(19) United States
(12) Patent Application Publication
(10) Pub. No.: US 2007/0277267 A1
(43) Pub. Date: Nov. 29, 2007

(54) Nucleic acid molecules and other molecules associated with plants

(76) Inventor: Joseph R. Byrum, Des Moines, IA (US)

Correspondence Address: ARNOLD & PORTER, LLP, 555 TWELFTH STREET, N.W., ATTN: IP DOCKETING, WASHINGTON, DC, 20004, US

(21) Appl. No.: 11/311,886

(22) Filed: Dec. 20, 2005

Related U.S. Application Data
(63) Continuation of application No. 09/421,106, filed on Oct. 15, 1999, now abandoned.

(51) Int. Cl. A01H 5/00; C07K 14/415; C07H 21/02

(52) U.S. Cl. 800/285; 530/370; 536/23.6

(57) ABSTRACT

The present invention is in the field of plant genetics. More specifically the invention relates to nucleic acid molecules and nucleic acid molecules that contain markers, in particular, single nucleotide polymorphism (SNP) and repetitive element markers. In addition, the present invention provides nucleic acid molecules having regulatory elements or encoding proteins or fragments thereof. The invention also relates to proteins and fragments of proteins so encoded and antibodies capable of binding the proteins. The invention also relates to methods of using the nucleic acid molecules, markers, repetitive elements and fragments of repetitive elements, regulatory elements, proteins and fragments of proteins.

### CROSS-REFERENCE TO RELATED APPLICATION

[0001] This application is a continuation under 35 U.S.C. § 120 of U.S. application Ser. No. 09/421,106 filed Oct. 15, 1999, herein incorporated by reference in its entirety.

### INCORPORATION OF SEQUENCE LISTING

[0002] This application contains a sequence listing, which is contained on three identical CD-ROMs: two copies of the sequence listing (Copy 1 and Copy 2) and a sequence listing Computer Readable Form (CRF), all of which are herein incorporated by reference. All three CD-ROMs each contain one file called “15598C seq list.txt” which is 23,696,009 bytes in size (measured in MS-DOS) and which was created on Dec. 20, 2005.

### FIELD OF THE INVENTION

[0003] The present invention is in the field of plant genetics. More specifically the invention relates to nucleic acid molecules and nucleic acid molecules that contain markers, in particular, single nucleotide polymorphism (SNP) and repetitive element markers. In addition, the present invention provides nucleic acid molecules having regulatory elements or encoding proteins or fragments thereof. The invention also relates to proteins and fragments of proteins so encoded and antibodies capable of binding the proteins. The invention also relates to methods of using the nucleic acid molecules, markers, repetitive elements and fragments of repetitive elements, regulatory elements, proteins and fragments of proteins.

### BACKGROUND OF THE INVENTION

I. Sequence Tagged Connector Nucleic Acid Molecules and the Bacterial Artificial Chromosomes (BACs) Containing these Sequences.

[0004] Sequence tagged connectors, or STCs, are sequences of insert data generated from both ends (at the vector-insert point) of a BAC clone in a genomic library. These sequences, and BACs containing these STC sequences, can be used, for example, for marker development, genetic mapping or linkage analysis, marker assisted breeding, and physical genome mapping (Venter, et al., Nature, 381:364-366 (1996), the entirety of which is herein incorporated by reference; Choi and Wing, on the Worldwide web at genome.clemson.edu/protocols2-nj.html July, 1998). STCs can represent a copy of up to a full length of a mRNA transcript, a promoter element or part of a promoter, can contain simple sequence repeats (also called microsatellites) repetitive elements or fragments of repetitive elements, other DNA markers, or any combination thereof.

[0005] Markers have been used in genetic mapping which can be a step in isolating a gene. Genetic mapping or linkage analysis is based on the level at which markers and genes are co-inherited (Rothwell, Understanding Genetics. 4^{th} Ed., Oxford University Press, New York, p. 703 (1988)). Statistical tests like chi-square analysis can be used to test the randomness of segregation or linkage (Kochert, The Rockefeller Foundation International Program on Rice Biotechnology, University of Georgia, Athens, Ga., pp. 1-14 (1989), the entirety of which is herein incorporated by reference). In linkage mapping, the proportion of recombinant individuals out of the total mapping population provides the information for determining the genetic distance between the loci (Young, Encyclopedia of Agricultural Science, Vol. 3, pp. 275-282 (1994), the entirety of which is herein incorporated by reference).

[0006] Classical mapping studies utilize easily observable, visible traits instead of molecular markers. These visible traits are also known as naked eye polymorphisms. These traits can be morphological like plant height, fruit size, shape and color or physiological like disease response, photoperiod sensitivity or crop maturity. Visible traits are useful and are still in use because they represent actual phenotypes and are easy to score without any specialized lab equipment. By contrast, the other types of genetic markers are arbitrary loci for use in linkage mapping and often not associated to specific plant phenotypes (Young, Encyclopedia of Agricultural Science, Vol. 3, pp. 275-282 (1994)). Many morphological markers cause such large effects on phenotype that they are undesirable in breeding programs. Many other visible traits have the disadvantage of being developmentally regulated (i.e., expressed only at certain stages; or in specific tissues and organs). Often times, visible traits mask the effects of linked minor genes making it nearly impossible to identify desirable linkages for selection (Tanksely, et al., Biotech. 7:257-264 (1989), the entirety of which is herein incorporated by reference).

[0007] Although a number of important agronomic characters are controlled by loci having major effects on phenotype, many economically important traits, such as yield and some forms of disease resistance, are quantitative in nature. This type of phenotypic variation in a trait is characterized by continuous, normal distribution of phenotypic values in a particular population (Beckmann and Soller, Oxford Surveys of Plant Molecular Biology, Miffen. (ed.), Vol. 3, Oxford University Press, UK., pp. 196-250 (1986), the entirety of which is herein incorporated by reference). Such traits are governed by a large number of loci, Quantitative Trait Loci (QTL), each of which can make a small positive or negative effect to the final phenotype value of the trait (Beckmann and Soller, Oxford Surveys of Plant Molecular Biology, Miffen. (ed.), Vol. 3, Oxford University Press, U.K., pp. 196-250 (1986)). Loci contributing to such genetic variation are often termed minor genes as opposed to major genes with large effects that follow a Mendelian pattern of inheritance. Polygenic traits are also predicted to follow a Mendelian type of inheritance, however the contribution of each locus is expressed as an increase or decrease in the final trait value.

[0008] Markers have been used in physical mapping studies with BAC libraries made from plant genomes. Such mapping studies have been carried out in rice (Kim et al., Genomics 34:213-218 (1996), the entirety of which is herein incorporated by reference; Hang, Plant Mol. Biol. 35:129-133 (1997), the entirety of which is herein incorporated by reference; Zhang and Wing., Plant Mol. Bio. 35:115-127 (1997), the entirety of which is herein incorporated by reference; Chen et al., Proc. Acad. Sci. (U.S.A.) 94:3431-3435 (1997), the entirety of which is herein incorporated by reference; Wang et al., Plant J. 7:525-533 (1995), the entirety of which is herein incorporated by reference), sorghum (Zwick et al., Genetics 148:1983-1992 (1998), the entirety of which is herein incorporated by reference; Zhang, et al., Molecular Breeding 2:11-24 (1996), the entirety of which is herein incorporated by reference), maize (Chen, et al., Proc. Acad. Sci. (U.S.A.) 94:3431-3435 (1997), the entirety of which is herein incorporated by reference), and Arabidopsis (Kim, et al., Genomics 34:213-218 (1996), the entirety of which is herein incorporated by reference).

[0009] Repetitive elements have been used in physical mapping in cereals (Ananiev, et al., Proc. Acad. Sci. (U.S.A.) 95:13073-8 (1998), the entirety of which is herein incorporated by reference; McLean et al., Mol Gen Genet. 253:687-694 (1997), the entirety of which is herein incorporated by reference).

II. Sequence Comparisons

[0010] STCs and sequenced BACs can be compared, for example, to sequences that encode promoters or proteins. These homologies can be determined by similarity searches (Adams, et al., Science 252:1651-1656 (1991), the entirety of which is herein incorporated by reference).

[0011] A characteristic feature of a DNA sequence is that it can be compared with other DNA sequences. Sequence comparisons can be undertaken by determining the similarity of the test or query sequence with sequences in publicly available or propriety databases (“similarity analysis”) or by searching for certain motifs (“intrinsic sequence analysis”)(e.g., cis elements)(Coulson, Trends in Biotechnology, 12:76-80 (1994), the entirety of which is herein incorporated by reference; Birren, et al., Genome Analysis, 1:543-559 (1997), the entirety of which is herein incorporated by reference).

[0012] Similarity analysis includes database search and alignment. Examples of public databases include the DNA Database of Japan (DDBJ)(on the Worldwide web at ddbj.nig.ac.jp/); Genebank (on the Worldwide web at ncbi.nlm.nih.gov/web/Genbank/Index.htlm); and the European Molecular Biology Laboratory Nucleic Acid Sequence Database (EMBL) (on the Worldwide web at ebi.ac.uk/ebi_docs/embl_db.html). A number of different search algorithms have been developed, one example of which are the suite of programs referred to as BLAST programs. There are five implementations of BLAST, three designed for nucleotide sequences queries (BLASTN, BLASTX, and TBLASTX) and two designed for protein sequence queries (BLASTP and TBLASTN) (Coulson, Trends in Biotechnology, 12:76-80 (1994); Birren, et al., Genome Analysis, 1:543-559 (1997)).

[0013] BLASTN takes a nucleotide sequence (the query sequence) and its reverse complement and searches them against a nucleotide sequence database. BLASTN was designed for speed, not maximum sensitivity, and may not find distantly related coding sequences. BLASTX takes a nucleotide sequence, translates it in three forward reading frames and three reverse complement reading frames, and then compares the six translations against a protein sequence database. BLASTX is useful for sensitive analysis of preliminary (single-pass) sequence data and is tolerant of sequencing errors (Gish and States, Nature Genetics, 3:266-272 (1993), the entirety of which is herein incorporated by reference). BLASTN and BLASTX may be used in concert for analyzing STC data (Coulson, Trends in Biotechnology, 12:76-80 (1994); Birren, et al., Genome Analysis, 1:543-559 (1997)).

[0014] Given a coding nucleotide sequence and the protein it encodes, it is often preferable to use the protein as the query sequence to search a database because of the greatly increased sensitivity to detect more subtle relationships. This is due to the larger alphabet of proteins (20 amino acids) compared with the alphabet of nucleic acid sequences (4 bases), where it is far easier to obtain a match by chance. In addition, with nucleotide alignments, only a match (positive score) or a mismatch (negative score) is obtained, but with proteins, the presence of conservative amino acid substitutions can be taken into account. Here, a mismatch may yield a positive score if the non-identical residue has physical/chemical properties similar to the one it replaced. Various scoring matrices are used to supply the substitution scores of all possible amino acid pairs. A general purpose scoring system is the BLOSUM62 matrix (Henikoff and Henikoff, Proteins, 17:49-61 (1993), the entirety of which is herein incorporated by reference), which is currently the default choice for BLAST programs. BLOSUM62 is tailored for alignments of moderately diverged sequences and thus may not yield the best results under all conditions. Altschul, J. Mol. Biol. 36:290-300 (1993), the entirety of which is herein incorporated by reference, uses a combination of three matrices to cover all contingencies. This may improve sensitivity, but at the expense of slower searches. In practice, a single BLOSUM62 matrix is often used but others (PAM40 and PAM250) may be attempted when additional analysis is necessary. Low PAM matrices are directed at detecting very strong but localized sequence similarities, whereas high PAM matrices are directed at detecting long but weak alignments between very distantly related sequences.

[0015] Homologues in other organisms are available that can be used for comparative sequence analysis. Multiple alignments are performed to study similarities and differences in a group of related sequences. CLUSTAL W is a multiple sequence alignment package available that performs progressive multiple sequence alignments based on the method of Feng and Doolittle, J. Mol. Evol. 25:351-360 (1987), the entirety of which is herein incorporated by reference. Each pair of sequences is aligned and the distance between each pair is calculated; from this distance matrix, a guide tree is calculated, and all of the sequences are progressively aligned based on this tree. A feature of the program is its sensitivity to the effect of gaps on the alignment; gap penalties are varied to encourage the insertion of gaps in probable loop regions instead of in the middle of structured regions. Users can specify gap penalties, choose between a number of scoring matrices, or supply their own scoring matrix for both the pairwise alignments and the multiple alignments. CLUSTAL W for UNIX and VMS systems is available at: ftp.ebi.ac.uk. Another program is MACAW (Schuler et al., Proteins, Struct. Func. Genet, 9:180-190 (1991), the entirety of which is herein incorporated by reference, for which both Macintosh and Microsoft Windows versions are available. MACAW uses a graphical interface, provides a choice of several alignment algorithms, and is available by anonymous ftp at: ncbi.nlm.nih.gov (directory/pub/macaw).

[0016] Sequence motifs are derived from multiple alignments and can be used to examine individual sequences or an entire database for subtle patterns. With motifs, it is sometimes possible to detect distant relationships that may not be demonstrable based on comparisons of primary sequences alone. Currently, the largest collection of sequence motifs in the world is PROSITE (Bairoch and Bucher, Nucleic Acid Research, 22:3583-3589 (1994), the entirety of which is herein incorporated by reference). PROSITE may be accessed via either the ExPASy server on the World Wide Web or anonymous ftp site. Many commercial sequence analysis packages also provide search programs that use PROSITE data.

[0017] A resource for searching protein motifs is the BLOCKS E-mail server developed by S. Henikoff, Trends Biochem Sci., 18:267-268 (1993), the entirety of which is herein incorporated by reference; Henikoff and Henikoff, Nucleic Acid Research, 19:6565-6572 (1991), the entirety of which is herein incorporated by reference; Henikoff and Henikoff, Proteins, 17:49-61 (1993). BLOCKS searches a protein or nucleotide sequence against a database of protein motifs or “blocks.” Blocks are defined as short, ungapped multiple alignments that represent highly conserved protein patterns. The blocks themselves are derived from entries in PROSITE as well as other sources. Either a protein or nucleotide query can be submitted to the BLOCKS server; if a nucleotide sequence is submitted, the sequence is translated in all six reading frames and motifs are sought in these conceptual translations. Once the search is completed, the server will return a ranked list of significant matches, along with an alignment of the query sequence to the matched BLOCKS entries.

[0018] Conserved protein domains can be represented by two-dimensional matrices, which measure either the frequency or probability of the occurrences of each amino acid residue and deletions or insertions in each position of the domain. This type of model, when used to search against protein databases, is sensitive and usually yields more accurate results than simple motif searches. Two popular implementations of this approach are profile searches (such as GCG program ProfileSearch) and Hidden Markov Models (HMMs) (Krough, et al., J. Mol. Biol. 235:1501-1531 (1994); Eddy, Current Opinion in Structural Biology 6:361-365 (1996), both of which are herein incorporated by reference in their entirety). In both cases, a large number of common protein domains have been converted into profiles, as present in the PROSITE library, or HHM models, as in the Pfam protein domain library (Sonnhammer, et al., Proteins 28:405-420 (1997), the entirety of which is herein incorporated by reference). Pfam contains more than 500 HMM models for enzymes, transcription factors, signal transduction molecules, and structural proteins. Protein databases can be queried with these profiles or HMM models, which will identify proteins containing the domain of interest. For example, HMMSW or HMMFS, two programs in a public domain package called HMMER (Sonnhammer, et al., Proteins 28:405-420 (1997)) can be used.

[0019] PROSITE and BLOCKS represent collected families of protein motifs. Thus, searching these databases entails submitting a single sequence to determine whether or not that sequence is similar to the members of an established family. Programs working in the opposite direction compare a collection of sequences with individual entries in the protein databases. An example of such a program is the Motif Search Tool, or MoST (Tatusov, et al., Proc. Natl. Acad. Sci. 91:12091-12095 (1994), the entirety of which is herein incorporated by reference). On the basis of an aligned set of input sequences, a weight matrix is calculated by using one of four methods (selected by the user); a weight matrix is simply a representation, position by position in an alignment, of how likely a particular amino acid will appear. The calculated weight matrix is then used to search the databases. To increase sensitivity, newly found sequences are added to the original data set, the weight matrix is recalculated, and the search is performed again. This procedure continues until no new sequences are found.

### SUMMARY OF THE INVENTION

[0020] The present invention includes and provides a substantially purified nucleic acid molecule, the nucleic acid molecule capable of specifically hybridizing to a second nucleic acid molecule having a nucleic acid sequence selected from the group consisting of SEQ ID NO: 1 through SEQ ID NO: 36935 or complement or fragment thereof.

[0021] The present invention provides a substantially purified nucleic acid molecule comprising a nucleic acid molecule or fragment thereof having a pair of defined ends, wherein the pair of defined ends are selected from the defined ends in Table A.

[0022] The present invention provides a substantially purified protein or fragment thereof encoded by a first nucleic acid molecule which specifically hybridizes to a second nucleic acid molecule, the second nucleic acid molecule having a nucleic acid sequence selected from the group consisting of SEQ ID NO:1 through SEQ ID NO:36935 or complements thereof.

[0023] The present invention provides a substantially purified protein or fragment thereof encoded by a nucleic acid sequence selected from the group consisting of SEQ ID NO:1 through SEQ ID NO:36935 or complements thereof.

[0024] The present invention provides a transformed plant having a nucleic acid molecule which comprises: (A) an exogenous promoter region which functions in a plant cell to cause the production of a mRNA molecule; which is linked to (B) a structural nucleic acid molecule, wherein the structural nucleic acid molecule is selected from the group consisting of SEQ ID NO:1 through SEQ ID NO:36935 or complements thereof or fragments of either; which is linked to (C) a 3′ non-translated sequence that functions in a plant cell to cause termination of transcription and addition of polyadenylated ribonucleotides to a 3′ end of the mRNA molecule.

[0025] The present invention provides a transformed plant having a nucleic acid molecule which comprises: (A) an exogenous promoter region which functions in a plant cell to cause the production of a mRNA molecule wherein the promoter nucleic acid molecule is selected from the group consisting of SEQ ID NO:1 through SEQ ID NO:36935 or complements thereof or fragments of either; which is linked to (B) a structural nucleic acid molecule encoding a protein or peptide; which is linked to (C) a 3′ non-translated sequence that functions in a plant cell to cause termination of transcription and addition of polyadenylated ribonucleotides to a 3′ end of the mRNA molecule.

[0026] The present invention provides a transformed plant having a nucleic acid molecule which comprises: (A) an exogenous promoter region which functions in a plant cell to cause the production of a mRNA molecule; which is linked to (B) a transcribed nucleic acid molecule with a transcribed strand and a non-transcribed strand, wherein the transcribed strand is complementary to a nucleic acid molecule having a nucleic acid sequence selected from the group consisting of SEQ ID NO:1 through SEQ ID NO:36935 or complements thereof or fragments of either and the transcribed strand is complementary to an endogenous mRNA molecule; which is linked to (C) a 3′ non-translated sequence that functions in plant cells to cause termination of transcription and addition of polyadenylated ribonucleotides to a 3′ end of the mRNA molecule.

[0027] The present invention provides a transformed plant having a nucleic acid molecule which comprises: (A) an exogenous promoter region which functions in a plant cell to cause the production of a mRNA molecule wherein the promoter nucleic acid molecule is selected from the group consisting of SEQ ID NO:1 through SEQ ID NO:36935 or complements thereof or fragments of either; which is linked to (B) a transcribed nucleic acid molecule with a transcribed strand and a non-transcribed strand, wherein the transcribed strand is complementary to an endogenous mRNA molecule; which is linked to (C) a 3′ non-translated sequence that functions in plant cells to cause termination of transcription and addition of polyadenylated ribonucleotides to a 3′ end of the mRNA molecule.

[0028] The present invention provides a computer readable medium having recorded thereon one or more of the nucleotide sequences depicted in SEQ ID NO:1 through SEQ ID NO: 36935.

[0029] The present invention provides a method of introgressing a trait into a plant comprising using a nucleic acid marker for marker assisted selection of the plant, the nucleic acid marker complementary to a nucleic acid sequence selected from the group consisting of SEQ ID NO: 1 through SEQ ID NO: 36935 or complements thereof, and introgressing the trait into a plant.

[0030] The present invention provides a method for screening for a trait comprising interrogating genomic DNA for the presence or absence of a marker molecule that is genetically linked to a nucleic acid sequence complementary to a nucleic acid sequence selected from the group consisting of SEQ ID NO: 1 through SEQ ID NO: 36935 or complements thereof; and detecting the presence or absence of the marker.

[0031] The present invention provides a method for determining the likelihood of the level, presence or absence of a trait in a plant comprising the steps of: (A) obtaining genomic DNA from the plant; (B) detecting a marker nucleic acid molecule; the marker nucleic acid molecule wherein the marker nucleic acid molecule specifically hybridizes with a nucleic acid sequence that is genetically linked to a nucleic acid sequence complementary to a nucleic acid sequence selected from the group consisting of SEQ ID NO: 1 through SEQ ID NO: 36935 or complements thereof; (C) and determining the level, presence or absence of the marker nucleic acid molecule, wherein the level, presence or absence of the marker nucleic acid molecule is indicative of the likely presence in the plant of the trait.

[0032] The present invention provides a method for determining a genomic polymorphism in a plant that is predictive of a trait comprising the steps: (A) incubating a marker nucleic acid molecule, under conditions permitting nucleic acid hybridization, and a complementary nucleic acid molecule obtained from the plant, the marker nucleic acid molecule having a nucleic acid sequence selected from the group consisting of SEQ ID NO: 1 through SEQ ID NO: 36935 or complements thereof; (B) permitting hybridization between the marker nucleic acid molecule and the complementary nucleic acid molecule obtained from the plant; and (C) detecting the presence of the polymorphism.

[0033] The present invention provides a method of determining an association between a polymorphism and a plant trait comprising: (A) hybridizing a nucleic acid molecule specific for the polymorphism to genetic material of a plant, wherein the nucleic acid molecule comprises a nucleic acid sequence selected from the group consisting of SEQ ID NO: 1 through SEQ ID NO: 36935 or complements thereof; and (B) calculating the degree of association between the polymorphism and the plant trait.

### DETAILED DESCRIPTION OF THE INVENTION

[0034] Agents of the Invention:

[0035] (a) Nucleic Acid Molecules

[0036] Agents of the present invention include nucleic acid molecules and more specifically BACs and STC nucleic acid molecules or fragments thereof.

[0037] A subset of the nucleic acid molecules of the present invention includes nucleic acid molecules that are marker molecules. Another subset of the nucleic molecules of the present invention include nucleic acid molecules that are promoters and/or regulatory elements. Another subset of the nucleic acid molecules of the present invention include nucleic acid molecules that encode proteins or fragments of proteins. In a preferred embodiment the nucleic acid molecules of the present invention are derived from Glycine max (soybean) and more preferably Glycine max, genotype A3244.

[0038] Fragment STC nucleic acid molecules and fragments of BACs may encode significant portion(s) of, or indeed most of, the STC or BAC nucleic acid molecule. In addition, a fragment nucleic acid molecule can encode a Glycine max protein or fragment thereof. Alternatively, the fragments may comprise smaller oligonucleotides (having from about 15 to about 250 nucleotide residues, and more preferably, about 15 to about 30 nucleotide residues).

[0039] The term “substantially purified”, as used herein, refers to a molecule separated from substantially all other molecules normally associated with it in its native state. More preferably a substantially purified molecule is the predominant species present in a preparation. A substantially purified molecule may be greater than 60% free, preferably 75% free, more preferably 90% free, and most preferably 95% free from the other molecules (exclusive of solvent) present in the natural mixture. The term “substantially purified” is not intended to encompass molecules present in their native state.

[0040] The agents of the present invention will preferably be “biologically active” with respect to either a structural attribute, such as the capacity of a nucleic acid to hybridize to another nucleic acid molecule, or the ability of a protein to be bound by an antibody (or to compete with another molecule for such binding). Alternatively, such an attribute may be catalytic, and thus involve the capacity of the agent to mediate a chemical reaction or response.

[0041] The agents of the present invention may also be recombinant. As used herein, the term recombinant means any agent (e.g., DNA, peptide etc.), that is, or results, however indirect, from human manipulation of a nucleic acid molecule.

[0042] It is understood that the agents of the present invention may be labeled with reagents that facilitate detection of the agent (e.g., fluorescent labels (Prober, et al., Science 238:336-340 (1987); Albarella et al., EP 144914, chemical labels (Sheldon et al., U.S. Pat. No. 4,582,789; Albarella et al., U.S. Pat. No. 4,563,417, modified bases (Miyoshi et al., EP 119448, all of which are hereby incorporated by reference in their entirety).

[0043] It is further understood, that the present invention provides bacterial, viral, microbial, insect, fungal and plant cells comprising the agents of the present invention. The BAC nucleic acid molecules of the present invention include, without limitation, BAC nucleic acid molecules having inserts with two defined ends (STCs) as set forth in Table A. It is understood that fragments of such BAC molecules can contain one or neither of the defined ends.

[0044] STC nucleic acid molecules or fragment STC nucleic acid molecules, or BACs or fragments thereof, of the present invention are capable of specifically hybridizing to other nucleic acid molecules under certain circumstances. As used herein, two nucleic acid molecules are said to be capable of specifically hybridizing to one another if the two molecules are capable of forming an anti-parallel, double-stranded nucleic acid structure. A nucleic acid molecule is said to be the “complement” of another nucleic acid molecule if they exhibit complete complementarity. As used herein, molecules are said to exhibit “complete complementarity” when every nucleotide of one of the molecules is complementary to a nucleotide of the other. Two molecules are said to be “minimally complementary” if they can hybridize to one another with sufficient stability to permit them to remain annealed to one another under at least conventional “low-stringency” conditions. Similarly, the molecules are said to be “complementary” if they can hybridize to one another with sufficient stability to permit them to remain annealed to one another under conventional “high-stringency” conditions. Conventional stringency conditions are described by Sambrook, et al., Molecular Cloning, A Laboratory Manual, 2nd Ed., Cold Spring Harbor Press, Cold Spring Harbor, N.Y. (1989), and by Haymes, et al., Nucleic Acid Hybridization, A Practical Approach, IRL Press, Washington, D.C. (1985), the entirety of which is herein incorporated by reference. Departures from complete complementarity are therefore permissible, as long as such departures do not completely preclude the capacity of the molecules to form a double-stranded structure. Thus, in order for an STC nucleic acid molecule, fragment STC nucleic acid molecule, BAC nucleic acid molecule or fragment BAC nucleic acid molecule to serve as a primer or probe it need only be sufficiently complementary in sequence to be able to form a stable double-stranded structure under the particular solvent and salt concentrations employed.

[0045] Appropriate stringency conditions which promote DNA hybridization are, for example, 6.0× sodium chloride/sodium citrate (SSC) at about 45° C., followed by a wash of 2.0×SSC at 50° C., are known to those skilled in the art or can be found in Current Protocols in Molecular Biology, John Wiley & Sons, N.Y. (1989), 6.3.1-6.3.6. For example, the salt concentration in the wash step can be selected from a low stringency of about 2.0×SSC at 50° C. to a high stringency of about 0.2×SSC at 50° C. In addition, the temperature in the wash step can be increased from low stringency conditions at room temperature, about 22° C., to high stringency conditions at about 65° C. Both temperature and salt may be varied, or either the temperature or the salt concentration may be held constant while the other variable is changed.

[0046] In a preferred embodiment, a nucleic acid of the present invention will specifically hybridize to one or more of the nucleic acid molecules set forth in SEQ ID NO: 1 through SEQ ID NO: 36935 or complements thereof under moderately stringent conditions, for example at about 2.0×SSC and about 40° C.

[0047] In a particularly preferred embodiment, a nucleic acid of the present invention will specifically hybridize to one or more of the nucleic acid molecules set forth in SEQ ID NO: 1 through SEQ ID NO: 36935 or complements thereof under high stringency conditions. In one aspect of the present invention, the nucleic acid molecules of the present invention have one or more of the nucleic acid sequences set forth in SEQ ID NO: 1 through to SEQ ID NO: 36935 or complements thereof. In another aspect of the present invention, one or more of the nucleic acid molecules of the present invention share between 100% and 90% sequence identity with one or more of the nucleic acid sequences set forth in SEQ ID NO: 1 through to SEQ ID NO: 36935 or complements thereof. In a further aspect of the present invention, one or more of the nucleic acid molecules of the present invention share between 100% and 95% sequence identity with one or more of the nucleic acid sequences set forth in SEQ ID NO: 1 through to SEQ ID NO: 36935 or complements thereof. In a more preferred aspect of the present invention, one or more of the nucleic acid molecules of the present invention share between 100% and 98% sequence identity with one or more of the nucleic acid sequences set forth in SEQ ID NO: 1 through to SEQ ID NO: 36935 or complements thereof. In an even more preferred aspect of the present invention, one or more of the nucleic acid molecules of the present invention share between 100% and 99% sequence identity with one or more of the sequences set forth in SEQ ID NO: 1 through to SEQ ID NO: 36935 or complements thereof. In a further, even more preferred aspect of the present invention, one or more of the nucleic acid molecules of the present invention exhibit 100% sequence identity with one or more nucleic acid molecules present within the genomic library herein designated BAC#1 (Monsanto Company, St. Louis, Mo., United States of America).

[0048] It is understood that the present invention encompasses fragments of such nucleic acid molecules and that such nucleic acid fragments may contain one, part of one, or neither of the defined sequences.

[0049] (a)(1) Nucleic Acid Molecule Markers

[0050] One aspect of the present invention concerns nucleic acid molecules SEQ ID NO:1 through SEQ ID NO:36935 or complements thereof, that contain microsatellites, single nucleotide substitutions (SNPs), repetitive elements or parts of repetitive elements or other markers. Microsatellites typically include a 1-6 nucleotide core element within SEQ ID NO:1 through SEQ ID NO:36935 that are tandemly repeated from one to many thousands of times. A different “allele” occurs at an SSR locus as a result of changes in the number of times a core element is repeated, altering the length of the repeat region, (Brown et al., Methods of Genome Analysis in Plants, (ed.) Jauhar, CRC Press, Inc, Boca Raton, Fla., USA; London, England, UK, pp. 147-159, (1996), the entirety of which is herein incorporated by reference). SSR loci occur throughout plant genomes, and specific repeat motifs occur at different levels of abundance than those found in animals. The relative frequencies of all SSRs with repeat units of 1-6 nucleotides have been surveyed. The most abundant SSR is AAAAAT followed by Aₙ, AGₙ AAT, AAC, AGC, AAG, AATT, AAAT and AC. On average, 1 SSR is found every 21 and 65 kb in dicots and monocots. Fewer CG nucleotides are found in dicots than in monocots. There is no correlation between abundance of SSRs and nuclear DNA content. The abundance of all tri and tetranucleotide SSR combination jointly have been reported to be equivalent to that of the total di-nucleotide combinations. Mono- di- and tetra-nucleotide repeats are all located in noncoding regions of DNA while 57% of those trinucleotide SSRs containing CG were located within gene coding regions. All repeated trinucleotide SSRs composed entirely of AT are found in noncoding regions, (Brown et al., Methods of Genome Analysis in Plants, ed. Jauhar, CRC Press, Inc, Boca Raton, Fla., USA; London, England, UK, pp. 147-159, (1996).

[0051] Microsatellites can be observed in SEQ NO:1 to SEQ NO: 36935 or complements thereof by using the BLASTN program to examine sequences for the presence/absence of microsatellites. In this system, raw sequence data is searched through databases, which store SSR markers collected from publications and 692 classes of di-, tri and tetranucleotide repeat markers generated by computer. Microsatellites can also be observed by screening the BAC library of the present invention by colony or plaque hybridization with a labeled probe containing microsatellite markers; isolating positive clones and sequencing the inserts of the positive clones; suitable primers flanking the microsatellite markers.

[0052] Single nucleotide polymorphisms (SNPs) are single base changes in genomic DNA sequence. They generally occur at greater frequency than other markers and are spaced with a greater uniformity throughout a genome than other reported forms of polymorphism. The greater frequency and uniformity of SNPs means that there is greater probability that such a polymorphism will be found near or in a genetic locus of interest than would be the case for other polymorphisms. SNPs are located in protein-coding regions and noncoding regions of a genome. Some of these SNPs may result in defective or variant protein expression (e.g., as a result of mutations or defective splicing). Analysis (genotyping) of characterized SNPs can require only a plus/minus assay rather than a lengthy measurement, permitting easier automation.

[0053] SNPs can be characterized using any of a variety of methods. Such methods include the direct or indirect sequencing of the site, the use of restriction enzymes (Botstein et al., Am. J. Hum. Genet. 32:314-331 (1980), the entirety of which is herein incorporated reference; Konieczny and Ausubel, Plant J. 4:403-410 (1993), the entirety of which is herein incorporated by reference), enzymatic and chemical mismatch assays (Myers et al., Nature 313:495-498 (1985), the entirety of which is herein incorporated by reference), allele-specific PCR (Newton et al., Nucl. Acids Res. 17:2503-2516 (1989), the entirety of which is herein incorporated by reference; Wu et al., Proc. Natl. Acad. Sci. USA 86:2757-2760 (1989), the entirety of which is herein incorporated by reference), ligase chain reaction (Barany, Proc. Natl. Acad. Sci. USA 88:189-193 (1991), the entirety of which is herein incorporated by reference), single-strand conformation polymorphism analysis (Labrune et al., Am. J. Hum. Genet. 48: 1115-1120 (1991), the entirety of which is herein incorporated by reference), primer-directed nucleotide incorporation assays (Kuppuswami et al., Proc. Natl. Acad. Sci. USA 88:1143-1147 (1991), the entirety of which is herein incorporated by reference), dideoxy fingerprinting (Sarkar et al., Genomics 13:441-443 (1992), the entirety of which is herein incorporated by reference), solid-phase ELISA-based oligonucleotide ligation assays (Nikiforov et al., Nucl. Acids Res. 22:4167-4175 (1994), the entirety of which is herein incorporated by reference), oligonucleotide fluorescence-quenching assays (Livak et al., PCR Methods Appl. 4:357-362 (1995a), the entirety of which is herein incorporated by reference), 5′-nuclease allele-specific hybridization TaqMan™ assay (Livak et al., Nature Genet. 9:341-342 (1995), the entirety of which is herein incorporated by reference), template-directed dye-terminator incorporation (TDI) assay (Chen and Kwok, Nucl. Acids Res. 25:347-353 (1997), the entirety of which is herein incorporated by reference), allele-specific molecular beacon assay (Tyagi et al., Nature Biotech. 16: 49-53 (1998), the entirety of which is herein incorporated by reference), PinPoint assay (Haff and Smimov, Genome Res. 7: 378-388 (1997), the entirety of which is herein incorporated by reference), and dCAPS analysis (Neff et al., Plant J. 14:387-392 (1998), the entirety of which is herein incorporated by reference).

[0054] SNPs can be observed by examining sequences of overlapping clones in the BAC library according to the method described by Taillon-Miller et al. Genome Res. 8:748-754 (1998), the entirety of which is herein incorporated). SNPs can also be observed by screening the BAC library of the present invention by colony or plaque hybridization with a labeled probe containing SNP markers; isolating positive clones and sequencing the inserts of the positive clones; suitable primers flanking the SNP markers.

[0055] Genetic markers of the present invention include “dominant” or “codominant” markers. “Codominant markers” reveal the presence of two or more alleles (two per diploid individual) at a locus. “Dominant markers” reveal the presence of only a single allele per locus. The presence of the dominant marker phenotype (e.g., a band of DNA) is an indication that one allele is present in either the homozygous or heterozygous condition. The absence of the dominant marker phenotype (e.g., absence of a DNA band) is merely evidence that “some other” undefined allele is present. In the case of populations where individuals are predominantly homozygous and loci are predominately dimorphic, dominant and codominant markers can be equally valuable. As populations become more heterozygous and multi-allelic, codominant markers often become more informative of the genotype than dominant markers.

[0056] In addition to SSRs and SNPs, repetitive elements can be used as markers. For most eukaryotes, interspersed repeat sequence elements are typically mobile genetic elements (Wright et al., Genetics 142:569-578 (1996), the entirety of which is herein incorporated by reference). They are ubiquitous in most living organisms and are present in copy numbers ranging from just a few elements to tens or hundreds or thousands per genome. In the latter case, they can represent a major fraction of the genome. For example, transposable elements have been estimated to make up greater than 50% of the maize genome (Kidwell, and Lisch Proc. Natl. Acad. Sci. (U.S.A.) 94:7704-7711 (1997), the entirety of which is herein incorporated by reference).

[0057] Transposable elements are classified in families according to their sequence similarity. Two major classes are distinguished by their differing modes of transposition. Class I elements are retroelements that use reverse transcriptase to transpose by means of an RNA intermediate. They include long terminal repeat retrotransposons and long and short interspersed elements (LINES and SINES, respectively). Class II elements transpose directly from DNA to DNA and include transposons such as the Activator-Dissociation (Ac-Ds) family in maize, the P element in Drosophila and the Tc-1 element in Caenhorabditis elegans. Additionally, a category of transposable elements has been discovered whose transposition mechanism is not yet known. These miniature inverted-repeat transposable elements (MITEs) have some properties of both class I and II elements. They are short (100-400 bp in length) and none so far has been found to have any coding potential. They are present in high copy number (3,000-10,000) per genome and have target site preferences for TAA or TA in plants (Kidwell and Lisch, Proc. Natl. Acad. Sci. (U.S.A.) 94:7704-7711 (1997)).

[0058] Insertion elements are found in two areas of the genome. Some are located in regions distant from gene sequences such as in the heterochromatin or in regions between genes; other repeat elements are found in or near single copy sequences. The insertion of an Ac-Ds element into wx-m9, an allele of the waxy locus in maize is an example of a repetitive element found within a coding region. The effect of this insertion is attenuated by the loss through splicing of the transposable element after transcription (Kidwell and Lisch, Proc. Natl. Acad. Sci. (U.S.A.) 94:7704-7711 (1997)).

[0059] The genetic variability resulting from transposable elements ranges from changes in the size and arrangement of whole genomes to changes in single nucleotides. They may produce major effects on phenotypic traits or small silent changes detectable only at the DNA sequence level. Transposable elements may also produce variation when they excise, leaving small footprints of their previous presence (Kidwell and Lisch, Proc. Natl. Acad. Sci. (U.S.A.) 94:7704-7711 (1997)).

[0060] In addition, other markers such as AFLP markers, RFLP markers, RAPD markers, phenotypic markers or isozyme markers can be utilized (Walton, Seed World 22-29 (July, 1993), the entirety of which is herein incorporated by reference; Burow and Blake, Molecular Dissection of Complex Traits, 13-29, Eds. Paterson, CRC Press, New York (1988), the entirety of which is herein incorporated by reference). DNA markers can be developed from nucleic acid molecules using restriction endonucleases, the PCR and/or DNA sequence information. RFLP markers result from single base changes or insertions/deletions. These codominant markers are highly abundant in plant genomes, have a medium level of polymorphism and are developed by a combination of restriction endonuclease digestion and Southern blotting hybridization. CAPS are similarly developed from restriction nuclease digestion but only of specific PCR products. These markers are also codominant, have a medium level of polymorphism and are highly abundant in the genome. The CAPS result from single base changes and insertions/deletions. Another marker type, RAPDs, are developed from DNA amplification with random primers and result from single base changes and insertions/deletions in plant genomes. They are dominant markers with a medium level of polymorphisms and are highly abundant. AFLP markers require using the PCR on a subset of restriction fragments from extended adapter primers. These markers are both dominant and codominant, are highly abundant in genomes and exhibit a medium level of polymorphism. SSRs require DNA sequence information. These codominant markers result from repeat length changes, are highly polymorphic, and do not exhibit as high a degree of abundance in the genome as CAPS, AFLPs and RAPDs. SNPs also require DNA sequence information. These codominant markers result from single base substitutions. They are highly abundant and exhibit a medium of polymorphism (Rafalski, et al., In: Nonmammalian Genomic Analysis, ed. Birren and Lai, Academic Press, San Diego, Calif., pp. 75-134 (1996), the entirety of which is herein incorporated by reference). Methods to isolate such markers are known in the art.

[0061] Long Terminal repeat retrotransposons and MITEs have been found to be associated with the genes of many plants where some of the transposable elements contribute regulatory sequences. MITEs such as the Tourist element in maize and the Stowaway element in Sorghum are found frequently in the 5′ and 3′ noncoding regions of genes and are frequently associated with the regulatory regions of genes of diverse flowering plants (Kidwell and Lisch, Proc. Natl. Acad. Sci. (U.S.A.) 94:7704-7711 (1997)). It is understood that one or more of the Long Terminal repeat retrotransposons and/or MITES may be a marker, and even more preferably a marker for a gene.

[0062] (a)(2) Nucleic Acid Molecules Comprising Regulatory Elements

[0063] Another class of agents of the present invention are nucleic acid molecules having promoter regions or partial promoter regions within SEQ ID NO: 1 through SEQ ID NO: 36935 or complements thereof. Such promoter regions are typically found upstream of the trinucleotide ATG sequence at the start site of a protein coding region.

[0064] As used herein, a promoter region is a region of a nucleic acid molecule that is capable, when located in cis to a nucleic acid sequence that encodes for a protein or fragment thereof to function in a way that directs expression of one or more mRNA molecules that encodes for the protein or fragment thereof.

[0065] Promoters of the present invention can include between about 300 bp upstream and about 10 kb upstream of the trinucleotide ATG sequence at the start site of a protein coding region. Promoters of the present invention can preferably include between about 300 bp upstream and about 5 kb upstream of the trinucleotide ATG sequence at the start site of a protein coding region. Promoters of the present invention can more preferably include between about 300 bp upstream and about 2 kb upstream of the trinucleotide ATG sequence at the start site of a protein coding region. Promoters of the present invention can include between about 300 bp upstream and about 1 kb upstream of the trinucleotide ATG sequence at the start site of a protein coding region. While in many circumstances a 300 bp promoter may be sufficient for expression, additional sequences may act to further regulate expression, for example, in response to biochemical, developmental or environmental signals.

[0066] It is also preferred that the promoters of the present invention contain a CAAT and a TATA cis element. Moreover, the promoters of the present invention can contain one or more cis elements in addition to a CAAT and a TATA box.

[0067] By “regulatory element” it is intended a series of nucleotides that determines if, when, and at what level a particular gene is expressed. The regulatory DNA sequences specifically interact with regulatory or other proteins. Many regulatory elements act in cis (“cis elements”) and are believed to affect DNA topology, producing local conformations that selectively allow or restrict access of RNA polymerase to the DNA template or that facilitate selective opening of the double helix at the site of transcriptional initiation. Cis elements occur within, but are not limited to promoters, and promoter modulating sequences (inducible elements). Cis elements can be identified using known cis elements as a target sequence or target motif in the BLAST programs of the present invention.

[0068] Promoters of the present invention include homologues of cis elements known to effect gene regulation that show homology with the nucleic acid molecules of the present invention. These cis elements include, but are not limited to, oxygen responsive cis elements (Cowen, et al., J. Biol. Chem. 268(36):26904-26910 (1993) the entirety of which is herein incorporated by reference), light regulatory elements (Bruce and Quaill, Plant Cell 2 (11):1081-1089 (1990) the entirety of which is herein incorporated by reference; Bruce, et al., EMBO J. 10:3015-3024 (1991), the entirety of which is herein incorporated by reference; Rocholl, et al., Plant Sci. 97:189-198 (1994), the entirety of which is herein incorporated by reference; Block, et al., Proc. Natl. Acad. Sci. (U.S.A.) 87:5387-5391 (1990), the entirety of which is herein incorporated by reference; Giuliano, et al., Proc. Natl. Acad. Sci. (U.S.A.) 85:7089-7093 (1988), the entirety of which is herein incorporated by reference; Staiger, et al., Proc. Natl. Acad. Sci. (U.S.A.) 86:6930-6934 (1989), the entirety of which is herein incorporated by reference; Izawa, et al., Plant Cell 6:1277-1287 (1994), the entirety of which is herein incorporated by reference; Menkens, et al., Trends in Biochemistry 20:506-510 (1995), the entirety of which is herein incorporated by reference; Foster, et al., FASEB J. 8:192-200 (1994), the entirety of which is herein incorporated by reference; Plesse, et al., Mol Gen Gene 254:258-266 (1997), the entirety of which is herein incorporated by reference; Green, et al., EMBO J. 6:2543-2549 (1987), the entirety of which is herein incorporated by reference; Kuhlemeier et al., Ann. Rev Plant Physiol. 38:221-257 (1987), the entirety of which is herein incorporated by reference; Villain et al., J. Biol. Chem. 271:32593-32598 (1996), the entirety of which is herein incorporated by reference; Lam et al., Plant Cell 2:857-866 (1990), the entirety of which is herein incorporated by reference; Gilmartin, et al., Plant Cell 2:369-378 (1990), the entirety of which is herein incorporated by reference; Datta, et al., Plant Cell 1: 1069-1077 (1989) the entirety of which is herein incorporated by reference; Gilmartin, et al., Plant Cell 2:369-378 (1990), the entirety of which is herein incorporated by reference; Castresana, et al., EMBO J. 7:1929-1936 (1988), the entirety of which is herein incorporated by reference; Ueda, et al., Plant Cell 1:217-227 (1989), the entirety of which is herein incorporated by reference; Terzaghi, et al., Annu. Rev. Plant Physiol. Plant Mol. Biol. 46:445-474 (1995), the entirety of which is herein incorporated by reference; Green et al., EMBO J. 6:2543-2549 (1987), the entirety of which is herein incorporated by reference; Villain, et al., J. Biol. Chem. 271:32593-32598 (1996), the entirety of which is herein incorporated by reference; Tjaden, et al., Plant Cell 6:107-118 (1994), the entirety of which is herein incorporated by reference; Tjaden, et al., Plant Physiol. 108:1109-1117 (1995), the entirety of which is herein incorporated by reference; Ngai, et al., Plant J. 12:1021-1234 (1997), the entirety of which is herein incorporated by reference; Bruce, et al., EMBO J. 10:3015-3024 (1991), the entirety of which is herein incorporated by reference; Ngai, et al., Plant J. 12:1021-1034 (1997), the entirety of which is herein incorporated by reference), elements responsive to gibberellin, (Muller, et al., J. Plant Physiol. 145.606-613 (1995), the entirety of which is herein incorporated by reference; Croissant, et al., Plant Science 116:27-35 (1996), the entirety of which is herein incorporated by reference; Lohmer, et al., EMBO J. 10:617-624 (1991), the entirety of which is herein incorporated by reference; Rogers, et al., Plant Cell 4:1443-1451 (1992), the entirety of which is herein incorporated by reference; Lanahan et al., Plant Cell 4:203-211 (1992) the entirety of which is herein incorporated by reference; Skriver et al., Proc. Natl. Acad. Sci. (U.S.A.) 88:7266-7270 (1991) the entirety of which is herein incorporated by reference; Gilmartin, et al., Plant Cell 2:369-378 (1990), the entirety of which is herein incorporated by reference; Huang, et al., Plant Mol. Biol. 14:655-668 (1990), the entirety of which is herein incorporated by reference, Gubler, et al., Plant Cell 7:1879-1891 (1995), the entirety of which is herein incorporated by reference), elements responsive to abscisic acid, (Busk, et al., Plant Cell 9:2261-2270 (1997), the entirety of which is herein incorporated by reference; Guiltinan, et al., Science 250:267-270 (1990), the entirety of which is herein incorporated by reference; Shen, et al., Plant Cell 7:295-307 (1995) the entirety of which is herein incorporated by reference; Shen et al., Plant Cell 8:1107-1119 (1996), the entirety of which is herein incorporated by reference; Seo et al., Plant Mol. Biol. 27:1119-1131 (1995), the entirety of which is herein incorporated by reference; Marcotte et al., Plant Cell 1:969-976 (1989) the entirety of which is herein incorporated by reference; Shen et al., Plant Cell 7:295-307 (1995), the entirety of which is herein incorporated by reference; Iwasaki et al., Mol Gen Genet 247:391-398 (1995), the entirety of which is herein incorporated by reference; Hattori et al., Genes Dev. 6:609-618 (1992), the entirety of which is herein incorporated by reference; Thomas et al., Plant Cell 5:1401-1410 (1993), the entirety of which is herein incorporated by reference), elements similar to abscisic acid responsive elements, (Ellerstrom et al., Plant Mol. Biol. 32:1019-1027 (1996), the entirety of which is herein incorporated by reference), auxin responsive elements (Liu et al., Plant Cell 6:645-657 (1994) the entirety of which is herein incorporated by reference; Liu et al., Plant Physiol. 115:397-407 (1997), the entirety of which is herein incorporated by reference; Kosugi et al., Plant J. 7:877-886 (1995), the entirety of which is herein incorporated by reference; Kosugi et al., Plant Cell 9:1607-1619 (1997), the entirety of which is herein incorporated by reference; Ballas et al., J. Mol. Biol. 233:580-596 (1993), the entirety of which is herein incorporated by reference), a cis element responsive to methyl jasmonate treatment (Beaudoin and Rothstein, Plant Mol. Biol. 33:835-846 (1997), the entirety of which is herein incorporated by reference), a cis element responsive to abscisic acid and stress response (Straub et al., Plant Mol. Biol. 26:617-630 (1994), the entirety of which is herein incorporated by reference), ethylene responsive cis elements (Itzhaki et al., Proc. Natl. Acad. Sci. (U.S.A.) 91:8925-8929 (1994), the entirety of which is herein incorporated by reference; Montgomery et al., Proc. Acad. Sci. (U.S.A.) 90:5939-5943 (1993), the entirety of which is herein incorporated by reference; Sessa et al., Plant Mol. Biol. 28:145-153 (1995), the entirety of which is herein incorporated by reference; Shinshi et al., Plant Mol. Biol. 27:923-932 (1995), the entirety of which is herein incorporated by reference), salicylic acid cis responsive elements, (Strange et al., Plant J. 11:1315-1324 (1997), the entirety of which is herein incorporated by reference; Qin et al., Plant Cell 6:863-874 (1994), the entirety of which is herein incorporated by reference), a cis element that responds to water stress and abscisic acid (Lam et al., J. Biol. Chem. 266:17131-17135 (1991), the entirety of which is herein incorporated by reference; Thomas et al., Plant Cell 5:1401-1410 (1993), the entirety of which is herein incorporated by reference; Pla et al., Plant Mol Biol 21:259-266 (1993), the entirety of which is herein incorporated by reference), a cis element essential for M phase-specific expression (Ito et al., Plant Cell 10:331-341 (1998), the entirety of which is herein incorporated by reference), sucrose responsive elements (Huang et al., Plant Mol. Biol. 14:655-668 (1990), the entirety of which is herein incorporated by reference; Hwang et al., Plant Mol Biol 36:331-341 (1998), the entirety of which is herein incorporated by reference; Grierson et al., Plant J. 5:815-826 (1994), the entirety of which is herein incorporated by reference), heat shock response elements (Pelham et al., Trends Genet. 1:31-35 (1985), the entirety of which is herein incorporated by reference), elements responsive to auxin and/or salicylic acid and also reported for light regulation (Lam et al., Proc. Natl. Acad. Sci. (U.S.A.) 86:7890-7897 (1989), the entirety of which is herein incorporated by reference; Benfey et al., Science 250:959-966 (1990), the entirety of which is herein incorporated by reference), elements responsive to ethylene and salicylic acid (Ohme-Takagi et al., Plant Mol. Biol. 15:941-946 (1990), the entirety of which is herein incorporated by reference), elements responsive to wounding and abiotic stress (Loake et al., Proc. Natl. Acad. Sci. (U.S.A.) 89:9230-9234 (1992), the entirety of which is herein incorporated by reference; Mhiri et al., Plant Mol. Biol. 33:257-266 (1997), the entirety of which is herein incorporated by reference), antioxidant response elements (Rushmore et al., J. Biol. Chem. 266:11632-11639, the entirety of which is herein incorporated by reference; Dalton et al., Nucleic Acids Res. 22:5016-5023 (1994), the entirety of which is herein incorporated by reference), Sph elements (Suzuki et al., Plant Cell 9:799-807 1997), the entirety of which is herein incorporated reference), Elicitor responsive elements, (Fukuda et al., Plant Mol. Biol. 34:81-87 (1997), the entirety of which is herein incorporated by reference; Rushton et al., EMBO J. 15:5690-5700 (1996), the entirety of which is herein incorporated by reference), metal responsive elements (Stuart et al., Nature 317:828-831 (1985), the entirety of which is herein incorporated by reference; Westin et al., EMBO J. 7:3763-3770 (1988), the entirety of which is herein incorporated by reference; Thiele et al., Nucleic Acids Res. 20:1183-1191 (1992), the entirety of which is herein incorporated by reference; Faisst et al., Nucleic Acids Res. 20:3-26 (1992), the entirety of which is herein incorporated by reference), low temperature responsive elements, (Baker et al., Plant Mol. Biol. 24:701-713 (1994), the entirety of which is herein incorporated by reference; Jiang et al., Plant Mol. Biol. 30:679-684 (1996), the entirety of which is herein incorporated by reference; Nordin et al., Plant Mol. Biol. 21:641-653 (1993), the entirety of which is herein incorporated by reference; Zhou et al., J. Biol. Chem. 267:23515-23519 (1992), the entirety of which is herein incorporated by reference), drought responsive elements, (Yamaguchi et al., Plant Cell 6:251-264 (1994), the entirety of which is herein incorporated by reference; Wang et al., Plant Mol. Biol. 28:605-617 (1995), the entirety of which is herein incorporated by reference; Bray E A, Trends in Plant Science 2:48-54 (1997), the entirety of which is herein incorporated by reference) enhancer elements for glutenin, (Colot et al., EMBO J. 6:3559-3564 (1987), the entirety of which is herein incorporated by reference; Thomas et al., Plant Cell 2:1171-1180 (1990), the entirety of which is incorporated by reference; Kreis et al., Philos. Trans. R. Soc. Lond., B314:355-365 (1986), the entirety of which is herein incorporated by reference), light-independent regulatory elements, (Lagrange et al., Plant Cell 9:1469-1479 (1997), the entirety of which is herein incorporated by reference; Villain et al., J. Biol. Chem. 271:32593-32598 (1996), the entirety of which is herein incorporated by reference), OCS enhancer elements, (Bouchez et al., EMBO J. 8:4197-4204 (1989), the entirety of which is herein incorporated by reference; Foley et al., Plant J. 3:669-679 (1993), the entirety of which is herein incorporated by reference), ACGT elements, (Foster et al., FASEB J. 8:192-200 (1994), the entirety of which is herein incorporated by reference; Izawa et al., Plant Cell 6:1277-1287 (1994), the entirety of which is herein incorporated by reference; Izawa et al., J. Mol. Biol. 230:1131-1144 (1993) the entirety of which is herein incorporated by reference), negative cis elements in plastid related genes, (Zhou et al., J. Biol. Chem. 267:23515-23519 (1992), the entirety of which is herein incorporated by reference; Lagrange et al., Mol. Cell. Biol. 13:2614-2622 (1993), the entirety of which is herein incorporated by reference; Lagrange et al., Plant Cell 9:1469-1479 (1997), the entirety of which is herein incorporated by reference; Zhou et al., J. Biol. Chem. 267:23515-23519 (1992), the entirety of which is herein incorporated by reference), prolamin box elements, (Forde et al., Nucleic Acids Res. 13:7327-7339 (1985), the entirety of which is herein incorporated by reference; Colot et al., EMBO J. 6:3559-3564 (1987), the entirety of which is herein incorporated by reference; Thomas et al., Plant Cell 2:1171-1180 (1990), the entirety of which is herein incorporated by reference; Thompson et al., Plant Mol. Biol. 15:755-764 (1990), the entirety of which is herein incorporated by reference; Vicente et al., Proc. Natl. Acad. Sci. (U.S.A.) 94:7685-7690 (1997), the entirety of which is herein incorporated by reference), elements in enhancers from the IgM heavy chain gene (Gillies et al., Cell 33:717-728 (1983), the entirety of which is herein incorporated by reference; Whittier et al., Nucleic Acids Res. 15:2515-2535 (1987), the entirety of which is herein incorporated by reference.

[0069] (a)(3) Nucleic Acid Molecules Comprising Genes or Fragments Thereof

[0070] Nucleic acid molecules of the present invention can comprise one or more genes or fragments thereof. Such genes or fragments thereof include homologues of known genes or protein coding regions in other organisms or genes or fragments thereof that elicit only limited or no matches with known genes or protein coding regions.

[0071] Genomic sequences can be screened for the presence of protein homologues or genes utilizing one or a number of different search algorithms have that been developed, one example of which are the suite of programs referred to as BLAST programs. Other examples of suitable programs that can be utilized are known in the art, several of which are described above in the Background and under the section titled “Uses of the Agents of the Invention.” In addition, unidentified reading frames may be screened for protein coding regions by prediction software such as GenScan, which is located at the website gnomic.standford.edu/GENSCANW.html.

[0072] In a preferred embodiment of the present invention, the Glycine max protein or fragment thereof of the present invention is a homologue of another plant protein. In another preferred embodiment of the present invention, the Glycine max protein or fragment thereof of the present invention is a homologue of a fungal protein. In another preferred embodiment of the present invention, the Glycine max protein or fragment thereof of the present invention is a homologue of a mammalian protein. In another preferred embodiment of the present invention, the Glycine max protein or fragment thereof of the present invention is a homologue of a bacterial protein.

[0073] In a preferred embodiment of the present invention, the Glycine max protein or fragments thereof or nucleic acid molecule or fragment thereof has a BLAST score of more than 200, preferably a BLAST score of more than 300, even more preferably a BLAST score of more than 400.

[0074] In another preferred embodiment of the present invention, the nucleic acid molecule encoding the Glycine max protein or fragment thereof and/or nucleic acid molecule or fragment thereof exhibits a % identity with its homologue of between about 25% and about 40%, more preferably of between about 40 and about 70%, even more preferably of between about 70% and about 90%, and even more preferably between about 90% and 99%. In another preferred embodiment, of the present invention, the Glycine max the nucleic acid molecule encoding the Glycine max protein or fragment thereof exhibits a % identity with its homologue of 100%.

[0075] In a preferred embodiment of the present invention, the Glycine max protein or fragment thereof or nucleic acid molecule or fragment thereof exhibits a % coverage of between about 0% and about 33%, more preferably of between about 34% and about 66%, and even more preferably of between about 67% and about 100%.

[0076] Genomic sequences can be screened for the presence of proteins utilizing one or a number of different search algorithms have that been developed, one example of which are the suite of programs referred to as BLAST programs. Other examples of suitable programs that can be utilized are known in the art, several of which are described above in the Background. Nucleic acid molecules of the present invention also include non-Glycine max homologues. Preferred non-Glycine max homologues are selected from the group consisting of alfalfa, Arabidopsis barley, Brassica, broccoli, cabbage, citrus, cotton, garlic, oat, oilseed rape, onion, canola, flax, an ornamental plant, maize, pea, peanut, pepper, potato, rice, rye, sorghum, strawberry, sugarcane, sugarbeet, tomato, wheat, poplar, pine, fir, eucalyptus, apple, lettuce, lentils, grape, banana, tea, turf grasses, sunflower, oil palm, and Phaseolus.

[0077] In a preferred embodiment, nucleic acid molecules having SEQ ID NO: 1 through SEQ ID NO: 36935 or complements and fragments of either can be utilized to obtain such homologues.

[0078] The degeneracy of the genetic code allows different nucleic acid sequences to code for the same protein or peptide, e.g. see U.S. Pat. No. 4,757,006, the entirety of which is herein incorporated by reference. As used herein a nucleic acid molecule is degenerate of another nucleic acid molecule when the nucleic acid molecules encode for the same amino acid sequences but comprise different nucleotide sequences. An aspect of the present invention is that the nucleic acid molecules of the present invention include nucleic acid molecules that are degenerate from the STCs of this invention.

[0079] A further aspect of the present invention comprises one or more nucleic acid molecules which differ in nucleic acid sequence from those of a STC of this invention due to the degeneracy in the genetic code in that they encode the same protein but differ in nucleic acid sequence or a protein having one or more conservative amino acid residue. Codons capable of coding for such conservative substitutions are known in the art. For instance, serine is a conservative substitute of alanine and threonine is a conservative substitute for serine.

[0080] (a)(4) Nucleic Acid Molecules Comprising Introns and/or Intron/Exon Junctions

[0081] Nucleic acid molecules of the present invention can comprise an intron and/or one or more intron/exon junction. Sequences of the present invention can be screened for introns and intron/exon junctions utilizing one or a number of different search algorithms that have that been developed, one example of which are the suite of programs referred to as BLAST programs. Other examples of suitable programs that can be utilized are known in the art, several of which are described above in the Background and in the section entitled “Uses of the Agents of the Present Invention”.

[0082] (a)(5) Protein and Peptide Molecules

[0083] A class of agents comprises one or more of the protein or peptide molecules encoded by SEQ ID NO: 1 through SEQ ID NO: 36935, or complements thereof or fragments of either, or one or more of the proteins encoded by a nucleic acid molecule or fragment thereof or peptide molecules encoded by other nucleic acid agents of the present invention. Protein and peptide molecules can be identified using known protein or peptide molecules as a target sequence or target motif in the BLAST programs of the present invention. In a preferred embodiment, the protein or peptide molecules of the present invention are derived from Glycine max (soybean) and more preferably Glycine max, genotype A3244.

[0084] As used herein, the term “protein molecule” or “peptide molecule” includes any molecule that comprises five or more amino acids. It is well known in the art that proteins or peptides may undergo modification, including post-translational modifications, such as, but not limited to, disulfide bond formation, glycosylation, phosphorylation, or oligomerization. Thus, as used herein, the term “protein molecule” or “peptide molecule” includes any protein molecule that is modified by any biological or non-biological process. The terms “amino acid” and “amino acids” refer to all naturally occurring L-amino acids. This definition is meant to include norleucine, ornithine, homocysteine, and homoserine.

[0085] One or more of the protein or fragments of peptide molecules may be produced via chemical synthesis, or more preferably, by expression in a suitable bacterial or eukaryotic host. Suitable methods for expression are described by Sambrook, et al., Molecular Cloning, A Laboratory Manual, 2nd Edition, Cold Spring Harbor Press, Cold Spring Harbor, N.Y. (1989), or similar texts.

[0086] A “protein fragment” is a peptide or polypeptide molecule whose amino acid sequence comprises a subset of the amino acid sequence of that protein. A protein or fragment thereof that comprises one or more additional peptide regions not derived from that protein is a “fusion” protein. Such molecules may be derivatized to contain carbohydrate or other moieties (such as keyhole limpet hemocyanin, etc.). Fusion protein or peptide molecules of the present invention are preferably produced via recombinant means.

[0087] Another class of agents comprises protein or peptide molecules encoded by SEQ ID NO: 1 through SEQ ID NO: 36935 or complements thereof or, fragments or fusions thereof in which conservative, non-essential, or not relevant, amino acid residues have been added, replaced, or deleted. An example of such a homologue is the homologue protein of all non-Glycine max plant species, including but not limited to alfalfa, barley, Brassica, broccoli, cabbage, citrus, cotton, garlic, oat, oilseed rape, onion, canola, flax, maize, an ornamental plant, pea, peanut, pepper, potato, rice, rye, sorghum, strawberry, sugarcane, sugarbeet, tomato, wheat, poplar, pine, fir, eucalyptus, apple, lettuce, peas, lentils, grape, banana, tea, turf grasses, etc. Particularly preferred non-Glycine max plants to utilize for the isolation of homologues would include alfalfa, barley, cotton, corn, oat, oilseed rape, rice, corn, canola, ornamentals, sugarcane, sugarbeet, tomato, potato, wheat, and turf grasses. Such a homologue can be obtained by any of a variety of methods. Most preferably, as indicated above, one or more of the disclosed sequences (SEQ ID NO: 1 through SEQ ID NO: 36935 or complements thereof) will be used to define a pair of primers that may be used to isolate the homologue-encoding nucleic acid molecules from any desired species. Such molecules can be expressed to yield homologues by recombinant means.

[0088] (a)(6) Antibodies

[0089] One aspect of the present invention concerns antibodies, single-chain antigen binding molecules, or other proteins that specifically bind to one or more of the protein or peptide molecules of the present invention and their homologs, fusions or fragments. Such antibodies may be used to quantitatively or qualitatively detect the protein or peptide molecules of the present invention. As used herein, an antibody or peptide is said to “specifically bind” to a protein or peptide molecule of the present invention if such binding is not competitively inhibited by the presence of non-related molecules. In a preferred embodiment the antibodies of the present invention bind to proteins of the present invention, in a more preferred embodiment of the antibodies of the present invention bind to proteins derived from Glycine max.

[0090] Nucleic acid molecules that encode all or part of the protein of the present invention can be expressed, via recombinant means, to yield protein or peptides that can in turn be used to elicit antibodies that are capable of binding the expressed protein or peptide. Such antibodies may be used in immunoassays for that protein. Such protein-encoding molecules, or their fragments may be a “fusion” molecule (i.e., a part of a larger nucleic acid molecule) such that, upon expression, a fusion protein is produced. It is understood that any of the nucleic acid molecules of the present invention may be expressed, via recombinant means, to yield proteins or peptides encoded by these nucleic acid molecules.

[0091] The antibodies that specifically bind proteins and protein fragments of the present invention may be polyclonal or monoclonal. It is understood that practitioners are familiar with the standard resource materials which describe specific conditions and procedures for the construction, manipulation and isolation of antibodies (see, for example, Harlow and Lane, Antibodies: A Laboratory Manual, Cold Spring Harbor Press, Cold Spring Harbor, N.Y. (1988), the entirety of which is herein incorporated by reference).

[0092] It is understood that any of the antibodies of the present invention can be substantially purified and/or be biologically active and/or recombinant.

[0093] Uses of the Agents of the Invention

[0094] Nucleic acid molecules of the present invention may be employed to obtain other Glycine max nucleic acid molecules. Such molecules can be readily obtained by using the above-described nucleic acid molecules to screen libraries Glycine max libraries.

[0095] Nucleic acid molecules and fragments thereof of the present invention may also be employed to obtain nucleic acid molecule homologs of non-Glycine max species including the nucleic acid molecules that encode, in whole or in part, protein homologs of other species or other organisms, sequences of genetic elements such as promoters and transcriptional regulatory elements.

[0096] Nucleic acid molecules and fragments thereof of the present invention may be employed for genetic mapping studies using linkage analysis (genetic markers). A genetic linkage map shows the relative locations of specific DNA markers along a chromosome. Maps are used for the identification of genes associated with genetic diseases or phenotypic traits, comparative genomics, and as a guide for physical mapping. Through genetic mapping, a fine scale linkage map can be developed using DNA markers, and, then, a genomic DNA library of large-sized fragments can be screened with molecular markers linked to the desired trait. In a preferred embodiment of the present invention, the genomic library screened with the nucleic acid molecules of the present invention is a genomic library of Glycine max.

[0097] Mapping marker locations is based on the observation that two markers located near each other on the same chromosome will tend to be passed together from parent to offspring. During gamete production, DNA strands occasionally break and rejoin in different places on the same chromosome or on the homologous chromosome. The closer the markers are to each other, the more tightly linked and the less likely a recombination event will fall between and separate them. Recombination frequency thus provides an estimate of the distance between two markers.

[0098] In segregating populations, target genes have been reported to have been placed within an interval of 5-10 cM with a high degree of certainty (Tanksley et al., Trends in Genetics 11(2):63-68 (1995), the entirety of which is herein incorporated by reference). The markers defining this interval are used to screen a larger segregating population to identify individuals derived from one or more gametes containing a crossover in the given interval. Such individuals are useful in orienting other markers closer to the target gene. Once identified, these individuals can be analyzed in relation to all molecular markers within the region to identify those closest to the target.

[0099] Markers of the present invention can be employed to construct linkage maps and to locate genes with qualitative and quantitative effects. The genetic linkage of additional marker molecules can be established by a genetic mapping model such as, without limitation, the flanking marker model reported by Lander and Botstein, Genetics, 121:185-199 (1989), and the interval mapping, based on maximum likelihood methods described by Lander and Botstein, Genetics, 121:185-199 (1989), the entirety of which is herein incorporated by reference and implemented in the software package MAPMAKER/QTL (Lincoln and Lander, Mapping Genes Controlling Quantitative Traits Using MAPMAKER/QTL, Whitehead Institute for Biomedical Research, Massachusetts, (1990)). Additional software includes Qgene, Version 2.23 (1996), Department of Plant Breeding and Biometry, 266 Emerson Hall, Cornell University, Ithaca, N.Y., the manual of which is herein incorporated by reference in its entirety). Use of the Qgene software is a particularly preferred approach.

[0100] A maximum likelihood estimate (MLE) for the presence of a marker is calculated, together with an MLE assuming no QTL effect, to avoid false positives. A log₁₀ of an odds ratio (LOD) is then calculated as: LOD=log₁₀ (MLE for the presence of a QTL/MLE given no linked QTL).

[0101] The LOD score essentially indicates how much more likely the data are to have arisen assuming the presence of a QTL than in its absence. The LOD threshold value for avoiding a false positive with a given confidence, say 95%, depends on the number of markers and the length of the genome. Graphs indicating LOD thresholds are set forth in Lander and Botstein, Genetics, 121:185-199 (1989), the entirety of which is herein incorporated by reference and further described by Arus and Moreno-González, Plant Breeding, Hayward, Bosemark, Romagosa (eds.) Chapman & Hall, London, pp. 314-331 (1993).

[0102] Additional models can be used. Many modifications and alternative approaches to interval mapping have been reported, including the use of non-parametric methods (Kruglyak and Lander, Genetics, 139:1421-1428 (1995), the entirety of which is herein incorporated by reference). Multiple regression methods or models can be also be used, in which the trait is regressed on a large number of markers (Jansen, Biometrics in Plant Breed, van Oijen, Jansen (eds.) Proceedings of the Ninth Meeting of the Eucarpia Section Biometrics in Plant Breeding, The Netherlands, pp. 116-124 (1994); Weber and Wricke, Advances in Plant Breeding, Blackwell, Berlin, 16 (1994). Procedures combining interval mapping with regression analysis, whereby the phenotype is regressed onto a single putative QTL at a given marker interval, and at the same time onto a number of markers that serve as ‘cofactors,’ have been reported by Jansen and Stam, Genetics, 136:1447-1455 (1994) and Zeng, Genetics, 136:1457-1468 (1994). Generally, the use of cofactors reduces the bias and sampling error of the estimated QTL positions (Utz and Melchinger, Biometrics in Plant Breeding, van Oijen, Jansen (eds.) Proceedings of the Ninth Meeting of the Eucarpia Section Biometrics in Plant Breeding, The Netherlands, pp. 195-204 (1994), thereby improving the precision and efficiency of QTL mapping (Zeng, Genetics, 136:1457-1468 (1994). These models can be extended to multi-environment experiments to analysis genotype-environment interactions (Jansen et al., Theo. Appl. Genet. 91:33-37 (1995).

[0103] Selection of an appropriate mapping population is important to map construction. The choice of appropriate mapping population depends on the type of marker systems employed (Tanksley et al., J. P. Gustafson and R. Appels (eds.), Plenum Press, New York, pp. 157-173 (1988), the entirety of which is herein incorporated by reference). Consideration must be given to the source of parents (adapted vs. exotic) used in the mapping population. Chromosome pairing and recombination rates can be severely disturbed (suppressed) in wide crosses (adapted×exotic) and generally yield greatly reduced linkage distances. Wide crosses will usually provide segregating populations with a relatively large array of polymorphisms when compared to progeny in a narrow cross (adapted×adapted).

[0104] An F₂ population is the first generation of selfing after the hybrid seed is produced. Usually a single F₁ plant is selfed to generate a population segregating for all the genes in Mendelian (1:2:1) fashion. Maximum genetic information is obtained from a completely classified F₂ population using a codominant marker system (Mather, Measurement of Linkage in Heredity: Methuen and Co., (1938), the entirety of which is herein incorporated by reference). In the case of dominant markers, progeny tests (e.g., F₃, BCF₂) are required to identify the heterozygotes, thus making it equivalent to a completely classified F₂ population. However, this procedure is often prohibitive because of the cost and time involved in progeny testing. Progeny testing of F₂ individuals is often used in map construction where phenotypes do not consistently reflect genotype (e.g., disease resistance) or where trait expression is controlled by a QTL. Segregation data from progeny test populations (e.g., F₃ or BCF₂) can be used in map construction. Marker-assisted selection can then be applied to cross progeny based on marker-trait map associations (F₂, F₃), where linkage groups have not been completely disassociated by recombination events (i.e., maximum disequilibrium).

[0105] Recombinant inbred lines (RIL) (genetically related lines; usually >F₅, developed from continuously selfing F₂ lines towards homozygosity) can be used as a mapping population. Information obtained from dominant markers can be maximized by using RIL because all loci are homozygous or nearly so. Under conditions of tight linkage (i.e., about <10% recombination), dominant and co-dominant markers evaluated in RIL populations provide more information per individual than either marker type in backcross populations (Reiter, Proc. Natl. Acad. Sci. (U.S.A.) 89:1477-1481 (1992). However, as the distance between markers becomes larger (i.e., loci become more independent), the information in RIL populations decreases dramatically when compared to codominant markers.

[0106] Backcross populations (e.g., generated from a cross between a successful variety (recurrent parent) and another variety (donor parent) carrying a trait not present in the former) can be utilized as a mapping population. A series of backcrosses to the recurrent parent can be made to recover most of its desirable traits. Thus a population is created consisting of individuals nearly like the recurrent parent but each individual carries varying amounts or mosaic of genomic regions from the donor parent. Backcross populations can be useful for mapping dominant markers if all loci in the recurrent parent are homozygous and the donor and recurrent parent have contrasting polymorphic marker alleles (Reiter et al., Proc. Natl. Acad. Sci. (U.S.A.) 89:1477-1481 (1992). Information obtained from backcross populations using either codominant or dominant makers is less than that obtained from F₂ populations because one, rather than two, recombinant gametes are sampled per plant. Backcross populations, however, are more informative (at low marker saturation) when compared to RILs as the distance between linked loci increases in RIL populations (i.e., about 0.15% recombination). Increased recombination can be beneficial for resolution of tight linkages, but may be undesirable in the construction of maps with low marker saturation.

[0107] Near-isogenic lines (NIL)(created by many backcrosses to produce an array of individuals that are nearly identical in genetic composition except for the trait or genomic region under interrogation) can be used as a mapping population. In mapping with NILs, only a portion of the polymorphic loci are expected to map to a selected region.

[0108] Bulk segregant analysis (BSA) is a method developed for the rapid identification of linkage between markers and traits of interest (Michelmore, et al., Proc. Natl. Acad. Sci. (U.S.A.) 88:9828-9832 (1991). In BSA, two bulked DNA samples are drawn from a segregating population originating from a single cross. These bulks contain individuals that are identical for a particular trait (resistant or susceptible to particular disease) or genomic region but arbitrary at unlinked regions (i.e., heterozygous). Regions unlinked to the target region will not differ between the bulked samples of many individuals in BSA.

[0109] Applications for markers in plant breeding include: Quantitative Trait Loci (QTL) mapping (Edwards et al, Genetics 116:113-115 (1987), the entirety of which is herein incorporated by reference); Nienhuis et al, Crop Sci. 27:797-803 (1987); Osborn et al, Theor. Appl. Genet. 73:350-356 (1987); Romero-Severson et al, Use of RFLPs In Analysis of Quantitative Trait Loci In Maize, In Helentjaris and Burr (eds.) pp. 97-102 (1989), the entirety of which is herein incorporated by reference; Young et al, Genetics 120:570-585 (1988), the entirety of which is herein incorporated by reference; Martin et al, Science 243:1725-1728 (1989), the entirety of which is herein incorporated by reference): Sarfatti et al., Theor. Appl Genet. 78:22-26 (1989), the entirety of which is herein incorporated by reference; Tanksley, et al., Biotech. 7:257-264 (1989); Barone et al, Mol. Gen. Genet. 224:177-182 (1990), the entirety of which is herein incorporated by reference); Jung et al, Theor, Appl. Genet. 79:663-672 (1990), the entirety of which is herein incorporated by reference; Keim et al, Genetics 126:735-742 (1990), the entirety of which is herein incorporated by reference, Theor. Appl. Genet. 79:465-369 (1990), the entirety of which is herein incorporated by reference; Paterson et al., Genetics 124:735-742 (1990), the entirety of which is herein incorporated by reference; Martin et al, Proc. Natl. Acad. Sci. (U.S.A.) 88:2336-2340 (1991), the entirety of which is herein incorporated by reference; Messeguer et al, Theor. Appl. Genet. 82:529-536 (1991), the entirety of which is herein incorporated by reference; Michelmore et al, Proc Natl. Acad. Sci. (U.S.A.) 88:9828-9832 (1991), the entirety of which is herein incorporated by reference; Ottaviano et al, Theor. Appl. Genet. 81:713-719 (1991), the entirety of which is herein incorporated by reference; Yu et al, Theor. Appl. Genet. 81:471-476 (1991), the entirety of which is herein incorporated by reference; Diers et al, Crop Sci. 32:77-383 (1992), the entirety of which is herein incorporated by reference, Theor. Appl. Genet. 83:608-612 (1992), the entirety of which is herein incorporated by reference, J. Plant Nut. 15:2127-2136 (1992), the entirety of which is herein incorporated by reference; Doebley et al, Proc. Natl. Acad. Sci. (U.S.A.) 87:9888-9892 (1990), the entirety of which is herein incorporated by reference), screening genetic resource strains for useful quantitative trait alleles and introgression of these alleles into commercial varieties (Beckmann and Soller, Theor. Appl. Genet. 67:35-43 (1983), the entirety of which is herein incorporated by reference; Tanksley et al, (1989) the entirety of which is incorporated by reference), or the mapping of mutations (Rafalski, et al., In. Nonmammalian Genomic Analysis, ed. Birren and Lai, Academic Press, San Diego, Calif., pp. 75-134 (1996). Additionally, markers can be used to characterize transformants or germplasm, as a genetic diagnostic test for plant breeding or to identify individuals or varieties (Soller and Beckmann, Theor. Appl. Genet. 67:25-33 (1983), the entirety of which is herein incorporated by reference; Tanksley et al, 1989). Markers also can be used to obtain information about: (1) the number, effect, and chromosomal location of each gene affecting a trait; (2) effects of multiple copies of individual genes (gene dosage); (3) interaction between/among genes controlling a trait (epistasis); (4) whether individual genes affect more than one trait (pleiotropy); and (5) stability of gene function across environments (G×E interactions).

[0110] It is understood that one or more of the nucleic acid molecules of the present invention may in one embodiment be used as markers in genetic mapping. In a preferred embodiment, nucleic acid molecules of the present invention may in one embodiment be used as markers with Glycine max.

[0111] The nucleic acid molecules of the present invention may be used for physical mapping. Physical mapping, in conjunction with linkage analysis, can enable the isolation of genes. Physical mapping has been reported to identify the markers closest in terms of genetic recombination to a gene target for cloning. Once a DNA marker is linked to a gene of interest, the chromosome walking technique can be used to find the genes via overlapping clones. For chromosome walking, random molecular markers or established molecular linkage maps are used to conduct a search to localize the gene adjacent to one or more markers. A chromosome walk (Bukanov and Berg, Mo. Microbiol, 11:509-523 (1994), the entirety of which is herein incorporated by reference; Birkenbihl and Vielmetter Nucleic Acids Res. 17:5057-5069 (1989), the entirety of which is herein incorporated by reference; Wenzel and Herrmann, Nucleic Acids Res. 16:8323-8336, (1988), the entirety of which is herein incorporated by reference) is then initiated from the closest linked marker. Starting from the selected clones, labeled probes specific for the ends of the insert DNA are synthesized and used as probes in hybridizations against a representative library. Clones hybridizing with one of the probes are picked and serve as templates for the synthesis of new probes; by subsequent analysis, contigs are produced.

[0112] The degree of overlap of the hybridizing clones used to produce a contig can be determined by comparative restriction analysis. Comparative restriction analysis can be carried out in different ways all of which exploit the same principle; two clones of a library are very likely to overlap if they contain a limited number of restriction sites for one or more restriction endonucleases located at the same distance from each other. The most frequently used procedures are, fingerprinting (Coulson et al, Proc. Natl. Acad. Sci. (U.S.A.) 83:7821-7821, (1986), the entirety of which is herein incorporated by reference); Knott et al., Nucleic Acids Res. 16:2601-2612 (1988), the entirety of which is herein incorporated by reference; Eiglmeier et al., Mol. Microbiol. 7(2): 197-206 (1993), the entirety of which is herein incorporated by reference, 1993), restriction fragment mapping (Smith and Birnstiel, Nucleic Acids Res. 3:2387-2398 (1976), the entirety of which is herein incorporated by reference, or the “landmarking” technique (Charlebois et al., J. Mol. Biol. 222:509-524 (1991), the entirety of which is herein incorporated by reference

[0113] To generate a physical map of a genome with BACs using the fingerprinting technique, a BAC library containing a number of clones equivalent to 4×-20× haploid genome can be used (Zhang and Wing., Plant Mol. Bio. 35:115-127 (1997)). For example, BAC DNA can be purified with the conventional alkaline lysis procedure as used for plasmid DNA purification, digested with the restriction enzyme used for construction of the BAC libraries and end-labeled with ³²P-dATP, digested with Sau3AI and fractionated on a denaturing polyacrylamide gel. The gel is dried to chromatography paper and exposed to X-ray film. Fingerprints are scanned and then converted into database records, according to the positions of each band relative to the bands of the closest molecular-weight marker on a gel. The incoming database of fingerprints are first compared against each other to assemble contigs if overlapped, and then compared against all existing databases to place the incoming BACs and BAC contigs in established contigs if overlapped. The physical length of a contig in kb is estimated according to the number of restriction sites of the enzyme used for the first digestion prior to fragment end labeling Restriction analysis of a certain clone can be carried out, for example, according to a method originally described by Smith and Berstiel, Nucleic Acids Res. 3:2387-2398 (1976), First, the number and size of cloned restriction fragments to be mapped are determined by complete digestion and agarose gel electrophoresis. Then, the clone is linearized at a unique restriction site outside of the cloned DNA. Aliquots of the linearized molecules are digested to different extents with the enzyme selected for mapping. These partially cut samples are separated on agarose gels, blotted, and hybridized to a labeled fragment of vector DNA. This probe is derived entirely from one side or the other of the unique site used to linearize the clone.

[0114] The results show a ladder of DNA fragments that have the same unique end. By repeating these analyses in pairs with all the neighboring intermediate DNA fragments, the correct order of restriction fragments as well as the orientation of the cloned insert can be deduced. The order of restriction fragments produced by restriction enzymes other than the cloning enzyme can be determined similarly. Fragment data from different enzymes are then combined by a computer program and compared with the alignments of other clones of the library (Kohara et al., Cell 50:495-508 (1987), the entirety of which is herein incorporated by reference).

[0115] The landmarking technique can be carried out without any labeling and relies on agarose gel analysis. Clones are first digested preferably with a 6 bp specific endonuclease A, if possible with the original clone enzyme. Clones are then digested with a second endonuclease B. Endonuclease B is chosen based on its ability to cut rarely in the genome, for example, on average only once in 30 kbp. Of the fragments generated by digestion of one clone with enzyme A, statistically only a small number (between zero and three fragments) will also be cut by enzyme B. The very specific pattern of those fragments which are produced by double digestion are easily recognized. Any of these fragments which have a restriction site for the rarely cutting endonuclease is called a “landmark” Generally one common landmark is sufficient for defining two overlapping clones.

[0116] Alternatively to chromosome walking and the associated comparative restriction analyses methods, chromosome landing also has been reported to be used to locate a gene of interest (Tanksley et al., Trends in Genetics 11(2):63-68 (1995), the entirety of which is herein incorporated by reference. For chromosome landing, a DNA marker is isolated at a physical distance from the targeted gene. High resolution linkage analysis is used to identify such a marker that cosegregates with the gene. The marker is isolated at a distance that is less than the average insert size of the genomic library used for clone isolation. The DNA marker is then used to screen the library and isolate (or “land” on) the clone containing the gene without chromosome walking. Genome coverage of a library can also be determined by cross-hybridization of individual large insert clones by screening a BAC library with single copy RFLP markers distributed randomly across the genome by hybridization. To assure accuracy of the physical map, the markers should be single-copy or of single-locus origin, if multiple-copy.

[0117] Chromosome landing of large-insert clones using chromosome-specific DNA markers such as STSs microsatellites, RFLPs, or other markers can correlate physical and genetic maps (Zwick et al., Genetics 148:1983-1992 (1998), the entirety of which is herein incorporated by reference in its entirety). These strategies include chromosome landing of BACs containing markers or BAC contigs by BAC-FISH (Fluorescent In Situ Hybridization), a technique that involves tagging the DNA marker with an observable label. BAC clones giving positive hybridization signals are individually analyzed by FISH to metaphase chromosome spreads. The location of the labeled probe can be detected after it binds to its complementary DNA strand in an intact chromosome. The FISH of a BAC selected from a BAC contig will directly place the BAC contig to a specific chromosome region and establish a linkage relationships of the BAC contig to another BAC contig.

[0118] Likewise, BACs and STCs of the present invention can be used for contig mapping (Venter, et al., Nature, 381:364-366 (1996), the entirety of which is herein incorporated by reference). A “seed” BAC insert can be sequenced and then STCs and the corresponding BAC of each STC can be placed on the sequenced insert using the BLASTN program. Marker or gene containing STCs can be determined by the BLASTN program and their corresponding BACs can be hybridized to specific chromosomes using BAC-FISH (Zwick et al., Genetics 148:1983-1992 (1998)).

[0119] STCs can be used to identify a minimum tiling path of BACs by computational procedures. Any nucleation sequence (the sequence of an entire BAC, for example) can be electronically compared to a database of STCs to identify the next clones to be sequenced to maximally extend a contig. Chosen STCs need to occupy correct positions in the tiling path. Several factors can contribute to errors in the positioning and selection of these clones. An STC that contains all or part of a repetitive element can appear to align at any part of the growing mosaic which contains that element. One method of selecting the appropriate BAC is to mask out all sections of DNA sequence which are known to be repetitive elements. The sequence symbols of these section are replaced with Ns. These sections of DNA are not used to align the STC. STCs which are completely comprised of Ns are discarded. In this way, the unmasked sections of DNA may be aligned against the growing mosaic without misplacing them due to redundant sequence. A program publicly available, PowerBLAST includes a number of options for masking repetitive elements and low complexity subsequences (Zhang and Madden, Genome Res 7.649-56 (1997), the entirety of which is herein incorporated by reference. cDNA and genomic libraries also can be used as probe sources, thus directly combining the ordering of the genomic DNA with the localization of transcribed sequences. By a simultaneous hybridization to the genomic and back to the transcriptional libraries, results are produced on sequence homologies between transcribed sequences.

[0120] It is understood that the nucleic acid molecules of the present invention may in one embodiment be used in physical mapping. In a preferred embodiment, nucleic acid molecules of the present invention may in one embodiment be used in the physical mapping of Glycine max.

[0121] Nucleic acid molecules of the present invention can be used in comparative mapping (physical and genetic). Comparative mapping within families provides a method to the degree of sequence conservation, gene order, ploidy of species, ancestral relationships and the rates at which individual genomes are evolving. Comparative mapping has been carried out by cross-hybridizing molecular markers across species within a given family. As in genetic mapping, molecular markers are needed but instead of direct hybridization to mapping filters, the markers are used to select large insert clones from a total genomic DNA library of a related species. The selected clones, each a representative of a single marker, can then be used to physically map the region in the target species. The advantage of this method for comparative mapping is that no mapping population or linkage map of the target species is needed and the clones may also be used in other closely related species. By comparing the results obtained by genetic mapping in model plants, with those from other species, similarities of genomic structure among plants species can be established. Cross-hybridization of RFLP markers have been reported and conserved gene order has been established in many studies. Such macroscopic synteny is utilized for the estimation of correspondence of loci among these crops. These loci include not only Mendelian genes but also Quantitative Trait Loci (QTL) (Mohan et al., Molecular Breeding 3:87-103 (1997), the entirety of which is herein incorporated by reference.

[0122] It is understood that markers of the present invention may in another embodiment be used in comparative mapping. In a preferred embodiment the markers of present invention may be used in the comparative mapping of Glycine clandestina, Glycine gracilis, Glycine soja, Glycine tomentella, and Glycine tabaina.

[0123] The nucleic acid molecules of the present invention can be used to identify polymorphisms. In one embodiment, one or more of the STC nucleic acid molecules or a BAC nucleic acid molecule (or a sub-fragment of either) may be employed as a marker nucleic acid molecule to identify such polymorphism(s). Alternatively, such polymorphisms can be detected through the use of a marker nucleic acid molecule or a marker protein that is genetically linked to (i.e., a polynucleotide that co-segregates with) such polymorphism(s).

[0124] In an alternative embodiment, such polymorphisms can be detected through the use of a marker nucleic acid molecule that is physically linked to such polymorphism(s). For this purpose, marker nucleic acid molecules comprising a nucleotide sequence of a polynucleotide located within 1 mb of the polymorphism(s), and more preferably within 100 kb of the polymorphism(s), and most preferably within 10 kb of the polymorphism(s) can be employed.

[0125] The genomes of animals and plants naturally undergo spontaneous mutation in the course of their continuing evolution (Gusella, Ann. Rev. Biochem. 55:831-854 (1986)). A “polymorphism” is a variation or difference in the sequence of the gene or its flanking regions that arises in some of the members of a species. The variant sequence and the “original” sequence co-exist in the species' population. In some instances, such co-existence is in stable or quasi-stable equilibrium.

[0126] A polymorphism is thus said to be “allelic,” in that, due to the existence of the polymorphism, some members of a species may have the original sequence (i.e., the original “allele”) whereas other members may have the variant sequence (i.e., the variant “allele”). In the simplest case, only one variant sequence may exist, and the polymorphism is thus said to be di-allelic. In other cases, the species' population may contain multiple alleles, and the polymorphism is termed tri-allelic, etc. A single gene may have multiple different unrelated polymorphisms. For example, it may have a di-allelic polymorphism at one site, and a multi-allelic polymorphism at another site.

[0127] The variation that defines the polymorphism may range from a single nucleotide variation to the insertion or deletion of extended regions within a gene. In some cases, the DNA sequence variations are in regions of the genome that are characterized by short tandem repeats (STRs) that include tandem di- or tri-nucleotide repeated motifs of nucleotides. Polymorphisms characterized by such tandem repeats are referred to as “variable number tandem repeat” (“VNTR”) polymorphisms. VNTRs have been used in identity analysis (Weber, U.S. Pat. No. 5,075,217; Armour, et al., FEBS Lett. 307:113-115 (1992); Jones, et al., Eur. J. Haematol. 39:144-147 (1987); Horn, et al., PCT Application WO91/14003; Jeffreys, European Patent Application 370,719; Jeffreys, U.S. Pat. No. 5,175,082; Jeffreys et al., Amer. J. Hum. Genet. 39:11-24 (1986); Jeffreys et al., Nature 316:76-79 (1985); Gray, et al., Proc. R. Acad. Soc. Lond. 243:241-253 (1991); Moore, et al., Genomics 10:654-660 (1991); Jeffreys, et al., Anim. Genet. 18:1-15 (1987); Hillel, et al., Anim. Genet. 20:145-155 (1989); Hillel, et al., Genet. 124:783-789 (1990), all of which are herein incorporated by reference in their entirety).

[0128] The detection of polymorphic sites in a sample of DNA may be facilitated through the use of nucleic acid amplification methods. Such methods specifically increase the concentration of polynucleotides that span the polymorphic site, or include that site and sequences located either distal or proximal to it. Such amplified molecules can be readily detected by gel electrophoresis or other means.

[0129] The most preferred method of achieving such amplification employs the polymerase chain reaction (“PCR”) (Mullis, et al., Cold Spring Harbor Symp. Quant. Biol. 51:263-273 (1986); Erlich, et al., European Patent Appln. 50,424; European Patent Appln. 84,796, European Patent Application 258,017, European Patent Appln. 237,362; Mullis, European Patent Appln. 201,184; Mullis, et al., U.S. Pat. No. 4,683,202; Erlich., U.S. Pat. No. 4,582,788; and Saiki, et al., U.S. Pat. No. 4,683,194, all of which are herein incorporated by reference), using primer pairs that are capable of hybridizing to the proximal sequences that define a polymorphism in its double-stranded form.

[0130] In lieu of PCR, alternative methods, such as the “Ligase Chain Reaction” (“LCR”) may be used (Barany, Proc. Natl. Acad. Sci. (U.S.A.) 88:189-193 (1991), the entirety of which is herein incorporated by reference. LCR uses two pairs of oligonucleotide probes to exponentially amplify a specific target. The sequences of each pair of oligonucleotides is selected to permit the pair to hybridize to abutting sequences of the same strand of the target. Such hybridization forms a substrate for a template-dependent ligase. As with PCR, the resulting products thus serve as a template in subsequent cycles and an exponential amplification of the desired sequence is obtained.

[0131] LCR can be performed with oligonucleotides having the proximal and distal sequences of the same strand of a polymorphic site. In one embodiment, either oligonucleotide will be designed to include the actual polymorphic site of the polymorphism. In such an embodiment, the reaction conditions are selected such that the oligonucleotides can be ligated together only if the target molecule either contains or lacks the specific nucleotide that is complementary to the polymorphic site present on the oligonucleotide. Alternatively, the oligonucleotides may be selected such that they do not include the polymorphic site (see, Segev, PCT Application WO 90/01069, the entirety of which is herein incorporated by reference).

[0132] The “Oligonucleotide Ligation Assay” (“OLA”) may alternatively be employed (Landegren, et al., Science 241:1077-1080 (1988), the entirety of which is herein incorporated by reference). The OLA protocol uses two oligonucleotides which are designed to be capable of hybridizing to abutting sequences of a single strand of a target. OLA, like LCR, is particularly suited for the detection of point mutations. Unlike LCR, however, OLA results in “linear” rather than exponential amplification of the target sequence.

[0133] Nickerson, et al. have described a nucleic acid detection assay that combines attributes of PCR and OLA (Nickerson, et al., Proc. Natl. Acad. Sci. (U.S.A.) 87:8923-8927 (1990), the entirety of which is herein incorporated by reference). In this method, PCR is used to achieve the exponential amplification of target DNA, which is then detected using OLA. In addition to requiring multiple, and separate, processing steps, one problem associated with such combinations is that they inherit all of the problems associated with PCR and OLA.

[0134] Schemes based on ligation of two (or more) oligonucleotides in the presence of nucleic acid having the sequence of the resulting “di-oligonucleotide”, thereby amplifying the di-oligonucleotide, are also known (Wu, et al., Genomics 4:560 (1989), the entirety of which is herein incorporated by reference), and may be readily adapted to the purposes of the present invention.

[0135] Other known nucleic acid amplification procedures, such as allele-specific oligomers, branched DNA technology, transcription-based amplification systems, or isothermal amplification methods may also be used to amplify and analyze such polymorphisms (Malek, et al., U.S. Pat. No. 5,130,238; Davey, et al., European Patent Application 329,822; Schuster et al., U.S. Pat. No. 5,169,766; Miller, et al., PCT Application WO 89/06700; Kwoh, et al., Proc. Natl. Acad. Sci. (U.S.A.) 86:1173-1177 (1989); Gingeras, et al., PCT Application WO 88/10315; Walker, et al., Proc. Natl. Acad. Sci. (U.S.A.) 89:392-396 (1992), all of which are herein incorporated by reference in their entirety).

[0136] The identification of a polymorphism can be determined in a variety of ways. By correlating the presence or absence of it in an plant with the presence or absence of a phenotype, it is possible to predict the phenotype of that plant. If a polymorphism creates or destroys a restriction endonuclease cleavage site, or if it results in the loss or insertion of DNA (e.g., a VNTR polymorphism), it will alter the size or profile of the DNA fragments that are generated by digestion with that restriction endonuclease. As such, individuals that possess a variant sequence can be distinguished from those having the original sequence by restriction fragment analysis. Polymorphisms that can be identified in this manner are termed “restriction fragment length polymorphisms” (“RFLPs”). RFLPs have been widely used in human and plant genetic analyses (Glassberg, UK Patent Application 2135774; Skolnick, et al., Cytogen. Cell Genet. 32:58-67 (1982); Botstein, et al., Ann. J. Hum. Genet. 32:314-331 (1980); Fischer, et al. (PCT Application WO90/13668); Uhlen, PCT Application WO90/11369).

[0137] Polymorphisms can also be identified by Single Strand Conformation Polymorphism (SSCP) analysis. The SSCP technique is a method capable of identifying most sequence variations in a single strand of DNA, typically between 150 and 250 nucleotides in length (Elles, Methods in Molecular Medicine: Molecular Diagnosis of Genetic Diseases, Humana Press (1996), the entirety of which is herein incorporated by reference); Orita et al., Genomics 5:874-879 (1989), the entirety of which is herein incorporated by reference). Under denaturing conditions a single strand of DNA will adopt a conformation that is uniquely dependent on its sequence conformation. This conformation usually will be different, even if only a single base is changed. Most conformations have been reported to alter the physical configuration or size sufficiently to be detectable by electrophoresis. A number of protocols have been described for SSCP including, but not limited to Lee et al., Anal. Biochem. 205:289-293 (1992), the entirety of which is herein incorporated by reference; Suzuki et al., Anal. Biochem. 192:82-84 (1991), the entirety of which is herein incorporated by reference; Lo et al., Nucleic Acids Research 20:1005-1009 (1992), the entirety of which is herein incorporated by reference; Sarkar et al., Genomics 13:441-443 (1992), the entirety of which is herein incorporated by reference). It is understood that one or more of the nucleic acids of the present invention, may be utilized as markers or probes to detect polymorphisms by SSCP analysis.

[0138] Polymorphisms may also be found using a DNA fingerprinting technique called amplified fragment length polymorphism (AFLP), which is based on the selective PCR amplification of restriction fragments from a total digest of genomic DNA to profile that DNA. Vos, et al., Nucleic Acids Res. 23:4407-4414 (1995), the entirety of which is herein incorporated by reference. This method allows for the specific co-amplification of high numbers of restriction fragments, which can be visualized by PCR without knowledge of the nucleic acid sequence.

[0139] AFLP employs basically three steps. Initially, a sample of genomic DNA is cut with restriction enzymes and oligonucleotide adapters are ligated to the restriction fragments of the DNA. The restriction fragments are then amplified using PCR by using the adapter and restriction sequence as target sites for primer annealing. The selective amplification is achieved by the use of primers that extend into the restriction fragments, amplifying only those fragments in which the primer extensions match the nucleotide flanking the restriction sites. These amplified fragments are then visualized on a denaturing polyacrylamide gel.

[0140] AFLP analysis has been performed on Salix (Beismann, et al., Mol. Ecol. 6:989-993 (1997), the entirety of which is herein incorporated by reference); Acinetobacter (Janssen, et al., Int. J. Syst. Bacteriol 47:1179-1187 (1997), the entirety of which is herein incorporated by reference), Aeromonas popoffi (Huys, et al., Int. J. Syst. Bacteriol. 47:1165-1171 (1997), the entirety of which is herein incorporated by reference), rice (McCouch, et al., Plant Mol. Biol. 35:89-99 (1997), the entirety of which is herein incorporated by reference); Nandi, et al., Mol. Gen. Genet. 255:1-8 (1997); Cho, et al., Genome 39:373-378 (1996), herein incorporated by reference), barley (Hordeum vulgare) (Simons, et al., Genomics 44:61-70 (1997), the entirety of which is herein incorporated by reference; Waugh, et al., Mol. Gen. Genet. 255:311-321 (1997), the entirety of which is herein incorporated by reference; Qi, et al., Mol. Gen. Genet. 254:330-336 (1997), the entirety of which is herein incorporated by reference; Becker, et al., Mol. Gen. Genet. 249:65-73 (1995), the entirety of which is herein incorporated by reference), potato (Van der Voort, et al., Mol. Gen. Genet. 255:438-447 (1997), the entirety of which is herein incorporated by reference; Meksem, et al., Mol. Gen. Genet. 249:74-81 (1995), the entirety of which is herein incorporated by reference), Phytophthora infestans (Van der Lee, et al., Fungal Genet. Biol. 21:278-291 (1997), the entirety of which is herein incorporated by reference), Bacillus anthracis (Keim, et al., J. Bacteriol. 179:818-824 (1997)), Astragalus cremnophylax (Travis, et al., Mol. Ecol. 5:735-745 (1996), the entirety of which is herein incorporated by reference), Arabidopsis (Cnops, et al., Mol. Gen. Genet. 253:32-41 (1996), the entirety of which is herein incorporated by reference), Escherichia coli (Lin, et al., Nucleic Acids Res. 24:3649-3650 (1996), the entirety of which is herein incorporated by reference), Aeromonas (Huys, et al., Int. J. Syst. Bacteriol. 46:572-580 (1996), the entirety of which is herein incorporated by reference), nematode (Folkertsma, et al., Mol. Plant. Microbe Interact. 9:47-54 (1996), the entirety of which is herein incorporated by reference), tomato (Thomas, et al., Plant J. 8:785-794 (1995), the entirety of which is herein incorporated by reference), and human (Latorra, et al., PCR Methods Appl. 3:351-358 (1994) the entirety of which is herein incorporated by reference). AFLP analysis has also been used for fingerprinting mRNA (Money, et al., Nucleic Acids Res. 24:2616-2617 (1996), the entirety of which is herein incorporated by reference; Bachem, et al., Plant J. 9:745-753 (1996), the entirety of which is herein incorporated by reference). It is understood that one or more of the nucleic acid molecules of the present invention, may be utilized as markers or probes to detect polymorphisms by AFLP analysis for fingerprinting mRNA.

[0141] Polymorphisms may also be found using random amplified polymorphic DNA (RAPD) (Williams et al., Nucl. Acids Res. 18:6531-6535 (1990), the entirety of which is herein incorporated by reference) and cleavable amplified polymorphic sequences (CAPS) (Lyamichev et al., Science 260:778-783 (1993), the entirety of which is herein incorporated by reference). It is understood that one or more of the nucleic acid molecules of the present invention, may be utilized as markers or probes to detect polymorphisms by RAPD or CAPS analysis.

[0142] Nucleic acid molecules of the present invention can be used to monitor expression. A microarray-based method for high-throughput monitoring of plant gene expression may be utilized to measure gene-specific hybridization targets. This ‘chip’-based approach involves using microarrays of nucleic acid molecules as gene-specific hybridization targets to quantitatively measure expression of the corresponding plant genes (Schena et al., Science 270:467-470 (1995), the entirety of which is herein incorporated by reference; Shalon, Ph.D. Thesis. Stanford University (1996), the entirety of which is herein incorporated by reference). Every nucleotide in a large sequence can be queried at the same time. Hybridization can be used to efficiently analyze nucleotide sequences.

[0143] Several microarray methods have been described. One method compares the sequences to be analyzed by hybridization to a set of oligonucleotides or cDNA molecules representing all possible subsequences (Bains and Smith, J. Theor. Biol. 135:303 (1989), the entirety of which is herein incorporated by reference). A second method hybridizes the sample to an array of oligonucleotide or cDNA probes. An array consisting of oligonucleotides or cDNA molecules complementary to subsequences of a target sequence can be used to determine the identity of a target sequence, measure its amount, and detect differences between the target and a reference sequence. Nucleic acid molecule microarrays may also be screened with protein molecules or fragments thereof to determine nucleic acid molecules that specifically bind protein molecules or fragments thereof.

[0144] Additionally, microarrays of BACs may be prepared to sufficiently cover 3× of an entire genome. Such microarrays can be used in a variety of genomics experiments including gene mapping, DNA fingerprinting and promoter identification. Microarrays of genomic DNA can also be used for parallel analysis of genomes at single gene resolution (Lemieux et al., Molecular Breeding 277-289 (1988), the entirety of which is herein incorporated by reference). It is understood that one or more of the molecules of the present invention, preferably one or more of the nucleic acid molecules or protein molecules or fragments thereof of the present invention may be utilized in a genomic microarray based method. In a preferred embodiment of the present invention, one or more of the Glycine max nucleic acid molecules or protein molecules or fragments thereof of the present invention may be utilized in a genomic microarray based method. For example, Genomic Mismatch Scanning (GMS), a hybridization-based method of linkage analysis that allows rapid identification of regions of identity-by-descent between two related individuals, can be carried out with microarrays. GMS is reported to have been used to identify genetically common chromosomal segments based on the ability of these DNA sequences to form extensive regions of mismatch-free heteroduplexes. A series of enzymatic steps, coupled with filter binding, is used to selectively remove heteroduplexes that contain mismatches (i.e., chromosomal regions that do not share identity-by descent.). Fragments of chromosomal DNA representing inherited regions are hybridized to a microarray of ordered genomic clones and positive hybridization signals pinpoint regions of identity-by-descent at high resolution (Lemieux et al., Molecular Breeding 277-289 (1988))

[0145] It is understood that one or more of the molecules of the present invention, preferably one or more of the nucleic acid molecules or protein molecules or fragments thereof of the present invention may be utilized in a GMS microarray based method to locate regions of identity-by-descent between related individuals. In a preferred embodiment of the present invention, one or more of the Glycine max nucleic acid molecules or protein molecules or fragments thereof of the present invention may be utilized in a GMS microarray based method to locate regions of identity-by-descent between related individuals. The GMS microarray approach can also be used as a tool to map mutagenic traits. For example, in yeast, the entire genomic sequence is known and it has been reported that the genes responsible for growth at elevated temperature, a trait required for the pathogenicity of certain yeast strains, may be determined using GMS (Lemieux et al, Molecular Breeding 277-289 (1988)). By analyzing the inheritance of large numbers of tetrads derived from crosses of pathogenic and wild type strains, all the genes responsible for a yeast strain's ability to grow at 42° C., for example, could be identified.

[0146] It is understood that one or more of the molecules of the present invention, preferably one or more of the nucleic acid molecules or protein molecules or fragments thereof of the present invention may be utilized in a GMS microarray based method to map multigenic traits. In a preferred embodiment of the present invention, one or more of the Glycine max nucleic acid molecules or protein molecules or fragments thereof of the present invention may be utilized in a GMS microarray based method to map multigenic traits.

[0147] Plant repeat elements may be used with GMS microarraying to identify species specific chromosomes in another species background. For example, the maize genome contains moderately repetitive DNA sequences (ZLRS) representing about 2500 copies per haploid genome; these sequences are present in the genus Zea and absent in other graminaceous species. Ananiev et al., (Proc. Natl. Acad. Sci. (U.S.A.) 94:3526-3529 (1997), all of which are herein incorporated by reference in their entirety) have reported unusual plants with individual maize chromosomes added to a complete oat genome generated by embryo rescue from oat (Avena sativa)×Zea mays crosses. By using highly repetitive maize-specific sequences as probes, Ananiev et al. (1997) were able to selectively isolate cosmid clones containing maize genomic DNA.

[0148] It is understood that one or more of the molecules of the present invention, preferably one or more of the nucleic acid molecules or protein molecules or fragments thereof of the present invention may be utilized in a GMS microarray based method using repeat elements to selectively isolate clones containing species specific DNA. In a preferred embodiment of the present invention, one or more of the Glycine max nucleic acid molecules or protein molecules or fragments thereof of the present invention may be utilized in a GMS microarray based method to selectively isolate clones containing species specific DNA. A particular preferred microarray embodiment of the present invention is a microarray comprising nucleic acid molecules encoding genes that are homologues of known genes or nucleic acid molecules that comprise genes or fragments thereof that elicit only limited or no matches to known genes. A further preferred microarray embodiment of the present invention is a microarray comprising nucleic acid molecules encoding genes or fragments thereof that are homologues of known genes and nucleic acid molecules that comprise genes or fragments thereof that elicit only limited or no matches to known genes. A further preferred microarray embodiment of the present invention is a microarray comprising nucleic acid molecules encoding genes or fragments thereof that elicit only limited or no matches to known genes.

[0149] It is understood that one or more of the molecules of the present invention, preferably one or more of the nucleic acid molecules or protein molecules or fragments thereof of the present invention may be utilized in a microarray based method. In a preferred embodiment of the present invention, one or more of the Glycine max nucleic acid molecules or protein molecules or fragments thereof of the present invention may be utilized in a microarray based method.

[0150] Nucleic acid molecules of the present invention may be used in site directed mutagenesis. Site-directed mutagenesis may be utilized to modify nucleic acid sequences, particularly as it is a technique that allows one or more of the amino acids encoded by a nucleic acid molecule, to be altered (e.g. a threonine to be replaced by a methionine). Three basic methods for site-directed mutagenesis are often employed. These are cassette mutagenesis (Wells et al., Gene 34:315-23 (1985), the entirety of which is herein incorporated by reference), primer extension (Gilliam et al., Gene 12:129-137 (1980), the entirety of which is herein incorporated by reference); Zoller and Smith, Methods Enzymol. 100:468-500 (1983), the entirety of which is herein incorporated by reference; and Dalbadie-McFarland et al., Proc. Natl. Acad. Sci. (U.S.A.) 79:6409-6413 (1982), the entirety of which is herein incorporated by reference) and methods based upon PCR (Scharf et al., Science 233:1076-1078 (1986), the entirety of which is herein incorporated by reference; Higuchi et al., Nucleic Acids Res. 16:7351-7367 (1988), the entirety of which is herein incorporated by reference).

[0151] Any of the nucleic acid molecules of the present invention may either be modified by site-directed mutagenesis or used as, for example, nucleic acid molecules that are used to target other nucleic acid molecules for modification. It is understood that mutants with more than one altered nucleotide can be constructed using techniques that practitioners skilled in the art are familiar with such as isolating restriction fragments and ligating such fragments into an expression vector.

[0152] ApBACwich system has been developed to achieve site-directed integration of DNA into the genome. A 150 kb cotton BAC DNA is reported to have been transferred into a specific lox site in tobacco by biolistic bombardment and Cre-lox site specific recombination.

[0153] A construct or vector comprising a nucleic acid molecules of the present invention may be used in transformation. Exogenous genetic material may be transferred into a plant cell and the plant cell regenerated into a whole, fertile or sterile plant. Exogenous genetic material is any genetic material, whether naturally occurring or otherwise, from any source that is capable of being inserted into any organism. In a preferred embodiment of the present invention the exogenous genetic material can include Glycine max genetic material. Such genetic material may be transferred into either monocotyledons and dicotyledons including but not limited to the plants, Zea mays and Arabidopsis thaliana and soybean (See specifically, Chistou, Particle Bombardment for Genetic Engineering of Plants, pp. 63-69 (Zea mays), ppSO-60 (soybean), Biotechnology Intelligence Unit, Academic Press, San Diego, Calif. (1996), the entirety of which is herein incorporated by reference and generally Chistou, Particle Bombardment for Genetic Engineering of Plants, Biotechnology Intelligence Unit, Academic Press, San Diego, Calif. (1996), the entirety of which is herein incorporated by reference).

[0154] Transfer of a nucleic acid that encodes for a protein can result in overexpression of that protein in a transformed cell or transgenic plant. One or more of the proteins or fragments thereof encoded by nucleic acid molecules of the present invention may be overexpressed in a transformed cell or transformed plant. Such overexpression may be the result of transient or stable transfer of the exogenous material.

[0155] Exogenous genetic material may be transferred into a plant cell by the use of a DNA vector or construct designed for such a purpose. In a preferred embodiment, the exogenous genetic material comprises a nucleic acid molecule of the present invention. Vectors have been engineered for transformation of large DNA inserts into plant genomes. Vectors have been designed to replicate in both E. coli and A. tumefaciens and have all of the features required for transferring large inserts of DNA into plant chromosomes (Choi and Wing, at the website genome.clemson.edu/protocols2-nj.html July, 1998). ApBACwich system has been developed to achieve site-directed integration of DNA into the genome. A 150 kb cotton BAC DNA is reported to have been transferred into a specific lox site in tobacco by biolistic bombardment and Cre-lox site specific recombination.

[0156] A construct or vector may include a plant promoter to express the protein or protein fragment of choice. A number of promoters which are active in plant cells have been described in the literature. These include the nopaline synthase (NOS) promoter (Ebert et al., Proc. Natl. Acad. Sci. (U.S.A.) 84:5745-5749 (1987), the entirety of which is herein incorporated by reference), the octopine synthase (OCS) promoter (which are carried on tumor-inducing plasmids of Agrobacterium tumefaciens), the caulimovirus promoters such as the cauliflower mosaic virus (CaMV) 19S promoter (Lawton et al., Plant Mol. Biol. 9:315-324 (1987), the entirety of which is herein incorporated by reference) and the CAMV 35S promoter (Odell et al., Nature 313:810-812 (1985), the entirety of which is herein incorporated by reference), the figwort mosaic virus 35S-promoter, the light-inducible promoter from the small subunit of ribulose-1,5-bis-phosphate carboxylase (ssRUBISCO), the Adh promoter (Walker et al., Proc. Natl. Acad. Sci. (U.S.A.) 84:6624-6628 (1987), the entirety of which is herein incorporated by reference), the sucrose synthase promoter (Yang et al., Proc. Natl. Acad. Sci. (U.S.A.) 87:4144-4148 (1990), the entirety of which is herein incorporated by reference), the R gene complex promoter (Chandler et al., The Plant Cell 1:1175-1183 (1989), the entirety of which is herein incorporated by reference), and the chlorophyll a/b binding protein gene promoter, etc. These promoters have been used to create DNA constructs which have been expressed in plants; see, e.g., PCT publication WO 84/02913, herein incorporated by reference in its entirety.

[0157] Promoters which are known or are found to cause transcription of DNA in plant cells can be used in the present invention. Such promoters may be obtained from a variety of sources such as plants and plant viruses. It is preferred that the particular promoter selected should be capable of causing sufficient expression to result in the production of an effective amount of protein to cause the desired phenotype. In addition to promoters which are known to cause transcription of DNA in plant cells, other promoters may be identified for use in the current invention by screening a plant cDNA library for genes which are selectively or preferably expressed in the target tissues or cells.

[0158] For the purpose of expression in source tissues of the plant, such as the leaf, seed, root or stem, it is preferred that the promoters utilized in the present invention have relatively high expression in these specific tissues. For this purpose, one may choose from a number of promoters for genes with tissue- or cell-specific or -enhanced expression. Examples of such promoters reported in the literature include the chloroplast glutamine synthetase GS2 promoter from pea (Edwards et al., Proc. Natl. Acad. Sci. (U.S.A.) 87:3459-3463 (1990), herein incorporated by reference in its entirety), the chloroplast fructose-1,6-biphosphatase (FBPase) promoter from wheat (Lloyd et al., Mol. Gen. Genet. 225:209-216 (1991), herein incorporated by reference in its entirety), the nuclear photosynthetic ST-LS1 promoter from potato (Stockhaus et al., EMBO J. 8:2445-2451 (1989), herein incorporated by reference in its entirety), the phenylalanine ammonia-lyase (PAL) promoter and the chalcone synthase (CHS) promoter from Arabidopsis thaliana. Also reported to be active in photosynthetically active tissues are the ribulose-1,5-bisphosphate carboxylase (RbcS) promoter from eastern larch (Larix laricina), the promoter for the cab gene, cab6, from pine (Yamamoto et al., Plant Cell Physiol. 35:773-778 (1994), herein incorporated by reference in its entirety), the promoter for the Cab-1 gene from wheat (Fejes et al., Plant Mol. Biol. 15:921-932 (1990), herein incorporated by reference in its entirety), the promoter for the CAB-1 gene from spinach (Lubberstedt et al., Plant Physiol. 104:997-1006 (1994), herein incorporated by reference in its entirety), the promoter for the cab1R gene from rice (Luan et al., Plant Cell. 4:971-981 (1992), the entirety of which is herein incorporated by reference), the pyruvate, orthophosphate dikinase (PPDK) promoter from Zea mays (Matsuoka et al., Proc. Natl. Acad. Sci. (U.S.A.) 90:9586-9590 (1993), herein incorporated by reference in its entirety), the promoter for the tobacco Lhcb1*2 gene (Cerdan et al., Plant Mol. Biol. 33:245-255. (1997), herein incorporated by reference in its entirety), the Arabidopsis thaliana SUC2 sucrose-H+ symporter promoter (Truernit et al., Planta. 196:564-570 (1995), herein incorporated by reference in its entirety), and the promoter for the thylacoid membrane proteins from spinach (psaD, psaF, psaE, PC, FNR, atpC, atpD, cab, rbcS). Other promoters for the chlorophyll a/b-binding proteins may also be utilized in the present invention, such as the promoters for LhcB gene and PsbP gene from white mustard (Sinapis alba; Kretsch et al., Plant Mol. Biol. 28:219-229 (1995), the entirety of which is herein incorporated by reference).

[0159] For the purpose of expression in sink tissues of the plant, such as the tuber of the potato plant, the fruit of tomato, or the seed of Zea mays, wheat, rice, and barley, it is preferred that the promoters utilized in the present invention have relatively high expression in these specific tissues. A number of promoters for genes with tuber-specific or -enhanced expression are known, including the class I patatin promoter (Bevan et al., EMBO J. 8:1899-1906 (1986); Jefferson et al., Plant Mol. Biol. 14995-1006 (1990), both of which are herein incorporated by reference in its entirety), the promoter for the potato tuber ADPGPP genes, both the large and small subunits, the sucrose synthase promoter (Salanoubat and Belliard, Gene. 60:47-56 (1987), Salanoubat and Belliard, Gene. 84:181-185 (1989), both of which are incorporated by reference in their entirety), the promoter for the major tuber proteins including the 22 kd protein complexes and proteinase inhibitors (Hannapel, Plant Physiol. 101:703-704 (1993), herein incorporated by reference in its entirety), the promoter for the granule bound starch synthase gene (GBSS) (Visser et al., Plant Mol. Biol. 17:691-699 (1991), herein incorporated by reference in its entirety), and other class I and II patatins promoters (Koster-Topfer et al., Mol. Gen. Genet. 219:390-396 (1989); Mignery et al., Gene. 62:27-44 (1988), both of which are herein incorporated by reference in their entirety).

[0160] Other promoters can also be used to express a fructose 1,6 bisphosphate aldolase gene in specific tissues, such as seeds or fruits. The promoter for β-conglycinin (Chen et al., Dev. Genet. 10:112-122 (1989), herein incorporated by reference in its entirety) or other seed-specific promoters such as the napin and phaseolin promoters, can be used. The zeins are a group of storage proteins found in Zea mays endosperm. Genomic clones for zein genes have been isolated (Pedersen et al., Cell 29:1015-1026 (1982), herein incorporated by reference in its entirety), and the promoters from these clones, including the 15 kD, 16 kD, 19 kD, 22 kD, 27 kD, and gamma genes, could also be used. Other promoters known to function, for example, in Zea mays, include the promoters for the following genes: waxy, Brittle, Shrunken 2, Branching enzymes I and II, starch synthases, debranching enzymes, oleosins, glutelins, and sucrose synthases. A particularly preferred promoter for Zea mays endosperm expression is the promoter for the glutelin gene from rice, more particularly the Osgt-1 promoter (Zheng et al., Mol. Cell. Biol. 13:5829-5842 (1993), herein incorporated by reference in its entirety). Examples of promoters suitable for expression in wheat include those promoters for the ADPglucose pyrophosphorylase (ADPGPP) subunits, the granule bound and other starch synthases, the branching and debranching enzymes, the embryogenesis-abundant proteins, the gliadins, and the glutenins. Examples of such promoters in rice include those promoters for the ADPGPP subunits, the granule bound and other starch synthases, the branching enzymes, the debranching enzymes, sucrose synthases, and the glutelins. A particularly preferred promoter is the promoter for rice glutelin, Osgt-1. Examples of such promoters for barley include those for the ADPGPP subunits, the granule bound and other starch synthases, the branching enzymes, the debranching enzymes, sucrose synthases, the hordeins, the embryo globulins, and the aleurone specific proteins.

[0161] Root specific promoters may also be used. An example of such a promoter is the promoter for the acid chitinase gene (Samac et al., Plant Mol. Biol. 25:587-596 (1994), the entirety of which is herein incorporated by reference). Expression in root tissue could also be accomplished by utilizing the root specific subdomains of the CaMV35S promoter that have been identified (Lam et al., Proc. Natl. Acad. Sci. (U.S.A.) 86:7890-7894 (1989), herein incorporated by reference in its entirety). Other root cell specific promoters include those reported by Conkling et al. (Conkling et al., Plant Physiol. 93:1203-1211 (1990), the entirety of which is herein incorporated by reference).

[0162] Additional promoters that may be utilized are described, for example, in U.S. Pat. Nos. 5,378,619, 5,391,725, 5,428,147, 5,447,858, 5,608,144, 5,608,144, 5,614,399, 5,633,441, 5,633,435, and 4,633,436, all of which are herein incorporated in their entirety. In addition, a tissue specific enhancer may be used (Fromm et al., The Plant Cell 1:977-984 (1989), the entirety of which is herein incorporated by reference).

[0163] Constructs or vectors may also include, with the coding region of interest, a nucleic acid sequence that acts, in whole or in part, to terminate transcription of that region. For example, such sequences have been isolated including the Tr7 3′ sequence and the nos 3′ sequence (Ingelbrecht et al., The Plant Cell 1:671-680 (1989), the entirety of which is herein incorporated by reference; Bevan et al., Nucleic Acids Res. 11:369-385 (1983), the entirety of which is herein incorporated by reference), or the like.

[0164] A vector or construct may also include regulatory elements. Examples of such include the Adh intron 1 (Callis et al., Genes and Develop. 1:1183-1200 (1987), the entirety of which is herein incorporated by reference), the sucrose synthase intron (Vasil et al., Plant Physiol. 91:1575-1579 (1989), the entirety of which is herein incorporated by reference) and the TMV omega element (Gallie et al., The Plant Cell 1:301-311 (1989), the entirety of which is herein incorporated by reference). These and other regulatory elements may be included when appropriate.

[0165] A vector or construct may also include a selectable marker. Selectable markers may also be used to select for plants or plant cells that contain the exogenous genetic material. Examples of such include, but are not limited to, a neo gene (Potrykus et al., Mol. Gen. Genet. 199:183-188 (1985), the entirety of which is herein incorporated by reference) which codes for kanamycin resistance and can be selected for using kanamycin, G418, etc.; a bar gene which codes for bialaphos resistance; a mutant EPSP synthase gene (Hinchee et al., Bio/Technology 6:915-922 (1988), the entirety of which is herein incorporated by reference) which encodes glyphosate resistance; a nitrilase gene which confers resistance to bromoxynil (Stalker et al., J. Biol. Chem. 263:6310-6314 (1988), the entirety of which is herein incorporated by reference); a mutant acetolactate synthase gene (ALS) which confers imidazolinone or sulphonylurea resistance (European Patent Application 154,204 (Sep. 11, 1985), the entirety of which is herein incorporated by reference); and a methotrexate resistant DHFR gene (Thillet et al., J. Biol. Chem. 263:12500-12508 (1988), the entirety of which is herein incorporated by reference).

[0166] A vector or construct may also include a transit peptide. Incorporation of a suitable chloroplast transit peptide may also be employed (European Patent Application Publication Number 0218571, the entirety of which is herein incorporated by reference). Translational enhancers may also be incorporated as part of the vector DNA. DNA constructs could contain one or more 5′ non-translated leader sequences which may serve to enhance expression of the gene products from the resulting mRNA transcripts. Such sequences may be derived from the promoter selected to express the gene or can be specifically modified to increase translation of the mRNA. Such regions may also be obtained from viral RNAs, from suitable eukaryotic genes, or from a synthetic gene sequence. For a review of optimizing expression of transgenes, see Koziel et al., Plant Mol. Biol. 32:393-405 (1996), the entirety of which is herein incorporated by reference.

[0167] A vector or construct may also include a screenable marker. Screenable markers may be used to monitor expression. Exemplary screenable markers include a β-glucuronidase or uidA gene (GUS) which encodes an enzyme for which various chromogenic substrates are known (Jefferson, Plant Mol. Biol, Rep. 5:387-405 (1987), the entirety of which is herein incorporated by reference; Jefferson et al., EMBO J. 6:3901-3907 (1987), the entirety of which is herein incorporated by reference); an R-locus gene, which encodes a product that regulates the production of anthocyanin pigments (red color) in plant tissues ((Dellaporta et al., Stadler Symposium 11:263-282 (1988), the entirety of which is herein incorporated by reference); a β-lactamase gene (Sutcliffe et al., Proc. Natl. Acad. Sci. (U.S.A.) 75:3737-3741 (1978), the entirety of which is herein incorporated by reference), a gene which encodes an enzyme for which various chromogenic substrates are known (e.g., PADAC, a chromogenic cephalosporin); a luciferase gene (Ow et al., Science 234:856-859 (1986), the entirety of which is herein incorporated by reference) a xylE gene (Zukowsky et al., Proc. Natl. Acad. Sci. (U.S.A.) 80:1101-1105 (1983), the entirety of which is herein incorporated by reference) which encodes a catechol dioxygenase that can convert chromogenic catechols; an α-amylase gene (Ikatu et al., Bio/Technol. 8:241-242 (1990), the entirety of which is herein incorporated by reference); a tyrosinase gene (Katz et al., J. Gen. Microbiol. 129:2703-2714 (1983), the entirety of which is herein incorporated by reference) which encodes an enzyme capable of oxidizing tyrosine to DOPA and dopaquinone which in turn condenses to melanin; an α-galactosidase, which will turn a chromogenic α-galactose substrate.

[0168] Included within the terms “selectable or screenable marker genes” are also genes which encode a secretable marker whose secretion can be detected as a means of identifying or selecting for transformed cells. Examples include markers which encode a secretable antigen that can be identified by antibody interaction, or even secretable enzymes which can be detected catalytically. Secretable proteins fall into a number of classes, including small, diffusible proteins detectable, e.g., by ELISA, small active enzymes detectable in extracellular solution (e.g., α-amylase, β-lactamase, phosphinothricin transferase), or proteins which are inserted or trapped in the cell wall (such as proteins which include a leader sequence such as that found in the expression unit of extension or tobacco PR-S). Other possible selectable and/or screenable marker genes will be apparent to those of skill in the art.

[0169] Methods and compositions for transforming a bacteria and other microorganisms are known in the art (see for example Sambrook et al., Molecular Cloning: A Laboratory Manual, Second Edition, Cold Spring Harbor Laboratory Press, Cold Spring Harbor, N.Y., (1989), the entirety of which is herein incorporated by reference).

[0170] There are many methods for introducing transforming nucleic acid molecules into plant cells. Suitable methods are believed to include virtually any method by which nucleic acid molecules may be introduced into a cell, such as by Agrobacterium infection or direct delivery of nucleic acid molecules such as, for example, by PEG-mediated transformation, by electroporation or by acceleration of DNA coated particles, etc. (Pottykus, Ann. Rev. Plant Physiol. Plant Mol. Biol. 42:205-225 (1991), the entirety of which is herein incorporated by reference; Vasil, Plant Mol. Biol. 25:925-937 (1994), the entirety of which is herein incorporated by reference. For example, electroporation has been used to transform Zea mays protoplasts (Fromm et al., Nature 312:791-793 (1986), the entirety of which is herein incorporated by reference).

[0171] Technology for introduction of DNA into cells is well known to those of skill in the art. Four general methods for delivering a gene into cells have been described: (1) chemical methods (Graham and van der Eb, Virology, 54:536-539 (1973), the entirety of which is herein incorporated by reference); (2) physical methods such as microinjection (Capecchi, Cell 22:479-488 (1980), electroporation (Wong and Neumann, Biochem. Biophys. Res. Commun., 107:584-587 (1982); Fromm et al., Proc. Natl. Acad. Sci. (U.S.A.), 82:5824-5828 (1985); U.S. Pat. No. 5,384,253; and the gene gun (Johnston and Tang, Methods Cell Biol. 43:353-365 (1994), all of which the entirety is herein incorporated by reference; (3) viral vectors (Clapp, Clin. Perinatol., 20:155-168 (1993); Lu et al., J. Exp. Med., 178:2089-2096 (1993); Eglitis and Anderson, Biotechniques, 6:608-614 (1988), all of which the entirety is herein incorporated by reference); and (4) receptor-mediated mechanisms (Curiel et al., Hum. Gen. Ther., 3:147-154 (1992); Wagner et al., Proc. Natl. Acad. Sci. U.S.A., 89:6099-6103 (1992), all of which the entirety is herein incorporated by reference).

[0172] Acceleration methods that may be used include, for example, microprojectile bombardment and the like. One example of a method for delivering transforming nucleic acid molecules to plant cells is microprojectile bombardment. This method has been reviewed by Yang and Christou, eds., Particle Bombardment Technology for Gene Transfer, Oxford Press, Oxford, England (1994), the entirety of which is herein incorporated by reference). Non-biological particles (microprojectiles) that may be coated with nucleic acids and delivered into cells by a propelling force. Exemplary particles include those comprised of tungsten, gold, platinum, and the like.

[0173] A particular advantage of microprojectile bombardment, in addition to it being an effective means of reproducibly, and stably transforming monocotyledons, is that neither the isolation of protoplasts (Cristou et al., Plant Physiol. 87:671-674 (1988), the entirety of which is herein incorporated by reference) nor the susceptibility of Agrobacterium infection is required. An illustrative embodiment of a method for delivering DNA into maize cells by acceleration is a biolistics-particle delivery system, which can be used to propel particles coated with DNA through a screen, such as a stainless steel or Nytex screen, onto a filter surface covered with corn cells cultured in suspension. Gordon-Kamm et al., describes the basic procedure for coating tungsten particles with DNA (Gordon-Kamm et al., Plant Cell 2:603-618 (1990), the entirety of which is herein incorporated by reference). The screen disperses the tungsten nucleic acid particles so that they are not delivered to the recipient cells in large aggregates. A particle delivery system suitable for use with the present invention is the helium acceleration PDS-1000/He gun which is available from Bio-Rad Laboratories (Bio-Rad, Hercules, Calif.) (Sanford et al., Technique 3:3-16 (1991), the entirety of which is herein incorporated by reference).

[0174] For the bombardment, cells in suspension may be concentrated on filters. Filters containing the cells to be bombarded are positioned at an appropriate distance below the microprojectile stopping plate. If desired, one or more screens are also positioned between the gun and the cells to be bombarded.

[0175] Alternatively, immature embryos or other target cells may be arranged on solid culture medium. The cells to be bombarded are positioned at an appropriate distance below the macroprojectile stopping plate. If desired, one or more screens are also positioned between the acceleration device and the cells to be bombarded. Through the use of techniques set forth herein one may obtain up to 1000 or more foci of cells transiently expressing a marker gene. The number of cells in a focus which express the exogenous gene product 48 hours post-bombardment often range from one to ten and average one to three.

[0176] In bombardment transformation, one may optimize the prebombardment culturing conditions and the bombardment parameters to yield the maximum numbers of stable transformants. Both the physical and biological parameters for bombardment are important in this technology. Physical factors are those that involve manipulating the DNA/microprojectile precipitate or those that affect the flight and velocity of either the macro- or microprojectiles. Biological factors include all steps involved in manipulation of cells before and immediately after bombardment, the osmotic adjustment of target cells to help alleviate the trauma associated with bombardment, and also the nature of the transforming DNA, such as linearized DNA or intact supercoiled plasmids. It is believed that pre-bombardment manipulations are especially important for successful transformation of immature embryos.

[0177] In another alternative embodiment, plastids can be stably transformed. Methods disclosed for plastid transformation in higher plants include particle gun delivery of DNA containing a selectable marker and targeting of the DNA to the plastid genome through homologous recombination (Svab et al. Proc. Natl. Acad. Sci. (U.S.A.) 87:8526-8530 (1990): Svab and Maliga Proc. Natl. Acad. Sci. (U.S.A.) 90:913-917 (1993)); (Staub, J. M. and Maliga, P. EMBO J. 12:601-606 (1993), U.S. Pat. Nos. 5,451,513 and 5,545,818 all of which are herein incorporated by reference in their entirety).

[0178] Accordingly, it is contemplated that one may wish to adjust various aspects of the bombardment parameters in small scale studies to fully optimize the conditions. One may particularly wish to adjust physical parameters such as gap distance, flight distance, tissue distance, and helium pressure. One may also minimize the trauma reduction factors by modifying conditions which influence the physiological state of the recipient cells and which may therefore influence transformation and integration efficiencies. For example, the osmotic state, tissue hydration and the subculture stage or cell cycle of the recipient cells may be adjusted for optimum transformation. The execution of other routine adjustments will be known to those of skill in the art in light of the present disclosure.

[0179] Agrobacterium-mediated transfer is a widely applicable system for introducing genes into plant cells because the DNA can be introduced into whole plant tissues, thereby bypassing the need for regeneration of an intact plant from a protoplast. The use of Agrobacterium-mediated plant integrating vectors to introduce DNA into plant cells is well known in the art. See, for example the methods described (Fraley et al., Biotechnology 3:629-635 (1985); Rogers et al., Meth. In Enzymol, 153:253-277 (1987), both of which are herein incorporated by reference in their entirety. Further, the integration of the Ti-DNA is a relatively precise process resulting in few rearrangements. The region of DNA to be transferred is defined by the border sequences, and intervening DNA is usually inserted into the plant genome as described (Spielmann et al., Mol. Gen. Genet., 205:34 (1986), the entirety of which is herein incorporated by reference).

[0180] Modern Agrobacterium transformation vectors are capable of replication in E. coli as well as Agrobacterium, allowing for convenient manipulations as described (Klee et al., In: Plant DNA Infectious Agents, T. Hohn and J. Schell, eds., Springer-Verlag, New York, pp. 179-203 (1985), the entirety of which is herein incorporated by reference. Moreover, recent technological advances in vectors for Agrobacterium-mediated gene transfer have improved the arrangement of genes and restriction sites in the vectors to facilitate construction of vectors capable of expressing various polypeptide coding genes. The vectors described have convenient multi-linker regions flanked by a promoter and a polyadenylation site for direct expression of inserted polypeptide coding genes and are suitable for present purposes (Rogers et al., Meth. In Enzymol., 153:253-277 (1987), the entirety of which is herein incorporated by reference). In addition, Agrobacterium containing both armed and disarmed Ti genes can be used for the transformations. In those plant strains where Agrobacterium-mediated transformation is efficient, it is the method of choice because of the facile and defined nature of the gene transfer.

[0181] A transgenic plant formed using Agrobacterium transformation methods typically contains a single gene on one chromosome. Such transgenic plants can be referred to as being heterozygous for the added gene. More preferred is a transgenic plant that is homozygous for the added structural gene; i.e., a transgenic plant that contains two added genes, one gene at the same locus on each chromosome of a chromosome pair. A homozygous transgenic plant can be obtained by sexually mating (selfing) an independent segregant transgenic plant that contains a single added gene, germinating some of the seed produced and analyzing the resulting plants produced for the gene of interest.

[0182] It is also to be understood that two different transgenic plants can also be mated to produce offspring that contain two independently segregating added, exogenous genes. Selfing of appropriate progeny can produce plants that are homozygous for both added, exogenous genes that encode a polypeptide of interest. Back-crossing to a parental plant and out-crossing with a non-transgenic plant are also contemplated, as is vegetative propagation.

[0183] Transformation of plant protoplasts can be achieved using methods based on calcium phosphate precipitation, polyethylene glycol treatment, electroporation, and combinations of these treatments. See for example (Potrykus et al., Mol. Gen. Genet., 205:193-200 (1986); Lorz et al., Mol. Gen. Genet., 199:178, (1985); Fromm et al., Nature, 319:791, (1986); Uchimiya et al., Mol. Gen. Genet.:204:204, (1986); Callis et al., Genes and Development, 1183, (1987); Marcotte et al., Nature, 335:454, (1988), all of which the entirety is herein incorporated by reference).

[0184] Application of these systems to different plant strains depends upon the ability to regenerate that particular plant strain from protoplasts. Illustrative methods for the regeneration of cereals from protoplasts are described (Fujimura et al., Plant Tissue Culture Letters, 2:74, (1985); Toriyama et al., Theor Appl. Genet. 205:34. (1986); Yamada et al., Plant Cell Rep., 4:85, (1986); Abdullah et al., Biotechnology, 4:1087, (1986), all of which the entirety is herein incorporated by reference).

[0185] To transform plant strains that cannot be successfully regenerated from protoplasts, other ways to introduce DNA into intact cells or tissues can be utilized. For example, regeneration of cereals from immature embryos or explants can be effected as described (Vasil, Biotechnology, 6:397, (1988), the entirety of which is herein incorporated by reference). In addition, “particle gun” or high-velocity microprojectile technology can be utilized (Vasil et al., Bio/Technology 10:667, (1992), the entirety of which is herein incorporated by reference).

[0186] Using the latter technology, DNA is carried through the cell wall and into the cytoplasm on the surface of small metal particles as described (Klein et al., Nature, 328:70, (1987); Klein et al., Proc. Natl. Acad. Sci. (U.S.A.), 85:8502-8505, (1988); McCabe et al., Biotechnology, 6:923, (1988), all of which the entirety is herein incorporated by reference). The metal particles penetrate through several layers of cells and thus allow the transformation of cells within tissue explants.

[0187] Other methods of cell transformation can also be used and include but are not limited to introduction of DNA into plants by direct DNA transfer into pollen (Zhou et al., Methods in Enzymology, 101:433, (1983); Hess et al., Intern Rev. Cytol., 107:367, (1987); Luo et al., Plant Mol. Biol. Reporter, 6:165, (1988), all of which the entirety is herein incorporated by reference), by direct injection of DNA into reproductive organs of a plant (Pena et al., Nature, 325:274, (1987), the entirety of which is herein incorporated by reference), or by direct injection of DNA into the cells of immature embryos followed by the rehydration of dessicated embryos (Neuhaus et al., Theor. Appl. Genet., 75:30, (1987), the entirety of which is herein incorporated by reference).

[0188] The regeneration, development, and cultivation of plants from single plant protoplast transformants or from various transformed explants is well known in the art (Weissbach and Weissbach, In: Methods for Plant Molecular Biology, (Eds.), Academic Press, Inc., San Diego, Calif., (1988), the entirety of which is herein incorporated by reference). This regeneration and growth process typically includes the steps of selection of transformed cells, culturing those individualized cells through the usual stages of embryonic development through the rooted plantlet stage. Transgenic embryos and seeds are similarly regenerated. The resulting transgenic rooted shoots are thereafter planted in an appropriate plant growth medium such as soil.

[0189] The development or regeneration of plants containing the foreign, exogenous gene that encodes a protein of interest is well known in the art. Preferably, the regenerated plants are self-pollinated to provide homozygous transgenic plants, as discussed before. Otherwise, pollen obtained from the regenerated plants is crossed to seed-grown plants of agronomically important lines. Conversely, pollen from plants of these important lines is used to pollinate regenerated plants. A transgenic plant of the present invention containing a desired polypeptide is cultivated using methods well known to one skilled in the art.

[0190] There are a variety of methods for the regeneration of plants from plant tissue. The particular method of regeneration will depend on the starting plant tissue and the particular plant species to be regenerated.

[0191] Methods for transforming dicots, primarily by use of Agrobacterium tumefaciens, and obtaining transgenic plants have been published for cotton (U.S. Pat. No. 5,004,863, U.S. Pat. No. 5,159,135, U.S. Pat. No. 5,518,908, all of which the entirety is herein incorporated by reference); soybean (U.S. Pat. No. 5,569,834, U.S. Pat. No. 5,416,011, McCabe et al., Biotechnology 6:923, (1988), Christou et al., Plant Physiol., 87:671-674 (1988), all of which the entirety is herein incorporated by reference); Brassica (U.S. Pat. No. 5,463,174, the entirety of which is herein incorporated by reference); peanut (Cheng et al., Plant Cell Rep. 15:653-657 (1996), McKently et al., Plant Cell Rep. 14:699-703 (1995), all of which the entirety is herein incorporated by reference); papaya (Yang et al., (1996), the entirety of which is herein incorporated by reference); pea (Grant et al., Plant Cell Rep. 15:254-258, (1995), the entirety of which is herein incorporated by reference).

[0192] Transformation of monocotyledons using electroporation, particle bombardment, and Agrobacterium have also been reported. Transformation and plant regeneration have been achieved in asparagus (Bytebier et al., Proc. Natl. Acad. Sci. (U.S.A.) 84:5345, (1987), the entirety of which is herein incorporated by reference); barley (Wan and Lemaux, Plant Physiol 104:37, (1994), the entirety of which is herein incorporated by reference); maize (Rhodes et al, Science 240:204, (1988), Gordon-Kamm et al., Plant Cell, 2:603, (1990), Fromm et al., Bio/Technology 8:833, (1990), Koziel et al., Bio/Technology 11:194, (1993), Armstrong et al., Crop Science 35:550-557, (1995), all of which the entirety is herein incorporated by reference); oat (Somers et al., Bio/Technology, 10:1589, (1992), the entirety of which is herein incorporated by reference); orchardgrass (Horn et al., Plant Cell Rep. 7:469, (1988), the entirety of which is herein incorporated by reference); rice (Toriyama et al., Theor Appl. Genet. 205:34, (1986); Park et al., Plant Mol. Biol., 32:1135-1148, (1996); Abedinia et al., Aust. J. Plant Physiol. 24:133-141, (1997); Zhang and Wu, Theor. Appl. Genet. 76:835, (1988); Zhang et al., Plant Cell Rep. 7:379, (1988); Battraw and Hall, Plant Sci. 86:191-202, (1992); Christou et al., Bio/Technology 9:957, (1991), all of which the entirety is herein incorporated by reference); sugarcane (Bower and Birch, Plant J. 2:409, (1992), the entirety of which is herein incorporated by reference); tall fescue (Wang et al., Bio/Technology 10:691, (1992), the entirety of which is herein incorporated by reference), and wheat (Vasil et al., Bio/Technology 10:667, (1992), the entirety of which is herein incorporated by reference; U.S. Pat. No. 5,631,152, the entirety of which is herein incorporated by reference.

[0193] Assays for gene expression based on the transient expression of cloned nucleic acid constructs have been developed by introducing the nucleic acid molecules into plant cells by polyethylene glycol treatment, electroporation, or particle bombardment (Marcotte, et al., Nature, 335:454-457 (1988), the entirety of which is herein incorporated by reference; Marcotte, et al., Plant Cell, 1:523-532 (1989), the entirety of which is herein incorporated by reference; McCarty, et al., Cell 66:895-905 (1991), the entirety of which is herein incorporated by reference; Hattori, et al., Genes Dev. 6:609-618 (1992), the entirety of which is herein incorporated by reference; Goff, et al., EMBO J. 9:2517-2522 (1990), the entirety of which is herein incorporated by reference). Transient expression systems may be used to functionally dissect gene constructs (See generally, Mailga et al., Methods in Plant Molecular Biology, Cold Spring Harbor Press (1995)).

[0194] Any of the nucleic acid molecules of the present invention may be introduced into a plant cell in a permanent or transient manner in combination with other genetic elements such as vectors, promoters enhancers etc. Further any of the nucleic acid molecules of the present invention may be introduced into a plant cell in a manner that allows for over expression of the protein or fragment thereof encoded by the nucleic acid molecule.

[0195] Nucleic acid molecules of the present invention may be used in cosuppression. Cosuppression is the reduction in expression levels, usually at the level of RNA, of a particular endogenous gene or gene family by the expression of a homologous sense construct that is capable of transcribing mRNA of the same strandedness as the transcript of the endogenous gene (Napoli et al., Plant Cell 2:279-289 (1990), the entirety of which is herein incorporated by reference; van der Krol et al., Plant Cell 2:291-299 (1990), the entirety of which is herein incorporated by reference). Cosuppression may result from stable transformation with a single copy nucleic acid molecule that is homologous to a nucleic acid sequence found with the cell (Prolls and Meyer, Plant J. 2:465-475 (1992), the entirety of which is herein incorporated by reference) or with multiple copies of a nucleic acid molecule that is homologous to a nucleic acid sequence found with the cell (Mittlesten et al., Mol. Gen. Genet. 244: 325-330 (1994), the entirety of which is herein incorporated by reference). Genes, even though different, linked to homologous promoters may result in the cosuppression of the linked genes (Vaucheret, C. R. Acad. Sci. III 316: 1471-1483 (1993), the entirety of which is herein incorporated by reference).

[0196] This technique has, for example been applied to generate white flowers from red petunia and tomatoes that do not ripen on the vine. Up to 50% of petunia transformants that contained a sense copy of the chalcone synthase (CHS) gene produced white flowers or floral sectors; this was as a result of the post-transcriptional loss of mRNA encoding CHS (Flavell, Proc. Natl. Acad. Sci. (U.S.A.) 91:3490-3496 (1994)), the entirety of which is herein incorporated by reference). Cosuppression may require the coordinate transcription of the transgene and the endogenous gene, and can be reset by a developmental control mechanism (Jorgensen, Trends Biotechnol, 8:340344 (1990), the entirety of which is herein incorporated by reference; Meins and Kunz, In: Gene Inactivation and Homologous Recombination in Plants (Paszkowski, J., ed.), pp. 335-348. Kluwer Academic, Netherlands (1994), the entirety of which is herein incorporated by reference).

[0197] It is understood that one or more of the nucleic acids of the present invention comprising SEQ ID NO:1 or complement thereof through SEQ ID NO:36935 or complement thereof, may be introduced into a plant cell and transcribed using an appropriate promoter with such transcription resulting in the co-suppression of an endogenous protein.

[0198] Nucleic acid molecules of the present invention may be used to reduce gene function. Antisense approaches are a way of preventing or reducing gene function by targeting the genetic material (Mol et al., FEBS Lett. 268:427-430 (1990), the entirety of which is herein incorporated by reference). The objective of the antisense approach is to use a sequence complementary to the target gene to block its expression and create a mutant cell line or organism in which the level of a single chosen protein is selectively reduced or abolished. Antisense techniques have several advantages over other ‘reverse genetic’ approaches. The site of inactivation and its developmental effect can be manipulated by the choice of promoter for antisense genes or by the timing of external application or microinjection. Antisense can manipulate its specificity by selecting either unique regions of the target gene or regions where it shares homology to other related genes (Hiatt et al., In Genetic Engineering, Setlow (ed.), Vol. 11, New York: Plenum 49-63 (1989), the entirety of which is herein incorporated by reference).

[0199] The principle of regulation by antisense RNA is that RNA that is complementary to the target mRNA is introduced into cells, resulting in specific RNA:RNA duplexes being formed by base pairing between the antisense substrate and the target mRNA (Green et al., Annu. Rev. Biochem. 55:569-597 (1986), the entirety of which is herein incorporated by reference). Under one embodiment, the process involves the introduction and expression of an antisense gene sequence. Such a sequence is one in which part or all of the normal gene sequences are placed under a promoter in inverted orientation so that the ‘wrong’ or complementary strand is transcribed into a noncoding antisense RNA that hybridizes with the target mRNA and interferes with its expression (Takayama and Inouye, Crit. Rev. Biochem. Mol. Biol. 25:155-184 (1990), the entirety of which is herein incorporated by reference). An antisense vector is constructed by standard procedures and introduced into cells by transformation, transfection, electroporation, microinjection, or by infection, etc. The type of transformation and choice of vector will determine whether expression is transient or stable. The promoter used for the antisense gene may influence the level, timing, tissue, specificity, or inducibility of the antisense inhibition.

[0200] It is understood that protein synthesis activity in a plant cell may be reduced or depressed by growing a transformed plant cell containing a nucleic acid molecule of the present invention.

[0201] Antibodies have been expressed in plants (Hiatt et al., Nature 342:76-78 (1989), the entirety of which is herein incorporated by reference; Conrad and Fielder, Plant Mol. Biol. 26:1023-1030 (1994), the entirety of which is herein incorporated by reference). Cytoplasmic expression of a scFv (single-chain Fv antibodies) has been reported to delay infection by artichoke mottled crinkle virus. Transgenic plants that express antibodies directed against endogenous proteins may exhibit a physiological effect (Philips et al., EMBO J. 16:4489-4496 (1997), the entirety of which is herein incorporated by reference; Marion-Poll, Trends in Plant Science 2:447-448 (1997), the entirety of which is herein incorporated by reference). For example, expressed anti-abscisic antibodies reportedly result in a general perturbation of seed development (Philips et al., EMBO J. 16:4489-4496 (1997)).

[0202] Nucleic acid molecules of the present invention may be used as antibodies. Antibodies that are catalytic may also be expressed in plants (abzymes). The principle behind abzymes is that since antibodies may be raised against many molecules, this recognition ability can be directed toward generating antibodies that bind transition states to force a chemical reaction forward (Persidas, Nature Biotechnology 15:1313-1315 (1997), the entirety of which is herein incorporated by reference; Baca et al., Ann. Rev. Biophys. Biomol. Struct. 26:461-493 (1997), the entirety of which is herein incorporated by reference). The catalytic abilities of abzymes may be enhanced by site directed mutagenesis. Examples of abzymes are, for example, set forth in U.S. Pat. No. 5,658,753; U.S. Pat. No. 5,632,990; U.S. Pat. No. 5,631,137; U.S. Pat. No. 5,602,015; U.S. Pat. No. 5,559,538; U.S. Pat. No. 5,576,174; U.S. Pat. No. 5,500,358; U.S. Pat. No. 5,318,897; U.S. Pat. No. 5,298,409; U.S. Pat. No. 5,258,289 and U.S. Pat. No. 5,194,585, all of which are herein incorporated in their entirety.

[0203] It is understood that any of the antibodies of the present invention may be expressed in plants and that such expression can result in a physiological effect. It is also understood that any of the expressed antibodies may be catalytic.

[0204] In addition to the above discussed procedures, practitioners are familiar with the standard resource materials which describe specific conditions and procedures for the construction, manipulation and isolation of macromolecules (e.g., DNA molecules, plasmids, etc.), generation of recombinant organisms and the screening and isolating of clones, (see for example, Sambrook et al., Molecular Cloning: A Laboratory Manual, Cold Spring Harbor Press (1989); Mailga et al., Methods in Plant Molecular Biology, Cold Spring Harbor Press (1995), the entirety of which is herein incorporated by reference; Birren et al., Genome Analysis: Analyzing DNA, 1, Cold Spring Harbor, N.Y., the entirety of which is herein incorporated by reference).

[0205] Computer Media

[0206] One or more of the nucleotide sequence provided in SEQ ID NO: 1 through SEQ ID NO: 36935 or complements thereof or fragments of either can be “provided” in a variety of media to facilitate use. Such a medium can also provide a subset thereof in a form that allows a skilled artisan to examine the sequences be recorded on computer readable media. As used herein, “computer readable media” refers to any medium that can be read and accessed directly by a computer. Such media include, but are not limited to: magnetic storage media, such as floppy discs, hard disc, storage medium, and magnetic tape: optical storage media such as CD-ROM; electrical storage media such as RAM and ROM; and hybrids of these categories such as magnetic/optical storage media. A skilled artisan can readily appreciate how any of the presently known computer readable mediums can be used to create a manufacture comprising computer readable medium having recorded thereon a nucleotide sequence of the present invention.

[0207] As used herein, “recorded” refers to a process for storing information on computer readable medium. A skilled artisan can readily adopt any of the presently known methods for recording information on computer readable medium to generate media comprising the nucleotide sequence information of the present invention. A variety of data storage structures are available to a skilled artisan for creating a computer readable medium having recorded thereon a nucleotide sequence of the present invention. The choice of the data storage structure will generally be based on the means chosen to access the stored information. In addition, a variety of data processor programs and formats can be used to store the nucleotide sequence information of the present invention on computer readable medium. The sequence information can be represented in a word processing text file, formatted in commercially-available software such as WordPerfect and Microsoft Word, or represented in the form of an ASCII file, stored in a database application, such as DB2, Sybase, Oracle, or the like. A skilled artisan can readily adapt any number of data processor structuring formats (e.g., text file or database) in order to obtain computer readable medium having recorded thereon the nucleotide sequence information of the present invention.

[0208] By providing one or more of nucleotide sequences of the present invention, a skilled artisan can routinely access the sequence information for a variety of purposes. Computer software is publicly available which allows a skilled artisan to access sequence information provided in a computer readable medium. The examples which follow demonstrate how software which implements the BLAST (Altschul et al., J. Mol. Biol. 215:403-410 (1990)) and BLAZE (Brutlag et al., Comp. Chem. 17:203-207 (1993), the entirety of which is herein incorporated by reference) search algorithms on a Sybase system can be used to identify open reading frames (ORFs) within the genome that contain homology to ORFs or proteins from other organisms. Such ORFs are protein-encoding fragments within the sequences of the present invention and are useful in producing commercially important proteins such as enzymes used in amino acid biosynthesis, metabolism, transcription, translation, RNA processing, nucleic acid and a protein degradation, protein modification, and DNA replication, restriction, modification, recombination, and repair.

[0209] The present invention further provides systems, particularly computer-based systems, which contain the sequence information described herein. Such systems are designed to identify commercially important fragments of the nucleic acid molecule of the present invention. As used herein, “a computer-based system” refers to the hardware means, software means, and data storage means used to analyze the nucleotide sequence information of the present invention. The minimum hardware means of the computer-based systems of the present invention comprises a central processing unit (CPU), input means, output means, and data storage means. A skilled artisan can readily appreciate that any one of the currently available computer-based system are suitable for use in the present invention.

[0210] As indicated above, the computer-based systems of the present invention comprise a data storage means having stored therein a nucleotide sequence of the present invention and the necessary hardware means and software means for supporting and implementing a search means. As used herein, “data storage means” refers to memory that can store nucleotide sequence information of the present invention, or a memory access means which can access manufactures having recorded thereon the nucleotide sequence information of the present invention. As used herein, “search means” refers to one or more programs which are implemented on the computer-based system to compare a target sequence or target structural motif with the sequence information stored within the data storage means. Search means are used to identify fragments or regions of the sequence of the present invention that match a particular target sequence or target motif. A variety of known algorithms are disclosed publicly and a variety of commercially available software for conducting search means are available and can be used in the computer-based systems of the present invention. Examples of such software include, but are not limited to, MacPattern (EMBL), BLASTIN and BLASTIX (NCBIA). One of the available algorithms or implementing software packages for conducting homology searches can be adapted for use in the present computer-based systems.

[0211] The most preferred sequence length of a target sequence is from about 10 to 100 amino acids or from about 30 to 300 nucleotide residues. However, it is well recognized that during searches for commercially important fragments of the nucleic acid molecules of the present invention, such as sequence fragments involved in gene expression and protein processing, may be of shorter length.

[0212] As used herein, “a target structural motif,” or “target motif,” refers to any rationally selected sequence or combination of sequences in which the sequence(s) are chosen based on a three-dimensional configuration which is formed upon the folding of the target motif. There are a variety of target motifs known in the art. Protein target motifs include, but are not limited to, enzymatic active sites and signal sequences. Nucleic acid target motifs include, but are not limited to, promoter sequences, cis elements, hairpin structures and inducible expression elements (protein binding sequences).

[0213] Thus, the present invention further provides an input means for receiving a target sequence, a data storage means for storing the target sequences of the present invention sequence identified using a search means as described above, and an output means for outputting the identified homologous sequences. A variety of structural formats for the input and output means can be used to input and output information in the computer-based systems of the present invention. A preferred format for an output means ranks fragments of the sequence of the present invention by varying degrees of homology to the target sequence or target motif. Such presentation provides a skilled artisan with a ranking of sequences which contain various amounts of the target sequence or target motif and identifies the degree of homology contained in the identified fragment.

[0214] A variety of comparing means can be used to compare a target sequence or target motif with the data storage means to identify sequence fragments sequence of the present invention. For example, implementing software which implement the BLAST and BLAZE algorithms (Altschul et al., J. Mol. Biol. 215:403-410 (1990)) can be used to identify open frames within the nucleic acid molecules of the present invention. A skilled artisan can readily recognize that any one of the publicly available homology search programs can be used as the search means for the computer-based systems of the present invention.

[0215] Having now generally described the invention, the same will be more readily understood through reference to the following examples which are provided by way of illustration, and are not intended to be limiting of the present invention, unless specified.

### EXAMPLE 1

[0216] BACs are stable, non-chimeric cloning systems having genomic fragment inserts (100-300 kb) and their DNA can be prepared for most types of experiments including DNA sequencing. BAC vector, pBeloBAC11, is derived from the endogenous E. coli F-factor plasmid, which contains genes for strict copy number control and unidirectional origin of DNA replication. Additionally, pBeloBAC11 has three unique restriction enzyme sites (Hind III, Bam HI and Sph I) located within the LacZ gene which can be used as cloning sites for megabase-size plant DNA. Indigo, another BAC vector contains Hind III and Eco RI cloning sites. This vector also contains a random mutation in the LacZ gene that allows for darker blue colonies.

[0217] As an alternative, the P1-derived artificial chromosome (PAC) can be used as a large DNA fragment cloning vector (Ioannou, et al., Nature Genet. 6:84-89 (1994), the entirety of which is herein incorporated by reference; Suzuki, et al., Gene 199:133-137 (1997), the entirety of which is herein incorporated by reference). The PAC vector has most of the features of the BAC system, but also contains some of the elements of the bacteriophage P1 cloning system.

[0218] BAC libraries are generated by ligating size-selected restriction digested DNA with pBeloBAC11 followed by electroporation into E. coli. BAC library construction and characterization is extremely efficient when compared to YAC (yeast artificial chromosome) library construction and analysis, particularly because of the chimerism associated with YACs and difficulties associated with extracting YAC DNA.

[0219] There are two general methods for preparing megabase-size DNA from plants. The protoplast method yields megabase-size DNA of high quality with minimal breakage. The process involves preparing young leaves which are manually feathered with a razor-blade before being incubated for four to five hours with cell-wall-degrading enzymes. The second method developed by Zhange et al., Plant J. 7:175-184 (1995) the entirety of which is herein incorporated by reference is a universal nuclei method that works well for several divergent plant taxa. Fresh or frozen tissue is homogenized with a blender or mortar and pestle. Nuclei are then isolated and embedded. DNA is prepared by the nucleic method often more concentrated and is reported to contain lower amounts of chloroplast DNA than the protoplast method.

[0220] Once protoplasts or nuclei are produced, they are embedded in an agarose matrix as plugs or microbeads. The agarose provides a support matrix to prevent shearing of the DNA while allowing enzymes and buffers to diffuse into the DNA. The DNA is purified and manipulated in the agarose and is stable for more than one year at 4° C.

[0221] Once high molecular weight DNA has been prepared, it is fragmented to the desired size range. In general, DNA fragmentation utilizes two general approaches, 1) physical shearing and 2) partial digestion with a restriction enzyme that cuts relatively frequently within the genome. Since physical shearing is not dependent upon the frequency and distribution of particular restriction enzymes sites, this method should yield the most random distribution of DNA fragments. However, the ends of the sheared DNA fragments must be repaired and cloned directly or restriction enzyme sites added by the addition of synthetic linkers. Because of the subsequent steps required to clone DNA fragmented by shearing, most protocols fragment DNA by partial restriction enzyme digestion. The advantage of partial restriction enzyme digestion is that no further enzymatic modification of the ends of the restriction fragments are necessary. Four common techniques that can be used to achieve reproducible partial digestion of megabase-size DNA are 1) varying the concentration of the restriction enzyme, 2) varying the time of incubation with the restriction enzyme 3) varying the concentration of an enzyme cofactor (e.g., Mg²⁺) and 4) varying the ratio of endonuclease to methylase.

[0222] There are three cloning sites in pBeloBAC11, but only Hind III and Bam HI produce 5′ overhangs for easy vector dephosphorylation. These two restriction enzymes are primarily used to construct BAC libraries. The optimal partial digestion conditions for megabase-size DNA are determined by wide and narrow window digestions. To optimize the optimum amount of Hind III, 1, 2, 3, 10, and 5-units of enzyme are each added to 50 ml aliquots of microbeads and incubated at 37° C. for 20 minutes

[0223] After partial digestion of megabase-size DNA, the DNA is run on a pulsed-field gel, and DNA in a size range of 100-500 kb is excised from the gel. This DNA is ligated to the BAC vector or subjected to a second size selection on a pulsed field gel under different running conditions. Studies have previously reported that two rounds of size selection can eliminate small DNA fragments co-migrating with the selected range in the first pulse-field fractionation. Such a strategy results in an increase in insert sizes and a more uniform insert size distribution. A practical approach to performing size selections is to first test for the number of clones/microliter of ligation and insert size from the first size selected material. If the numbers are good (500 to 2000 white colony/microliter of ligation) and the size range is also, good (50 to 300 kb) then a second size selection is practical. When performing a second size selection one expects a 80 to 95% decrease in the number of recombinant clones per transformation.

[0224] Twenty to two hundred nanograms of the size-selected DNA is ligated to dephosphorylated BAC vector (molar ratio of 10 to 1 in BAC vector excess). Most BAC libraries use a molar ratio of 5 to 15:1 (size selected DNA:BAC vector).

[0225] Transformation is carried out by electroporation and the transformation efficiency for BACs is about 40 to 1,500 transformants from one microliter of ligation product or 20 to 1000 transformants/ng DNA.

[0226] Several tests can be carried out to determine the quality of a BAC library. Three basic tests to evaluate the quality include: the genome coverage of a BAC library-average insert size, average number of clones hybridizing with single copy probes and chloroplast DNA content.

[0227] The determination of the average insert size of the library is assessed in two ways. First, during library construction every ligation is tested to determine the average insert size by assaying 20-50 BAC clones per ligation. DNA is isolated from recombinant clones using a standard mini preparation protocol, digested with Not I to free the insert from the BAC vector and then sized using pulsed field gel electrophoresis (Maule, Molecular Biotechnology 9:107-126 (1998), the entirety of which is herein incorporated by reference).

[0228] To determine the genome coverage of the library, it is screened with single copy RFLP markers distributed randomly across the genome by hybridization. Microtiter plates containing BAC clones are spotted onto Hybond membranes. Bacteria from 48 or 72 plates are spotted twice onto one membrane resulting in 18,000 to 27,648 unique clones on each membrane in either a 4×4 or 5×5 orientation. Since each clone is present twice, false positives are easily eliminated and true positives are easily recognized and identified.

[0229] Finally, the chloroplast DNA content in the BAC library is estimated by hybridizing three chloroplast genes spaced evenly across the chloroplast genome to the library on high density hybridization filters.

[0230] There are strategies for isolating rare sequences within the genome. For example, higher plant genomes can range in size from 100 Mb/1C (Arabidopsis) to 15,966 Mb/C (Triticum aestivum), (Arumuganathan and Earle, Plant Mol Bio Rep. 9:208-219 (1991), the entirety of which is herein incorporated by reference). The number of clones required to achieve a given probability that any DNA sequence will be represented in a genomic library is N=(ln(1−P))/(ln(1−L/G)) where N is the number of clones required, P is the probability desired to get the target sequence, L is the length of the average clone insert in base pairs and G is the haploid genome length in base pairs (Clarke et al., Cell 9:91-100 (1976) the entirety of which is herein incorporated by reference).

[0231] The soybean BAC library of the present invention is constructed in the pBeloBAC11 or similar vector. Inserts are generated by partial Eco RI or other enzymatic digestion of DNA from the cultivar A3244. The library provides approximately twenty fold coverage of the soybean genome.

### EXAMPLE 2

[0232] Two basic methods can be used for DNA sequencing, the chain termination method of Sanger et al., Proc. Natl. Acad. Sci. (U.S.A.) 74:5463-5467 (1977), the entirety of which is herein incorporated by reference and the chemical degradation method of Maxam and Gilbert, Proc. Natl. Acad. Sci. (U.S.A.) 74:560-564 (1977), the entirety of which is herein incorporated by reference. Automation and advances in technology such as the replacement of radioisotopes with fluorescence-based sequencing have reduced the effort required to sequence DNA (Craxton, Methods, 2:20-26 (1991), the entirety of which is herein incorporated by reference; Ju et al., Proc. Natl. Acad. Sci. (U.S.A.) 92:4347-4351 (1995), the entirety of which is herein incorporated by reference; Tabor and Richardson, Proc. Natl. Acad. Sci. (U.S.A.) 92:6339-6343 (1995), the entirety of which is herein incorporated by reference). Automated sequencers are available from, for example, Pharmacia Biotech, Inc., Piscataway, N.J. (Pharmacia ALF), LI-COR, Inc., Lincoln, Nebr. (LI-COR 4,000) and Millipore, Bedford, Mass. (Millipore BaseStation).

[0233] In addition, advances in capillary gel electrophoresis have also reduced the effort required to sequence DNA and such advances provide a rapid high resolution approach for sequencing DNA samples (Swerdlow and Gesteland, Nucleic Acids Res. 18:1415-1419 (1990); Smith, Nature 349:812-813 (1991); Luckey et al., Methods Enzymol. 218:154-172 (1993); Lu et al., J. Chromatog. A. 680:497-501 (1994); Carson et al., Anal. Chem. 65:3219-3226 (1993); Huang et al., Anal. Chem. 64:2149-2154 (1992); Kheterpal et al., Electrophoresis 17.1852-1859 (1996); Quesada and Zhang, Electrophoresis 17:1841-1851 (1996); Baba, Yakugaku Zasshi 117:265-281 (1997), all of which are herein incorporated by reference in their entirety).

[0234] A number of sequencing techniques are known in the art, including fluorescence-based sequencing methodologies. These methods have the detection, automation and instrumentation capability necessary for the analysis of large volumes of sequence data. Currently, the 377 DNA Sequencer (Perkin-Elmer Corp., Applied Biosystems Div., Foster City, Calif.) allows the most rapid electrophoresis and data collection. With these types of automated systems, fluorescent dye-labeled sequence reaction products are detected and data entered directly into the computer, producing a chromatogram that is subsequently viewed, stored, and analyzed using the corresponding software programs. These methods are known to those of skill in the art and have been described and reviewed (Birren et al., Genome Analysis: Analyzing DNA, 1, Cold Spring Harbor, N.Y., the entirety of which is herein incorporated by reference).

### EXAMPLE 3

[0235] To identify sequences containing microsatellites or simple sequence repeats (SSR), a SSR repeat pattern library is generated by using a Perl program, SSR_generator.pl, developed at Monsanto. The library contains repeat patterns of di-, tri-, tetra-, penta- and hexa-nucleotide repeats, a total of 5421 patterns. The length of di-, tri-, tetra-, penta- and hexa-nucleotide repeat units were 18, 12, 9, 5 and 4, respectively. These repeat patterns are used to search against the BAC-end sequence databases by the BLASTN program. If the search is performed on both strands, complementary and replicated patterns of an SSR library are removed from the library to avoid redundancy of SSRs. For di-nucleotide repeats, there are four unique patterns, i.e. (CA)n, (CT)n, (CG)n and (AT)n. Product scores are used as a criteria to extract potential SSRs from BAC-ends. If a product score is equal or greater than 90, the sequences are further examined.

[0236] The SSR-containing sequences identified from BAC ends are searched against each other as well as the existing SSR collections by using BLASTN, and clustering of the sequences is performed by using CLUSTER2, a tool developed at Monsanto. The minimal match-length is set to 100 base pairs. Any redundant sequences are removed and the unique ones are then passed through a visible inspection to further remove those with not enough flanking sequences for primer design and those with substantial ambiguous nucleotides.

[0237] Primers are designed from good quality unique sequences. A public available primer design software program, PRIMER 3, (Cambridge, Mass.) is used. PRIMER 3 can be accessed though the internet at (on the Worldwide web at genome.wi.mit.edu/cgi-bin/primer/primer3.cgi). Default parameters are used except those for product size and primer size are changed. Product Size is Min: 80, Opt: 100, Max: 120, while Primer Size is Min: 18, Opt: 22 and Max: 27. Oligos are synthesized by Genosis Biotechnologies, Inc (Houston, Tex.).

[0238] The above protocols are used to develop primers from Sequence id GM_M02_A2_B07_MR_MR containing the following nucleotide composition:

AGGCGTTTTNCCTTGATACCTTCGNAGGTCCANCCTTTTNCTTGCTGTAT
CGACTCATTAACACCAAGCTCGGTGAGCACTCTGAAGATTATGACAACTT
TCGNTGATCTTTTTGTCATCGATATTNTAGNAGAGACCAATCTTTCTTCT
TCAAATGTCGCTCATGATATTTATTGTAATTATCTTCAATGTATGTCCAA
AAAGTTAACCTTTTTTGGACCCCCACAATAGAAATCTTTGAAATATTTAG
CCATGTGTTGGCAAGCCATTCATATTTCTTTGCGGAGAAACATGATCTAT
TGTGTCTTTCGGATGCTTCTTCTATGTcttcttcttcttcttcttcttct
tcttcttcttCATTGACCACAATATTATCCAACTCAACTTAGGTGCAAAA
TGGTGGAATTTGAGACTTTGACGCANAGTCAGATGGTGCGTCATGCTCTT
TCATTACATTGGACATCATNTACTACCCTTTGAAGACCCTCGATCCATGG
AAGGGTTAATTGGTG

[0239] This sequence contains CTT dinucleotide repeats with a repeat unit of 11. Using the Primer 3 program, two primers are selected: SER157F GTGTCTTTCGGATGCTTCTTCT and SER157R CACCATTTTGCACCTAAGTTGA. When these two primers are used to amplify genomic DNAs from eight different varieties, Minsoy, Noir, PIC, HS-1, A3244, H6686, A0868 and H5088, three alleles are detected. Sizes of these alleles ranged from 80 to 110 bp The size variation in the PCR products result from repeat numbers in different varieties.

PCR Reaction Conditions

[0240] Genomic DNA is isolated from young leaves of Glycine max or Glycine soja plants. Two leaf discs are collected (approximately 40 mg) from a healthy leaf and stored on wet ice or at 4° C. Tissue samples are then freeze-dried and stored at −20° C. or −80° C. The frozen samples are kept as dry as possible and sealed from contact with the atmosphere. The freeze-dried samples from −20° C. or −80° C., are allowed to warm up to room temperature prior to unsealing or opening. One leaflet (or 2 leaf discs) is inserted into an 1.5 ml Eppendorf tube, placed on dry ice, and crushed with a wooden dowel. Approximately 200 μl of microprep buffer (25 ml extraction buffer (350 mM sorbitol, 100 mM Tris-base, 5 mM EDTA-Na₂), 25 ml nuclei lysis buffer (1M Tris/HCl, 0.5 M EDTA, 5 M NaCl, 2% CTAB), 10 ml 5% sarkosyl, 0.1 g Na bisulfite) is added to each sample. The sample is then homogenized. An additional 55011 of microprep buffer is added, vortexed for about 30-60 seconds, and incubated at 65° C. for about 60 minutes. About 700 μl chloroform/isoamyl (24:1) is added, mixed well for about 10-30 seconds. Centrifugation of the tubes is performed at approximately 10,000 rpm for 5 minutes in a microcentrifuge. The aqueous phase is transferred into a new tube and RNA is removed from the extract by the addition of 30 μl of RNase (10 mg/ml) to the aqueous phase and incubated for 1 hour at room temperature. Approximately 500 μl ice-cold isopropanol is added to the aqueous extract, and the tubes inverted until the DNA precipitated. The precipitated solution is kept at 4° C. for about 1 hour or overnight. Centrifugation of the tubes is performed at approximately 10,000 rpm for 5 minutes in a microcentrifuge. The supernatant is discarded and the pellet washed 1-3 times with 200 μl 70% ethanol. The ethanol is removed using a micropipette and pellet dried at 37° C. for 10 minutes. The DNA is dissolved in 50 μl TE (10 mM Tris-HCl pH8.0, 0.1 mM EDTA), then kept overnight at 4° C. Centrifugation of the tubes is performed at approximately 10,000 rpm for 5 minutes and then the supernatant is transferred into new tubes. Using this method, approximately 2 μg of DNA per mg of fresh leaf tissue is extracted.

[0241] DNA concentration is measured by a Spectrometry (Molecular Devices, Sunnyvale, Calif.) and adjusted to proper concentration for use as template. The total volume for PCR reaction is 20 ul. The reaction mixture contains: Template DNA at a concentration of 15 ng, 0.15 uM of primer, 0.03 unit of Taq DNA polymerase (Perkin Elmer), 50 uM of dNTP, the Reaction buffer contains, 10 mM Tris.HCl pH8.5, 1.5 mM MgCl2, 50 mM KCl and water is added to a total volume of 20 ul.

[0242] The PCR is performed on a Perkin Elmer DNA Thermal Cycler 9700 using the following cycle profile: hold at 94° C. for 3 min, 32 cycles of 94° C. for 25 second, 47° C. for 25 second and 72° C. for 25 second, and 72° C. for 3 min of final extension.

[0243] An acrylamide gel is prepared using 56.5 ml water, 3.5 ml 10× TAE buffer, 10.5 ml 40 acrylamide stock solution, 50 μl TEMED, 0.06 g ammonium persulfate. To each PCR, sample 20 μl of formamide loading dye is added to each sample and the samples are denatured at 90° C. for 3 minutes with a 4° C. hold in a thermocycler. 1.5 μl of each sample is loaded onto the gel. Gels are run at constant wattage to give a constant heat development during electrophoresis at 40 to 50 Volt/cm of the gel length. Gels should be run at approximately 50° C. during electrophoresis. Electrophoresis is stopped when the Bromophenol blue dye is at the bottom of the gel. After electrophoresis, the gel is stained in 1×SYBR solution for 15 to 20 minutes with vigorous shaking. A Gel image is recorded using an Alpha-InnoTech imager.

### EXAMPLE 4

[0244] In order to create a file containing complex repeats, the GCG (Madison, Wis.) REPEAT program is used to determine initial internal repeats. Stringency is defined as 19 matched bases out of every contiguous 20 bases in the repeated diagonals part of the REPEAT program algorithm. After the REPEAT program is run on the STCs, a REPEAT output filed is processed with the UNIX utilities grep, sort, uniq and sed to produce a GCG pattern file. The GCG pattern file is broken into size groups: <20, 20-39, 40-59, 60-79, 80-89, 100-119, 120-139, 140-159, 160-179, 180-199, 200-219, and >220. Each pattern group is compared against the entire STC library or subset thereof using the GCG FINDPATTERNS program. Sequences of size 1-19 are allowed no mismatches. The 20-39 group are allowed one mismatch. A pattern of size n is allowed floor (n/20) mismatches. Patterns that occurred in at least 100 STCs are selected in this step. The results of the FINDPATTERNS program is post-processed with the UNIX utilities grep, sort and uniq and with the GCG REFORMAT program to produce GCG sequence files. Each sequence file is derived from a selected pattern and placed in a subdirectory that corresponds to its size group. GELSTART, GELENTER, GELMERGE and GELASSEMBLE are used to coalesce similar sequences of each size group. Patterns are 90% similar before they are aligned and the patterns overlap by at least two thirds of the modal length in their length group. The GELSTART program creates a subdirectory which contains the individual and the coalesced consensus sequences. The consensus sequences are placed into a single directory and a FASTA style sequence library is constructed from it. The REPEAT-MASKER program is used to mask the original STCs. The unmasked sequences that remain afterward are concatenated into 100 KB pseudo-sequences. The pseudo-sequences are fed back into this algorithm and the new repeat patterns that result are added to the repeat library. The algorithm is iterated 3 times.

[0245] The repeat library is compared to the STCs using NCBI BLASTN version 2.0. HSPs are reported if they satisfied the criteria of:

[0246] “observed fractional match”>=“allowed fractional match”

[0247] where “observed fractional match” is defined as:

[0248] “fraction of HSP similarity”×“fraction of query sequence in HSP”

[0249] and “allowed fractional match” is defined as:

[0250] (“repeat length”−“floor (repeat length/20)”)/“repeat length”

[0251] Alternatively, the repeat library is compared to the STCs by an algorithm that is written in the C programming language and is compiled with optimization. Using a repeat library patterns file containing 3,302 complex repeat sequences from Glycine max, 306,271 Glycine max STC sequences are searched. 1,599,791 repeat coordinates are identified in these sequences.

[0252] STC and repeat library DNA sequences are represented by the characters A, C, G, and T. Ambiguous sequence characters allow for combinations of these characters, as defined by the IUPAC-IUB (the Wisconsin Package version 10.0, Genetics Computer Group, Madison, Wis.). For example, A or T is represented by W, G or C by S, and A or C or G or T by N. DNA sequence characters are represented as 4 binary digits (bits), where 0001 represents A, 0010 represents C, 0100 represents G, and 1000 represents T. Using standard Boolean logic, A or T (W) is equivalent to applying the logical OR operator to 0001 and 1000, the result being 1001. The table below shows all standard symbols and their computer representation for this method.

| IUPAC-IUB | | Computer |
|---|---|---|
| Symbol | Meaning | Representation |
| A | A | 0001 |
| C | C | 0010 |
| G | G | 0100 |
| T | T | 1000 |
| K | G or T (Keto) | 1100 |
| M | A or C (aMino) | 0011 |
| R | A or G (puRine) | 0101 |
| S | G or C (Strong pairing) | 0110 |
| W | A or T (Weak pairing) | 1001 |
| Y | C or T (pYrimidine) | 1010 |
| B | C or G or T (not A) | 1110 |
| D | A or G or T (not C) | 1101 |
| H | A or C or T (not G) | 1011 |
| V | A or C or G (not T or U) | 0111 |
| N | A or C or G or T | 1111 |

When matching sequence patterns, a match occurs only when a symbol in the sequence being searched is a subset of the symbol appearing in the pattern. For example, an A in the pattern will match only an A in the sequence, whereas an R in the pattern will match any of A, G, or R (but no other symbols). The AND operator is applied to the computer representation of the pattern symbol and the sequence symbol, and a match occurs if the result is identical to the sequence symbol. For example, A matches A because 0001 (pattern) AND 0001 (sequence) equals 0001 (result), and the result equals the sequence. An R in the pattern matches an A in the sequence because 0101 (pattern) AND 0001 (sequence) equals 0001 (result), and the result equals the sequence. An S in the pattern does not match an A in the sequence: 0110 (pattern) AND 0001 (sequence) equals 0000 (result), the result not matching the sequence. Using this algorithm, pattern matching becomes a byte by byte comparison using the AND operator.

[0253] The algorithm allows the user to define the number of mismatches as a fraction of the number of characters in the pattern. For example, a 5% mismatch frequency allows for one mismatch every 20 pattern characters. This works out to 0 mismatches for a pattern of 1-19 characters, 1 mismatch for a pattern of 20-39 characters, 2 mismatches for a pattern of 40-59 characters, and so on.

[0254] The searching algorithm aligns the pattern sequence with the DNA sequence at every possible position on both DNA strands and counts the number of mismatches in the alignment. If the number of mismatches is less than or equal to the number permitted, then a match is recorded.

[0255] The patterns and the DNA sequence are stored in Fasta-format DNA sequence files. The length of the patterns and the DNA sequences are limited only by available computer memory. The computer program first loads the patterns into memory. Each DNA sequence is then loaded sequentially from the Fasta file and searched sequentially with each pattern, allowing for the mismatch frequency designated by the user. The reverse complement of the DNA sequence is generated and again searched with the patterns. The coordinates of the pattern matches for each sequence and the name of the pattern that matched are saved in memory. Once a sequence has been searched with all patterns, the coordinates of the patterns are sorted into order, and the name of the DNA sequence, the name of the pattern, and the coordinates of the match are written to an output file.

LENGTHY TABLE REFERENCED HERE
US20070277267A1-20071129-T00001
Please refer to the end of the specification for access instructions.

LENGTHY TABLE
The patent application contains a lengthy table section. A copy of the table is available in electronic form from the USPTO web site (http://seqdata.uspto.gov/?pageRequest=docDetail&DocID=US20070277267A1). An electronic copy of the table will also be available from the USPTO upon request and payment of the fee set forth in 37 CFR 1.19(b)(3).

1. A substantially purified nucleic acid molecule, said nucleic acid molecule capable of specifically hybridizing to a second nucleic acid molecule having the nucleic acid sequence of SEQ ID NO: 1 or complement or fragment thereof.

2. The substantially purified nucleic acid molecule according to claim 1, wherein said nucleic acid molecule comprises a microsatellite sequence.

3. The substantially purified nucleic acid molecule according to claim 1, wherein said nucleic acid molecule comprises a region having a single nucleotide polymorphism.

4. The substantially purified nucleic acid molecule according to claim 1, wherein said nucleic acid molecule comprises a nucleic acid molecule having the nucleic acid sequence of SEQ ID NO: 1 or the complement thereof.

5. The substantially purified nucleic acid molecule according to claim 4, wherein said nucleic acid molecule further comprises a bacterial ORI site.

6. The substantially purified nucleic acid molecule according to claim 1, wherein said nucleic acid molecule has a promoter or partial promoter region.

7. The substantially purified nucleic acid molecule according to claim 6, wherein said promoter region comprises a CAAT cis element and a TATA cis element and an additional cis element.

8. A substantially purified nucleic acid molecule comprising a nucleic acid molecule or fragment thereof having a pair of defined ends, wherein said pair of defined ends are selected from the defined ends in Table A.

9. The substantially purified nucleic acid molecule according to claim 8, wherein said molecule comprises a nucleic acid molecule having one or two of said defined ends.

10. The substantially purified nucleic acid molecule according to claim 9, wherein said molecule comprises a nucleic acid molecule having two of said defined ends.

11. A substantially purified protein or fragment thereof encoded by a first nucleic acid molecule which specifically hybridizes to a second nucleic acid molecule, said second nucleic acid molecule having a nucleic acid sequence selected from the group consisting of SEQ ID NO: 1 through SEQ ID NO: 36935 or complements thereof.

12. A transformed plant having a nucleic acid molecule which comprises:
(A) an exogenous promoter region which functions in a plant cell to cause the production of a mRNA molecule; which is linked to
(B) a structural nucleic acid molecule, wherein said structural nucleic acid molecule is selected from the group consisting of SEQ ID NO: 1 through SEQ ID NO: 36935 or complements thereof or fragment of either; which is linked to
(C) a 3′ non-translated sequence that functions in a plant cell to cause termination of transcription and addition of polyadenylated ribonucleotides to a 3′ end of said mRNA molecule.

13. The transformed plant according to claim 12, wherein said structural nucleic acid molecule is in the antisense orientation.

14. The transformed plant according to claim 12, wherein said plant is a dicot.

15. The transformed plant according to claim 12, wherein said plant is a monocot.

The application's sequence listing, which the Patent Office published only in electronic form, follows.

SEQUENCE LISTING (36938 sequences)

SEQ ID NO: 1 - DNA, 147 bp, Glycine max
  unsure at all n locations
actcattagcttatggagaagctttttctttttaactntcttctcctattagagcttatagaaaagcttatccaaacaagggccactatatattctgcaatctggtactgtgccatatatatggatggtggntttggacatttggat

SEQ ID NO: 2 - DNA, 378 bp, Glycine max
ctttataaaatggaagaagacaaactgatcagcaccactctcaacacacaagcaaccaccagctacctctctctcaacagcaaccaccttctttctcaccttcaacacacaaattttacaagcaaccgtgaactgctccctctgcacttgggtttttaaatcccactgaaactgacaacgccaacctcactggcgcctccctctcacccaaatcgccacctcgagtggcgccttccagctaggaccctgcaactgcaggtgctgcaacctatggttgcagaagtgcaggtgctgaagtcgctggtcaaaccagcgctttcatgcacctttggacgcgccaataagagctgcgatatgcagtcctttgtcgccagtcac

SEQ ID NO: 3 - DNA, 423 bp, Glycine max
  unsure at all n locations
agcttgtgagttgtgagtggtactactgaaaatacccccaccataccccctttccccttatcacaaactntgtggaatactattgctactccagaacaatgatctttagttaatctacactctagggtaattccatcatctaattaccttgcagaccctaaaatcagagaagattgagtttgttgtagctccatatgaagcagatgctcagttagcgtacatgtctcagcttggagtacaaaatggcggagttgcagcggtgatcacagaagatagtgatctaatagcatatggctgtccagctgtaagaactcctccaatactgtgatattgcgcatggaggtttactgcnnttttgatatctcgatttatttacttgttcactattcagcttcatagaaagcatgcattttgggatataat

SEQ ID NO: 4 - DNA, 462 bp, Glycine max
  unsure at all n locations
tcccatctgttctttagctgtacaaaaacacaatccctatcatggattaacacatcgagagcattttcagccaacccaaggcaccacttcttgcaacacactactggcctacacggatcgaaacagtacagcagatgaaaatggtgggtcgcattaaccttcacaatttggcagcacagaaatcggactattttctcaaacgaaccatttaatggaagcagaatgaatgaggatgcagtgttactggtctggtcatggttcacagagctggagaaaagatttacagagcattacaactactggtccagcaacctatcagtagctntctgtaactagcatagatgggaagctattgaccaaatgtaacaatgtatctagtctggattctaacagagggaccttcatcccacacagtcatactcctgtattcttagtaccccggtacttttctataatataaat

SEQ ID NO: 5 - DNA, 394 bp, Glycine max
  unsure at all n locations
agctttccctctttgaacaaatacccctcagccaaatagaatccatcttgggcctttttcccacaactctcataaatgggagagaaatgttcatctaaagcatacaagtccctaatattatcaaatcctaaaatttgagctcctagggagcaaaacaatgtgtgtctcctagagagggcatcagctaccacatttgtttttccctttttgtatttgataacatatggaaattgctctaggtactctacccattttgcatgcctcttggttaacttgctttgccctctaatgtacttaagtgattgatgatcactatgaatgacaaattccttggaaacaaggtgtcgcaacctacccttcngcgggagggcgacgcgtgactcgcgggatgcgt

SEQ ID NO: 6 - DNA, 464 bp, Glycine max
  unsure at all n locations
ntaagaggatgctntaatggagganaataaagagagaaggngggagcacaaaattgaaggaataaaatagggagagaagtggaacattgaagtgtgtctcataagactttcattcatcaaagttacaacaagtgttacacatgcttctatttatagactaggtagcttccttgagaagctttcttgaggaaacttccttgagaaacttctttgaaaaaacttccttgagaaggtagagcttagctacacacacccatctcataactaagctcacctccttgagaagtttccataagaagattcctaaagaagctagagcttagctacacatacctctctaatagctaagctcacctccttgagatgggaagctagagctntgctacacacccnctatgatagctaagctcacccccatgacaaaatacatganaatacaaaaaagatccctactacaaagacta

SEQ ID NO: 7 - DNA, 373 bp, Glycine max
  unsure at all n locations
agctntgaaaagtgttgttnttcaccttctcgctaagccaatccgctggcttagcgagcgtccgctaagcgcaacactcattggctaagcgcaaggaagaatctggaagaaaatgagctgtacaagttcgcttagcacactgtttcgtctcactaagcgcaccgcttcagtccatcagctaagcgagaaaggcacgcgctaagccgaaattcactaatgtgcgctaagcggtccagaattgcgctaagtgcacgagcacgaacaaggccacctatttaagcttgaaatcagattttgtgaagggagtttgggctaggattcagagctttgcatgtctagagattctagagagagaaaggtccaatttcagaga

SEQ ID NO: 8 - DNA, 462 bp, Glycine max
tgaaggcaaactggacgttggtcaacttggtaacccagctggccttgaatcagaaatctgtacctgtcgcaagggtttgtggtttgtgctcctctgctgaccaccatacagacctttgcccttccatgcagcaacctggagcaattgagcagcctgaagcttatgctgcaaatatttacaatagacctcctcaacctcagcagcaaaatcaaccacagtagagcaattatgacctttccagcaacagatacaaccctggatggaggaatcaccctaacctcagatggtccagccctcagcaacaacaacagcagcctgctccttccttccaaaatgctgctggcccaagcagaccatacattcctccaccaatccaacaacagcaacaaccccagaaacagccaacagctgaggcccctccacaaccttccctcgaagaacttgtgaggcaaatgactatgc

SEQ ID NO: 9 - DNA, 421 bp, Glycine max
  unsure at all n locations
agctttgactttagtcatcaagagattataaatatgtgacaatggcatgagtttcaataataatcaataatctatcttttacataatcttctttcaacacccttcaatcaatctttcaatatcttctttaatctctttcaacattttcaacagatctttctgatttatttcccttcatctttctaaaagtttttgttcaatagtttctcttccaagaaaagttctttgttcaaaaacttcagctattcatctttttcattctcttctccctttgccaaaagaaggaaggactaaccgcctgaatttttttgtgtctctcttctcccttacaaaagattcanaggactaaccgcctgatatatcttttgtttccccatacaaagatttaaaggactaactgcctgagaattctttgtcccaa

SEQ ID NO: 10 - DNA, 404 bp, Glycine max
  unsure at all n locations
tatctggcctcccattaacagtaccttcatagcaggggcaggaccatcaacagccagccgcagatgcaccaccaccgcctctacatcagcctccgtccttagagtccatctcagctcacatgcagaggattgagctccatatgcatgcatatatgcaacatgtggccgaccaataggcggccaatcataggggataggtgcagctgaatcagagcttttaccagtacaccctacgtcagcagagctaggatcccagcccttactcgtggcttactcccgagtagtttggggccacagttgcatggcctggagataggcccaattttcaagtagggacaagaccctcaaaggccccaggagttgaagatggagctcaagaagacgacgacatangcgatgtgatg

SEQ ID NO: 11 - DNA, 284 bp, Glycine max
agctttccaagatattaagttcttcctcagaactgtcgtaagcgaagatgccaatgtgctattaacaactttcgtttgcccatctgcttgtgggagacatgtggctgaaaataacaatttagtgcccaacttgacccacacaggactacgcaaatggcttatgaacttacagtccttatcactaacaatgctgcttggtaaaccatggatgctcacaatctccttgaggaacaaattagccacatgggaagcatcatctacttctttacatggaataaaatgag

SEQ ID NO: 12 - DNA, 373 bp, Glycine max
tcgatgaagatgaaccatctaacaatgaacaaggttgtattcaccatttggtgtgtagctactaatattttaagtcctatatataaatcttctctttgagcacttctttatagctaatgggaagtacattataaccaccaatttgataagatattgcgacataggcaaaccactaatccaatgtacatactgcagtgcatacatgttgtatccggaaaggattcacatgcatagagacattgtgaacccaagattcctactatgttgtgtgcaatggaaagagttaacaaacagtgttgaaaccaccccttgttaatgcctatgaagacaaacttactgtcacacctatactaaaacacccctaacatatact

SEQ ID NO: 13 - DNA, 339 bp, Glycine max
  unsure at all n locations
agcttgcatcacttttaccttttcatttccatcgtactcttgcttcaaaaactgcccaatcttgttggtgtttttagtgtcattattctaatcaacatagtggatgatattgctccaaacaagattgctcttgcctttgactttctctatctcctctcgngattttttttatttgagcaaccgttgattatccggtaggggtggaacttcgtatatgtctttaatatcttcccatagatcacaagcatcaagatagggttccgttctaatagcctagaggtggtaatgttntccattgaatagtgaaagcctatgaagcacggacaccctagtccctta

SEQ ID NO: 14 - DNA, 397 bp, Glycine max
ttctccctattttcctataaatagggggagaagtgatagggaaaaatgttcagccctcctgataattcgagatcacttgaaattagtgaaaaaaattgtttccgtgaagaaaattcaagccaaggcgtttccgtgggtgatttcgcgaagattttcaaccgttcttcgacgttcttcgttcgttcttcgtcgttcttcagtcttcaaccggtaagttcccgaaatcgaacttttcaattcattctatgtacccttagtggtcctcatttgttttcacgcgcttttattttcgtttcatttactttccgtacccccttttgacgtgctctagtcatttacttaagtcatgttctcgccttatcaaaaaataaaataaatatccactgatcatttgagt

SEQ ID NO: 15 - DNA, 384 bp, Glycine max
  unsure at all n locations
agcttgcataactntgaatggngtattggtagagtttatccgttaatgatatgggctattgagttggggaggattgattntggaacttgtcgtggtgcagaagttagttcaagtgcgaacactactagaaaaagagctttttgcgatgcacttacgacatcggtccaacaaaactgtcgaagtatattaaatggtgcatttgtgtaattacaacgaaagtgtgcaccttgccaattttatggttgacattggcacaactcccttgaaggttgttggaagggactcgagagtgaggaaactagacagcttggggtattctcgatttccgtaacatacttaatgctctcacaacatagtggagttagggtagtaaatttcaccatt

SEQ ID NO: 16 - DNA, 243 bp, Glycine max
cgaaccgcaccctactttatacggcgacaaacatgtggatatagacaaacatgcgctgacccgtctcagtgtcatgcctaaggctagctcagcatgagtccaactttagctagcgcgattcataatgagttgtgccacattttgcctataagtaggtgaggcgatttttttcaaccaattagactctaatccatggtggatcaagttgactcacaataataataataatctttttacttacct

SEQ ID NO: 17 - DNA, 331 bp, Glycine max
agctatatatcttttcttcttggttctgcttgctctgtagtgctttggttctatgctatccttttatatttcatactatctttgacacatgggactaaacattgaacaggtgggaaggtggtccagccaaaattccatggtcctttaaagaagaagagactatgtatctgctggagggaaaagtgagggttactgttgaagggtctgttgggtcttttgaaattgggggtggtgatttagttgtcttcccaaaaggaatgaacattacttgggaagtgattgaaactgtgaagaagcactacagcttgaaaaaataatgatgtgtacttat

SEQ ID NO: 18 - DNA, 443 bp, Glycine max
  unsure at all n locations
ctnggtgttgttcctattgtgcgagttactgaggtgcaatttcaattttaattggataatgagaaatgttagcaatatactaccgtatgacactgcatcacacactttattatttgccacaatttattggaaatcacaaaattttgtgggttctgttacttatttaatgaacttcactcgtgattttggaatttctaataaattttaaccaataataataataatagagtgtgttacttagaagggcattgtattgctagcactcctcttgaagtatagcatacaaacatgaaaggaattccattttaagtattatcctgtaccanaacctcactttagtccccaattttggaaatcacagttcttttcactgacaaatgacttacagttntagttaaaaatagggattaacaagagtggagcatacaagaccaggagggact

SEQ ID NO: 19 - DNA, 396 bp, Glycine max
  unsure at all n locations
agctttagctggactaaaaaacattataatcccttcaatagtaggatgagagtatgcctctcttagtatttctttcaagtattgtgcctactctagaaacaagaataagagaaaattaaagggaatgcagttagtcacatgatatattgagatttgttttttttttctttttttgtaattgataaaaaagacaaaattggtgtcttttgcattaaggggcctttcagaagaacttgtgaaaataaattgatcagtttaatttccttatacttcaagtgaaaagatttttatactatgaactaaccaaaaatcatcctatgattnttaatataattattataaaattaccatacatcataatttgagaatgtagaanacataaacaacgtttacact

SEQ ID NO: 20 - DNA, 459 bp, Glycine max
  unsure at all n locations
gtcctcgggccattcctgcgaaggaaaacatttggatagttagttntaccaagaaatgctacccttaaaacaaaaatggcatacaacctcctccaataaatacaaacatcaatgtaaatttagagcaagcttatgcgcatattttcttacgaacattcactcgcacaagatattcttctaactaagaaaaatgcacccatgcacaatcaaggcactttcgttacctacattatttgtatgtacttccaaggtgtactacctacaccacatgcatttccttggctaaatttacatacatgcatgctcaaagcctcttggctaccaaaagttgcacacatgcaaactttatgatgaatcttggctatctacacaataaggtgctacacttcatgctttatatcaagtgttttactaccagaagccgcatgcgaatgtcagtatattttcttttgccgacta

SEQ ID NO: 21 - DNA, 328 bp, Glycine max
  unsure at all n locations
agcttctcccccaattttctataaatagggggagaagtgtagtagaaaagggttcagtcccttaggcacttctctctctttcgaatttgcttaggaaaattgtttccgtgaagaaaatccaagccgaggcgcttccgtaacgtttccgtgagtgattttgcgaaggttttcgaccgttcttcgacgntcttcattcgttcttcatcgntcttcagtcttcaacgggtaagtacctcataccaagcttttcaattcattctatatacccgnnnggggccacattatggttcatgtattattattctcgnttcatttactctttataccc

SEQ ID NO: 22 - DNA, 391 bp, Glycine max
  unsure at all n locations
ggctctanatntacattgatgtttgtatttatgggaggaggttatatgccatttttgctttaagagtaacgtcccactggtaaaactaactttccaaatgtttgccttcgcaggaatggccccgaggaagcttgcctcaaagaggtccaggaaggacaaggcggccgaaggaactagttccgccccggagtacgacagtcaccgctttaggagcgttgtacaccagcagcgcttcgaagccatcaagggatggtcgtttctccgggagcgacgcgtccagctcatggacgacgagtatactgatttccaggaggaaatagggcgccggcggtgggcaccattggttactcccatggccaagtttgatccagaaatagtccttgagttttat

SEQ ID NO: 23 - DNA, 352 bp, Glycine max
agcttgtggtataatgtggaaacctctgaaatattctagagatgtgtggaaccttctggaaccttatgaaaaagtatggaagatagtagaagagtgtagagactcctagaatgtgtggagtattctagagaattagtctccatcctaggatacaagtaatctccactatttattgtggaggtggagtagtataaataaaggtaggatccttcattcctaaaaaatctaagtagagagtctctctgagagagaagataaatagctttggaagtctctatcctcaaacataagtaagcctctctgagagagaagataaatagcttgggaagtctctatcctcaagcttgagtga

SEQ ID NO: 24 - DNA, 438 bp, Glycine max
  unsure at all n locations
ggcacactctntgattatcttggtctaccaagtgtttattacacaatagtgaaatgcacttattcccattctccccgctcaaccactgaatcgaattatctccagccacccaactacacccaaaatagaggttcagaaaggaagcaaactaacactgccaataaccccaagttccaggttttaggtgggaattatactattatcaaaacgggttctacaacctcttatagaagcataactcttgcaaacacttttaatagtaaaaaagaaaaaaaaaactttacgtcacagaactcactaccaagtgaaaaaccaccaacattgtcggtttgtactctgcagtctgcacgtgtttccataaacagaaacacattgattttaaattaattaatcgattaatactaccatcaagtagtaccacccctatattctttctta

SEQ ID NO: 25 - DNA, 104 bp, Glycine max
ccacattatttccatgacacaaattgcaaaatgatgatttggaaacttcatgcaaaactggtcatgcatgcacctatgcagacactcaagtgtcaaatttttat

SEQ ID NO: 26 - DNA, 386 bp, Glycine max
tgtctcagcgtttatgcgagacagagaccaacatgttagctatcatcgccaagtaccaagaagagttaggtctagccacggcccacgagcatagaatcacggatgagtatgctcaagtgtatgcggaaaaagaggctagaggaagggtgatcgactctttacaccaagaggcaaccatgtggatggatcggtttgctcttaccttgaacgggagtcaagaacttccccgattgttagccaaggccaaggcgatggcagacacctactccgcccccgaagagattcatgggcttctcggctattgtcagcatatgatagacttaatggcccacataattagaaatcgttaggaaaattgtatggtctctcagaccttgactggatac

SEQ ID NO: 27 - DNA, 379 bp, Glycine max
  unsure at all n locations
agcttctcccccaattntctataaataggtggagaagtgaagtgaanaagggttcagccccttaagcacttctctctctttcgaatttgcttggaaaaattgtttccgtgaagaaaatccaagccgaggcgcttccgaaacgtttccgtaacgtttccgtgaggaatttcgcgaaggtttcgaccgttcttcgacgttcttcattcgttcttcatcgttcttcgatcttcaacgggtaagtacctcgaaccaagcttttcgattcattctatgtacctgtggtggtccacattgtggttcgtggatttttattctcgnttcatttactttctatacccccttttgacgtggcttaagccatttatttaagtcatttctc

SEQ ID NO: 28 - DNA, 395 bp, Glycine max
ttggatgcctataagattattaaggctgaagtcgagaaactatgtggatagcaaattaagatcgtgagatctgattgaggtggagagtactatggtagatacacggagaatggacaagcacctagtctgtttgcgaagtttgttcaggaacatgggattattgcccagtacactatgcttggttctccggatcagaatgatgtggcagaaagaagaaaccgaactttaatggacatgataaaaagtatgagaagtaataaaaaacttcctcaattcttgtggattgaagcattaaagacggttgtatatatattaaaccgggttccaaccaaggctgtcttaaagacacctttctagttattcaaaggttggaaaccgagtttgcgacatatatg

SEQ ID NO: 29 - DNA, 408 bp, Glycine max
  unsure at all n locations
agcttanaggagcactcanatcgggtgtatttaaccccatggcctagactccgaagagtccgtcagggcctctccctcctgattcaggtccaacccanaaaacattntagcacacagactntatctatgaactgtacaaaatacacgactcctcaattgttctcaaaataattttatctaatcgcgcttgtgattaaactcgtcaggtcccaacagtggttcccatcataatactcgccacgcattaactcgtcgcccttagattcatagttcacaaatcagggcacacaacatctcaatgcacatatatattacaagtcaatacatactcaatttatcacatacatttggtctcaatcacagtggtataatctcaatttaacatgttatcacacctcatgaatcata

SEQ ID NO: 30 - DNA, 443 bp, Glycine max
  unsure at all n locations
ntaactnttcaatctctctgcanataaataacaagattacttatatatcatattgagatgagtctgatatctcaagattacatttgaataaaatcatgaggttgaattaattgaaatactttaaggttatagcaaaaaaggtttcagctaaaacaaatgcaaggcagcgtaagaaataaattactacattagcaataacgcttaaatatctacataaacagaatattccataaagattatatttaagccccatgctgagatgcaagtaatatgctgtttcatatttatcaaaatataggaatggaaatgatgcaggaggcccacagaattaagtcataaacctgaactcaactacatctgtgcatacacataaaccanatcctaccattntaattntacaccctccccanacccacaatgaatatggcctaaggaatacatcg

SEQ ID NO: 31 - DNA, 398 bp, Glycine max
  unsure at all n locations
agctttcgtacatcgttcttctgaaactagtccaacttttcctacattgctttaacccagtattcattagacatagcgtcatctatgtactttggcttgatctcgaaaagcaaagttctatgcttgaaagagttccttgtcaggactttgtccttaggatcaccaatgatctgggactctagatgatctttttgtagcaatcatccagttggttctctgacttatagaggttgatcatccactggtgagttggacgcatattggtcttgactggacctagcaacatatttcacgatattntctactttcatctcagtagaagactcatctagctccaacattgtagtgttaggcttattgtcattaagtcttacgtgaatggcctcttccacagtcat

SEQ ID NO: 32 - DNA, 458 bp, Glycine max
tcaccttgtgcgcctcctcatagttgttgcatgagacaacatgctctattttcatctcccactccaagtaggcctccggatcattctttcctttaaagggaggaatgttgagtttaataccatcaattcggctttgactaggaacaccatcattccctcttctcctcctttcttcttcattatgatctctattctccatttgatccaacctctcatggagcacatcatctcattgtttcattaacctctccaaatgatgcatcacagcttgcatttggaattgcgaaagccccactccatcattaggatttggtcctgccatctcatacaaacacatcagacgtatcaagacaattatagttgctgtttgaatacctcactcactcaagtgtatcacacaattatggtttttctctaatgaaacactcttgccttctaccactctaattccacttgag

SEQ ID NO: 33 - DNA, 382 bp, Glycine max
  unsure at all n locations
agctttgatataatgctttctttgtatttataggtatagaggatctagccacttgagagtgtcttgccccgactcagtacaatgcattatattagcgcgacatagctttggtctacattgaattagtatatatagctacaccttattcaatccaagaatggaaaaagggaagcagtggttaagaatgatcatgggtcaagcttgagtcaagtaatctgataccaaaccgaatgaaaatggttaggttgagtgtgttaaatgtgactgtctcaaccacaactaatcacaagtgggatgtgcctaagtcacgtcattatattaaagattctgtgaatgaaggaagaaaaaacacacanaaataggggtagagtagggaaaaggt

SEQ ID NO: 34 - DNA, 460 bp, Glycine max
cctgagtgaaacaatgagactcttcacagttaaatttgaatttcgacgttcatggacactggtaatcgattaccaaaacattggaatcgattatagccttttgaatatattgggaacgttgtaaattcagtttgaaaactttttcaaactcttttagctactgagaatcgattacaacaatatgaggatcgattaccagagagtaaaagctctttggtaaagattttgtcaaaaactcacgagctatacaacgttgagaaaaaacctttttaatacttatattgatagagtgtttgatacattctcaaatgttgaatgttgaatcttgatcttgattcttgagaactcgagtattgagtcttgattattaaccttgatgcttgatgattgacatcatgaatcgtgaatcttgatacttatctgaaggctttcttcttgagtcttgaattcttgattcttg

SEQ ID NO: 35 - DNA, 320 bp, Glycine max
  unsure at all n locations
agcttgtagagcttgagttctaagaatgagctgagttattttgaacccattntgctgtttatttttcctaaaatggattatgaatatagcttggatactatggaaacaaaaaatgagtattctgatgaaggtgaagtagtaccgggtttatccattaatccggttagtttttgcgcaaacattgttccaatgattaatggtaaatatggtttgcattaccaaagtgaatgcaattctacaaagaattgcagtcctattggggggatgccaaccaattgccttatattgtgtctttgaaagaactggtttgttagatgtaa

SEQ ID NO: 36 - DNA, 368 bp, Glycine max
tcacattcactatcctctacatcatattcaaacttgaccaaataaatagtacagtcatctcgactcaaagaaggacatctaagtctcatacaattaatatagaacctatatcctaatgtcacatcctatcaaagcgtggcgctaccgcgtcctctagcttgaggctcttcatagtcatccacctattcatctgctaccccgaacacagagcttgagatcatcacaggatgcgaacacaaacagcacaccgggagtgagatatcacacttttaactactatagagaaacaacacaacatatatgagccgaagacgatttacttaccatatctcacattatttcatgactttgtccttcatcgatcacac

SEQ ID NO: 37 - DNA, 414 bp, Glycine max
  unsure at all n locations
agcttatcatctatttatactacacatagcaatgaatacttattctggatcactgcttaatgaaattaaggatctgtttattttacattgtaaacaggcaaatgtattaatttaagatttgtatctaaattgttctcaactatatataattatatacattngtattaacatgtataattctagcatacaggcagtttttagaaatataccatgtgactcgatcatgtgtatgtttgagttgataatcttcttggaggagtgttaagattcaacacatttgtattaatatgatgtgagagtcacaaattnttatcattttcaatatatttcaatcaataacaaagaatatatttaaagagactcaacaaatatgtctctactgtttctcacattattaatataatcaattgcttg

SEQ ID NO: 38 - DNA, 288 bp, Glycine max
gttccaaagaggtcttcggcattacattcaaactcgatccattgtcgataagtacatttgcgaccacgtgtgccgtacatatcaccgacgcatgtacagccttgatgtgccctctcctctcaacgggaataacttcttgcacgaacgcgatataattgccgatggctatatgattggctatgccgatcagaacgatgcgtgagatataatgagctacactgtcatggacatgatccataatctgagacgcactgatacactccctcaattcttgtggattgaagcatt

SEQ ID NO: 39 - DNA, 317 bp, Glycine max
  unsure at all n locations
agcttgtcactgtggaattaaccaagtctctgagggacgcgttcaaggataattcgaaatcatatgccatagcgatctcttcactctgaccatcaataattactaccatggtttctatctccaagatgtcaaccagaactgctaccttttgcctgagcttgaaggacgtatatgacactgaatacaccaataagtaattaatactacaatctaatagcttaatacttaacagttgacacaaatattaattntcattaccttaatgttctgaagtgcacgtctaaagttttgtgcataacagtatcgccactaaaacc

SEQ ID NO: 40 - DNA, 435 bp, Glycine max
  unsure at all n locations
cactatctatacttagcttgcaatctatgtgcaccagatagctaatagacttttgtattcttncgttatgagtatgatatctcaagattacatttgattcacctcgtgatgctgcataaattgagtatacttcatcgacgttgcaaatataggtttagcttaaactgatgcgctgcaccgcaggaaatagagtactacattagcagtaacgcttaaatatctacattatcagaatattccataaagattatatttaatccccatgctgatatgccagtaatatgcctgctcatattgatcacaatatatgaagggatatgatgcacgatgcccacagaattaaatcatagacctgaactcaactacatctgtgcatacacataaaccaaatcctaccattgtaattttacaccctccccaaacccacaatgaata

SEQ ID NO: 41 - DNA, 285 bp, Glycine max
agctatatataagctcttctttcatcagatgctccgaaaatttaacttcttgttgtgataattaggggggagcagtttataactggatttgtatctgacagagagaaatcttaacacaagtcactctgacactcttattgtataacaaattaaggccactgagttgagtccagctatccaaaagctgtaggaataaaaaatctattaagagcaaacacacacctcgacctgtgttatgcaagtaaatggtaatgtaagcgactacgcagtagtacgggttggtag

SEQ ID NO: 42 - DNA, 452 bp, Glycine max
  unsure at all n locations
ttgatgataganattaattgaatgatttattattaattcttcttaatgtttggacaatatttccaatattagaaattacaaactcaaaagaaaccaataaataaattcctagtaacaaaacttgttttttataatttcatatttatcaatatttattatataaataataataaattataattaaaaaatgaataagtattatgttagatatttttataataatataagataatatctaatattaaaaaatatctatcaatgagatcggtcacttgtgttagctaacttacatgaaaagtcaatgagatctgttacttgtgttgcattggtgtagacgaaacttgaacatcattagcaattatcaagggtctcctatcatcacataaagtatgggtttgatacttaacaataagcagaccatcacagaaaggatatgatagcactctgactat

SEQ ID NO: 43 - DNA, 335 bp, Glycine max
agcttctacttatgtggcagggcgggcttccttcaccttcttgtctccaacgcgaactttgaccattattcttccttcccgcgatgcttcttttcatgtccgcctgagtgggcttatagcctaaaccatacttcccacgatttccttgggtatttatcaggctagttatgccgcccgtgttttttcctaaacccatcccgggttcataaccgttccccaacataactcgggccatcattatcgctgcatcggacagacaaggcttgccaaagagggagtccacggaggaaatgctgaccacctcaaaagactggaaagcagtttctaacgattct

SEQ ID NO: 44 - DNA, 434 bp, Glycine max
  unsure at all n locations
tgcctcanagagatccaagaaggataaagcagctgaaggaactagttccgctcctgaatatgacagccatcgttttaggagtgctgagcaccagcagcgcttcgaggccattaagggatggtcatttctccgggagcgacgcgtccagatcagggacgacgagtataccgacttccaggaggagatagttcgccggcggtgggcatcgctggttacccccatggccaagttcgacccagacatagtccttgagttttatgccaatgcttggcctacagtggagggtgtatgagatatgcgatcctgggtgagggggttagtggatcccattcgatgcggatgctctcagccagttcttgggatatcctttagtgctggaggagggccaggagtgcaagtatggccaaaggaggaacccggccgatgggtttgat

SEQ ID NO: 45 - DNA, 408 bp, Glycine max
  unsure at all n locations
agctntntggagtagaaacatgggaccaactcattttatttcaaaaaggaagtcatatctagtcaaggtctgagagaccatacaagtttcctaacgatttctaattatgtgggccattaagtctatcatatgctgacaatagccgagaagcccatgaatctcttcggtggcggagtaagtgtctgccatcgctttggccttggctaacaatcggtgaagttcttgactcccattcaaggtaagagcaaaccgatccatccacatgggtgcctcttggtgtacagagtcgatcaccctctctctagcctctttttccgcgtatacttgagcatagtcgcccgcaatcctatgctcgtgggccgaggctagacctaactctttcttgcgatgatagctagcatggtggct

SEQ ID NO: 46 - DNA, 74 bp, Glycine max
tctcaaggaagttttctcaagagagcttctcaaggaagctacctagtctataaatagaagcatgtgtaacactt

SEQ ID NO: 47 - DNA, 358 bp, Glycine max
  unsure at all n locations
agcttgaagcatctcatcataggagatgatgatcacaaagaagcanagaagggtagtagtaataataatagtaataataataatagtgatcatgagagaggtggcaaaggaggatcaaggaactcacttggtgaacacttcacagaggaagagaagcagcataatcttcagctggttaggatgcaacagaataaggacaacctccaaggcttgaagttgaagaagttggtgcgtcgttacgccaaagttttggngcatttgatgaangctaagcgtgatcctcatctangtggtgatgctgggaaaaaacctgtnttcaagttatcagcctagccagggaaaattttggagttttact

SEQ ID NO: 48 - DNA, 407 bp, Glycine max
  unsure at all n locations
tgcatttcacgagcatcactctttntccttccctcttgtgttgtgacattntcctattgagaatggaaaattatttccataccttcaaatttgcaaagaaatgtatcccaaaaatgctactctaaaataggaagagagtttgctctttggtttttcgctggtccattaatatactaaattagaagtcattaaacaagctttttcaactctcataattgtggcatttactattgaaggtaggggaatgatcttaaacggattgaaaatattaagcaaggaaaattactgcagaaattcttaacaaatgaaatcagaagtcaccttctctagacgctgaagaagagcggttntgaattggcgaacaccacgcccacttgattgcggatctagtctgtgagctagttcaa

SEQ ID NO: 49 - DNA, 420 bp, Glycine max
  unsure at all n locations
agctntaagacactagtcttcggccaactntgttttaacaccaaggcaattaccatggttgctcataaatccatatttacagaacaaaattgnggcatggngctcaatacaaatcanaaagaggttctaaatatgtattagactaacaacggcatccaattagacaaagagagacttagttctctaagaatcaaattcgcatgcaaattgaaaattataggatttggaaaatcatcaccttttcccacctatctttactcttcaaaaccgaanatgattccaactcttctcttttccttagagagaaatacatgaagaaaggatggatgaagattattcctgcacccaaacggagattctaggagcttannaattcactctttatnatatcanaatacaaggaatcttanaaattactac

SEQ ID NO: 50 - DNA, 423 bp, Glycine max
  unsure at all n locations
tcatgtttaatcatacattcaatcttattatagcaganaactcaaataaaaattctattaaaaggtagcactcgtggcatgagtccttataaatatctactacaaaagttttaaatactctgtccatgaggaaagcagtccagtatcttccaatactctatccattgatccatatttgaccttttcccataccctccatatccaatgccaatggttcatctccttcgggagcatcaaaataagtctgcgcagtttacggattgacttcatcagttntcaacctagtggtatttttttcagtctaagttaggacattactatgcaagatgaccttgtgccatgtcaatggttgagttctttgaacaactattgctgactgcaccacgcaacactatagatatcatttggagaggcaacattcat

SEQ ID NO: 51 - DNA, 401 bp, Glycine max
  unsure at all n locations
agcttgcttctacaatagtttctctttacctcatctgaagagttacgaaggttccatagaagaagaaagtggctccaattgcagaagaaccataaggtcgtcggttacattattcattagtcttgttcgtgattgattgatgtaaagatcttgcaataatcgtcgaanaacaagtagattaggagccatatacggattaaggtatttcatctaatctttaataatgaggcatgttgtaaatcctagggcttttggtagattgttctaggttacgcacatgttgaattntagcttccgcataaagaataaagaatacggatcanaagttaaaattctaacaactataagatgaacatcagttgccaaattctttgcacatgcattggatntaaagaacaaat

SEQ ID NO: 52 - DNA, 464 bp, Glycine max
  unsure at all n locations
tagactaagttcagcctaccatcctcagactgatggccaaactgaacggaccatttagtcattggaggaccttttgaaggcgtgtgtcttagagcaaaaaggaagttgggagagttttcttccattaatagagttcacttataacaacaattttcactctacgattcatatggctccttatgaagctttgtatggtagaaggtgtaggacacccctatgttggttaaagcccggagaaggccttaccttaggaccggaagtggtacaacaaaccaccgagaaagtcaagttaatccaggaaaggatgaggactgctcagagtangcaaaaaagttatcatgataagaggaggaaagatctgaaatttgaggttggtgatcatgtattcttgagaatcactccgtggactggggttggtcgagcattgaaatcccgaaagctcacacctcactttatcgatcctt

SEQ ID NO: 53 - DNA, 342 bp, Glycine max
  unsure at all n locations
agctttaggataactttatatttgnggaatgacagtagacccacaattgtatttcatccacagaactctaacccacaattgtatttcatccacagaactctaacccacaacatactaggatcttcaatcatatatcatcccaacatgaataaataagactgattaagagtcctcaagctcttaaatccaagccccccttgatctttggatttacaaatcatctaagaaataagatgaggtgttctgttatttgcatcacttcctgagataaagtctctgcagaagctttcaatctcattacgaatagcaatcgtaataaaggttgcttcaagaacataagta

SEQ ID NO: 54 - DNA, 460 bp, Glycine max
  unsure at all n locations
ntntattgattnnttttatgtcttgaccaagaattagagactaattctttgaaatattgagatttatttaaaagataatatctcccaaaaaaatgttattatattcaaactgattaatatgaacatgaaaaataaacaaaacgccttataaaatttagatttaggaaattatttttaattactttaggaaatgttattgatgtcacattcaaaaagtatgtgaaaggatgagtgataaatcataaaatttggctgctataagttatatcgataagattaaatttaatttttaactcaagaattaaggaaagctttcataaaaagagaaaaatcaaattttcatttgacatgataatggttagagcctaaaaataaaatataaattaaaaatatacatatcaaaatacatctaaattaattaaataaaaagtactaaattcattggaaactagaaaatgga

SEQ ID NO: 55 - DNA, 371 bp, Glycine max
agcttgtacactacaacaccaacaaagtccaagaatccctccataacaatgatgctcaataccaacacgctctttcccaccttctctctgtctctcaggtatatttgcaattcatgcatattgatatgctcatatgcaaaaactagtttcaaattttattcttgcgtatggtgtttgtttattatatgcatagtttgtcaatcttccttaaaactttattttaatattaatggtatgtattgaatgtttttaatggttgagataggtagcactgacacagaagtgctgaatttattggcagttgaaaggagaagagatacttgagcaattcgaagcttctagttcttctgagccggtcgcttctataactc

SEQ ID NO: 56 - DNA, 459 bp, Glycine max
  unsure at all n locations
ntgaaccatccgtcccataggagcccaactntgcaggatgaaggggtcaaacaaaattttgatgaagctacaaaggagaactttggtataggaatgggcttaattgtagaaaccatcacggggagatcctaggggttgccatgagcatggtgaaccattgttatcgaacacacatggcataagctgtagctttcaaatgggccttaaagatagctaaggacctcttttttttttttttttttgacattgtcatggaaacagattgcttgaagattgtttagacttggcacaacacaaggaagttttcaacttcctattttgaaggcatccttgatgattgtagagagctgcagagtagaggttttcatacgttcaaaatgtcttttgtaaagcatacaggaaacaaagtatatggttcgttagtgaatttagctcttggttttagggaacgttattgga

SEQ ID NO: 57 - DNA, 423 bp, Glycine max
  unsure at all n locations
agcttctacaggtggtcagtaagaggaatagtgtaaggaattatggaagattaaaattcctagcaaaataacagtttttgcttggtggctaataaaggacagactaccaacaaggatgcatctgcataggagacaagtgcaactgcaggatctacgctgtcctttnttcagagaagctgaagaggagtcatctcatttgttcttccattgcgtcttcatccaaccaatttggtgggaatcgatgtcttggttgaatttacaaagtgcctttcctcttgggcctaaacaaaattttctacagcatattttcatccaagcagaaggtttaaggattaagagatggagatactggtggatggcagtaacttgggccatttggaaattcagaaacataattctgttttcaaatgcagaatttgatgc

SEQ ID NO: 58 - DNA, 467 bp, Glycine max
  unsure at all n locations
ttntgtgtagtagtgataacaagttcgttattggtgacaaagagagggaaatcaaggaaagcactaacatggaaaatgaagtttgccaacgtgatgaataaatgatctagagcaaaaaggcactgaaggtaaacgacatggcccattcaaagaaggaacataagtaggtgctatcactagtgcaaaaaatgcatattagatcaactttttggatcagctgtatgagcactgattttttttaagaaatgcaataacaattttgtaaatgaaaagaatgaaatcggtctaaaaaatactaccttttggactcatggtttggattgtaagaaatttttgcatcgtattagaaacatgagtcatattaaaacaaatgttgaatcgttntanaacaaatttactatggaattntgtagcacatgattaacctangtcacactcagaaatatgattcaatatgacccctacat

SEQ ID NO: 59 - DNA, 361 bp, Glycine max
  unsure at all n locations
agcttccttgataagctagagcttagctacacacacccatctaanaactaagctcacctccttgacaaaatacatgagaatacaaaaaaaaagtccctactacaaagactactcaaaatgccctgaaatacaaggctaaaaccccatactaatagaatggccaaaatacaaggcccaaaagaaggaaaaacctattctaatatttacaaagaagagtggatccaaccttgacccatgggctcaaaaatctaccctaaggttcatgagaaccctagggccttctttagtagctctagcccaagcctcttgaagtcttctatccaatacccttgnggggtaggattgcatcattctgcatatg

SEQ ID NO: 60 - DNA, 450 bp, Glycine max
tggatttccttttagtagggaatctatccttcctaagatagagccaaacctagtcaccctcattaagaactagctcttttcttcctctattgcctttagttgaatacacctttgtttgattctctatttggttcttaaccctctcatgcatcttctttacaaattctgacctagattccccttctttatgtataaaagaagtgtccagtgggaggggaatgaggtctaacggtgttaggggattgaacccatagacaacctcaaaaggggactgcttggtggttctatgaacccccctgttgtaggcaaattctacatgaggaagatactcatcccaagacttatggttgcctttcagaagagcccttaagagggtggataaagacctattcactacctctgtttgcccatcagtttgtggatgacatgtggtagagaacagaagtttag

SEQ ID NO: 61 - DNA, 247 bp, Glycine max
  unsure at all n locations
agctttgtgaatctcctgatctagcgccacccgatgatactcaaccattcgaagntgaatgtgatgctagtggaattggcattggagctgtcttgatacacaacataatgcctatagcttatttctcggagaaagtgggaagagccttgctgaattattgcacctatgacatagagatctatgccattgcgagagctcttgatcattggaatcattattttgcggctaatcactttatattggattc

SEQ ID NO: 62 - DNA, 442 bp, Glycine max
  unsure at all n locations
taccatcctcagactgagggccgagatgacatgaccatttagccactgcacgacctttagaacgcgcgtgtcttatagcctataggaggctgagagaggattcttccattaatagagttgacttataacaacaattctcactctacgattcatatggctccttatgaagctttgtatggtagaaggtgtaggacacccctatgttggataaagcccggagaaggccttaccttacgaccggaagtggtacaacaaaccaccgagaaagtcaagttaatccaggacaggatgatgactgctcatagtaggcaaaaaagttatcatgataagaggaggaaagatctgaaatttgagggtggtgatcatgtattcttgagaatcactccgtggactggggttggtcgagcatngaaatcccgaaagctacaccttactttatcga

SEQ ID NO: 63 - DNA, 371 bp, Glycine max
  unsure at all n locations
agcttatcgagaaaagaaattgtagaatgtttgtaaacaacattgttaagttcaactaaaaccctttgtagagcattattcccaagtgctgtaagaccaactgtaaaagaaaaaaaattaaacacttgacaatggatgcatgcactactatcactataccagctagcttcattcgtctctttcaagcatctatagcaattctttgcaatanaatcttgaaactaacacttggacagctagatctaaccgttgttgtcggagtgtgaccaaattaatggttatatttattatgaataattgaatattanaatactcttggcagtgcatacctacanagctcacttgtgggacaaaacattacgggtcttaat

SEQ ID NO: 64 - DNA, 442 bp, Glycine max
gtgcttccacaaaatagtctcggccgaaagacgctgacatcttccggaaaggtgcagatgaccacattggtctctgcgtgtcatcggacttggggtctccgaataacgaggtgcggataaccgtaaagtgctctgcatgccatcgaactcttgggtcgctggatagcaagaaggtgacactaaatagtctcagtcggaagacgctcacagctccaggaagagtgcagattaccacattggtctctacgtgtcattggacttggggtgtccgaatgatgaggtgctaataaccgtaaggtgtctccgcattccaccggactcttgggccgctggatagcaaaattgtgagacaaaaattgtctcgaccggaagatgctgacatctctgtcaagggtgcagatgaccacattggtctccatgtttcatcagacttgggatctcc

SEQ ID NO: 65 - DNA, 376 bp, Glycine max
aaaattactacatatcatcgtatgcttatacctacacgcatttttgcaacctccaattggctctatagcggaggtacaaaaactgcatcacgatcagctcactatacgaaaactataattcaactcaatcctcgccaatgtgtatggatgatctacgcaggagcatgaaacagacctcaacacacttgcatgatacttagagaacagtgtgttgcgcaaaaagtctgcgctatacttgcgccttaaccacaaggcgctatatccactgaacctgtactggttagaccaccacctacggctcgtagctcacacaactttagagcacctatgttgagtcctatccacccataacgcacgcttaagaatatcttaagcc

SEQ ID NO: 66 - DNA, 370 bp, Glycine max
tgcaggatgattgggttttactttatgctgatgacgctacacaggatagctttggtataagactgggcttacttgtacaaaccatcgcggcgagatcctatgggttgccatgagcatggtgaaccattgatatcgaacacacatggcataagctgtagctgtcacatgggccttatagatagctagcgacctcttttttttttttttttttgacacttgcttggaaacgtatcgcttgaacattgtttagacttggcacaacactaggaagctttgaccttcctattgtgaaagcctccttgacgattgttgacagctgcacagtataagaattcatacgctcaataagtgttttgctcagcatacagga

SEQ ID NO: 67 - DNA, 378 bp, Glycine max
agcttgggcatagcaaatgagaaaaatgagtgacaaatgtgaaagcaagagtcatttctagggtaaattgggtgttgaggggtcaaatcttgaatcggtagagttttcgccttacaatcactttgagcaagtctaaattaatgttatatactcgtttgagatgagaatttactccaaaattaccccattctcattttcacttctcaaaccttgaaaattcactcaattaatgggttttggatacctagatttggatttaccttgatctgaagctggtttttgcgttaaatacaatttatacatgatttacgacttgtaggatccaatttgagcaaaaatggatgtgggcaagaatggattcgaaatctgccctattat

SEQ ID NO: 68 - DNA, 296 bp, Glycine max
ttatgttggggcccacatggatggtgcatgaatgtataatcattatcgctatatgcatgacctggaaatgatttggggcattcccttattcctgaaccacctgtgaaacagacagcccgacatacatcatgtctcgccacttggaggccttttgagccaaacattaacttttggccataaccttggcctaagatggaaatttccaaccttaccctccgaagagagaacaaacgaatcttcccaaacgaagcttcttttaccttgagttataagtgtcgagccagacaaccgattag

SEQ ID NO: 69 - DNA, 365 bp, Glycine max
  unsure at all n locations
atctntatgttgngcaacactgaaatacagactaaaaaagcaaataaaaaaatatgctaaaggcgactgaagcaaaaagagacaaaagtcctccaaattttacaaggaaggcatagaagtgtaatgaggattaatgtataagacaaatggagtagagcccagcccaaatagttgaaatgaataaagtacaactaaggctctcaaggntcttactcaatataacccttaaacactctntgagcctttctgatcctttctttcatagccttcgtacccctgaccacgttacaagcccaacaaagcccatgtggatcaaggaaggactaattatgcttttgagtttggattctggaatagaacccaca

SEQ ID NO: 70 - DNA, 321 bp, Glycine max
  unsure at all n locations
nttcatatgcaccaagaatagctcaatacacttatagaactctcagatacaatgataagaatgaactcatacttttgatgaaattccatattgagtgtattgtggaaacgacgcacttcatgtgatgtgcattgagcagatcttcattctacaacagatcttcttatactttagctattgattacttctcatggcttaaagttttactcttcatcagtgagcaatttgacttcttcattgcataacataaccagagacactttcgagccctcttttaagcattctcgccaatgatcctttctgaatgactcatgacaacac

SEQ ID NO: 71 - DNA, 311 bp, Glycine max
  unsure at all n locations
agcttgtagaattcaccccaatttcgatgacctatgctaacttgctcccaaatctactcgataattcgatggtagccataaccccagccaaggttcctcaacctccatttttccgaggatactacttgaacacaacatgtgcttatcgtggatgagttctagggcattccattgagcattgtangaccctgaagcataaggtgcaaggtctaattgatgcgaggagaatcgcttgtgatttctgaaattgcaagcgacaccatacatggtgcaatttgaagggtgttgttagatgtctctaatgactcatt

SEQ ID NO: 72 - DNA, 423 bp, Glycine max
  unsure at all n locations
nttcacanaatcattaccaaagagttntactctctgataatctattaccagaaggtactaatcgattactagtgttttaaaacattaagatttcaaatttcaagagttacaacttgtgtttaaacatttttaacttgtgtaatcgattacacaatacttgtaatcaagtattgtgttatcgattaccagtgtttctaaatgttttaattttcaaaattcaaaatgaagagttacatctgttgatgtgtggtaatcgattaccagtgactgatttcgaaaaatacatttccaaaagtcacaattactcaagtgacttgtttctgaagattctttcaaaagtcacaactttttaagtgactagttntaaagaaattgccaagagtcataaactntgacttgagttatcaagagattataagtatg

SEQ ID NO: 73 - DNA, 397 bp, Glycine max
  unsure at all n locations
agcttgccacccagcttgcccaggcgagcaaggttgcttcctccagaagcaacaaccttctggaggaatcttctggagggcccaagtgggccttggtgctatttgcacccccatttttactaaatacacccctgcccttttttggtgattcttttttcgtaaagttacggaaacttacgaatttcgtaacgatacttattttctttccgtaatgttacagaaccttgcggattacataatcatcccctttttgacttacggaatgttacggaacctcactatttgtgcaacgatgcttccttttgatttccggtgtgtcacggaaccttacggattgcgcatcaatattttcttttgatttccgcacgtcacgaaatttcacaaatngcctaatgat

SEQ ID NO: 74 - DNA, 465 bp, Glycine max
  unsure at all n locations
tgttagaactatcatcacatgacgctntattggcacagaacatgttgctttctaagcaacttgagattntaacagaaacactcggtaagctgccaactaaattgtctattggtcaacctacacactcttctgttttgcaggttataggttgtaccatctgtggtgaggctcatgaaatgggccaatgtattcccactaaagaaaacactcaagaaattcattatatgggaaatcaacaacgacaaaggtatactcaaggaggattttcaggcttccagcagggtccctataatcaacaaggacagtggaggacacaccctgncaaccagttcaacaaagactagaatgggccttcaaacagtccaatccaacaagggcctaacatattcaagaggactactaagctggaggagaccttgactcagttnttgcaggtaacaatgtcaaatcatanaagcactgagt

SEQ ID NO: 75 - DNA, 418 bp, Glycine max
  unsure at all n locations
agcttatactcaataagaggatcccgctgcgcatatccccgtaaccccacggcttgctgaacaaattttagtgcctgcagatgttctttccacaggcgatcgatattgcttaagattaggaaccgctctgcttctttcatcaagcctgctgcttgttgctccacaatatcctatggggcagcattggttgtaataaaaaggtaaatttaaaaagaaataaatggtaaagaaaattatgtgaaaagacaaggccactgaaccaattcaagacgactcaatttttagacatgacacatgatggtaaaagtccaaccttatatagcacaaagttattacaagttgcactgaggtttgataaatccctctccccctttcccganaatgtataatcaattacttgatttaaatcacttatctc

SEQ ID NO: 76 - DNA, 399 bp, Glycine max
  unsure at all n locations
tgcctanagaggtccaggaaggacaaggcagccgaaggaactagttccgctccggagtatgacagtcaccgctttaggagcgttgtacaccagcagcgcttcgaggccatcaagggatggtcgtttctccgggagcgacgcgtccagctcagggacgacgaatatactgacttccaggaggaaatagggcgccggcggtgggcatcactggttactcccatggccaagtttgacccagaaatagtccttgagttttatgccaatgcttggccaacagaggagggcgtgcgtgacatgagatcctgngtaaggggtcagtggatcccgtttgatgccgacgctatcggccaactcctaggatatccgttggtgttggaagagggccaggaatgtgagtat

SEQ ID NO: 77 - DNA, 397 bp, Glycine max
agcttgctgctattcttgtatatgtgtactgagatattttccttgagctctgatgccaaaaatgatttatttgcatgttaaaacatagatttaaccttaaatttcacccaaatcatagttttctagcaaaagttacaaataaaataagtttaaggacctttagtaaaatgaaaatatgccccatatttggactgagagtgacaacagtatggactatttttattaacgttttgacctcaaaaatgagttttctatgtttgaaaatgtatggtagcgtataatatttgtgagaatccgactaacagagcaccaagagcactaaacataaggtatgagcgaaactgtgaagaactgagtcacaaagagattctattaccgtagatgacttaactttgga

SEQ ID NO: 78 - DNA, 461 bp, Glycine max
  unsure at all n locations
tgataaagagattntgatagaagactntgaggccaaactattccaatataaaatgagattcttttaacaatttaactaagtccttatttgtgattttcttgatcttatttgttgacttggaacaatgtgtgctttcatcaagtaaattcttttggcatcatcaaaacctgcacgattcacatttatgtcactcaacctctaggttttgagatcaaaaggaaggaattaatggtgtacaagttgaataaggccttgtatggtcttaaacaagcacctagagcctggaatagaaggattgactcatttttcatttagaatgaattcaccaagtacacaatggaatatgatgtatatgtgaaaaggaaaactaagggaatacttttgatttgcctatatgctgatgatttgcttgtgactggcagcaatagtgaagaaatagagaaattcaaagttgagatgat

SEQ ID NO: 79 - DNA, 347 bp, Glycine max
  unsure at all n locations
agcttctcctattctgtgactcttccgttggaaaatcctgcttgcttctcagattcgctgtgagttatcactttatttgcttctcctaatctctccttctgttcacttcctttgtttctttgtttcgtttcaggatgactcctatgtcgacagctacgtaagtactattggagttgatttcgtaattatcactcttcttctcttttggtatttctatttatggcccaacactcattcttatttattttcgnaaatcaaaccatgggcttggaagggaaaccgccagctgcagattgtagtattctaagtagtggcgttgccacgatcatatagcagtgtaggacttt

SEQ ID NO: 80 - DNA, 445 bp, Glycine max
  unsure at all n locations
tcagggtataaagaaacttcatgagcctttgtttttaagctataattcgtattgctcgcttagcgcacagccgcccttatcgagtcaatataacgattggttttaacaaagccttgtgcttagcccaacctcgcgctaagcccaattccaaattttcaaatcccagagagttttggggcttagtgcagtaggcctgcgcttagcactgtctgcaactcaaaattgttctgcaatttgcgcttagcatgagatgtcaggcttagcgctaaatcaagctctaacttacagggatagtccangcttagcgcatggaatgcgctaagcataattctatgagtttcaaaaatagtgaaggattggcgcttagcgcatcttgtcgctaagcccaattcatgaaagttcaattccagggaggaaattgagcttagcgcangacagcgcgctt

SEQ ID NO: 81 - DNA, 387 bp, Glycine max
  unsure at all n locations
tttctttatgattcattctatgcacccatagaggtccacattgtgtgtagagcatttttattctcgttgtgtgtactttttatacgccctgtcgacgtgcttaagccattttacttaagtcggttctcgcttaacttaaaaataaaatagacttccaccgaacgtgtgaattgattcatatctgacatcatattgagtttataagcatcttcttgaaaagttgaacaagcataagacatcatattgtaaatcaaacaagtactaaaactatgcaaccatccgtgtttcatactttcagtatcgtgtttaaattatgatgcatatcanatcatcatgaaattcctccacttttgaaagcaccaatgaaatgttcgtctcatggtcagt

SEQ ID NO: 82 - DNA, 294 bp, Glycine max
cccgcctcatgcctacgatagcaacactctaatacttccataacgttagtagttatccataaacctcgcttagtttgcctatgagcataaactagagtgtgatgctacatagatttaccctgcaccacgccattagttagatgagtatgcgtaaccacatagaaccactgattcggaacatgatatacatatgacgatgagttattctgatcctagatataattaggatccccgttgtacatcggtggctcatgcactttcgacttagacaccaactatggatgagtcgattac

SEQ ID NO: 83 - DNA, 315 bp, Glycine max
agcttctattattagctgaaccattgtatctatacacacaagctgagtgttattcagaccattagagtttatctcttttatcttagtgagagtgattctcctaaattcttgagtgattcaagaacaccctggctgtatcaaaggactttcacaacctttgtgtgttgccctcgctggaaagagtgattctttccttcctatcatctccacccttgttctttcaaaccacaattccagaaaatccacctctgcccaaaattatcttgtgaccataactcccatgttacacactcagattaagtgattcttgagcct

SEQ ID NO: 84 - DNA, 449 bp, Glycine max
  unsure at all n locations
ctaacatgccgccttactgccgcaagcctctttagtctctacataacgttgcgaatgtcacaagatgcacttgggaaactatcgactgacctggctattgtgcaacctgcacactctaatgatttgatgctatacggcgcaccatatgaggagaggctcatgacttgagcctgtggattatcactaacgataacactcaagagattcattatatgggaggtctgctgcgactcctgtattctgccggatgattgttaggcgtccagcagggtacctataatcaacacagacagtggaggacacaccctctcaaccagatcgacgaagactataatgggccttcactctgtccactattacaaggggctaacatactcaagaggactactaggctggatgagaccttgacttcagtnttgcaggtagcaatggcaaatcataacagcact

SEQ ID NO: 85 - DNA, 361 bp, Glycine max
  unsure at all n locations
agcttcagactgctcaattgctccaggctgctgcatggaagggcaaaggtctgtatggtggtcagcagaggagcacaaaccacaaacccttgcgacaggtacagatttctgattcaaggccaactgggttaccaagttgaccaacgcatccagtttgccttcaagcttcttagtttcagatgatgcagatgggtttgtagctacctcatgcactcctctaatgattatggcatcatttctggcgctaaactgctgngagttggaggccatcttctcaattaaatttctggcttcagcaagagtcatgtctccaaaggctccaccactggcagcatctatcatacttctctccatattactg

SEQ ID NO: 86 - DNA, 344 bp, Glycine max
tgaatctctctcaactgcttcttcttcttctttgtaccaaaagttttctgaagatgtctggctctccaaaccttgaaaacttgcgctattcatcttttcattctcttctgcctttgccaaaaagaattcgccaaggactaaccgcctgaactcttgatgtgcctctcttctcctttatacaaaagaacaaaggactaaccgcctgaattcttttgtgtctcccttatgccttgacaaagaactctgaacgacacaccctgagaattcttttgattattgccattccctaatacaaaactgtcaaaggactagccgcttgacaattgttttcgatccccattcac

SEQ ID NO: 87 - DNA, 402 bp, Glycine max
  unsure at all n locations
agcttaccattataaagaagcttgtgaggaagagtttccagccaaaccaacaagttctgttattcaactcaaggctcanattgtttcatggcaagatcaagtctataacagccgtaacttttaataaataaataaataaataaataagtaaaaataaaataaaataatataattaggtcataaatttccactatataaatcaaatgttaacctagagcagcttttacaaaacacttatgtccctttctcttcttctgacgcacaagaatcctaacagagcaactggaggaggagctctagagagcaccagagacgccacaattgctaatggagaacgatcgagggactacatcgaggtaagggatgagttattcacgcttgnggattagaattaacatgtat

SEQ ID NO: 88 - DNA, 451 bp, Glycine max
  unsure at all n locations
tgtaatcgattacacacatactgtaatcgattaccataggagttnttcagaanacattctcaatagtcacatctttttgtgtggttcttgaatggctatcataggcctatatatatgtgacttgagacacgaatttgaaaagagtttttcagaacaaaaaggtctgatcctcttataaagcaaaatcgcgttatcctcttacaaattccttggccaaattacttgtgattcaataaggaattatttgagtgctcaaattgttcaatctatctctttcaagagagattacttcttttcttcttctttattctgaagagggattaagagaccgagggtctcttgttgtgaaagaattctaaacacaaaggaagggtagtccttgtgtgtttagaactcgtacaagaaatttacaagatagtggaactctcaagcgggttgcttggggactgga

SEQ ID NO: 89 - DNA, 563 bp, Glycine max
  unsure at all n locations
gctcgcctcactcacctcnacctntcatactccgagactcctatacatacgtagctgtaactatagtcacacgactctgctcctaagcctcgcaccgcacnntttgtttgcatgcatgcacatacaggccattcgagtcggcacccgtgattctgtatatctgcctgnatgcatgcaagcttgttttatattctcaccacttgagatgatgacaacccttgtatctagaaacacatacccatactctttccctagtcgatcactcacttaataatacatattctcgccctttgattttgagtttatgcttcacttcgaattagatcaattacttacgcgagtccttgatttaatccctatttccttccccctttggcatcgacataaagcacaagggcgccaccaatcttaaacatacatacatgaccaatctttgcaatatagtcgttgaaagaatatcttgccgactagcaaaggactgcgtatgcaccaaaatattgtccaacagtcattgagatgacggaattgtggccatcattatagtgcaaaagaactaattatcg

SEQ ID NO: 90 - DNA, 559 bp, Glycine max
  unsure at all n locations
ctccctctccctctaccgctgtccgtactcgtcttgagcttgacctctatcctcactctcctatcccccctcccgccnccttgattgattcttgcgtggcgtgacctatacatactcaagctctagcatgaagacagtacctcagatggagactttcatcttgatgatactacacaattcgcgataggttttttataagcagagtggctcacgagaatctggtcctaaatgtttccccaagcgcatgcaatctctgggaatccattaccacaatagtgtcgtcgcttactactagcagactgcgcttaacactgtttcgcactgaatgtacgtcgtccctgtggacttacaatgagatgtcatgcataacgctgtgtcggtctttcacttacagtgacagagaacgcttaactcctggttcgctcgtaaacaggctcatactattccatagactctcggtgagacggactcactgcatcgtggacgggtacccttgctggctatgaaatcccatgagaggttctcctagacgggtctgcgctttaaagtgctctacatc

SEQ ID NO: 91 - DNA, 396 bp, Glycine max
agcttgtagaattatggggtacccatcacatgtggtactaggtggcggtcgggcgatggtgcacaacaagctttccacatacacaatgcgcgcataaacccaccatcccctgttgcccacctccaactgagctcacgtactcccacgtagcccatatcctcgtttctctcaacaccgggtccccatcaatcctctcaagcttccacaacatccaagcaaaacaacattcaaacagcacaagctatcacagccaagcaaaacagagccaaggcagaaaactctgctcaacacatcaaccaaaatcacagcttttctcacgtagagaccacagtaacaattccttcgatccaattcgttaaccgctggatcgactccaaaattatactggaagtctat

SEQ ID NO: 92 - DNA, 360 bp, Glycine max
cttacgaccacgctctctccactattttactctcaaatgatctacattcaccatcccctttgtacttacacccttccattgtctatacacaagacacattgatcttccactggtgatgaatatgcaaggctagacactccatctatccaaggagctactccaccactggctaaatatatatatggtctattcatgctactatctgcgagagtggatcatattcttgaatgctagtcttgataatcatgaatatgaatatgctgaccaatgctaatgactcacgttatggattcatttgcttcacttcgaagatagacacaaagtgtttggatgaactctcacctaatttgagatctcaat

SEQ ID NO: 93 - DNA, 407 bp, Glycine max
  unsure at all n locations
agcttctatcagtgcaacaaagaccttagtttgttgatatggcaaatttcaaggctgtaggagtaattttgaaggaatgaattggcactagaagaagaaattctttaaggatgctaatcattatgtgcgggataatcctcacttgctcaagattagagcaaataaattgatataagatgtgtcattttggagcattctttggcattatcacaattcaccttatggnggccattttaatggagaaagaagtgctgccaaggttctccaagcangaattttgtggcccatgctatataaagatgcacatttgtatgtgacacaatatgacaaatgccacagaaaatgaggaatttcaagaacgaatgagatggccttgaacaacattcttgaagntgaagttttgactg

SEQ ID NO: 94 - DNA, 287 bp, Glycine max
  unsure at all n locations
tatgcgtgaatctgggacctaccatggcggaagtctccacagaggccattgcctccctcgcccagaattatgaccagtcgttcaggtgcttcacttttgtggacttacagctatcacccatggtggaagaatctgaagagatcctatgatgccctctagggggaaggaaaccatacctcttctcangattctatgcctctttagctagaatttctaagatagtccatatctcggcgcaggaattacaccacagaaagcaagtcgaaaatggagagagtggagtaccg

SEQ ID NO: 95 - DNA, 380 bp, Glycine max
  unsure at all n locations
agcttcggaataaagtgatgaggtacaagccctaaaggcagagcttgaaagagcccgggtagtcaaagagaagttcaagtccatagccatcanagtctgaagagagtatgatgaactaagggacgtcaatatggccaccgctgaagccttggaatgagaaaccatgaaggcccgaaaggaagaacatgaccaaaacaaagttntgaggggctttatagggcagcaatagtgagctcaagctccaaagaggtgaaaggaatcatcacggntcaaaggcatgatcttgaaggacgagctaaaggcttgccttangtcgaaaagaaatttgtcccaacagttaaagtgagactgaanggaatatgtgggccatcatcgatgag

SEQ ID NO: 96 - DNA, 432 bp, Glycine max
  unsure at all n locations
tgtaatcgattgcacacatactgtaatcgattaccagaggagttnttcagaaaatattctcaacagtcacatctttttgtgtggttcttgaatggctatcataggcctatatatatgtgacttgagacatgaatttgataagagtttttcagaacaaaaaggtcttatcctcttataaagcaaaatcgttttatcctcttacaaattccttggccaaattacttgtgattcaataaggaattatttgagtgctcaaattgttcaatctatctctttcaagagagatttcttcttttcttcttcttcattctaaaaagggattaagagaccgagggtctcttgttgtgaaagaattctaaacacacaggaagggttgtccttgtgtgtttagaacttgtaaaaggaatttacaagatagtggaactctcaagc

SEQ ID NO: 97 - DNA, 370 bp, Glycine max
  unsure at all n locations
agcttgcagactataccttcgaccaaacacggccgtgtttctgtctcggcccggatttaaagcgggttgcaacaccggctccgcttccctaactgtactggaggcggntgccgtggctttgtcctctatggttntctggagttttaacatgacctccgagatggaagccatttgatcttttaaggccgatagatcgaccttcatctgttcctgctcgccctcttcattatccanttttctggattgagtgttataggggtgccttggtgttttcttagttatgatgaaattcctaaagaaataaacaacggtgagtatgccaccaaaacatgagtatgcaaatggatgatcggagcacttggatccaccc

SEQ ID NO: 98 - DNA, 458 bp, Glycine max
  unsure at all n locations
tcatcatgaatcaacaatgattcanaggtgttntgatgataacaatgatgacaacaaaagatgatgacaaaggtgatgaacaaaaagctcaagtgaatcaaagaacatctcaagtaaatcaagaacaagtcaagagttcaagaatcaaggagaattcacgactcaagaagaaagcctagaatcaagaatcaagactctctcaagaatcaagatcaagattcaagactcaagattcaagaatgaagaaaagactcaatcaagataagtattaaaaagttttttcaaaactttgaataacacatgagtttttgacaaaacctttaccanagagtttttactctctggtaatcaattaccagtagcaaaatgagtttgaaaaaagttttcaaactgaatttacaacgttccaaatattttcaaaaggctgtaatcgattacaatgttttggtaatcgatta

SEQ ID NO: 99 - DNA, 349 bp, Glycine max
agcttctataaaggttcttatggactgcttgtctcatcattccagtaataccttcacccacaatattgaaaagcaagggagctaggggatccccttgcctcaaacccctagaaggattaaactccttagaagggctaccatttatcaaaattgatatcgatgctgagtggaggcaagctgatatccaagatctccattttggacaaaaacccattctgcacagcatgtaatccagaaaagaccaagaaactgaatcgtaggccttttcaaagtccaccttaagaatcatcacaggtttcttatttctccttgcttcctcaaccacttcattaaggatcagaataccatg

SEQ ID NO: 100 - DNA, 432 bp, Glycine max
  unsure at all n locations
tatcaaccaaatacccacgttntcaaactcaaagtatattacaattacaaaacataaataagaaagatcttcacatctataaaaagacttaatgaacattaacagaaataaaacctaccagaacctgtaagtgaaagaaaatatacagacccatgtaaactatagaacatagatctaaccttttaagtggaaaataacataaacgtagaagtatgcaaatgaagatttaccaaatgaattcagtaatagcaactttacctgaaagtgtaaactgttaatgcagcacccaatccgccaaaacaatgggaccatgatcctctggaactctaccatgttaataacttccaaaatttcttccagttcacccagaaacatcacctctttctgactatttgttgctggccaatatttcaacaagccgcttatcacaat

SEQ ID NO: 101 - DNA, 406 bp, Glycine max
  unsure at all n locations
agcttgtcaaggccctaagcatggacaagtgttgttcagtgttgagagtggtagccttgacaagtgttgtccgggttgcttctgtcaagttgtctggggtggacaccctttttgatgcaagaggctccaagaggattgggctagagctgctgaagaaggtcctaaggttctcatgaactttaggatagatttttgagcccatgggccaaggttgggtccaattatctttgtacgtattagattacgatgtcactatatttggttcttgtaattagggctccataatgtaggtagggtaccctagaaatataggatttttcagcccttgtattttagggcacctagactagttnttgtattaagggtagttttgtaatttcacatgcactaagtgaatatttaatgt

SEQ ID NO: 102 - DNA, 451 bp, Glycine max
  unsure at all n locations
tntaaggccctcaaatgactggatggcaacaccccacttaaatgattatgaaagagggataaatatgtgagattcttggacaaattaaaagaaggaagtggacctgtaaagttattggaagacaagtctagataaacaagttggctgagttctgagaatgaactaggaagtgttccattaaattggcagtaagctagatcaattgtagataactgcttcatattggaaattgcacctggaagctttcctgagaaatttgtatagctaagattcatgtgatgaagagaaccatgttgtgggaagtttggcaaagaacccccaagatcttggttgtctgagatgtcaaggaccttcaacgttgatatttggaatatatcttttggaaaagaaccattcaagccacaacttcttaactctagtgtgactaaattggagaaattacaaaggattc

SEQ ID NO: 103 - DNA, 410 bp, Glycine max
agcttgctgctattcctgtatatgtgtactgagatattttccttgagctttgatgccaaaaatgatttatttgcatgttaaaacatagatttaaccttaaatttcacccaaatcatagttttctagcaaaagttacaaataaaataagtttaaggacctttagtaaaatgaaaatttgccccaaatttggactgagagtgacaacagtatggactatttttattaaggttttgacctcaaaaatgagttttttaggtttgaaaatgtagggtagcgtataatatttgtgaaaatccgactaacagagcaccaagagcactaaacataagttaggagcgaaactgttgaaaactgagtcacaaagagatttttttaccgtagatgactctaacttggaatccaagtctctg

SEQ ID NO: 104 - DNA, 460 bp, Glycine max
  unsure at all n locations
tgataaagaaattntgatagaagactttgaggccaaactattccaataaaaaatgagattcttttaacaatttaactaagtccttatttgtgattttcttgatcttatttgttgacttggaacaatgtgtgctttcatcaagtaaattcttttggcatcatcaaaacctgcacgattcacatttatgtcactcaacctctaggttttgagatcaaaaggaaggaattaatggtgtacaagttgaataaggccttgtatggtcttaaacaagcacctagagcctggaatagaaggattgactcatttttcatttagaatgaattcaccaagtacacaatggaatatgatgtatatgtgaaaaggaaaactaagggaatacttttgatttgcctatatgctgatgatttgcttgtgactggcagcaatagtgaagaaatagagaaattcaaagttgagatga

SEQ ID NO: 105 - DNA, 411 bp, Glycine max
agcttcttcagaccatgatactctaggacctcaggaaagcaaaatgttatgaattcaacttggttgaatcaactcaattgttagatagttgtgccggtataatgcttcatagtgctcttttgcaaaccatggcataaatttgggaggggatgagtgttttggagattccccctttgtagatcacccaacaactttctttctcttcttcttcattttctcctctatgagctttgttttcttctctttttaaggcttaaggttaaagggagcattgttgattgcaaccctcttaatatgtttccttctaggttggtctaacatggtgtatgggaagaagaaagtgatgggttgaaggaattacggaagaagaaagggatcggaaaaaggggtacttagcattcccaaaaactt

SEQ ID NO: 106 - DNA, 463 bp, Glycine max
  unsure at all n locations
ttgatctaccaccaccgccgccaccatcattntagttntctattatttaattttactagtactttgttttctagccgtgtatttggctatattatgacatttggataatttagtatttctttatttgcatggtttgattgaacaattatgaattatgttatatgactatgtggtttttatatatttgatctattcatgtttcttccttcatgattggcttatattcttcaatgtatgtcttgtgaatgattaatagtatatgtttgtcctatacttgttacgcactttggctttttgttgatgccaaagggggagagaaatagggattaaatcaagaactcacataagtaattaacttaatttcaagtgaagcatanactcaaaaaacacaggcggagaatttaagtgagtgttcgactaggacaaaatgtgtgtatgaatttcttgatttcagggttatcat

SEQ ID NO: 107 - DNA, 406 bp, Glycine max
agcttgcattattgatggagaaaagggaacaaccatgaatggacaaagtaatttagctgctactaactctgtttttcacttaagcaaatcaatttctagtgatttttaatcatcgaaaatgaatcttataaaattactgcttcatcatcatttagtggtgctatttgatggcaataactaaaaacattaacggaatataagtttaaaagactaatcacaattttgtttgggaactaaaaataaaaacctgaagaaatccagacataataaacataatctaccccaacttatccaaaatacattacattctatgttctataatcccttttcctttttttaagatttttttaaaaatattatattacaaaaagtatatattgataaagcattcttttttttcaatttt

SEQ ID NO: 108 - DNA, 388 bp, Glycine max
tcgcgatgatggtcatgatgactacgggggatgacgactcctgtgaggaacacacagctctactgagtcagagaacatctcaagttattctggatcatgtctagagttcgtgattcaaggagaattcgcgtgtccagaagaaagcctagactcaagaatctagagtctctcaagaatcaagatcacgattcatgactcatgattctagaatgatgaatagactctttcccgatcagtattaacgagtttttgtcgaactttgaatagcacatgagtgtttgacagaacctttaccagcgtagtttgactctatggcgctcaattaccagcagcacaatgagctcgaaaaaagttttcagactgaatttacaacgctccaaatattttc

SEQ ID NO: 109 - DNA, 318 bp, Glycine max
agcttatatgcaatgtggtaccatgtcagtgaataacctcgtcgggcgcctaggagtacatgacaagacaaaccacacaataagtagtcaagtcactctcactaggtaatatcatagggagaccagtcagggtcacagtgttttgcgagaatgatccaaccatatgggatcaacataggcttaaaggagcactcaaaccgtgtaacccccaaggcctacactccgaagagttcgtcagggcctctccctcctgattcaggtccaacccagaaaaattttagcacacagactctatctatgaactgtacaaaacacact

SEQ ID NO: 110 - DNA, 165 bp, Glycine max
tcttatccaacgctcatcttggtggagaagctccttcttccatggcttattccctagtggatggtgcctcctctcacctgatctactttgccttccgctatatctccatggcggaaaatcgccattaaaggacctcatcgaagctcatggaaccatcctacatag

SEQ ID NO: 111 - DNA, 394 bp, Glycine max
  unsure at all n locations
tataaagctgtttctggttgtatttaagtcctaagctatagcttctttcctcatgtaaccctgttcagacttgttatatatatatatatatatatatatatatatatatatatatatatatatatatatatatatatatatatatgggtttgctaatgcactcacaccatttttttagtatgagtacattagcaatcaacaccaaanattttaactaaaaaatcaatcacctctcttatttttcaaaatttaatgtagggatatcctacatttgttccaagctcgacacatctgatctatatgctcgagcttgagggggagtgttgaaatatgataagttcccattggaaatgatctgttcctaattctactactgtttcaatgaaattactcg

SEQ ID NO: 112 - DNA, 330 bp, Glycine max
tagctggtccttgtttgcttcttcacacacctctctctctctctctctcatgcactccatatatcggatcctagatacacaaacaaagaaagggctataccatatgagggatatgaatgaaagaaagtctatagcgcagtgtcatttttttggattagaaatatttccccaagctgaacgagaagcccgccatgccacggctgtagatatccgttttaatatgaaaacattcccgtggggctttcataagaacaatgagcccttcataatctatgagagaaagcacaactcatcgaagctcgatcattacctatactatcttgtttatat

SEQ ID NO: 113 - DNA, 229 bp, Glycine max
  unsure at all n locations
gctttgatgccagctatgaggtatgtgcatgtttgaacagacatttatgcttcgcctatacccccctccttgttctctagcgcaagttactcctttgacaagtactgggagctggagtaaaatgatgacatgccccttagctggactgacagcgactacagtctggactatttttagtcacgacncgacctcttaaaggacctttatatgattgtaaatgcagggtagc

SEQ ID NO: 114 - DNA, 407 bp, Glycine max
  unsure at all n locations
atgatataagactttgaggccaaactatatccaatatcanaatgaggaatcttttaacaatttaactaagtccttatttgtgattttcttgatcttatttggtgacttggaacaatgtgtgctttcatcacgtaaattcttttggcctcatcagaacctgcacgattcacatttatgtcactcctcctctaggttgtgagatcacaaggagggatttaaaggcgtacacgtcgaataaagccttgtatggtcttagaccagcacctacagcctggaatataaggattgactcagtttacattgacaatgacttcaccaactacacagtggaatatgatgtgtatgagaaaaggataactacgggaatacttttgatctgcctatatgcttatgatttgcttgtgact

SEQ ID NO: 115 - DNA, 378 bp, Glycine max
agcttataccagcccaatcccccaaattttttaatccgagctgggaattctctcccgactcaagtaaaaggaccacctgcaacagaaagagcgccggcccaacgcacggctccagccgctccccggccagttaataatacagcccccgacgcgacctataaatatgcacagcacccgcccccgaaagataacttctcccctattcccatggcatactccgagttatggccttcattattggagaatcatttggtggtggccatacccgggaaggtcttccagccaccctaccccaagtggtacgacccgggtgccaagtgtgtgtaccatagtggagctcccggacacaatattgactcctgcatcccgttcaagtat

SEQ ID NO: 116 - DNA, 457 bp, Glycine max
  unsure at all n locations
tccattgttgagttgttgcttcccttgtcacgctctaattcactccccacaagtaagtgcaatttcccttggttatttggctctccattgatgtgttttggtgctttagttgctcatttttttgcaaaattcgtgaagcaattcgcatctgaatccatgcttgttttgttgaattgagggtttgtgtgagaaggcattatgcctatgttgtattctgaagcaatggggcatgccacattgtccccattctcttgcaatttgagtccgaacgtgcgccccccaagtgctcggtgaagtgccccaatgatatatgaatatgattttgcacaattgggatggtgggactgttttatatatgtagagacagcataagagattcaaaatatgtgcccgaatgcaatttcaagcttatgaacccanaccttttatcttcaatgcaagaagacatactcatagc

SEQ ID NO: 117 - DNA, 305 bp, Glycine max
agctttgatagtaagtttaattgaataaattatactcactatcacaaaaatggtcttctacgacgcacgttttacgacggttgtacaaaaaccgatgtcataagtaaagtagtgacatttttgtaaataacttaaaaattttaaagatggttcttatcaaaccagtctttgaaaaggaattaccacatcagttcttctacaaccgacgtagaatgcgaagcttaaaaatgcgaacgggctctctctcactctctattatatcctctttataatctctctcctcctaaaatctagaaaaccctaat

SEQ ID NO: 118 - DNA, 427 bp, Glycine max
  unsure at all n locations
tctctgcctcggntgaaacattggcggtgacatgtgacctcatgtggccacccaaggatcttccacaagggaagctcttgctgcagaacttgcacatgtgtttcacttcttgatcttcttccattggattgatttttcaagatcacacacacgcacggatcagcaaagaaagcaaaattaaccacactttcttgatcaccaccaacacaagagaaatcgatcacaagggaaaaacagcaacaccccagatcagcatcacatcttgaaagtggttggagagaagaataataccgagaagaagaagaagagaaaccccatgtctgaaaattgcaaggtggtgagtgcaagatctaacgcagaaaacaagaggaaaagaaaagggacaagagaacgtgtagtagtagcacaaactattatatatactata

SEQ ID NO: 119 - DNA, 394 bp, Glycine max
  unsure at all n locations
agctntttggagtagaaacataggaccaactcattntatttcaaaaagaaagtcgtatctagtcaaggtctgagagaccatacaagtttcctaacgatttctaattatgtgggccattaagtctatcatatgctgacaatagccgagaagcccatgaatctcttcgggggcggagtaagtgtctgccatcgccttggccttggctaacaagcggngaagttcttgactcccgttcaaggtaagagcaaaccgatccatccacatggttgcctcttggtgtaaagagtcgatcacccttcctctagcctctttttccgcgtatacttgagcatactcgtccgcgattctatgctcgtgggccgtggctagacctaactcttcttggtacttggcg

SEQ ID NO: 120 - DNA, 335 bp, Glycine max
  unsure at all n locations
agctntntattttcagtagatgaagatgaattcgtggccacctcatggactcctctaaggacaataacatcatttcttgctctgaattgttgggagttggaagccatcttctcaatcaaattcctagcctcaacaggggtcatatcaccaagagctctaccactggcagcatcaatcatactcctctccatgttactaagtccctcatagaaatattgaagaaagagttgctcagaaatctggtggtgaggacaacttgcacacaatttcttgaatctttcccagtactcatacaagctctctccactaagttgcctgatgcctgaaatgtcttt

SEQ ID NO: 121 - DNA, 439 bp, Glycine max
  unsure at all n locations
ntaacctcatcgtctctcacagtctttagaattgggagccaatccaatccttgtgttcggactctcagccacttatgatagccgtcgatgatcccattactgcttcccctaagctctatgtcctttcttcatgccgcatcccatgccttgcgaactccttggagtaccctcacgttgtggtcaccgaaaccccgtgcgatgaaaggcgtgatgctttcgtctgatggcactcctctcatggggtagccaagctgtcttatggtgaggacgggattataattaatacaaccccttgttccatcaagggaacatttggacatccttcgcatgaagatagaatcctgattcttccttccttctagcgagggaacaaattaatagacgcccctccatgctagccaagagttggtcccaattcgcctttcctttttcgatgcac

SEQ ID NO: 122 - DNA, 397 bp, Glycine max
  unsure at all n locations
agctttaagccaattcatacgacaataactttntactcggatgtctgattgagtcccgtaatataacgaaacgctcgaaattgaatgttgaagctctaaccctattcaaacaacaataacgttttactcggatgtctgaatgagtctcgtaatatatcgacacgctcgaaattgaatgttgaagctctaagcctattcaaacaacaataacgttttactcggatgtccgattgagtgacgtaatatatcgagacggtcgaaattgaatggtgaacctatgagccaatttaaacgacaataactttttactcggatgtctgattgagtcccgtatatatcgagacgctcaaaatgaatgttgacctctgagccattcaagacaatacttttactcgat

SEQ ID NO: 123 - DNA, 427 bp, Glycine max
taaacattcaatttcgagcgtctccatatattacgcgactcaatcagacatctgagtaaaaagttattgtcgtttgaattggctcagaggttcaacattcaattttgagcatctcgatatattacgggactcaatcagacatccgagtaaaaagttattgtcgtttgaaatggctcagagcttcaacattcaatttcgagcgtctcgatatattacgggactcaatcagacatccgagtaaaaagatattgtcgtttgaattggctcagaggttcaacatataatttggagcgtctcgatatattatgggactaaatcagacatccgagtaaaaagttattgtcgtgtgaattggctcataggttgaacattcaatttcgagcgtctcgatatattatgggactcaatcagacatccgagtaaaaag

SEQ ID NO: 124 - DNA, 413 bp, Glycine max
  unsure at all n locations
agcttggttcaaccctataatccaaggaatggcaattctaatcgccaatacttcaacaacatctcatagggatgaatgactcaggcatactttaagcttatgcacggaaaatgtaattatgaaattgagatgcccgaagaaacaccatttcctagttaaccatgcattaggtaccatgttcaattattctgttttgttggtgtgtgttttttttttttttagaaatgggtttatgatcccaacatggttggctcatggtgcctaacacatgcaactaagaatgtagtgtgaagtttcacgcttccccttttttgtttntgttttgtagaggaaaacgcaaggatgagcaaacatganaacaaatggtatgcaattttgcagatcanaaagtttgttgaacgcatatgcatgat

SEQ ID NO: 125 - DNA, 333 bp, Glycine max
tcaaccttaggccatcatttctgctccaaatcgcgaaaggagagcattcttggagtcgtgaagtgcgtggctacgagtgggacttcgaaaattcaggtttgggtggacttctttctcctttaattttcgtgggtatggggtttggggagatatgatgggtagtcttgctaggtttctgctgtgtgatgattatttgtgaagacatttgttgaaagcttgttgaaattgccatgtttggatgagttagacatacccattctgttttagggtttttgtgatgatgcttgtgatgtttatatgctgaaattgcccatggaaaactgctagagatga

SEQ ID NO: 126 - DNA, 405 bp, Glycine max
agcttcttagtttcagatgatccagatgggtttgtagctacctcatgcactcctctaatgactatggcatcatttctggcgctaaactgctgggagttggaggccatcttctcaattaaatttctggcttcagcaggagtcatgtctccaagggctccaccactggcagcatctatcatacttctctccatattactgagtccttcataaaaatattggagaagaagctgttctgaaatctgatggtgggggcaactggcacatagtttcttatatctctcccagtactcatacaggctctctccactgagttgtctaatacctgagatattcttcctgatggctgtggtcctggaagcagggaaatttttttctaagaatactctcttaaggtcatcccagctc

SEQ ID NO: 127 - DNA, 388 bp, Glycine max
  unsure at all n locations
agcttgctctatatttacattgatgcttatgggaagaggttgtatgccatttttgttttaagagtagtgtcccactggtaaaactaactttccaaatgtttgccttcgcaggaaatggccccaaggaagcttgcctcatagaggtctaggaaggacaaggcagccgaaggaactagttccgctccggagtatgacagtcaccgctttaagagcgccgtacaccagcagcgcttcgaggccatcaagggatggtcgtttctccgggagcgacgcgtccagctcaagacgttaaagaagcgctactaggaggcaacctagtaccttttaaatttctgcctgctatttgatcactctttatagtangacgcacctaggtgctcatgatcct

SEQ ID NO: 128 - DNA, 458 bp, Glycine max
  unsure at all n locations
tgcctaattaacctagaattgagaganaatgattattaaacacaaaatatgaaaataataagtatttattacctatacttaacagaaaatacttataacattacaaaataaccataaattgggagagtttgatacaatttatacaagttttatacacaaaagttagtcattttcaccgactaacaactcccccaaatttacagttttgcttgtcctcaagcaaaaagagaacaactcactagtgctcgagtgacaatgacatgcagtgactatgtacaaaggtgtatgctacaaagtgactgattgcatgataagagaatggagtaaaatgccctaatcacttgtctttcacaaggtatgcagttatccaaagagaagaataaattgtaacctgaacagatagatgaagttaggaataagacagatatcaagggaagtagcttacaccatagtctcat

SEQ ID NO: 129 - DNA, 347 bp, Glycine max
  unsure at all n locations
agctttactattatcttccgaacaatatatgaatgaaatgatgaaccttataattaaacaaagatactactactactaagtttctattgatgcttgtatctgagtactaaaaagaaagcctgttataatgattcaaaggcataacaataaacaacttaacaataaaccatgaactacagcagctggnggtactttaataaatctctttgtattttaaaatagtctctaaaattntatgtaaaaaagataactttacttatatttactaactaatgatataaaactaatttgctaacgatttaaactaaaacaaaaatgcgggaccttaataaatctctttgatttat

SEQ ID NO: 130 - DNA, 398 bp, Glycine max
  unsure at all n locations
ntaacctcatcgtctctcacagtctttagatttgggagccaattcaatccttgtgttcggactctcagccacttatgatagccgtcgatgatcccattactgcttcccctaagctctatgtcctttcttcatgccgcatcccatgccttgcgaactccttggagtaccctcacgttgtggtcaccgaaaccccgtgcgatgaaaggcgtgatgctttcgtctgatggcactcctctcatggggtagccaagctgtcttatggtgaggacgggattataattaatacaaccccttgttccatcaagggaacatttggacatccttcgcatgaagatagaatcctgattcttccttgcttctagcgagggaacaaattaatagacgcccctccatgctag

SEQ ID NO: 131 - DNA, 312 bp, Glycine max
  unsure at all n locations
agcttgtatgggtgagttataaattataatacctcagcttggttcaaaagatcatgtttactccgtcgcacgttgagcaagttttgcacagcttgcccctctatggacatcctcacccgactagctcttactctggcctgaactcgaaccaatgcctgcatgcaccttaatgtccncgctgtctgcttcctcacctgtctccccccgaacaagtgcttgaatcctcaccactggcttcaatgccctcaaagcccttcttgcctgcaatcaccacacaagtgatgtcgaaatataatgttggtctaatggtaa

SEQ ID NO: 132 - DNA, 414 bp, Glycine max
tgttcatgtgagagctcaacactaagttgctgatgtcttcacaaagcccttaatgcttctaactctctcttcctttatccacaagttgggactcattaacatttactctccaacttgagggggtattaaagttgtatgaagaaatggagttagttacttcagatagagggtagatagactagttggtaattaggtagaatgaagttagatactaagtttgttaagctggatataaaatagtgtgtatgcaaccttatattcaataatcatcaataatattctacagatttccttgttgcacaaagctctctatcaataaattcccctttgccaagtccacattgaagaatttagagcaattgtagaatgtcgaagaacatattatgtacatacaagacacaacttataaatctc

SEQ ID NO: 133 - DNA, 397 bp, Glycine max
  unsure at all n locations
agcttgctctaaatttacattgatgtttgtatttatgggaggaggttgtatgccatttttgttttaagagtagtgtcccactggtaaaactaactttccaaatgtttgccttcgcaggaaatggccccgaggaagcttgcctcanagaggtccaggaaggacaagacagccgaaggaactagttccgctccggagtatgacagtcaccgctttaggagcgctgtacaccagcagcgcttcgaggccatcaagggatggtcgtttctccgggagcgacgcgtccagctcagggacgacgagtatactgatttccaggaggaaataaggcgccgacggtgggcatcactggttactcccatggccaagtttgatccagaaatagtccttgagttttatg

SEQ ID NO: 134 - DNA, 450 bp, Glycine max
  unsure at all n locations
ctgatagcagatgatatgatccttactaggagtggatcgcttgatacaggtcatagagtttggatgatgctacttccagagagggaagataagtcaggatagacaccacaagaattgccttgataagtctgagattgggtcaacatgagacccagagagaagctctctccaaagtttataaaaggccaaaagtacttatattgaaaatgaaacccatacatatagcgtatctgaatgaaaaaaatataaatagaccagggccttcanataagttagggccaaaattacgacaataaaattataaataacaaatagaacatattttgcatgggccttcaaattagtttgggccttcaacaacaattaatattcttagtagtgcctctggctttggaccttcatccttctccacttgagccgtggtaagtatgtctgttaccaatttgtgga

SEQ ID NO: 135 - DNA, 394 bp, Glycine max
  unsure at all n locations
agcttcttgatatactgcagcacgattatattaatgcttcatagtattttttgacatatatattaatattgtcaagctaaaggcacaatttttgttatgctaattgataacaatgatagaaatgatcttagatacaccaagctgccttggatatgatgtttgattcgatgatgattgggtagtcagagtaaatgttagtttagagaggaagaattaactaagttaattatattaaagattaataatttgaaatgagactattaaaacatatagataataaattgtcataatgaaaagtttacgatctgtttggaatatgataaaataggataagatataccattatgataaactttaggtttatttaatatttgatgcacactanataatatta

SEQ ID NO: 136 - DNA, 440 bp, Glycine max
ctataaggacatgcatccagtcaacacaccgctgccaattcccttatgaatatcctgaatcataaataagttcttcaaacaatagtttaagttatgactgaagtttcatatacgcaaaggcaaataataataatagtaattgagctaagttttttggaaagtagttcaaatttaaaataaaaaatattaaatccatattaaattcgtaaatttgaaacattgtaattgtacttcaagtgacgatttttttttttttttgcagcaggtcaaatcaaggctggtatctttattttgagccaaaatttcttaagcagcgtttcacccgcaaattatgcaacggcgaaccaaaactttagaactgaaaatcttgcattccaaggaacccattagccattggcctcaagacaagaactacgtattgtggctgggttgatccctac

SEQ ID NO: 137 - DNA, 340 bp, Glycine max
agctttcagctatgtatctcattagtaatactttttcgtgctgttggatgggcaacaattgcctccttggtggtgatagtaatcactgtgctttgcaatactccactcgcaaagttacagcacaagtttcaaagcaaacttatggtgacacaagatgatagattgaaggcttgttctgaggctcttgtgaatatgaaggtgttgaagttgtatgcgtgggaaaccaattttagaagttctatagagagattaaggaatgaggagctcaaatggttgtctgcagtgcaattaagaaaggcatacaacacctttctcttttggcctctcctgagttggctct

SEQ ID NO: 138 - DNA, 453 bp, Glycine max
ctgcttgatgagaaagaggcacagttacgccaatttataaggtaagcacgtgttggtttattcagtggtttagcatcttttggacatgcttggtgttctgattaatttggattgaagtatggaaggggggagtactggttcatcgagcaatttgcgtgaagaaactgctcgtgtgtcgaaagattcttcagagctttttccaactggcattccacaagtaggtcaaacagagattagccaagattcatttgcgggtggactggggaatattcgttcggagttgattggctccacatctggcaatgattctactacttttctatcgaatgaccgtatgagaaatggcagagctgacaatgccactctaaaaggtcatgacagctccattagaggcagacagagatatacttcattgctgctcaccctccttgtcaagcgatgttaattaattgc

SEQ ID NO: 139 - DNA, 304 bp, Glycine max
agcttgctctaaatttacattgatgcttgtatttgtgggaggaggttatatgccatttttgttttaagagtaatgtcccactggtaaaactaactttccaaatgtttgccttcgcaggaatggccccgaggaagcttgcctcaaagaggtccaggaaggacaaggcggccgaaagaactagttccgctccggagtacgacagtcaccgctttatgagcgctgtacaccagcagcgcttcgaagccatcaagggatggtcgtttctccgggagcgacgcgtccagctcagggacgacgagtatac

SEQ ID NO: 140 - DNA, 376 bp, Glycine max
ctgaatgctctattcaatggagttgacaagaataccttcagactgatcaacacttgcacagtggccaaagatgcgtgggagatcctgaaaaccactcatgaaggaacctccaaagtgaagatgtccagattgcaactattggccacaaaattcgaaaatctgaagatgaaggaggaagaatgtattcatgacttccacatgaacattcttgaaattgccaatgcttgcactgccttgggagagagaatgacagatgaaaagctggtgagaaagatcctcacatccttgcctaagagatttgacatgaaagtcactgcaatagaggaggcccaagacatttgcaacatgagagtagatgaactcattggttcccttc

SEQ ID NO: 141 - DNA, 402 bp, Glycine max
  unsure at all n locations
agcttgctgtagtataataggaagcaccaatataaatatcttgatgcctactattgatatatagcattgaacatacattaaactagctagagagaataaaaattgctgataatagtacactccataggtagtcatgatgcgtaaaccactactgcaagaaaacactttatattatagtattagctagcaatttttgtggttggcttgatcatgcttggcctcacatgactgacaggtggcgaatccatctgcctatatagacccttccncataacttcctttnttactacttcttaagaaaatttctaataggaaacagtagaagaacattaccatgagacttccatggctgagaatgaacggtcagttaaagagacgtattgtgtaaatgtgttaaaatga

SEQ ID NO: 142 - DNA, 391 bp, Glycine max
tgtaataaccttagatagaaatgagagattatgttcttgagttgaatccctcatgtgaggtgaaaatctttagcatgtgtcgtaaaaccatagatattttttttatgtaaagtccaatagtgactagcaaaggtgaaatccagtggtgcacctggtctagtagaagattgaagtctagtaaggaattgacaaggttgtgaaacccaatggttgctggaccagttgcgaattggttgtgttactgaaataacatctttaacggtgaggattggacgcaccccaagggtgtggtgaaccattatatagacctttgtgcactttcttctctgtctctatattttgctcttgcacaaatctaacactacttttgtataaaatactacaatttgtt

SEQ ID NO: 143 - DNA, 378 bp, Glycine max
  unsure at all n locations
ntggacaaccatatataagaagtactttcagattagtcatagttgacagccactccggaagcatttcaagattgtcgcagtctgaaataatcaaggtccgtaaggagttggcagtttcttgaagccattgaggtaaggccaccagctgtggtaagccccagaatgcaacatattttaaccttaacttgaggttatgctcttcatggcgttccttccacagatctaagtccagactaacacagtctttaacagacagagattctaattcaggaaaatttataacatcctctgaccttgacttcagactatgacaggcagcaacattcaatgctttaagagcagggaacttcacccctgcaaagatagactccatattat

SEQ ID NO: 144 - DNA, 369 bp, Glycine max
  unsure at all n locations
agctttacacaaagaacatagtataggttaaataaatatagctgaagatttaaatcacatagaaaacacctttaatttctagtaaacatagctaattctcccaactgctgctcgctctgcaattctattgcaatactctacatggaaaaatgaggtatattatttgtgatataaaatgacaaatcaaactaatgaagagaaacgaagaanattagatacccgagttaacaactttcacaaattaaacaatatctncttgtagacatattacatgagcatacctttgctacatctagntttccaagctgtattgctagatcanatatgtagtcagggtcaatagctacttcaagagcatcttctatcata

SEQ ID NO: 145 - DNA, 397 bp, Glycine max
  unsure at all n locations
tgtccacaaanataggttnttgaagtttgtcatttcaatttctcactaagtaaaatggatcattttcaaggtccaatgccttanaatgatcacctcttaaagtaaaaaagaatcacttgataagaaagaactacgtaggtcttatttcctcatcgcaattgaggaatacgtaggagcaaagggaaacacccttgtcgactacaaaaagagaaaaatataaaaagggtgtaaaggatataaggacttaaaagggaacataaaaaatcaaggtcatgtttgcacattcgattaaagcctgccgtcccttgggacggacgtgtggngtgctaataccttccccgtgcgtaaacacaactcccgaacctttcacttannagttcgtagatcgcgtcttttc

SEQ ID NO: 146 - DNA, 416 bp, Glycine max
agcttcaatacgagtagccacccattcactagatagtttcctaaccagtcaaaccattcccaaaatcattctgcagaataataaatgcaaaatagagttggctaaacaaaaaagatcctcataatcatttcccaattggttcttggattcccatagcactatacaaatcaataattttttaacagaaagtatactcaaattgaaacctagcaattttctcaggttaaaaaaactacacctcctagcaatggagaggattgctcctacatcaaatgcttcagctggatcggcctggattgcacgtagctcttcattggtttcacgagcaaccttatacataagccagaaattatttctaaagcattgctttccatcacaggcaacaacaaaattaaacattatacaaaaccgagaat

SEQ ID NO: 147 - DNA, 457 bp, Glycine max
  unsure at all n locations
ntganagagttatcttttgacaacttctaactccttttcctgtaattnttaacacgtgtgcccttactttagtgtaagacccattaaaaactatttcacaaaaattgcatctaacttcaaaatttccaccgcctccacttagacctttaagctttgaaacacaattccataaaggtttggtgtcatcaccttgttctttaacttgattagaagtactcatctctacaattaatcaatataataaaataataaataagaacacaatggccaatttaaaataaaaaaattatgaatggttaactgttatatttaaaaactattatcaaaataggatataaaattaaaaatcataaagtattaaatgtattagtaggtaagaaagtaaagaanaataatattaaactaaaaattcttatgagcctacgaaagaagaanaaaaaattataaaaattggaaa

SEQ ID NO: 148 - DNA, 396 bp, Glycine max
  unsure at all n locations
agcttcatgcttaactatgtatggaaaaacttcattactgttgttcaagacatacaagtgagcttgtaacaaatcttctacacttggagtgatcacctgcagtcctcttgaacccttaccacccactctgtcatcatgccgacactcaggaagcccaacagctttagccttctctaagtattctgaacaaaattcaatggcttcttctgcaatgtacctctcaacaatagatgcttccggacgatatagattctttgtatacccttttaagatcttcatttatcgctcaaccgggtacatccaccgtagataaacaggaccacagcatttgatttctctgaccagatgcacaatcaagtgaatcatgatgtcaaagaaagcangggaaaatacatc

SEQ ID NO: 149 - DNA, 462 bp, Glycine max
tcaccaccaagacagtgtcttggataagaagcttagagaggatgcttcaatagaggaagagaatgagagagaaagagggaagggcgtgggaattgatgaaggagattagggagagaagttgaactttgaagtgtgtctcacaagtttctcattcatcaaagttatgagaagtgttacacatgtttctatttatagcctagcacaatggaagcttccttgggaagctaggggaagaaagcttccttgagaagctagagggggctactcacacctctccaatagctaagctcaccccatgtcaagatgcatgaaaatacaatgggaaacttccttgagaggtaaggtagcttccttaggaagcaaggaagaaagcttcctttagaagatagagaggggctactgatgcaatcctaccccacaagggcattggatagaagaatccaagtagattgggctagagat

SEQ ID NO: 150 - DNA, 406 bp, Glycine max
  unsure at all n locations
agcttttttttacggttcttattaaatcccatccccttccataagctaaaatactctttcatatacagtgatatggtcagacacaaaaaaaagtggaaaatattcaagtgtaacacacattgtatttgaaaagcaacaactagctttaaagtacaaaacaagcaaaactaaaaattactacttgctagtagttgaaactccctagtaattagcattaacattggatttattcaaattcacctaaatacaacatactaattaacacgagggtagcgtattatctcaaacattaaaagtggcataaaacaaattagcaagactatnttagttcaactgctttctcaaagtcaactctaatgcattctcactgctttcgttaataaacttgggtcaatgctagatcact

SEQ ID NO: 151 - DNA, 440 bp, Glycine max
  unsure at all n locations
tatcttggacctcaagtcgatgtagttgaacctcagcttgctgaactcacttcccaacccatagctgaagatgtccttgcaacaattagcacttccagtattccatataaaatatctcctttaaccacctttgcttcaacgggtgtgtctaaagaaaggattcaagaaatgttgtgccttcaacaggccaacctagaagaaaccatggaaaagagtttcctcttttaatgcatggaaacaaatttgcttatcaagaacaccttggaagcttcactcaagtccttcaacgactttgttttgttcaatatgaatatgctaatgcaacaacgactgcctccaaccgtccaaccccttctgccaccaccagctacttcttccacactcacaacttctaaaanaattgtgctgtgcctcgaccttcaccaccttagtcaccacca

SEQ ID NO: 152 - DNA, 395 bp, Glycine max
  unsure at all n locations
agcttgtactcttgttggaggaacccttactcaagctatcctaaaatgaatacaacaaaccataaaaatttcatcacactcatagcaaatcagaaataaatggcgtgaatggtttatcattacagttacaacaaatcaaacacaagtggtgcacaaatcaaacatgaatggtgcgaatggtttttctttgcaactactatccacanagtgagatagaggttagggattaaacaaatcanagcacacaagtaataatgttatttgtagtgtgagaaaataacaattgaagaatgctaaggcgcgaanaaaattcaattacacttctccannaaatgagataaagcttcaagattaagaaaatacaagtgnaaaatttaaaagtataatggtatctg

SEQ ID NO: 153 - DNA, 376 bp, Glycine max
atacgttgctcattgactctcgattgctacacagaatgaccaagatctttacggtgatctgcagaagagcatagaccacagactcttgcgacatgtgtagatttcttattcatgggaagacgatgtactacggtgaccaacggatgaaggtctccttcaggctttttattttcacttgacgaggaggaatgtgcggccacctgatggactcctctaagaacaatagcataatttcttgcactgaattgttgagagttggaagccatcttctcaatcaaattcctagcttcagcaggggtcatatcaccaagggcttcaccactggcagcatcaatcatactcctctccatgttgctaaggtcctcatagaaatatt

SEQ ID NO: 154 - DNA, 264 bp, Glycine max
agcttagaagaattaaaaatgaaaaaaaaaactataataactaaaattggaaagacgtccacttataaggactaaaattagaaaaataaacttatagagattaaaaattaaaaaaaatgctaacttacagggacaaatacatatttaagcttaaaaataacattattctaaaattaaaatttgggctcctagttagcatcaaaacagtccatttattacaattaagatcaagccagagatacttaaataaaataaataaaaaat

SEQ ID NO: 155 - DNA, 314 bp, Glycine max
  unsure at all n locations
tgttacaaatgtggtaaaccttatagaaactaaaggctgntcgagtcgtgtggttgtgccggataaacatggctttgcagcagccaacaaaggctcgcaatgacgatggagaccagtgtgatgctcgctggagatgcgtcacgcgatgtgtgcgtgaacctcacacgccaaggccctgcatggggttgcgtgcggcggtgttatgagttggctgcgcacatggagtcgtggacgatgtggtggcctttggcgatgatgatgggcattgtttacctgtgaaaataaaaagtggcaaggctcaccacggacgcctt

SEQ ID NO: 156 - DNA, 403 bp, Glycine max
agcttaacaatccttttgatctatttcaaaatatttctatccctatcatataacttgcctcactcatatccttcattttaaagttacaagagagaaactttttcgttgagcatttttctaaattggaaattgtgatgttgagcatttttccatcttaaatctctctagtactttattgatatatgctttttgagacaagcttaacaatcctatgatctatttcagaatatttctatccctatcacaaaacttgcctcacccatatccttcatttcaaagttattagagagaaacttcttagtctcatgaagaagatcaagatcattagttgcaagcaatatatcatcaatatacaggattagaaaaataaccttactcctactgaccttcagatatatacatt

SEQ ID NO: 157 - DNA, 450 bp, Glycine max
  unsure at all n locations
gtatcccaagctggacttatatacagtattctttggtctaccatatactatggctctaacctatcgacgaacttattggaagaatccctcccgactagcatatatgatcgtcttacccaccaacttctctctaagctctattagtcgttactctcttgatttacgggatgttgtgagcgccttgttctttgacttgagtagaagtactcatctctacaattaatcgatataataaaatactcaataagaacacgatgggcaatttaaaataaaaaaattatgaatggttaactgttatatttaacaactattatcaacataggatataagattatgagtcataaagtattagatgtaatagtgggtaagaaagtaaagaatgataatattaaactaaaaattcttatgagcctacgatagaagaangaaaattataaaaatcggaaagta

SEQ ID NO: 158 - DNA, 401 bp, Glycine max
  unsure at all n locations
agcttccaagaatcaagatcaagattcaagactcaagattcaagaatcaagagaagacttaatcaagataagtatgaaaaggttttttaaaaaattgagtagcacatggatttttctcacaacatgtttatcaaagagtttttactctctggtaatcgattactagattgttctaatcgattaccagtagcaaaatgtttttgaaaaagttttcaactgaatttacaacgttccaattgatttcaaaaagctcttatatgttttggtaatcgattaccactgtctttgaacgttgaaattcaaattcaaatgtgaagagtcacatcctttcgcataanagctttgtgtaattgattacactgatttggtaatcgattaccagtgattgtttctgaataaat

SEQ ID NO: 159 - DNA, 387 bp, Glycine max
tcttatccaaggctcatcttggaggcgaagctacttcttccatggcttattccctaatggaaggcgcctactctcagctcttctactttgtcttccgctgcatctacatggtggaaaatcactattaaaggacctcattgaagctcacagatccaacctgcatagagaccccacaggcaagcttccatcataaccactctatttgccctaccagggatatccaacttggacactgcactcgccaagtacatacacgacatacatcattacaatgacactatcaacatccacagcatctaagtctgatgacactatgatcatctacctgatcccgtctcgatgtcattctcaacatcaacagtatctgatctcaatgacataatcaac

SEQ ID NO: 160 - DNA, 411 bp, Glycine max
  unsure at all n locations
agctttccatgaatcaacaaaatgaatagataactcacaacactattggcatccctgcctccacaaagcagaagaagtccatcagagcgtgcacttgcagttgcatacctagtcaaagattaaatggtaaaatgaaaatcgcaccatgacaagttgcaccaaatgatagccaactaatatatttaaggtaagtctacacttcacagaatcgattgtttacatcttctaatgtaagatatttaaagtattctcttgtgcttacaaaaaacaaaaagcaataatgtggtaactttgttccacaaacagtaatattaatgctaatcaaaatggccaaataagatgagattcaattcanaccctactcaagctgcagtctaactcaagttntcgtacagaanatcanaagaaaat

SEQ ID NO: 161 - DNA, 442 bp, Glycine max
tgtagactgaatctataccataaaaaagatttgtgttcagtacaccgcttatcataattttttttttctctagccattatttttagggaggtagtttagctaactcacggattttaattctttacttgcatgatgattcatttttcctttctatacacattgttttttttgaatgatttttacatatgtattgaatcaaacatttcagaattatcatttatattaacgctatttatccgcatagtttaattggccatcgtcaaacttaaatatacggcagatatatattataactttttgtataatacatgatttttaacaaaatctttatttacattttcttatgataagggattagaactttttttttgtggacaagagatacaagtctctcattcctggaacatatataaagctgaatgaatatgaaatgccctcccgc

SEQ ID NO: 162 - DNA, 324 bp, Glycine max
  unsure at all n locations
tcaagcttcaagttagaagttgaacacttttatgttagaagtgtcaaatgaggaaatctgaagcgttgtgttttctatggggaactacaaggcgctaggagtagatgggttccaatctattctctataagagcaaataagatgttggtggtgaaaccttttgtactcttattagaagtatnttttataatcccactaacattgatgattttaattatactcttattgctcttaattccaagcaagatgtgctcactaacatgaagcactttaagcgcataatgttgtgcaatggttcctacagacaatgacaagaatatgtctg

SEQ ID NO: 163 - DNA, 379 bp, Glycine max
ctaaacgatgggctagcttaagctagccaggcaactttcatgttcttcattagagaaactagctcagaagtgtgtccctaatgatctagcttaagctagcttggccacttgcaaattgtgtacactgttctttcaatgatagctttaaatatctcttcaaagagatccttactgtagttcctacaaagagactgaacgacataaaccacctcacagctagtacactaggctcttaaaatatttctctaaagctgagtttattcaaagatcaacccaattgtgctcaaacaatgttcagaagcatgagaaacatatcatagttgtcacaaaaatcgcaaaaaacaagtaaaagaggtaattataattgatatctaactct

SEQ ID NO: 164 - DNA, 173 bp, Glycine max
tgcttctatactttatacaagaatgaagctctgataccacttgttagacaagtggcctcacatatattaagaaggggggggggggtcccatcctagacacccgcttcattctctcctcatccttatccaaaagtatttattctattctacgcctcccatatattgatcttccc

SEQ ID NO: 165 - DNA, 377 bp, Glycine max
tgaaggatgtaagattctgtgattcttcaatgtccaccacaatgtgatcaaactttgatgtcagtgttctgagcaccttctcaatcaccagttgttccttaatttgttctccacagcacttcatctaattggtgagtgtgagaatcttggtgaaatactcagctactgattcagtctcctccattgcaagaagctcatactgtcttctcaatgtctgaagctttaccttctttatcttttctccaaagataatccaatatttatttagatcaagatatctaaatatatattttagtaaagtaaaagatagatacaattgctttaatatattatattgttattcttattctcgaaagatgttattatcataatatatt

SEQ ID NO: 166 - DNA, 449 bp, Glycine max
  unsure at all n locations
tgttcctanatgatgggctagcttaagctagcctggtaacttttaagttcttcattagaatagctagcttaaaagtctgcccctaatgatctagcttaagctagcttggtaacttccaaattctttacacttttctttcaatgatagctntaaatatctcttcaaagagatccttaatgtaattcctacaaagagactaaacaacaaaaaccacaaaaaagcaataaaactaagttcttaaaatatttctctaaagctgagtttattcaaggatcaaccaaattgtgctcaaacaaggttcagaagcatgagaaacatataatagttgcaaaaaaaattgcaaaaaacaagtaaaagtggtaattataattgattatttaactctagtaaaaaaaaaaagcattgatcgtctaaccttattttatcaatggttaaatacttaattcaat

SEQ ID NO: 167 - DNA, 331 bp, Glycine max
agcttggtcttgatttttttctaagttctttaacaagattagaacaatatacttgtccttcatttaactgtctttgggcttggcggccacgatcaacaaagtactttcgacacctactatatgttgatttgaccaacactgttatcggtatgttgcgacaatccttcaaaaccttatttatacattttgagaggttggttgtcatgtggccatatcgacgtccttctctatcataagccatcgtccaattttcctttgaaatacgatcaatccatgttgctatggctggactcagttgaacggaattttctaaattttgattaaaaaaaat

SEQ ID NO: 168 - DNA, 449 bp, Glycine max
tgtgaagtgccacgttagagaacagaacactcttttcttctctctgtttgaacaggctcttcttcacgagaaattattactctctctactttatcattagctcttatttcagtgtttgactttttgcgttgttgcttcgttgagtgtgcactcggttctgtttggcgtctggacaaaaaacatgggggaagaagaagaagaagaagtgagcgtcaccgctttgcatcatccaaacagcggaaacgatgatcagagcctcgaattcgatatatatcctttgagcagttactattttggatccaaagatgctgttccctccagagacctcaccttagatgatcgtgttctcaggatgaagtacaagctcgggttctttcttctcctctctgcttatttctactgcaatataaacactctctttgttctcttctttaactattctttctttc

SEQ ID NO: 169 - DNA, 394 bp, Glycine max
  unsure at all n locations
agcttgtgctattcatctttntcattctcttctccctttgccaacctgaattcttttgtgtctcccttctccctttccaagagaattcaaaggaccccgcctgagaattcttttgattctttcctttcccttaaacaaaagatttcaaaggactaactgcctgagatatcttttgtttccccttacaaagattcaaaggactaaccgcctgagaattctttgtcttaacacattggagggtacatcctttgtggtacaagtagaggatacgtctacttgggttgttgaactaagaataagagagggtacatctcttgtggatcagttcaagtggagggtacatccacttggttgttcaaagagaacaagggaaggtacatcccttgtggatctt

SEQ ID NO: 170 - DNA, 463 bp, Glycine max
  unsure at all n locations
tgtgctttaagcccacttaacaaaaaactgtttttataaagtaaaaaagccacactcttgacaagttctacatatgttggcaataaggtccaacatatagctctctcatttacagtaaacaaaactttaaaatttggtttaggcctcactcacccttgggttggatcaattgcaccatataaatatgtgttccccgtggactaacaaattttatttggcttttatcgttgcatttagacctttgcatgatggcgactttgatgtcatacacattacttgcgctcttttttccttacacatttgttgcatgtcttcaatctaatttgttgaatctgggaatcaggttgtaagttatgatttcaaggaaaacagatttgcgcatctacaccgatctgcgatcagctntccagaatcaaggttcttctatgccggcactcctgctacatcaaatgcanaagcagct

SEQ ID NO: 171 - DNA, 417 bp, Glycine max
  unsure at all n locations
agcttgcttgtggtgcttctatggaggctggatctttgagcttcaatgaggtcctttaatggtgattttctatcatggagatgcagcaaaagacaaaggagaaaaggtgagaagaggcgccatccaataggtaataagccgtggaagaaggagcttcaccaccaagatgagccttggataagaagcttggaaggatgcttcaatggaggaaaagaaagagggagtgaaagagagatgggggagcacgaaattgaaggaataaaagagggagagaagttgaactttgagttgtgtctcacaagactctcattcatcanagttacaataagtgttacacatgtttctatttatagactangtagcttccttgagaagctctcttgagaaaacttccttgagaagtttctatgagaaaac

SEQ ID NO: 172 - DNA, 461 bp, Glycine max
  unsure at all n locations
tganatgaggaagtgtggaagggtgagacttcctacttttattcgttggccacagagtggtacctggagatatgtcgcggnggtcaggagaccttggggacgtcaggtggggtgctattgcccaaaaccaagcttgaccaatcccgacccaacccgggcatagtcagtcagtgagaacctgtgatgtacctaaacaggcgagctcctggaagtcaatcgataaaagaacaaagaccacaaagcaaggaggcttgtgtggtggctggccagctgtgaatcttgagtgatatatgggatagggcctctggtaatcgattaccgagggtgggtagtcgattacaaggcttanaagtgaagacaggaagctaagatggcctctggtaatcaattaccaagagagtgtaatcgatttccaggcttannaacgagatcaggaagctaagagggcttctggtaatcga

SEQ ID NO: 173 - DNA, 260 bp, Glycine max
  unsure at all n locations
tttcttctatgattcattctatgcacccatatatcgtgctgttggatggacaacaattgcattctcggtggggatactaatcactgcgctttgcaatactctcactccatagtaacaacacaagtttcaaagcaaacttatggtgacacaagatgatacagtgcgngctagttgtgatattcattagcttaggataaaatcaattccgaccgttcggtcgtgccgtaaccacgttggaaatcaaagagaggtgaaaaatg

SEQ ID NO: 174 - DNA, 237 bp, Glycine max
  unsure at all n locations
tagtagaagatanacactgctagggacgaacctggcaatgaagacatgctgtctactctatatcggaaccggtgataggttcaaacctaactattttattgatgataatatctagcaggacctatggctaccatggaaggatgcagtgattgtgacactattatgaatactgatatggattgtcacaatgcacgataggttgtaatctatttggacattatcacgaagaggaattaa

SEQ ID NO: 175 - DNA, 324 bp, Glycine max
  unsure at all n locations
agcttgaaattgaacaacggaagctctcgagaaaatcgagtggtcataaattttcacacagatgtccgattcggggaaataatatatcgagacgcacgaaattgaacaacggaagctctcgagaaatttgaatggtcataacatttcactcggatgttcgatccggggacataatttatcgagacgctcgaaattgaacaaccgaagctctcgacanattagaatggtcgtaacttttcacgcgaatgttcgattcgnggacataactcatctagacgctcgaaattgaacaacggaagctctcgagaaatttgaatggtcata

SEQ ID NO: 176 - DNA, 381 bp, Glycine max
  unsure at all n locations
ngccgccacggagttntccgactatgctcttgtgtgttggaacaagctacaaaaggagagagcaagaaatgaagagccaatggttgatacatggacggagatgaaaaagatcatgaggaagcggtatgttccggctagttactcaagggacttgaaattcaagctccaaaaactaacccaaggcaacaagggggttgaggagtatttcaaggaaatggatgtgctcatgattcaagcaaatattgaagaagatgaggaggtaactatggctcgatttcttaatggtttgactaatgatatccgcgatattgttgagctgcaggagtttgttgaaatggatgatttgcttcacaaagcaatccaagtggagcaacaattaaa

SEQ ID NO: 177 - DNA, 276 bp, Glycine max
agcttattggttaaaaaggcgttatttgaatcacttagataaaggtggaagttataacttcctccattattaattaatcttctttcacccactctctccatatataaacccaccctcaatgctttcaaaaagtttaaaaaataattataagaaaaatggcaacatgtaaacttccacctacctaagttcagacaaaaaacacccacacacacaaagaagttaaggaacaaattggaaccataagcattctctcttagtggagaaggagaaaataat

SEQ ID NO: 178 - DNA, 459 bp, Glycine max
  unsure at all n locations
tannagttgaaaataatataaaagtcctaatacaggtccagcatgattccactcactagtacaaaactcacctactaaaatgtgtgctaaccagtgtatcatacagtggcctccattcaatagttagtgaaatctttttactatatttgttgagtagtctaactaataaatttccccatctaacctaataaacaaaaaatggcacaatcatttaagagcaagcagagacatatagagaacaagaaaactcagcatctcatctaagacaaaatgcagcagcacctaagcataatgcttattacgggacacatgagatatctcaaggcccttctgaataaggttgtgaacatcctccanagctacatcacttttttcctttatgaaattgcacaacacacataaaaagttagatttcaacccaacaaccaactccatctggatacaagccatgagtgaaaa

SEQ ID NO: 179 - DNA, 330 bp, Glycine max
agcttgtaatcgattaaactgatatgagacatttgtctgcaagcttcaaacacttgtgtaactggttactatcagtctgtaatcgattaaaacagaagagatgtaactatagaggaaatcttctaactttagaacttttcttctaactccaacatgatgatgcatgatacacatatgaaatgatagagacaaagatgcaacacacagtacaataatcaatacaaatgtcattcaagagagttgggcatgtagaagacaataagatcaagctcttctttaagctgtaatgctaagtatacatggtgcttcccctatctctaacatgcaata

SEQ ID NO: 180 - DNA, 457 bp, Glycine max
  unsure at all n locations
taatcttacaaagctctntgaaagaaggttttctatgtattgattccttcaagtatccatcttgagatacttttcttgaagaggaggaatatgcaattggagtgtatggagaaagggaactagtgctcaagcaatttcccatcagactcattattgctcctaacccaaacagcctgatatttaagtataggccaactgcaatgaaggtttatccccttggtcccaccatttttgtctttgtgggataccctaacggaactaagggatactatttctacaacacatatgaggaaaaagtatctatcactaagattggagtgttccttgagaagcaatacatctcccatggagccaatggaggaatgtagatcttggagaaatccaagtggcacataacattgatccacctacaatggaacaagaattgatgccacaaaagcattgtagatccatcttt

SEQ ID NO: 181 - DNA, 368 bp, Glycine max
agctgtggaaagtgttgttgtcaccttctcgctaagccactctgatggcttatcgagcgtctgctatatgcaacattcctgggctaagcgcaaggaagaatccataagaagatgagctgtacaagtgcgctaagtgcacgcgcttcatcttactaagcgcaccacttgagttcatctgctaagcgagaaaagcgggctaagccaaaaatcactaacgtgcgctaagcggtccataagtgcgctaagcacacgagcacaaacaaggccgcctagttaagcctgaaatcagatcttgtgaaaggagtatggactaagattcagagctctgcatgcctagggtttctagagagagaaagtgcaagttctag

SEQ ID NO: 182 - DNA, 377 bp, Glycine max
gctattacggacctataatactcagctgtttatccgtttttgtgcaagacatatttaaaccgatcaattgtcatttaaggcgttggaccattaacgatctcttggttttttaaaagtagtggtaaaggtagacgtttattgtatgtttccgaaggtgcatattaaccaataaaagcagagagaaccttttaaggcattggaccttaaaacggtttttagtgacttttgcggacaaaagcttcatttgagagttgattttagccttaagttcactttgggtattagtcaattcattcaaggaaacttgcaaagaaaaatgcccgactgaggttttttctttttgagattgtattcaaagatattgcgattattttatt

SEQ ID NO: 183 - DNA, 364 bp, Glycine max
agcttagaatggccgaaagggacgagtcaagggtggtaagcatggcattaaaggataaattgaaggcttgtcataggtcaaagagaagtttgaccgaacaatcgagtggaacggaagagaatatgttgacgatcattgatcagtataaggagaaggtaaacctagctgctagtcttaggcagagactagaggatgatcatgcgaaggtattgactctacaaatggaaagggaagcaagagagagggtgatagaatcattacgctgggaagctgtgaaatggatggatagattcgctctcactctgaatgggagtcaagaagcttcagggtattagccagaaccaggcaatgacggaagtatact

SEQ ID NO: 184 - DNA, 439 bp, Glycine max
gtctccactaagttgcctaatgcctgaaatgtcttttctgatggcagaggtcctagatgcagggaagaatttctccaagaacaccctcttaaggtcatcccagttgaaaatggacctgggagcaaggtagtatagccaatcttttgccactccctccagagaatgaggaaaagcctttagaaagatatgatcttcttgaacatcacggggcttcatggtgtaacaaacaatatggaactccttaagatgcttataaggatcttcacctgcaagaccatgaaacttgtgcagcaaatgtattagtccagccttgagaacataaggaacaccttcatcaggatattgaatgcacaagctttcataagtgaaatcaggtgcagccatctccctaagagtcctctcacgaagtggaggtagagccatgttctcagtatgaaaa

SEQ ID NO: 185 - DNA, 396 bp, Glycine max
  unsure at all n locations
agcttggagaggatgcttcaatggaggaaaagaaagagggagagaaagagggaggggggagcacgaaattgaaggaagaaaaagggagagaagttgaactttgagttgtgtctcacaagactctcattcatcaaagttacaacaagtgttacacatgcttctatttatagactacgtagcttccttgagaagctntcttgagaaaactctcttgagaagcttctttgagaaaacttccttgagaagctagagcttagctacacacaaccctctcataactaagctcaccttcttgagaagcttccttaagaagattcctaaagaactaaagcttaactacacatacctctctaatagctaagctcacctcctgagatgagaactagagcttactcc

SEQ ID NO: 186 - DNA, 139 bp, Glycine max
  unsure at all n locations
tcataagcatctacccattgcgtcaanagatacatgcaaagtgctacacatgctgctctttatacactgactacctaccttgatgggctttctatgaggacactaccatggaaaaccctattgtaatatctaccttgat

SEQ ID NO: 187 - DNA, 396 bp, Glycine max
  unsure at all n locations
agcttcaaagaagactattgaagtgtggttcaatcaatttacaaacttttggaggcagtagacaaagatgacagctgggaaaggacaactagcagagtcattctgaggtagtcatgttgaggaacctttctgatgagcattttaaagtaaaatcagaatggtgatgttagctgagaaaggatccatacttgaagtagatccttttgatgaagatcaactattatgtctttctgaagtagcagaactgcatcaattntaatacatcttcacaacacanagcatcctgaagtagattgcttcattaaatcacagtgaaggcatagnttcttggtgtttagtggtctatcanaagttagaatgtgtaaagtcttcaatcttccattctgatgatccaca

SEQ ID NO: 188 - DNA, 395 bp, Glycine max
tgacactatccaagactctatacaatactgaagctctggtctctacagatcttcacacagcacaagtactcttaactctctggagcttgtacctttctctctctagaaaccctagacatgcacagatatgaattctaatccatactgcccttgtaaaatctgaatatacgctcatatatgcggccttggtcctgctcgtgcgctgtacgcacttatggaccggttaacgcacattagagaatttacgattacagcgtgcctttctcgcatatcgaatgaactgaatacgcgcacttaacgagatgaagtggtgcggtcacagaacgcttaccaatcaactttttccagagtcttgctcgcacttaacccatgaatgttgcgcttatcggacactt

SEQ ID NO: 189 - DNA, 499 bp, Glycine max
  unsure at all n locations
cgattgaccctttgagcccgagatcccgtgagtcacctgcagcatgcgagctatgcagcaattgaaatggtcacaactgttctctctgttttacgagaggggcacataagatattgagatgctcgaaattcatctatggatactcttgagcaatacaaatggtcagtgacttttcactgggaggtgcgatacacgctcatatgatatcgcgatgctatacattgaacaacagaagatctcgacagattcagaaggtcatatcctntcactcagaggtcttagtcaggcccctagcatatcgagacacgaatattgagagaacgaatggtctcgacaaattcatatggagagagattttcacttgtatgtctcatatatgcgcataaggaataaaaacgctcgggtctgttgatggagaggtctctagaaaacaaaggggcgttgtcttgcacgcatggcaattcagcacagagtgatgtgacctcggatatactcttcn

SEQ ID NO: 190 - DNA, 428 bp, Glycine max
  unsure at all n locations
gaggaagcaaccctgctcgcctgggcgagctgagctcgcctgggcgagctgggcggcaaccacctcccctattttgctataaataggggaggaaatgaagaaggaaggggtccggcccctttggcacttctctctctttcgaatttgcttggaaaaattgtttccgtgaagaaaatctaagccgaggcgcttccgaaacgtttccgtaacgttttgcgtgaggaatctagcagaggtttcaaccgttcttcgacgatcttcattcgataagcatcgatcttcgaccttctgcgggtaagtaccgccaaccaagctgttcaatgagagttatggacctcgttggcttcacattcgcactcgtgctatattctcctatagcgctgacactagaacangaagctgatttgttgtagcaagtaaataagact

SEQ ID NO: 191 - DNA, 238 bp, Glycine max
  unsure at all n locations
aacattcttttcagctaangattatatacttatgttcttttcaaatgcanaatcactagatggatgaacatgatgacattgacatcttggcttctagcacaacaggagaaatgttaacgcttttctccgtagggcatanaaatcaatctattgcatgggatcacttttgataaatgccataccccaatcctttatcccaagctaaatgtcgacattgtggtgctntgatcaaatatag

SEQ ID NO: 192 - DNA, 210 bp, Glycine max
  unsure at all n locations
tcatatctcccanaaccccatacncacgannattaagagagaaagaagtccacccagacctggattntcgaagtcccactcgtagccacgcacttcacgaccccgaanatgccctcctttcgcgatttggagcagaaatgagcaccaaaggttggagctnntgtcgggtttcaatggagaatggaggagaaggaaaaagcaacgtgagga

SEQ ID NO: 193 - DNA, 220 bp, Glycine max
  unsure at all n locations
gagtttcgaaacaagagtataaagtgtgcagagtcaaatctggtatttggcttggatgannatgggctagaatatatctaanatcagatacggnnggtggactgcatctggngtcggaatgagggananaaatatgcctaactcaactnntaaaaanaatcaactaaggctaccggagtactatacgaactntggtcatatgctntgatgatgagagatc

SEQ ID NO: 194 - DNA, 209 bp, Glycine max
  unsure at all n locations
attattcagatgctttatgaatgacaatcaaaggtgacttggaaacaagaaattaaagagacttttcatttgccaaacagntntatcctctcaaaaagaataagaagtnttctgaactgaaatggtntatcctctcanaaagattctttggtcaaccacttgcatattcaataanggaatttgattgatcttcattgtacaatctatct

SEQ ID NO: 195 - DNA, 194 bp, Glycine max
actactcataattaatgctactagaagaggatgactgataactattattactataatatccaacaagctactcaccatttaggaagttgatctgtattacctgaacaatggcaactatgacaatgatatgttatgttcaaacattataccttgagttaggctatgctgtagaaatgagactaattaatgtcatt

SEQ ID NO: 196 - DNA, 366 bp, Glycine max
  unsure at all n locations
accatggtaatcagaatagaaagtctacttcttatgtaagagttgcagagattcctttctcacttctcacttattacagctagaacctatgtctagctgatggttctatcggctgtgatgcaaagattcactatcaccctgtatctaatataaaagtggacagattcagaattgttactttagaccacgtaaagaataatatgcatatttgacaatatagaccaagagaaactcagatagcacaatccagtggtagagaagcaacacttaatttagtgttcannagtcgtatatagacatgagaatagataccttgccanaattatccataagacatttatttccattccctaccagtgtattcat

SEQ ID NO: 197 - DNA, 276 bp, Glycine max
  unsure at all n locations
atgccctctctctcttctcntttctctctctcttctggctctcctatattcgnttatagntctaggctcttcttagacactnntttcattntgcaattccactnttagtaataaaaattcgctcttcaatctataatttcgttctctattgattaatgcaaggctaagtctccagcgtctgtttctcttgaggatcaagcacagttctctctgaggtcttattattactgggtaaattctgntcagtttttctcttcactacatactctgaatttg

SEQ ID NO: 198 - DNA, 234 bp, Glycine max
  unsure at all n locations
caataatcaataatctatctttcaatcttctctcaacatcattcaatatctntcaactctttctacacnaatttctgattcatttctcttcatctttctaaaagtttttgttcaacactctctcttatgagaaaagttctttgttcanaaacttgtgttattcatccttttcattctcttctccctttgccaaaagaatgaagggactaaccgcctgaattctttgtgtctctc

SEQ ID NO: 199 - DNA, 499 bp, Glycine max
  unsure at all n locations
atgacccttagancttcagaacnctctagagtccacctgangtatgcgagcttcagacagttagcaatcctgtggtgcattgttttatctgaactaccattatcaagtaatattggaaccaccatgccattaattgtaccactaaacttcatagttcctaggccagaggaacctttaagggcattataagatagatgatggtctaaattcatatgtgccatggcttcctcaataatagaaggtggctctggttgcacttcagcattttcatcctcatccattgcaatagtaggcattgccgattatgacacctatgataagaagtgaacttctcatgacatgtataacatagccctttctcccttcgaatctgcatttcagctggtgacattcttctaacatttcctgggatcggaaaacaggagtttgatctaactcagtctaggcacctgagtccacattcccttgaatggatatgctaagagagagacttgtgact

SEQ ID NO: 200 - DNA, 299 bp, Glycine max
  unsure at all n locations
tgtcgctagagctgacccatcaactgtcctatctctntcagactggcgactcttangctcttgatcttgacttgatagaacctctntntaagtgaagggtgcctgactcgatcccatgtttactaaagtggaataaaaaccagtgcgaatcaagactgtgacatctatcacaggtgaaatggatgaatgcataaagaaatgcatatggcacagatgccatttacggatacganagcccgagagaatatctatttcttanatacaacattcnggcagcatagtgcccgatgcatgcattt

SEQ ID NO: 201 - DNA, 429 bp, Glycine max
  unsure at all n locations
attattatctgaactaccattatcaagtaatatttgaaccaccatgccattaattgtaccactaaacttcatagttcctaggccagaggaacctttaagggcattataagatagatgatggtctaaattcaaatttcccatggcttcctcaattctagaaggtggttctggttgcacttcagcattttcatcctcatccattgcaatagtaggtattgccgattaggacacctatgagaagaagtgaacttctcatcacatgtataacatagccctttctcccttcgaatctgcatttcagctggtgacattcttctaacatttcctggttntggaaaattgganngtgtaattcatttggggcttggaagtaacggcggcatgcttgttgacttttcttactgacactaccgctgacttctacttcct

SEQ ID NO: 202 - DNA, 433 bp, Glycine max
  unsure at all n locations
atgactattgaataatctattcatgtttcctttgatgaatctaatgctatttctccaagaaaggatattttagatgatgttgcagaatctttagaacaaatgcatattcatggacaagattctaaagggaaagggaaaggaagcaatgaagatcctccagaagaagccaaatcaaatgatgaaggtggcatccatggagttcactgactatgctcttatttggtgggactaacaacaagaagatttggagaacctttggtgaatacttaggaggacatgaaaagattaatgagaagaagatttgttccttctcattataataaagaccttcataacaagcttcataggctcatacaaggaanaaaaagtgtagatggatattataaagagatggagaattccttgagtagagccagtcttaatgaagatcaat

SEQ ID NO: 203 - DNA, 240 bp, Glycine max
  unsure at all n locations
acactcgnngatatgnggactntctctattcaactntnntgttcgtcctatcagtagaattcgtttgtagttccgtacacaattntctttgcttcttcagtttacagtgagttagatatgttctaattattaatttcttttctttttttttcgaatattccatntaccataaatagttgcagaagcttctgtcacacctataaaaacactntatatttgacttgacgaatntatatgtat

SEQ ID NO: 204 - DNA, 437 bp, Glycine max
  unsure at all n locations
gtgtcccccatcgaaatganaaacctttattcaaacctttcanagntagtgagaaggctaaacgaaaaatagggaacttagaaaagctaaatccttaactgaaggcgtaggtgacaatcatagtgaattactaaacaagaatggtagtttacttaaggtcattccagatacctcccaagcctcggaaaatacttctaanatggtaacaagaagtaccttcaaatttaataatggtattaatgaagatagtgaccaaactcagatacacacttggataggacactatcagaaagatataatccaataattcaaaactgaaacacctcaaatatatatcacgtcactgccctgcctctatagagaagaggaaacatttaaagttagtgaatacattacgatgacataatgacaacgagatacatatgatacctcacata

SEQ ID NO: 205 - DNA, 505 bp, Glycine max
  unsure at all n locations
ntgaccctgaaccctggatctctaagtcactctgaagatgcacgcntangaganaccataaaaactaaggtagtttctaaactaaaatcaattgaggaagcttcgccaagtatccccattgaaaaacctttattcaaacctttcaaagttagtgagaaggctaaacgaataattagggaacttagaaaaactaaatccttaattgaaggcgtaggtgataaccatagtgaattacttaacaagattggtagtttacttaaagtcattccagatactccccaagccttggaaaatacttgcaaaatggtaacaagaagtacctacaaattaattaatgttataattgaagatagtgaccaaagctcagataacacaactgagataggatcagtgtcagaaatgaatataaattcaattaattccgagcactgggaaacaccctccaaattatattatcaacgtccaactggccctgaccttctattataagaaagaggagaaaacg

SEQ ID NO: 206 - DNA, 424 bp, Glycine max
  unsure at all n locations
tgctgactcgagagacaaggacaacccactctaaagcatttacgccatcagactcactgcttgaggggttgtacatcatccagaaagcgaatcccaataataccgactcaagagacaaggacaactcatgcttaagcatttatgccattacgcttaatgcttgaggggttatacaccgtacaagatgaatattctattaataatgactcaggagacgaggaagactcacccttaagcattttaggcacaaggataaatgcttgaagagttgtacaccgctcgagatgagtattctggagatattgcctctagtgaggagatgacttatccctanacatttatgcgacaaggctgaatgcttgaggngttatacgccatttatgatgaatatcccananataccgacctaagcaaaagagacacg

SEQ ID NO: 207 - DNA, 511 bp, Glycine max
  unsure at all n locations
ntgaccctgaaaccctcgnagcacctgagataccctacagacgatgcgagngatgcaagcttccncaacatccaagtaactctacattctaacaacacaaaccatcacagccaagaatacagggcaaaggcagataactctgcccaaaacaccaaccaaaatcacagcttttctcacttaaagaccccagtaacaattccttcgttccaattcgttaaccgttggatcgactccaaaagattactggaagtctctagtacataagcctacattatgaccgttgggatctactagcaaacatccagaactcattctgaactactctgtccacagccaattacacacaagcattgttctgcacttgtgcaaaattctgctgcacaatttcacagcataaatctgcacaaagtgcagatttcgaataccacacttcctctcatccaatcttgcccaaatcaaatactacaagtcccnatcatgtatcaatcatgtctaaaccagagccaagctg

SEQ ID NO: 208 - DNA, 257 bp, Glycine max
  unsure at all n locations
actattccaatacgctnggagcagcttaatagatctcaagctgtgcaaatattcagagctaatagattgagctgagtctaaataatgaaggaacagttattcaagttagcttcattatcctccgggattcggaaggacacattttgcattcgatataatgattcacatcgtgatgtagtcttgaattatcgtacatctatattacgccggttctctatttttgtacatgaatatagacagcaacatgcaatgaacag

SEQ ID NO: 209 - DNA, 488 bp, Glycine max
  unsure at all n locations
acccattgaatcttgagaccatcgtananccagagatcctctagagacgacgtcgacgcatgcaagcttgggctgggcctacctccatccctagagtgagccgtatgaggcggaagctccacgtacggttntgaagccgagcctttctagcaatggngcctagggaccgatatgatgattggtttaggtagggcggccggcctactacgggcacctgtagggattagtgcttgagaccgcgatccacaaaagcatgggactcaccctttacttgagaatgaagaggggaatgacacgacgtttcaagagctatgcgaggggtgaaccaaactgcagagggatcttcctgaccaggcgtgatagagatgccctttattacccaactcatattatcattcaatcctgctttgtgccactcagtcttggcgggatccccctcctttctcttttctctcaaccggcgtccctttcctccacaaacgtgctcc

SEQ ID NO: 210 - DNA, 180 bp, Glycine max
  unsure at all n locations
tgcatctttcttcaactcctgaagccctatcatagcagactcaagaacatnctgcattccanagatcactttcattngaatgcactatgtattggtagtcttcccatccaggaatggtagatgcgttgaaggtccgttcccattcatctctgaaacactgaagcttcagggatcccacac

SEQ ID NO: 211 - DNA, 510 bp, Glycine max
  unsure at all n locations
ggtgcccttaggcttgagacccctgtagancccgtgatactttgcagacgacgcccangcatgcaagctatgatgatatggtcttcaccttcgaaatgatcaaagtgggtctgagaagaggcaaatctgatcatcttgctttgatacatgcgaacaaacaaagttggggcaaatacagagggtgatgatgaatgagaaccccgagctgtgactgacattcctatacagccgagtttcccaccaacccaacgatgtcattactcagtcgatagccaaccttctccttacccaccgcccagttatccacagaggccatccctataatatccacagagtttgtcgttcgcactctcaatgacgaccatcatctttagcacanacctagagcaccaaccaagatatgaatttagcagcgagaaagcctgtagaattaatcccattccagtgtcctatgctgacttgctcccatatctaattgataactcaatggtagccataaccccaaccacg

SEQ ID NO: 212 - DNA, 425 bp, Glycine max
  unsure at all n locations
acatttgcttgttgctcgtgtgctgagtgtgtgatgagatcgtgtagaggggtttgatggaacttatatttatattagttgagtgtggctgctagtccttgtttgtaggggatattgtagtctttgcagttaattctcggcttgtagatattaatcaatagcttacatataatgttagagataaacatttgcttatagataaaaaggtagaagataatcaaaccttgtagataatgtgtgggcttataaataattattttaactgccaatagataagatattcaaatacatttgaatattagtaggttagagataacctgtttgttggggagtccggctggtnacgttcatccctcctctcttttggcctgccttcattgtngttgcctcctcctcatgattcctttcttctacccctccttccg

SEQ ID NO: 213 - DNA, 190 bp, Glycine max
  unsure at all n locations
tgaagacccgcacanacattngaaagaatntcacattgtctgctccaccatganacccccagatgtccaagaggatcacatatttctgaaggcttttcctcattcattagagggagtggcaaaggactggatgtattaccttgctccaaggtccatcacgagctgngatgaccttaagagagtattctta

SEQ ID NO: 214 - DNA, 224 bp, Glycine max
  unsure at all n locations
atatannttttttagtattatatagaattgaatgttngaatttaattgatcctgaggctntggaatgtgattagcaatctaatgcataanagtattntatttaggcggtgggtgatcaagtcaatctctgcaaactgttcanatttcaatgagattntgggaaaagaatctgagctggtggaatanatagctgaggtctaatttcaatacaggaacattatact

SEQ ID NO: 215 - DNA, 156 bp, Glycine max
  unsure at all n locations
tcttggatggctactcggngtataattagatagcagtagatcctaaagaccaagaaaaaaatggctttacatgccctttcggtgtctttacttacagaagggatgccattgngttatgtaatggccttgccaccttccaaagatgtatgctagcta

SEQ ID NO: 216 - DNA, 195 bp, Glycine max
  unsure at all n locations
aataccagaagaatccaggttctgaattccatatcttgattagaaggaaaggtagcataatcaagtaaagcaaaaagggattgaatttgactattttctttattgctcnnnnnnctngtattgtttgattgtcttaaactaattctcttgtttcaagcatggcaattacattcacaacttactcataatttatat

SEQ ID NO: 217 - DNA, 181 bp, Glycine max
ttccaccatggagatgcagcggaagacaaaggagaagaggtaagaggcggcgccatccactagggaataagccttggaagaaggagcttcaccaccaagatgagccttggataagaagcttggagatgatgcttcaatggaggaaaagaaagagggagagaaagagagaggggggagcacg

SEQ ID NO: 218 - DNA, 274 bp, Glycine max
  unsure at all n locations
gcagctgagcganggtccaatcattacccattatttaccttcntgncttacatttcttgcaccaacaacttcgtcactttcatanttggaaggggtgctacatggaagttgagggcaggagaggaanaaagatggatataattatgtagcgagtggactgaagggatnggtgtggattcttccatcgtggtcttcacatanttttggttttgcatacaatacattgttggattacgaacacctaaatcggacgaccttgntagctcttcacata

SEQ ID NO: 219 - DNA, 249 bp, Glycine max
  unsure at all n locations
accatcacgattatcgtcttccttgtcattattgggggtaccacctgagccgccagatccctacaccttttgagcgtgttctttgaaagatccgtcctcctttgtgcacatgctcatgaggtgcatcctatccgaaaccatatcaagattgtactgatactgactaacacaggcaaccattatgtccttgcaagaatggactcgtgaatgctccaagttagtgtaccangtaacagctacctcagtaag

SEQ ID NO: 220 - DNA, 246 bp, Glycine max
  unsure at all n locations
gtatctngttntccatcgatgtgccatcattntcttctatgttctanaccctgtctcgcaccatttaattattgattggtcttaattgtcaattaattaggcagttctattatttgngcccattcagccaatgtgatgcttttaatctaatttcaggaattaatgaagaattgngcttgaatctagcattgngcttgaatctagaattgngctcggacttgaagagggcaaactatattattctat

SEQ ID NO: 221 - DNA, 510 bp, Glycine max
  unsure at all n locations
gtactgcgcctcgtacttcacancnctgtagtacccggcatccttagagtcgacctgcggcatgcaagcttgctctanatnttcattgatgtttgtatttatgggaggaggttatatgtccattttgctttaagagtagcgtcccactggtaaaattaactttccaaatgtttgccttcgcaggaatggccccgaggaagcttgcctcaaagaggtccaggaaggacaacggcggcgaaagaactatttccgctccggagtacgacagtcaccgctttaggagcgctgtacaccagcagcgcttcgaagccatcaagggatggtcgtttctccgggagcgacgcgtccagctcagggatgacgagtatactgattttcaggaggaaatagggcgtcggcgatgggcaccactggttacttctatggncaagtttgatccagaaatagttcctgagntttattccaatgcttggcaacagaggatggcgtgcgtgacatgagatcttggcg

SEQ ID NO: 222 - DNA, 207 bp, Glycine max
  unsure at all n locations
tctcatgcacttagtgtccanataatatatctatagttagaaatttattatgttatggtaaaaataggtttgttcaatctctgtaaaccatanttgtcatgntctttcaattaactgaaataatgagtctgtgagacatgacttaagtttaattctcacagaatacactcttngaaaatgatgattagctntaagtgtgactaagtc

SEQ ID NO: 223 - DNA, 431 bp, Glycine max
tctggttgatgagttatcgacagcgatgactgcgaacagtcctgagaatgtgttcaggactgattacgtgagatgcaatctagaggattctgatctattagaagacttggttcatcattgcttgagactatgacctcgactatcctgagaacattctccgaagacttcggaagggatatattgaaatgaggtttcataactccttcatgccattgataaggatctcgacgagcttctttctctgtcttgtacgtcacgaaagatcctacgctctggcgatcgttcaccagaaacagggcatcggatcccactggcgatcattgctgtactattcattttcgtgcgctcaagacgcttgtttctgcattaccagaggtgttatcagaacgcgtcattcgcatatctctgccactgtcctcttggtagagaat

SEQ ID NO: 224 - DNA, 481 bp, Glycine max
ttggcctggagctggtcttgagcaccccggctgcagcttgcccagcatctggatcacattttacgacgcaatttgttggtgccatttctcacgactaagttctctcctgctccttactcacaccacgaacaatatagtttagcgattacattgtaagagtattaggaacttgaaaactaagcacaggctacactttaactaatggccttgttgctctcgccattcttggaacctcagcctactaattgaaacgcttcgagcatgttgttattgactgcccatatgggggcgtttttcttataaaggaaaaaataattggttatataatccgggggctttgatattgacagactgctccacactaacttttggtttatttgaaccctcctttatagggctcaacacttgacacacgcccccaataaggccttgagaccaatatatgctttcctctatcctatggtgccttatctcctatacg

SEQ ID NO: 225 - DNA, 277 bp, Glycine max
  unsure at all n locations
acctagactataaatagaagcatgtgtaagactaggtgtgactgtgatgaatgaaagtcttatgagatacacttcanagttgcacttctttgcctctgttattccttcaatttcgtgctccccccttctctctntcttttcctccattaaagcatcctcttcaagcttcttatccaaggcaattcttgggggtgaagctccttcttccttggcttattccctagtggatggtgcctcccctatcctcttctcctttgccttctatcgcaacctaccc

SEQ ID NO: 226 - DNA, 279 bp, Glycine max
  unsure at all n locations
acatcccactgagatgcactatgtaagtacctttcanaaaacagacttgttgagaataagggagctagcatctntagtaagtgatccagntgattntcaagctcaccatgggaagttgctcagaattcttagagtagatgttgaggaaggatgcctagagaccctggttcagttctatgacccgctctaccattgcttcacatttcccgattaccagctngtcctcacactngaagagtactcctacctagttggcttacctgtgccagacaagatacc

SEQ ID NO: 227 - DNA, 220 bp, Glycine max
  unsure at all n locations
tcgtcttattcanaaccncaaccaattatganatccnctatctcccacttcacacctcggaacgcaccgttcttatagagagaggcgctntcacatcnttcttaggctgggagaggaaatgttcccatnttttatgatactccggngaacagatatccagtggagatgacggngtggngcctgtagctcagaggattagagcacgtggctacgaaccacg

SEQ ID NO: 228 - DNA, 379 bp, Glycine max
  unsure at all n locations
gcagcttagatgatagaggtggagactcaggtctttctcttgcttgacttctttataatgtggaggacttggcctgcgactcggctagatggggctatttgcgctacacgcctttctcgttacgccagctgttccgctaccgcatggtangccttcaatatttctagttgattcttttgacttaatcctttacgattgcaacaggaaggaaattttaattttacaatagcatgatactgtaatatttttagatatttatattttagataaatactatttagagtatacaccaagtgagtcacagtgtgaatgactgaatcagtgtacacgacaacagcaagtgaaatcggtgacaacagtctcacaaatatcggcacat

SEQ ID NO: 229 - DNA, 169 bp, Glycine max
atacctgtaatgctgcatagccacagaaaatctcttcttctgattaacaccaccttcgtgatcataagcttctggcattctatactggcagttcaggagaacatatgagccgttggaaagaaacatatagatttgtcaatttacttatatatgcccatatccctttgta

SEQ ID NO: 230 - DNA, 497 bp, Glycine max
  unsure at all n locations
nttaacccgtgagctttgagacccttcgagnaccgtcatccttggagaagagtctaggcatgcgagcttgtgtaattagatacaaatgttaatgtttatttatataactgtgaaagcgcataagtgtggtgaaacaaaaacctgaagtaccatctcattagtcagagtatatacaagcatgtacgggtgatagaaaaaaaaaagatgttggaaggttggatgacttcttagtgcatagagtgttactcacggtgatgatttcttctcctgccaccaaatggcatatgtcggcgatggaatatatatgttagaagggagcctggcaatgatggcattatattattgctttcacatagatagatatgttttaataccttctgtcgacttccgtttatttatgaaatagtgggagggtgttatttcttgaatccttgattttttttaacgaccgaggtgacattctatttttgtctatagattataacactttatttaat

SEQ ID NO: 231 - DNA, 503 bp, Glycine max
  unsure at all n locations
tggggttttccggtttggcctatagtcctggacntcaagtgctctgaggtatgcagattaccatcagaccacttncagggtgctgtaactactttatatggacttgatggggcctatgcaagttgaaagccttggaggaaagaggtatgcctatgccgctgaggatgatttctgcagatttacctgggtcaactttatcagagagaaatcagacacctttgaagtattcaaagagctgagtctaagacttcaaagagaaaaagactgtgtcatcaagagaattaagagtgaccatggcagagagatagaaaacggcatgtgtactgtattatgtcatctgaccgcatcgctcatgaggtctctgcactcatcacaccacaactatatggcgtatttganatgctaacctcgactttgcgagaagttgcctggacttctttctcctttacaacttcactcatttctggttttttccttccaccgtctgctttttgatgtattcg

SEQ ID NO: 232 - DNA, 259 bp, Glycine max
  unsure at all n locations
gtaatattatagccgatgctctntctcggcgtcatgcattactttctatgcttgaaacannaatgattggtcttgaatgtttgaanaacatgtatgaaaatgatgaaactnttggagaaattttttaaaattatgatattttttcagaanatggtttctttagacatgaaggctttcttttcaaagaaaacannatgtgtgtgcctaaattntctactagaaatttgcttgttttgtgaagcacatgaaggaggttaat

SEQ ID NO: 233 - DNA, 300 bp, Glycine max
  unsure at all n locations
aatctcaataagtcaacaatgacattcgaagaaatcgaaatacgttatggaggggatgtactatagccaatgtgtggaaggcaatagaaagaatnggaaaccttaatctaatgctaagtgtagagagtgagagagagaatgggaacttagtaactcatganagactntgaagtctgaacaagttagtgaatgtgttagcactacatattgaagctttaaatataaaanatatgtaaacatataaacaacaatagtaattctaaagacatgtcacatcantgggtctatgggttgggtcat

SEQ ID NO: 234 - DNA, 271 bp, Glycine max
  unsure at all n locations
aagaatgtgtatgtgtttcttgatttcagggttgtcatcatcaaanaggggaagattgtagaagcaagcttcatgatgatgaatcaagttgattcaagtagttctgatgataacatagatgatgacaaaaagccaaaagaatgatntcaagattgagtcaacaaatataagattaaattcaagaatcaagagtcaagattcaagaataatcaagatcaagaatcaagactcatagattcaaanatcaagagaagacttantcaagataagt

SEQ ID NO: 235 - DNA, 212 bp, Glycine max
  unsure at all n locations
gagagagagaggngaggngagcataatattgaaggaggacaagagagagagaagttgaactttgatatgtgtctcacaagactctcattcatcaaagttacaacaagtgttacacatgcttctatntatagcctaggtagcttccttgagaagcttctttcataagcttccttgagaagttagagcttagctacacacacccctctaataac

SEQ ID NO: 236 - DNA, 266 bp, Glycine max
  unsure at all n locations
cacatcaacatgctngaaccttcactttttgtgagnaataagatttatntataagaatggngaacaaggatcaaactctagaccacacagttatagaggctccaattacatgtcatgaacttgntactcaaaagagctggtgagttaagacatatggatgaatttatgtctagcattcatgttatggtgttatatttgaatattgaatatactatatgctntgagaggttntaaacttaacttgctgtagaggaactgaaatatgg

SEQ ID NO: 237 - DNA, 338 bp, Glycine max
  unsure at all n locations
acatctaactcagactaccgattcatgccaataatatatcgagacgcttganattgaacaacggaagctctcgagagattcaaatggtcataactnttcacatggatgtccaattcaagtgcataatattctgagatgctctaaatttaacatggaagcacaagggaaattanaacggccataacctataacaaggatgtccgattcaggccaataatatattgagacgctcgatattgaacacttatgctctcaagagattcanatngtcatacattntcactcggatgtccgattcagacgcataatataccaacatgctcgatattaaacatcac

SEQ ID NO: 238 - DNA, 269 bp, Glycine max
  unsure at all n locations
tgacccacgcgggtgttgaagagacggcatgggcatctccctccttccttcttgcccctgatgccccgattcttntggcattcagcgttatggaagaaacgtaatcaaactttcctctnttcaatccaacctcgattctttccccggcaaacaccagatccgcaaagctggacggcatgtaacctactagcttctcatagtagaacactggcagagtgtctaccatcatggcgatcatctctctctcaaccatgggaggagctacttat

SEQ ID NO: 239 - DNA, 246 bp, Glycine max
  unsure at all n locations
ctacactgactcccagcttgtctaagggctagtggcanacatatatcaagccaaggaggcagtattgctcaagtactatcatgctgcanaaacccttattgatgactntaatcgcttcaagatgtaccatatacggggggagaacatcaccagagcagacttgctctccaagttggctagcactaagagagctggacatcttaagaccattatgcaagagacactccaagcacctaccatagacac

SEQ ID NO: 240 - DNA, 271 bp, Glycine max
  unsure at all n locations
acaacctcaagatttatcatatacttatcaagagaatcaatccttaagagagactntccanattcattggaagcactgagaatcttgacaaactgttaatatacagtagatgtccttctaacagatctggacatggatatgaaggagatacttatgttcatgataaggaaactaccaaatgttatttctgtggaaaggatcaatgttnggtcaaagatcgcattggagacccttctaccattgtcatgacttgagtgccttcaatcactat

SEQ ID NO: 241 - DNA, 425 bp, Glycine max
  unsure at all n locations
gatcggccgtatttcctggccgacgccgactgtcattnttttcgatcaatatcggtgaataatactttntttgccgaggtgggctaatgttttcctggccgaataaatgggaacatgccagtttcgggcgaaacgaaacatcggttgagctcgcacgaaaaaacctagcccacctacattgtaagttttttatgcaacaccgaaacaagaaaacttcccctgccgtaagaaaaaacattatcggccagcgagcatttttttttaaaaaaaattgcgcaatgtcggctgaaaaatatcagtcggngccatttcacgaccgatgtcggctattttggtttctattcaatccctgaatgaaatttgcatgatgtcgattaagaaatgttngatccgcgtgatccggtgatgcttttttttagaactcn

SEQ ID NO: 242 - DNA, 253 bp, Glycine max
  unsure at all n locations
tcttctcaatgtccgttaagtcttatggacttcttgcctataaaggataagccttttcttcctgcctctcattntttgcttcctgcacggntgcacctccaatatntttaatatccncttattacccctctctgcttcttctgttgggcttcttctcccttctcaacactatggcagagatcctatgcaactgaaccanaccanaatcttccatcaagaacaaaccanattngaaaaaccacaatggacaaac

SEQ ID NO: 243 - DNA, 393 bp, Glycine max
  unsure at all n locations
tgcttcttctagaagcaatcgccttctggaggaattttctggaaggcccaagtgggcctagttgctatttgcacccccatttttactaaatacaccacttgctctttttcggagatttccctccgcaccaaaccccaactctccccttgtctcgtcctctatcacgtcagccctcaaacctttcttgttgtcctcctcctccctcatcccaattactacccctacccaactacaaacatttacctcacgtcgcgtttacttcacatacctccccgtccctgcgcattcctctcctacccttcgccacctagtccccattttccctctntctccctctcacttcctgcttccacttaccccccccctcttccttctctcctctctcctctcccc

SEQ ID NO: 244 - DNA, 416 bp, Glycine max
tattttcctgaatcggacatccgagtgaaaagttatgaccattggaatttctcgagagcttccgctgttcaaatttgagagtctcgatatattatgtccccaaatcggacatccgagagaaaagttatgaccaattgaatttctcgagagcctacgtcgttcaatatcgagcgtctccaatattatgcacctgaatcggacatccgagtgacaagttataaccaatcgtatttctcgcgagctttaggcgcgcattatactacacctccatacatatattccactgactcgtcatcctacactcaaacctattatcatctccatatctttttgataaaggtttcgatcccatactcactcctatctctccttcattctcgccatcagttcttattttctttccactcgatttatcc

SEQ ID NO: 245 - DNA, 222 bp, Glycine max
catgcttctatcttgagattatgacacatgctaattcggaggagatgatgattcgcgagatgtatgcagtcatctcagatattgtggttggtactctctgaacaggtcattaagcgaacttagcatagttagctctcttttgctagaggacaagcaaaactatacatactggggagtttgatcattgacgtacataagtggattatgcaattaagacatata

SEQ ID NO: 246 - DNA, 429 bp, Glycine max
  unsure at all n locations
gggatgtgagctcttgtagacttttctttgcaggaatgtaagctttatccaagaganatgtatggtcattggttgtcatgttttcaattagctccatagcttcattaggtgtttttaactttatcttacctccaacggaagcgtctagaagttgcttcgagtgaggtcgtaagccatcaataaaaatatttagttgtattggctcactaaatccatgcattggagtctgacagagtaaaccgtggaagcaatctagagcttcgctgagtgattcgtctagggactgatgaaatgaaaagatatctacctttccttgtgcttgctttgattctggaaagtatttcttcaagaatttatccacaacctcttcccaagttctcaagttatttcctttaaacgagtgaaaccatctcttatctcactggcagg

SEQ ID NO: 247 - DNA, 215 bp, Glycine max
  unsure at all n locations
tctcactaccctgtttctgccataacttaagcctatagataattctttaccccatgtngtggtcctaaagaatagtataatcatcacatactaggtatcgtttggaatcttttaaatgagaaagaggatactatctcgataatcaatatataatcataattcatgagtatcaatctaatcaatataatcataattcatgctaatcaatatatact

SEQ ID NO: 248 - DNA, 510 bp, Glycine max
  unsure at all n locations
atgacactgagactctttgnactnccctagaatcctctagagtcgatgctgaggcatgcaagcgttggcaaatggagaggaatattttgtttctatatggagacgacgaagagagcaaggtgttggaggtttctgacaaaattgaaaggatttgatttgatcgcaagcaataggtgtggtagtaagggtaggggacgaaggattggccgtgtgataggagggcaacgaacaaatttccaaggcaacgaaaaatgatttacattttttattntgttcgctaaatgtttcataagtcttactaaagtgaatgcaagcaaaagaaacaaatatataaaaaggataattaccattttagtcatccttgaaattgcaaggtgttgtcccattactccatgacaagaacaatattcatattaattcacgtgtctctcaatacgtccctacccttaaaactctttcatctcctcacccatcctgtcactctctctcttttccatctattatgtgtcg

SEQ ID NO: 249 - DNA, 239 bp, Glycine max
  unsure at all n locations
atggtgtcttggagcgtgcttgtgattntntctttcgccatgctgcacaactntcaggtgttcccttgagaatggtggagagaagcagaaggcagttccctcttagaanagcccgtgatgctgcagaagacatgctctctgggctactcanagccaagggtgatggattcatgacattgatcgaaaatggtaaatggatgtgtgacgaggcacctcacagtggaaatgaatatgtaaac

SEQ ID NO: 250 - DNA, 255 bp, Glycine max
  unsure at all n locations
cgatggngcacaacaagctntccacatccacaatgcgcgcataaacccaccatccnctggtgcccacctccaactgagctcacgtactcccacgtagcccatctcctcgtttctctcaacaccgggtccccatcaatcctctcaagcttccacaacatccaagcanaacaacgttcaaacagcacaagctatcacagccaagcaaaacagagcagaggcagataactctgctcaacacatcaaccaaaatcacag

SEQ ID NO: 251 - DNA, 230 bp, Glycine max
  unsure at all n locations
aatttctgggtccaaaataatgtccaatanaaatgcgactcatcactgtcaacgtaaacaattaacaatcaacatctaatttcggggctagagactaaaatagcgagattacaanaaaatggaagactcaattgataaattaaattacaggggaaccaaattgtgagctanaatggaagactcaatccgacggcctcagctaccgtttcgaactcattccggacaccaat

SEQ ID NO: 252 - DNA, 224 bp, Glycine max
  unsure at all n locations
catctacaacagacctccttaacctcagcagtatattcatccacaacagaataattatgacctctccagcaacaggtacaatcccgagtggagaatcatcccaaccttagatggtcgaatccttcacaacaacagcagcaacaacaacaaccttaatttcanaatgctgctggcccaagcagaccatacgttcctccaccaatccagcaacaacaacagcaaca

SEQ ID NO: 253 - DNA, 426 bp, Glycine max
caggctccaccagttctagtgaacgtgctgcccataccattggcgctttcaatgcggcgcatagatgtgatcgcggcaattgaacccaaagcttccaatgggcatcgctacatcctagacgctatcgattacttcactaagagggaggaagccggttcatatgctaccgtgactagaaatgtggcggttaggatcataataaaggagataatttgcaaatatgggctgccgagctatatcatcactaacaacgccgccaacttgaataataagatgacgaatgagttgtgtgggtattccaagagaccacaccataatttgactccttatcgacccaagatgaatgatggagttgacgccgctcacaagaatactaagatgatcatcttagagatgacagcgacatacaaaggattgcacgagacg

SEQ ID NO: 254 - DNA, 505 bp, Glycine max
  unsure at all n locations
ttgacccctgagntttgagacccccgtagnatcgncgatnctttggagaagaantctaggcatgcaagcttttaatggaagtatagagcatganagtgttctgataccattaactagtcaatagggtcttgagcaggttgaggacatccatactatatttggaaagacccaaaagaaggaaaaaaagagtaaaacttgcatatggaagaagaggtcgatattgtttgatcttccatattggtttgatctagatgtcagacattgtagcaatgttatgcatgcggagaaaaatgtgtgtggtagtgtcattggcacacttcttaacattcaaggcatgacaaatgaggcgtagaacactcgacacgatcttattaatatgtggatctgagaccacttacttcctaggtttgacggtgaaatgttatcctctcctcccactagtgatactttgttcaataacacattaactttacttccatcttattctacgcttccttctcctccc

SEQ ID NO: 255 - DNA, 432 bp, Glycine max
  unsure at all n locations
gttgattactattttttaacatcgattttagcgtcaaccgatataaaaagtgctttacaacaccgattttcattagaaccgatgtaaaaagtgctttacaacatcaattttcactagaaccgatattaatgtagttnttgcataattaaaaaaatattttgtttcacaagaaccattttcttcgtgatccatttttttaaaaacataatcctgtgaccatgaagaacaaaactaagacactataatattaatataataaatgcaacatgaagcagctagcgaacttcaaaaaaattattgcgaaccaatgatttgatgttccagtagcaacttggacccttggaatgctcgtattgcttatagcatcctanaagaataacaattattagttgcattgggtggtttccaattatccctgaaaatatgtcagct

SEQ ID NO: 256 - DNA, 206 bp, Glycine max
  unsure at all n locations
gcataatccataatgctgcanaacannatacacgcatgaataaactcttaatcgacatatggagtacataggaanatcctttcttaatagttccagcctccatagacaataacgttgcttatgaattaagaacaacaataaaactagtctgaatatgtgaaacacataatctgaagaaagaatagctatattcatcaacagcaata

SEQ ID NO: 257 - DNA, 221 bp, Glycine max
  unsure at all n locations
tatagtaacaggcanacggaaggattccacacatactaagccttcattggtgatgacgaatttgttgaatntgatgagaacctcattgcaatcttcaagcacatattcaacctttatggagaatattctgatagtgccaaaaagaagatagccaagaactctattgcanaatcttgtctgcagaagggaaaaatganatgaataacataacataacattaa

SEQ ID NO: 258 - DNA, 478 bp, Glycine max
  unsure at all n locations
gcctcgccaagcattcccattgaagaaccattattcanacctttcanagttagtgagaaggctaaaagaaaaattagggaacttagaanaactaaatccttaattgaaggagtaggcgataatcatggtgaattactaaacaaatnggtagtttacttaaggtcatcccagaaactccncaaacttcagataatacttccaaaatggtaacaagaagtacttncanataattaatgtattaatgaagaatgtgaccaacctcaaaaatcaagtggatagatcagttcagaaagaatataatcattaatccaacactggaaacacctctaatatatataacgccaactgcctgactttatagagaagagggaaacatntagagttagtgaacacattatgatggactgatgcaacgagatacatatgatcctcacacatgactgagtcactacaactcatgatgtaaaacatatatatt

SEQ ID NO: 259 - DNA, 507 bp, Glycine max
  unsure at all n locations
agggatgactccttgagaccatcgatcctcagagacgatctcgcaggcatgccagcttaatgagtatggaagcgtcacaaataacttcttaggtttttataatctaatcaggaaccagaatctcggaggggtgaagacacccactacctgcgatgagttcccgggtggagtactctggctattgtaaatggtatagtcatgatagcttccattgtttagcactatcacgttttacattatggagaaggcgcagacagagcttattttattgctgacgtgcacgcccaggcgcagcactctcgagagagtcttttaacagtatacgcttctgcgccatctgtgctatgataattcgaggtgaaccagaatattcttatcatgctgctcaagaacaatgctagagtttatattctgagctatctaanacgatgggacattcgctactccgtgaaataacaaccgcccagaattctgcacgataccttctcatttattataatcccaaag

SEQ ID NO: 260 - DNA, 290 bp, Glycine max
  unsure at all n locations
gtttaagtcttctaaactgcctatctatattccatagcctataacaacttccgtgtgcccatcggcttgtgggtgacaagccggtgacaataacaatttaatgcccaacttgctccacaaagtcctccananatggcttaagaacttagagtccctatcactaacaatgctccttggcataccatggagtctcacaatctccttgaataacacatcagccacatgggaagcatcatcaactttcttacatggaatataatgagccattntagaacacctatcaacaacca

SEQ ID NO: 261 - DNA, 428 bp, Glycine max
gattggtgaatcttcctgcttttattggtgaccacagagtggtacctggagatatgtcgcggcggtcacgagaccttggggacgtcaggtggggtgctattgcccaaaaccaagcttgaccaatcccgacccaacccgggcatagtcggtcagtgagaacctgtgatgtacctaaacaggcgagctcctggcagtcaacagataaaaggaacaaagaccacaaagcaaggaggcttgtggtagctggccagctgtgaaacttgattgatatgtgagatatggtctctggtaatcgattaccaagggtggagaatcgattacaaggcttataaatgaagacaggttgctaacatggtctctggtaatccattaccatatgttgtacccgccaacaggctcggacactgattcgagaactataggacccg

SEQ ID NO: 262 - DNA, 421 bp, Glycine max
taacactttaacgtgcatatgttagcagggtgtaattaattacacactgcttccgtactgctaaaccagaacaaaagatgattaatggtagatgttttttattatcgataaatattaatttattaatttttgttaaaaatatagctcacaagagtaatatccaattcatatatggttctatattgtgatcccaaaagatgcacgacatttttttttcttctttccacatgaactcatatatcatcctaatctacaatggtataagtgaagattgtaccatacctcatataatactactgagatatgatcacgttcacaaatgaatttcattcccatttattctctactctggataacatcctccaactatattatcaacgcccacctgcccctgaccttttttagaaaaagaggtgtaacg

SEQ ID NO: 263 - DNA, 493 bp, Glycine max
  unsure at all n locations
ttgccctgaccctggacctcgagaacgtgatacttacactcacctgaagatgcagcttgagaatatgtctatactggattaaccnattatagccttatcataaacgactacacaattgctcttgagacaacgactgatttattcaagagactgtactttaatcgattaccatgccatataatcgattacttccctttgtatgcgtgtgtcagaagcgaacaagaacactttaattgattactttgagtatctaagtgattacatagtccttatgttctttccaattttcgagaagaacggtttaatcgattaccaagataatctaatcgatacatcattgaattgagcgattaccttgaagactcaactgataacagaccggtgtaggtgttttctctataaacaaccaacttgtgctatgtataacaacacaacaatttgatctctagcagagcctgcatcacttgttgttattaaataaagaaagaagcat

SEQ ID NO: 264 - DNA, 509 bp, Glycine max
  unsure at all n locations
ttgcccttgtanccttgntnacntccggagnnccgctgatggtatgcagtcgatctcggggcatgcnagactaagcgcatagttggggcatttatcactattacctgtatcacatacctgatccgattatgacttgtactgtaaagaatcacgagtgattgatattatgatcctcgccaccttgttcttgtacgaacacatcataacacttatagagnttgtactacacacagcacactctctgatttagggataggtgcatgcttgaactatgattgctgggattgctcgattgtagtttgagctcttttacgctgtaaactcgccgtgacttgagcccaacatcacttacatacactcttctatatgctcttactcgcttcaaatgtaatatgatttggaggcgactttaactcgcgtgtgacttgcccatgacaactcatatgactcttctcaaatcaatctacggccctatgttattaccaatgtgagttgatatcatcctaagg

SEQ ID NO: 265 - DNA, 485 bp, Glycine max
  unsure at all n locations
atganccttgagccccctcgagngcccgggatccttagagtcgacccgcggcatgcaagctnggactcatgagcggcccgtttatgacttattgaattgagccttgtggtgttactagtgctattacttatggcaccgatgagagcgcaccgactactcactcaacagcctattgtaaatggacactgactaaacccattcctaacacaccgttctatagcgcgacgagtggcgtgagagacttacttactccagcctactctttcaacaccaagacttacagagaatttcatttcctatctccctcattaagtgtattacactagtgaccttctatgcgatggtttgactagaaaaagagcttaactcgtgccacactgacgactatgagcagtacattagagcgatgctgttaaatacagtccacctctattttccttgtcaagacaaatctacatggacctctgttagggggtttcccaacc

SEQ ID NO: 266 - DNA, 435 bp, Glycine max
  unsure at all n locations
ggaaaacttaggcaatagacactagtatcttagcaaaattattattattattattatttttactttaaagaatagctagtcattgaaatttttctcccccccccctttttttcttaaaattttatattattatctatatagtttttcctacacacacacacacacatatatatgtataggtatataattgtacatttatttctggcaaatcaagaagctaatttgtgcacaaaatcactctagaatagccttaacatgagtccaaaacaacatttaagcacaaatttaaatcctcttacttgcttcaaatttaataagaaatggtggtgacttaaactccacaagttacttgcccatcaacaactcanatgactnttctcaattcacacaacaaccctatggtaaataccaatttgagttgatatcatcctaagg

SEQ ID NO: 267 - DNA, 200 bp, Glycine max
atgaactctatggactagtactcattgtgctggatacatacttgataattgttattgttagcagcaccttctctgttcatttagtttcatatattcatccttagacatatatgatctttgtaggctgacatatatatgtaacatggagggaatgaaagccagcgcaattgcactcactgctctagcagaatatacaggtg

SEQ ID NO: 268 - DNA, 272 bp, Glycine max
  unsure at all n locations
gctcttaactgcacaaggctcttaatatgtgaagagtatccttgtgtaaccttcacncgacgaagacactgacanagacttatcttcttcttattggacacagtatggcaggctggcggcaagtaaatattcatcccatcagaccttggatgcaactgtgatcgtatgcccatatcagctagatcttaacgggtattcaagccatccttcgtcttgccttgaatggtaaggagcgtaccaatcacactgtcacaaacattgttctccacatg

SEQ ID NO: 269 - DNA, 451 bp, Glycine max
  unsure at all n locations
cacgcctgttcatntgactttgccaccacaagtgggtgactctctatcgtactcacgctccaggacgcgtctcctgcacagaatgcagaactctctcactgcgcaaaaggagtgtatagacttttcttcatatatcgaggcccgcatgcatcttcgtgacactattgaccataaagcattcttgcacatgcatgatatgaaattctgatcctaatcatatgcctcctcangttcatctccaagtacagttgacagtgtgtgtttcttatgcacccttaactattgcaaatatgatgccggccactatacatatcacgctctctacaccagaggaccttttctatcttgaacacttcatatattgcgcccatgacctatcgcatccccactattacgccctgagtaccacaatgcttaccaatactcctctttctcattactacacaaaccg

SEQ ID NO: 270 - DNA, 262 bp, Glycine max
  unsure at all n locations
gaactcttaagagaaaatgcattagaatctcttttgatgaatcttagannatattggaccgtgataagttcgcanaaagagtcagaanagacacanaacaagtaaagtatttatagatntagcaganagaaatagatccaaacgattagtaatcactggtatttgattaattngatcataatacctttgttntgcattntcaaaatcatggtaatcgattacaatatgtggtaatcgattatctcannataacatagatcat

SEQ ID NO: 271 - DNA, 146 bp, Glycine max
  unsure at all n locations
cttcattttctccatgtatttcctcacatgtcttatgtgaatggtgtaacatgattctntagaatttccaccaatttaacttgctatagaagctagattngatttcctctagttcanatttcttggtcttgntcttgaaccatgaa

SEQ ID NO: 272 - DNA, 99 bp, Glycine max
cgtatcccggtgagagtgtgatcctttatatttgagagaaacagctatcatttagcattgatttttgcatgaatctctgaagtatggactgaatgcatg

SEQ ID NO: 273 - DNA, 227 bp, Glycine max
ctctctgacctgggaatttccgttcaacttattgaccattagtttcgagtcgatgaacacgtatcttgtatttattatattatttgtgagcggaagcgctattgttaatgcttgttcaagtaccaccccatatcaggattcctataagattctcgctccacatagtgttgtactggatgggccattgacaaatgtaacaccctctaccctcacacataacgaataaa

SEQ ID NO: 274 - DNA, 418 bp, Glycine max
accaattaaagagttcacttccaaacatcccagccttccgtattggtacaattgaaacattgagaaataatcaagacttgtgtggaaatgtctctggcttggaaccatgcccaaaagcaagtaaaaaatctcaaaatcataagactaacaaagtcatattggtatttttacccgttggtttgggtactttaatattggcattatttgcctttggagtctcatatcgtctttgtcgaagctcagagacaaaagaacaccaggatgcaaaaccaccaggccaaaatctatttgtgatatggagttttgatggaaaaatggtgtatgagaacatagttgacaccacataagagttcgacaataaacatctcattggagttggaggacaatgaagtgtttacaaagaagaaattgacatact

SEQ ID NO: 275 - DNA, 508 bp, Glycine max
  unsure at all n locations
atgaaccatgaancttgataccctcgaganccggcgaactctgagacgacccgcggcatgcaagcttgttgagatacctggcgaatctcattttttctatataaaggtaatagaactaaatcatataaataaaaggcagacaaaatgtccattgtaaagcatgaccacatcaatttcatttgcattagtcttgaagacataaagattctacatgttgcaagaataagaatgtaacagtagaacatcccatttctcagagaatgtttacctattccaaaatatggttgtcttcaatgctaagcaatgtagaccatgctcattgtgcccatccatttgaatttcactcaagtcatcaccaacgttaacaagttctctagagcacctgactatcagacgacaaagatcttttgataaagaaacctcgtgacaagtaacaacatcagcttccacaaggtgaaggttaatacttttcctcaatgactcattcatgcatgatgcatacacaccg

SEQ ID NO: 276 - DNA, 437 bp, Glycine max
cttcaaacacttgtgtaatcgattacgatcaacctgtaatcaattaaaacaaagagttttaactatagaggaaatcttctaactttagaacttttcttctaacccctacatgatgatgcatgatgcacatatgatatgatagagactaagatgcaacacacaatataacaatcaatacaaatgccactcaagagagttgggcatgtaaaaaataaaacatcttaaagctcttcttcaagcttcaaggctaacgtttcatgttgctcctcctatctctaacaatattttcatggcacaaaacatatatatatatatatatatatatatatatatatatatatatatatatatatatatatatatatatatatatatatatatatatatataaaagtgaatgatatgtttttcacatagaaggcgttccaccacaatag

SEQ ID NO: 277 - DNA, 519 bp, Glycine max
  unsure at all n locations
cgtgttgannccatcgatnaactgacactctataatactcaagctgggcagcanacgtatgtatgattntaagttggcttgggagtggttgctgacattcctttctagttgcacctattactaatatttatgtttgaattcgcatgattctattttgattttaacatgacttatgtgggagcagggatgatttgcccccaccttggatattcgtctttgctccttggagccattctctccttcggagtgatatggccgctcattgatcgtcgcaagggagattggttccctaccaatttagatgagagcatcatgagagctttgtacggcgtcgaggtctttctaacagctgctctcatcctcggtgatggcttatacaactttgtcaagattttagttttctcaatccttagcgtacatgaaataactaagaaccgtggaaatggtatgacgtacatgtcaattcccactctcttgtctgatattagtcatgaaaattacgtcacaatgctcattccg

SEQ ID NO: 278 - DNA, 453 bp, Glycine max
  unsure at all n locations
tatctccgacagccaatgggtgagtctcgtccaggtagtcccgaaaaagactggcctcacagtgatcagaaatgagaaggaggagctgattcctactcgggtgcagaacagttggagagtctgcattgactataggaggctgaaccaggttaccaaaaaggaccattttcccctgccattcattgaccagatgcttgaacgcctggcaggtaaatcccactactgtttccttgatggttnttctggttatatgcaaattactattgctcctgaggatcaggaaaagaccacattcacctgccccttcggcacttttgcttataggaggatgcctttcggcctgtgcaatgcccctggtaccttccagcgatgcatgaatagtattttcagtggatttttaaaaaattgcatagaggtgtttatggatgatttcactgtatatggatcctcttn

SEQ ID NO: 279 - DNA, 265 bp, Glycine max
  unsure at all n locations
taacgatttctaattatgtgggccattaagtctatcatatgctaacaatagccgagaagcccatgaatctcttcggnggcggagtaggtgtctgccattgccttggccttggctaacaagcggngaagttcttgactcccgttcaaggtaagagcaaaccgatccatcaacatggttgcctcttagtgtaaagagtcgatcacccttcctctagcctctntttccgtgtatacttgagcatactcatccgcgattctatgctcgt

SEQ ID NO: 280 - DNA, 456 bp, Glycine max
  unsure at all n locations
naggtgttttgatgataacaatgatgacaacaaaatatgatgaaaaaaaagctcaagtgaatcaaagaacatctcaagagaatcaagaacaagtcaagagttcaagaatcaagaagaattcaagattcaagaagaaagcctacaaacaagaatcaagattcaagattcaagatctcaagaatcaagatcaagattcaagactcaagattcaagaatgaagaaaagactcaatcaagataagtattaaaaagttttttcaaaactttgaatagcacatgagtttttgacaaaacctttaccaaagagtttttactctctggtaatcgattaccatattgttgtaatcaattaccagtagcanaatgagtttgaaaatgtnttcaaactgaatntacaacattccaaatattttcaaaaggctggaatcgattacaatgttgtggtaatcgattaccg

SEQ ID NO: 281 - DNA, 264 bp, Glycine max
  unsure at all n locations
gtatcacaatatatgtagctacttcccttgagaaaaaattaatggaaaattaatttgattntatatnntacttcaattttttggcaatggccggattgaaaaatatttaattgaataagggtgttatattgttgaatntgtcaataatacatgtgttgaagttattttggttttttttacttgattacttagtacccttctctatattaacgtttattatanaataagtngtttataactatgactaatngttcatattaaaat

SEQ ID NO: 282 - DNA, 246 bp, Glycine max
  unsure at all n locations
agcaattggcaatttatactggaatattctaaattacaaatgtntataagaaacaaacctgcaaatgactagctacttgctctcttatcaaagcagggatattcatagcttcaacaatcctctttggctttgcttctgaagaataatcaagggagaagattaattacaattatcatagaattaagccatatacatgttnttaaataccaactaagaggaatacanatggtgaagaataatcatact

SEQ ID NO: 283 - DNA, 457 bp, Glycine max
  unsure at all n locations
taaaaactataaaatgcaaggtaaataaaatgacattcagtttgtagatatgttgggtctttctaacaaacaagctgatgcatagaaatatatttctctaatcaatcgtgctcttgtgttctatgttgtagcctaaattactaaaccctcgatccctcgtcaggatgaatatccaagctttgtccgcagatccctcatttaagactacacctgatttagacagccctcttaggtatagactaacttaaactgagtntcatccgcagatcccttatgtaagactagactcacttcagtagcttaccaaagttaagcctatttaagccaaagctttgaccgcatatccttatgtagactaggccaacctaaccagctttatgtacagcatatttaaaccaaccttacctcgcaatccctcatgaaggctaagttaatcctgttcatcaattctaggcag

SEQ ID NO: 284 - DNA, 429 bp, Glycine max
  unsure at all n locations
gctcactacaagccttaggtgataaaccatgatattaccatatccttaanggaatttggagctttggaattgttntgggaataagtgtgtggggtctatggttcataggaacacatgccttgttgactatgcttcatgatgtattntgggccatacttgatgtacattgcatattggctaaatgttggacatgctgaatgaaatgttgtttctcataggtaaaagaaaacaataaagagaacagcaatacagttgagtgaataagatcttaaatggcacaagaatgatgagactcttggttctactcttcatgtctaattctatcttgactcttttattgcgtagtgttttaatatgcactatcccttngctctctattctttggattaccactattcatattctcataccttgccttgcccatacacc

SEQ ID NO: 285 - DNA, 544 bp, Glycine max
  unsure at all n locations
cgactgattgatttgattcagtactcgnagacgctgatcctttatcactcacctgcgcgcatgcaagctggcttctacaaccctgtcaaacttaagtgtgctcgnagngggactgacaacccacgtagagtctgaaaacgagagtcttcacagtgcacagtcatgactgtgatgagcctagtcctactcgggggcagatcatatggagagtctgctttgactattaggatgctgcaccacggttaccataaaaggaccattttctcctgccattcattgaccagatgcttgaccgcctggcacgtcaatctcactactgtctccttgatggtttctctggttatatgcagattactattgctcctgaggatcagggatagaccacattcacctgccccttcggcacttttgcttataagaggatgccctttcgcctgtgccatgcccctggtcctctcagccatgcatgattactattttcagtgattttatagaacattgcatataggtgttatggatgatctctctgttttcgatcctcttt

SEQ ID NO: 286 - DNA, 451 bp, Glycine max
  unsure at all n locations
acanaatctatgtatccaaaacccctcaatttaatggattntcaagttttgagaagtgaaattgggaatgggataaatttggagcaaactctcacctcacacaagtctataacatcaatttaaacttgttcaaactggatttacacctaaaatttcactgaatcaaaatttgactcctcaacccccaattttaccctagaaatggctctttgttcagtttggtcatttgtttttctctttagcacagcccanactttctcataagtcctaaatgacatttcaagctaggattaactcactttaacctccaaataccactaaatccagatttggccttccaactctaaaaaattcactctttntccactcataacaccataatctcaccttctaacccttggtaattctacccttatctctaacagtttccataacaatttcaccacaacat

SEQ ID NO: 287 - DNA, 54 bp, Glycine max
gtgaaagggctagtgatgtgcttgtgtgtgtgtgtgtatgtgtgtcttggagag

SEQ ID NO: 288 - DNA, 457 bp, Glycine max
  unsure at all n locations
cccatcaactgccctaactctttcagactggtgattcctagtctcttgaccttgacttgatagaacctctttttaagcgaaggcgcctgactcgatcccatgttttacaaagtgaaacaaaacccaatgtgaatcaaaactccgacatctatcatgggtggaatggatgaatgcttgaagaaatgcatatgacacagatacattttatgaatacgggagcccgggaaattgtccccttcttagatacaacattttgggcagcatggcgcctgacgtatgtatttaagaaggcgaaatggaccctccgtcggtttgacaaagtgaggggaccaagacacaatccgtgcatgatgcatatgcggaaggcacaaaacggtgatgtacatagtacgacaatatccacaaacaaatataagcaaaggcatacatgacatttangactacatgcatgacagtg

SEQ ID NO: 289 - DNA, 402 bp, Glycine max
  unsure at all n locations
gctagagcttagctacacatacctctctaatagctaagctcacctccttgagatgagaagctagagcttagctacacacccnctataatagctaagctcacccncatgacananaaaacatganaatacaaaanaaagtccttactacaaagactactcanaatgccccgaaatacaaggctaaaaccctatactattagaatggccaaaatacaaggcccaaacgaagaanaaacctattctaatatttacaaagataagcgggtcatgcttagcccatgggctcgaaatctaccctaaggctcatgagaaccttanggccttcctttgatctctagcccaatctacttggagtcttctacccaatgcccttgcaggataggattgcatcacatgtcatga

SEQ ID NO: 290 - DNA, 457 bp, Glycine max
cccatcacatgtggtactaggtggcggtcgggcgatggtgcacaacaagttttccacatccacaaagcgcgcataaacccaccatcccctgttgcccacctccaactgagctcacgtactcccacgtagcccatatcctcttttctctcaacaccgggtccccatcaatcctcccaagctttcccaacatcaaagtaaaacgacattcaaacagcacaagctatcacagccaagcaaaacagagcaaaggcagaaaactctgccaaaacaccaaccatatcacagcttttctcacttaaagactccaataacaattccttcgttccggttcattaaccgttggatcgactcgaaaattgtactggaagtctttagtacataagcctacgatttgaccgttgggatctactagcacacatccagaactcattgtacattactctctccacaaccagcg

SEQ ID NO: 291 - DNA, 219 bp, Glycine max
  unsure at all n locations
tattgtagccgatgctctttctcggcgtcatgcattactttctatgcttgaaacaaaattgattggtcttgaatgtttgaaaagcatgtatgaaaatgatgaaactnttggagaaatctttagaaattgtgagaaattttcagagnatggtttctttagacatgaaggctttcttttcanagaaaacaaattgtgtgtgcctaaatgttctactagaaa

SEQ ID NO: 292 - DNA, 544 bp, Glycine max
  unsure at all n locations
ngggacgtggatgaattcctgcattgtccgcacccggtgatcctntacagccgacccgcacgcatgcaacctttatgaactcacggngganaagcctcgaactttgacactcccgacgcgtcacttattagggtttgtttcgtggagcgttttggcgacgatagagagggcgtggaggccgctctggagctcctcggcgaggaggtcgtagacgagacggtgtcgtttgacgaggctctggccctcgaacttgggcgatacgatcttcacgttgaagtgggtttctttgtcggaacttcccttcacggcggcgtggcccgcgtgctggtacgacacgtcgtccacctccaaaacggtggcttccagcgccgtttgaagcttcgagcgaatcctgctggctcgagatagcagcgcgctggctcctctcgaactcattggatcggatgaatggtggcgtcgggttanggttttgagaacggaggagtttccgcagatganaacatggacagaaattggggagggaaagttatatttcccctctgcn

SEQ ID NO: 293 - DNA, 480 bp, Glycine max
  unsure at all n locations
ntgaacccanagtaacaactatgacttggctcaacaacacttgttgcgcttactctcaaccttcaaaagcaataactccctaattgatcttttaagattccctatcctaaatgagttttgtttggggacaaatacctaatacaaaaaaactcaccaataagtctctattgagaatatgtttacatacattctatggttaagtgaatttggctctaaaggcctatagagttatatatctacaaaatgacttctcctttccccaacatagtcatgagttntgctactttagaaaagtaagccttctttcttcacgtaagtgcagtttttttttcttgttttctagttgtattgcttgtataagacttatgatgacaaattaatctctcatttccagaatgattcatgtcttttggagagcttgtcacttcatatgcaaatatattgttgcatggcatctccttccttgcttctaatgtgtgg

SEQ ID NO: 294 - DNA, 424 bp, Glycine max
gggagttttacatatatgacaaaggcgcaacgcgttatggttgaaaatacccttctggtctttgactaaaaatataggtattagatctggagtacagataatcaagctaaaggtataaaagatagcctatgtggatcataacactataaaggtgtgaccaggctttacagatttctactgttattatattctgtcttttgctctgactctgataattatcaagatcctttttcatatgtctccgcaccgcttcacattctaattcatttacgtgtatatttctttacactttagaaactacatccatcaaccatgcccttaacgtctaaatctgtgacctgtcatcgatcaagcagaagcggtccaacaaaagtgaaaagacacgatgcggactttcccatattggagagatattcctcagacg

SEQ ID NO: 295 - DNA, 353 bp, Glycine max
  unsure at all n locations
cgacacataactcccaccgcatatagaatatcgggccttgtattggttagataccttatactccccacaagactcttgaagaccgtggaatctaccttctctccttcatcaaactttgatagcttcaagccaccttccatatgtgtgttcacgggattgcaatcaagcatattatatatcttcaacacttcttttgtgtagctttcttgtgagacacagataccattctcccgttgttcacttncattcccaagtatatgacatgagtccatatttgcatatcaattcacagacatgactcttgagtctcaacaatttggtattgcgataaataggcatccctaaacaataat

SEQ ID NO: 296 - DNA, 436 bp, Glycine max
ccagtttcctgaaaatatcaaggaatctcgttagatggcggtcgttgtccttcttggaaggtaccacaggatatggtacttttgtatcctcatttgaagctttttcttgcttcttctctcttgctttctcacttctactcttttctttcccttctttatttttttcaactttttctttttcttcattttctttttctttctctacctctatttctttttcttggtcgtttatttctttcttctcgaccgttattggtttttcactctcctaacttgtcacatctgttgcctcctctttctttttctcaatgccatcctttacaacaatatgtttctccaaagccaccctatcctcatcctcaactaccaaacgcttatttcttgtcatcacaacattacattcctctgtgggattctcttctgtgttcgccccaag

SEQ ID NO: 297 - DNA, 365 bp, Glycine max
  unsure at all n locations
ctctacaattgcatcacctctcaatgatctggtgaagaagaatgtggcatttacctgtggtgaaaaaaaggagcaagcctttgctttgctcaaagaaaagcttactaaggctncagttctagctcttcctgactnttctaanactttngagctagaatgtgatgcctctggagtgggagttagagctgtattngtacaaggtgggcactctattgcttattttagtgaanaacttcatagtgccaccctcaactaccccacctatgataaagagctntatgccttaataagagccctccanacttgnngaatataccttngttccangggaattgcattcatagtgatcatcaatcacttaagta

SEQ ID NO: 298 - DNA, 453 bp, Glycine max
  unsure at all n locations
aaggccaagtcatcacgatatgcgaggatgactccccgagcaagttggatttggtatgaccatgccctcctggtttctgactaggaaattggcgagtggaggagcgcccagacatttacgcgacaagcataatgtaaccctttgtggcttttaaactctacggtggggcctaggctttagagtttccttttgttatggcattatgtcttttgttcttgaatttataaatataaagatctttcttcatctgttcctgcacctctacccattctcattcatttgcatgtttatttctttacgcttaanacactagatccaacaacgagtccctcgaaggtactaatacctgngacccggccatcgattcaagcaagaagcgggtcaaacagagagtgaagaggacgaggatgtgggacttcccccagagttggagaagatagtcactcacgaggt

SEQ ID NO: 299 - DNA, 479 bp, Glycine max
  unsure at all n locations
nggaatggcacttggaccacctatttgaatctcctatgctgtacctacatacataaaaacagtcccaccatctcaatttttacaaaatcatattcatacaccattggggcatttcaccaagcacttggtgagcgcatgtttggacatgaattgcaagagaatgggagcaatgtggcatgccccattgcttcagaatacaacctaggcctaagaccttttcattcaaatcctcaattcaagaaaacaagcaccaaagcaaaccaaaactgcctcacaaatataagcatgttctcacaatttaaggcaccaaaagatgaagaaaacacatcaatgggaagcaaaaacatcaaggatggaatacttacttgttggagtgaattgaaacaccaaaaatgaaagcaaaaggcaaccaatagtggcttgagggggcaagaaccacaagccttcgtgttctttctttcttgaatgagaagggggan

SEQ ID NO: 300 - DNA, 541 bp, Glycine max
  unsure at all n locations
cggcacgatgtttgttgcattcgtacccgagaccctctagagtcacctgcggcatgcaagctngaacagattaaagtcaacaacactgactgttntggttgagaggtggagacctgagtcacacatatttcatcttctagttggtgaatgcatagtcactttggaagatgttgctcttcacctgagtttatgcgttgatggaaaaccaattaatgacctaacatattatgattgggaacaaatgtgtgcaaaatatatacgtgttgttcccccaaagaatgcactagtgggatcaacactaaaactaanatggttaaaagaaaacatgctgactctcccagcanaatccacgcaacaataattagcaccccattgtaggcatacattntaggaccaattagacaagtcaggaaacanagttcacctgatgtatctacctctgttagcaaatcttgaacaggcaggatggtacaattgagaattgacatgtttagcacatttgtacagagaaatgtttatgacaatttatccatcatcaaan

SEQ ID NO: 301 - DNA, 221 bp, Glycine max
  unsure at all n locations
gcctttcttcttcctgaacacacatggtcattaattcattgatagaccacttatctttatgtgtcgtgtaggaaatcttaaatggcccatattcatgccgaagggtgttcagaatgaaatgcactangaaggactcagacatatcaacctctagtttcttaagtngagctgaaatatctcgcattntcatgatgtactcacgcatcaccttcacacttgtg

SEQ ID NO: 302 - DNA, 170 bp, Glycine max
  unsure at all n locations
agcacaactagtcctatgtcttctctttgagagatanagatactcataagagttgatgtactctactatacatagttctctcactgtgtnggtcaacttgatgaactctctcaagtgtttcataggatcttcatgagcaccaccactaaatacgttgtctatagcatctg

SEQ ID NO: 303 - DNA, 256 bp, Glycine max
  unsure at all n locations
gctcgaaagagagttatgcnctgtacacttanacagtgttcagagtaatatattatgccannaataagagaacatgacacttggacccaatgatgtccaatntcacaaaactcaattaanaggcttcanaaccataataaaacatgtcanatatatgcaaaatgaaactataatgtatgctctaatattctctatcagaggacattcgataggaacanaatgaagtcccttanacaatattcttattgatgatgat

SEQ ID NO: 304 - DNA, 260 bp, Glycine max
  unsure at all n locations
catgtggactatgtggcggtcgggcgatggtgctcaacaagttntccacatccacaatgcgcgcataaacccaccatcccctgatgcccacctccatctgagctcacgtactaccacgtagcccataatcctcgttgtctcaacaccgggtgcccatcaatcctcgcacagctccacaacatccaagcgaaacaacattcaaacagcacaagctatcacagccaaagcaaacagagcacaggcagaaactctgccaaaca

SEQ ID NO: 305 - DNA, 523 bp, Glycine max
  unsure at all n locations
nccacgggnaagttccccagnnantcantnanatnganannaancaaananaataagagaacaatgaaaatggaagaattgattcatgtttcctttgatgagtctaatgttatttgtccaagaaaggatattttagatgatattgtagaatctttagaacaaatgcacattcatggacaagattctaaaggaaaaggagaaggaagcaatgaagatcctccagtagaagtcaaagaaaataatgatcttccaagagagtggaaagcttcaagagatcattcccttgacaacattattggtaatatctcaaaagggataacaactagacactctctcaaagatttatgcaataacatggtttttgtatctataattgaacctaaaaatttaaatgaagccataatagatgaaaattggataatagctatgcaggaagaactataaccaattgaaagaaataatggtntggagttagttgagaaacctgaaaactacccaatcattggaacaaaatgggtgttag

SEQ ID NO: 306 - DNA, 468 bp, Glycine max
  unsure at all n locations
agactgagcgcttatcacaaggtctgtgcttagcggatagacaattgcaaaaaaaatttctaagtctttttctgtctatatcttcacacaagcttaaaaccccttgttcattactaaacaaactaaaattaatcacaatcacaatcaagatatcctaactacatgcaagaggtaataatgaaaatagaaaagggaaagaaaagctaggttgcctcccagtaagcgctcttttaacgtcactagcttgacgcatcgtcctgttatccaggaaccaagagagttcctacttcaaggaccttcttctcaggtctcttttcctccatcacatgcactntanaataaacattntggctaggtggatccttgttctcctgaaacaaatcaaagctgatcttctgatcttctatgcccatccgcagtatcttttttcccatgtncaccacacagcttgcagtagacatgaatggn

SEQ ID NO: 307 - DNA, 472 bp, Glycine max
  unsure at all n locations
aagctccttcaactgcacaaggctcttaatatttgaagagtatccttgtggaaccttcacccaacgaagacactgacaaaaacttatcttctccttcttggacaaagtatggcaggctgggggcaagtaaattttcttcccatcagaccttggatgcaactgtgatcgtatacccatatcagctagatctatgtgtgtggctgtgtgtgtatggctgtgtgtgagtgtatctgtgtatgtgtgagtgtgtgtgtgtgtgtgtgtggttgtgtgtgtgtgtgtgtgtgtgtgtgtggttgtgagtgtgtgtgttagtatgagtgtgagcggctgagtgtgagcatatgtgcatgaagcgagaaccatatctcaacctctgtaattctatgtacatgcactccccttcaactttaatgcgcatctatcagcaacctttcattnctctccgtagaatgcttcgacaatccgcccg

SEQ ID NO: 308 - DNA, 475 bp, Glycine max
  unsure at all n locations
cgattggtgcatcagtcccgagaccctatnatcaaactgaggcggcgtctcactgagagggcacgacccagactgttcttattagaggtggataccggactcaccattactataatctctaccctgtgcatgcctgggggctccagtagatgcggctcatcccctgagcttatacgcctatggtataccagatacggaccctttatagcaagagtgctaacaaagcgtgcgatgcggatatacatgtagatcgccctgatactgcctaatgggagcacgttctggccttatggataggaaagcgtgatgccagctagtgacctcacgcactttactagtagactttgtggcatgcatgttagaccatctacagtaggaaccccgcacgtgggacctcctctggacatactggacagcagcggtcgactagattgcacgccatccactgcagagaaggtataaattatcatatcag

SEQ ID NO: 309 - DNA, 511 bp, Glycine max
  unsure at all n locations
gtgatgatgcatcattatctacgngaacatactcaagcttgctcggcacgaggtacttacccgttgaagatcgatgaacgttgattatcgaatgaagaacgttgaagaacggttgatacctttgagagattcctcaccgacaacgttgcggatacgcattcgaatcgcgtgcgcttagattgacttgatgtggacaagtaatgcgagcaaattggattgacacataggtgcctaatgggctcaacgccttaattcttgtctttctaacctatatataacaaaacaagggacgtggttgacgcccagctcgcccaggcgagctcaactcgcccaggcgagcagggttgcttcctccagaagcaaccgccttctggaggaatattccggagggcccaagtgtgcctgggtgctatttgcacccccatctttactaagaacaccacgctacgctgttttcggggagggtctataatacagtaccgtaacttacgatcgtctgaagaaagggggg

SEQ ID NO: 310 - DNA, 421 bp, Glycine max
  unsure at all n locations
agttgcacatggatttttctcanaacattcttaccaaagagtttttactctttggtaatcgattaccagattattgtaatcgattaccagtagcaaaatggatttgaaaaagttttcaaattgaatttacaatgttccaattaatttcaaaaagctgtaatcgattacaatgttttggtaatcgattaccagttcctttgaacgttgacattcaaattcaaatgtgaagagtcacatcctttcacataaaagccttgtgtaatcgattacactgatttggtaatcgattatcaatgattatttctgaataaatcaaaagatgtaactcttcatattgttttgatttttcacatggattaagctctctaaaactatactcttcatatgggcgatngaccaacttaatagtcatacattttct

SEQ ID NO: 311 - DNA, 234 bp, Glycine max
  unsure at all n locations
acatcatctactattgttcatctgcttccatgaatgaagattcatgatcatcacaggtaccacaccacaggtacaanaattgcagggtgagtntattataaaagaaataatcaagcattagatgacaataattagcaaggaaactataacaataaccataatcatacttaataattcatcagtttgacatacactanacatctagtcatcaactttcatcatttncaatcaatc

SEQ ID NO: 312 - DNA, 221 bp, Glycine max
aacagttcaatcacatgcccataaccacatcctgtgcccctcactgagctagactcacgaccattctgttttaaacggtccatatctccaagttccacataaggatcacataccagccagtatacagcagcaacaggcaagaaaacttgtcaaaaccacaaataagttttactaagaacagtacattctcatcaatcgtaccgtgatcgatcaaattatga

SEQ ID NO: 313 - DNA, 455 bp, Glycine max
  unsure at all n locations
ctgagcaaattcaaacgacaataactntataatcggatgtcctattgagtcccctaatatatcaaactgctccaaattgaaaatggaagctcgtagcatatttaaacgagaataactctttactcaaatgtgcgattgagtcacgtaatatatcgagacgctctaaattgaaaacggaagctcatagcaaatgtaaaccgtaataacttttaactcggatgtccgaatgagtcctgtgatatattgagacgctcataattgaaaacagatgctctgcgcatattctaacaacaataaccttttactctgttgtgcgaatgagtactggaatattgngagaccctcgaattgaacacaaagctcctaaaaaatcaaacaaaaacttttattttatgttcactgaaccgtattttcggacgctcacatggaacaaacttctttattcaacgcagtcg

SEQ ID NO: 314 - DNA, 446 bp, Glycine max
  unsure at all n locations
tcaaggaagcttcttaaggaagtttctcaaggaagctacctagtctataaatagaagcatgtgtaacacttgtggtaactttgatgaataagagtcttgtgagacacaactcaaagttcaacttctctcccctttttcctccttcaattttgtgctcccccctctctctttcttttcctccattgaagaatcctctccaagcttcttatccaaggcacattcttggtggcgaagctccttcttccatggctntttccctagaggatggcgcctcttctcctttgtcttccactgcatctccgtggtggaaaatcaccattgaaggacctcattgaagctcaaagatccagcctncatagaagttcacaagtaagcttcatcatattctcttangcacaacactgtggcagtatggactaccagcgacaatgcatcaccatnaaaat

SEQ ID NO: 315 - DNA, 482 bp, Glycine max
  unsure at all n locations
ctgatggtgtcgagaagagatcacatgtttgtcatcatcaaaaagggggagaatgtgaatgtatgtatacatgattttgatgatgtcaaagaagaatctaacaaggctacttcaaatgataagcatttgcttcaagaataattcaagattgcttcaacaaacaaagccttgtttcaagattcactaaagaccaagccttgccttataacaaagtgctttcaagacatgcaaggctctggtaatcgattaccaggaagtgtaatcgattacccgaagcagggttgagaaatagctgttgaaaaaggttttgaatttgaattttcaacatgtaatcgattaccatatgtctgtaatcgattaccagcaacgaaactntggaaattcaaattcaaaagtcataacccttcaaattataactgtgtagtcgattacacacacattgtaatcgattaccagtggagagtttcagaaaatctgccacg

SEQ ID NO: 316 - DNA, 441 bp, Glycine max
  unsure at all n locations
attaggttgtcagttctgcaaagataacaatgcagacgtagcataattacattatagtaaaaaaattggtttgcagacacataccttgattttaaatttttgaacataaacgatcataagctctagaaaaaatactcaccagtctccaaaaacatggttggcaatggcacatggtgagtggccttggcctccaatgtaatctaaattagggaaataaatcaaattctaccaaaagtgcttttcaaatttcaaaatgtagacttaaaaaacacaaattaacactatgtcatcatcctccaacaaaaacaaacctgtgtttgcattctatgaagtgaactatttgtttaaatgattatgcatgaagacattanacacagttgtaccattaaatatgcaaactatgagaatntcanacaactcanataccaagccaactattta

SEQ ID NO: 317 - DNA, 262 bp, Glycine max
  unsure at all n locations
cattctagcagntccttatgatataagctaagtcaatgaccagccttangttttcgtatgaggtgagagcatcagatccaacttcccttgatctacacaaggatgtgattaaagctgggaagcctanacgagaagagttagatngagccatcatggtcatttgtctagagatcaaaccgccaatgttcatgtccatccttgtgattaagccatagaccgacctagctctatcntgtgtcanatctgaaatgaaggatgtatg

SEQ ID NO: 318 - DNA, 537 bp, Glycine max
  unsure at all n locations
ggtgactccatncnnnnatgaaacctctcgtagtacccgtgatcctctagagacgaccccgccgcatgcaagctntgcggatttggtcttcgccagtgaaatgatcgaagtggatctgaaaagaggcaaatttaatcatcctgcttagacgaatgagaaaactgnggcaaataaagagggtgaggatgagggagaaacccatgctgtgactgccattcctatacggccaagtttcccaccaaacccaacaatgtcattactcagtcaataacaaaccacctccttacccaccacccagttatccacaaaggccatccctaaatcaaccacaaagcctgtctaccgcacttccaatgacgaagaccacctttagcaaanaccaaanaaaaacaccaaccaagatatgaattttgcagcgaanagcctgtaggattcaccccaaattccggtgtcatatgctaacttgctcccatatctacttgataacgcaatggtagccataacccctgctagggttcctcaaacacctcatttttg

SEQ ID NO: 319 - DNA, 512 bp, Glycine max
  unsure at all n locations
nggcgtgctatgtcctgagnatcnacngatntgaaaaaccaagctttattttgcttgattctctgcaattctctgcatccttgctcctcgaattgaaccttcaacctttgacattattttctccttcttcactatgagggaaggtaacttctttgtgtgagtgcttttggttttggttttgacgtaagtaggaggaaggttataggtaaaaaaaaaattataattattttttaatcattctgtagagaagaagttgtttattaagagagtgggtgagagaggttaattaataatggagaagttataactccctcctttatctaattgattcacatgatattttagaacaaacacaatatttccatttgtaataaacattcataaaattaaattcttcgattaattagcatgaatggtagcagtatgaagaattattatttntatcaatgaggcaagagatagttctaattttataaaacaagttaaatatgctnttagtccataataaattg

SEQ ID NO: 320 - DNA, 533 bp, Glycine max
  unsure at all n locations
tggacaagttgacgcttgtaaactggaccatagagncaccctgcggcatgcaagcttatcgctgacttattatccacaaaaagcttcactccatcactctccttgattnttaattcctataataatgtgtccaaccagacagcttggcaagcactcattgcagctgcaacatactcagcttcacatgatgataaagccactatggattgcttcttagaactccatgatattggtgttgcaccatacatgaatatgtaacctgtagtactctttttgtcatctctgtctcctccccgatccgcatcagtatatcccactaattcttctgagttggtgttgtctttatttggaaatagaattccagtattgatggttccttttatgaaccttagaatcctcttagcagctaggagatgaggaattctgggtcttttcgtatatctacttaccagtccaacaacaaattccaaatcaggtcttgaatgatacaagtacctgatgagagaaccaacaatctggttgaactcagtttn

SEQ ID NO: 321 - DNA, 301 bp, Glycine max
  unsure at all n locations
agagacatgaaagaccggatgagntttactgtgagatggaagatctaacttataagcaacaacacccaccttatntaacacctggaaaggaccataaaatcgangggagagnttttcattaatccttntagccaaggatcttctcttgtagggtgcatcttcaagaacacccaatcaccgactgtgtattctatgtcctgacgaacgtttgtggcattngctcgcatgatatcttgagacttcaacangatttctcttatagtagccaataattaatctaagcaannttgtagttattgac

SEQ ID NO: 322 - DNA, 450 bp, Glycine max
  unsure at all n locations
attatcatgaaaccaccctanaccaagagaacagagtagaggcagaaaactctgcccaagactcattcaaattccacagttttccctactcaaataccccagtaacattctcttagttccgattcgttaaccattggatcaccttgaaacgtttactggaggttcctagtacataaatctacattttgaccgttgggatctactagaaaatatctagaacacgagatatactacctttcccgtgactggtgctgcacaagcattttttctgcacatttggtcaagtttgctgcacaatttgacagcttttgctgcacaatttggcagatttcanaatccaactttcccacantccaatttactcannatggatcctanaattcctaaatcatgtataaatcatanttaaaccanaaacaaacttcagaccaaggcanatcanaatatacg

SEQ ID NO: 323 - DNA, 362 bp, Glycine max
  unsure at all n locations
ctcagtatgttccttgggtagataattaataattaacttagatacaattcacaattgtatataancattanatatgttataattaaagaaataactacctctcttgcccacactttggctaccacatgattaacatatgatgtcaacactaatgtatcttggggcccacctggaaaaccctatgaatcaacacctacatcctttgtaattggatcatganngttctcatgagtctcatcagcagcatcatcgatatgcccattatcctcgacaataggtgcagttgttcattatctacgtgtcgacactttcaatcttcgacgctgangggcttcttctcgtcaccactaacctctctacct

SEQ ID NO: 324 - DNA, 531 bp, Glycine max
  unsure at all n locations
tgatgaatcatctcgancttgagatccttagagacaccctgcggcatgcaagctntgaccgcatcttaacaatatcttttgttctattnttgtgttgttnttaatcaatgtctttaagtgcatcttaacaatgtcttttggatagggatgacaaaatagacactaattttgtgggtatctataaaagtatttgcaaataggaaggataattatctgcttattgggactagagatggggcggngatactatagtaccatctcacccctccccgcacatgtatgtcatatattttatatattaatgtaattaaaaaataattataatttcctaattttatgactagcaataacaatctaacaaagaataaagaatcctaattcaacattgttatattaaatttgcttcacattctacataagaatatcgaactactatttactgtttatgtataaagtaatgactctgctaacaagttattataagattgacttgtgaaatggtattctgtgttgttcgatgcttcaaactag

SEQ ID NO: 325 - DNA, 470 bp, Glycine max
  unsure at all n locations
atttcaatgcggaaagtattatgttcttcactatccatgttcacacattattgctgcttgtggttacgtgaacatgaattacttccaatatgtagatgttgtttacacaaatgagcacatcctanaagcttattccgcgcaatggtggcctcttgngaatgaagcgagtattcctccttctgatgagcaatggacacttatccctgatccaagtacaattcgtgcgaaaggtcggccaaaatcaacaaggataatgaatgagatggattggctggaccatctgacaccgacaanatgtntagatgtgaagagaagaccacagacgtgatgtcaatgaatctgatgtggaagttgtaataatgattatgtatttgttgtcacttaatgaatgacctatcatgacagctgttttaaatagtatatatattatggcggcctaactgacaatggtaatatatacataatgatat

SEQ ID NO: 326 - DNA, 315 bp, Glycine max
  unsure at all n locations
ctgcagctagctgctggcagctggtggaagctccttctctatttnnnctataataggggaggagtgaaggagagaaatgttcagaccttctggtatttcgagatcacttgaaattagtgaaaaanactgtctccgtgaagaaaatacaagccgacgcgctttcgtaacgtttcgtggggatttcgcgaagaatttacctatntcttcgacgtcttcgttcgttcttcggtcttcaacccggtaagttctcgaaatcgaaactttcaattcattctatgtacccttagtggtcctcatttgtttcacgtgctttat

SEQ ID NO: 327 - DNA, 352 bp, Glycine max
  unsure at all n locations
ctctctctnntcgaattgttgaggaagattatttccgtgaagaanatccaagccgagggcgcttcgtaacgtttccgtgagtaattacgcgaatattctcgaccgttcttcanagattcatcgttcgttcttcgttttcttcagtcttcaacgggtaagtacctcanacaaagctnttcaattcactctatgtacccgtggnggtccacattntggttcatggagttttattctcattntcatttactnttntataccccttttgacgtgcttaagccatntatttaagtcatttctcgcttaatctacnaaataaaataaatttccaccgatcggttgaatcgcatatccg

SEQ ID NO: 328 - DNA, 514 bp, Glycine max
ctttgactgctgcatctgcgacccttagagacgaatcgaggcatgcaagcttagcaccactatcgcgcttagcgcgagtaaatggatttggacttggcgccaatgttgcactgagcctagcaagagatggacgactcgcttagcgagctgatctcgcgcttagggcgctgcttcgattcaggtgctcttccagattcctttttcacgctaagtgcactgaagccgtgcttagtgacggatacgcactaagtccactgagttcgcttagtgcgacacccagcttccgacttgaagacatcagtaacttattatcttagctcggccaaagtctacctctcctcatctcacagaggccccacgcatcgtactagcaccgctgcctgttattcgtacaagtagctgacaactatacacaggtacccttcatctatcgcatctacctcaacgcaagcatcagctactgtacgtatcgtctcatctccgcatcctctcgcgcactgccacgagacgtccg

SEQ ID NO: 329 - DNA, 341 bp, Glycine max
  unsure at all n locations
tctacacctgttgcaagagtctgtggtctatgttcttctacagatcaccatacagatctcggtccttctttgtagcaatctggagtcaatgagcaacctgaagcttatgctgcatacatttataatagacctcctcagcagcaaaaccaacaacagaaaaataattatgacctttcaagcaatagatacaatctaggttggaggaatcatccaaatctgagatggacaagtccttcacaacaacaacagcttatcgcttctttctagaatgctgctggtccaagcaagccatatgtntcttctncaatacagcaacaacagtcacaaanaagacaacaagc

SEQ ID NO: 330 - DNA, 450 bp, Glycine max
  unsure at all n locations
atgtatccaaaacccctcaatttaatggattttcaagttttgagaagtgaaattgggaatgggataaatttggagcaaactctcacctcacacaagtctataacatcaatttaaacttgatcaaactggatttacacctaaaatttcactgaatcagaatgtgactactcaacccccaattttaccctagaaatggctctttgttcagttaggtcatttgtttttctctttagcacagcccagactttctcataagtcctatatgacattgcaagctaggattaactgactgtaacctccacataccactaaatccagatttggccttccaactatanaacattcactctttttacactcataacaccataatctcaccttctaacccttggttaattctacacttcatctctaacagatctccataagcaagttcagcacacatacatn

SEQ ID NO: 331 - DNA, 471 bp, Glycine max
  unsure at all n locations
cgtcagagtttanggattgagcttggttcaactgagtgtccatctgccccatctgattggtcaaactctgaatggaggctcttgtctcttgctgaaactgcatattttgtattgtcatttgccttactaactcctctaaggaaggttgagaaggggcctcagttgattgttgtctctgttgttgttgctgttgatgctattgttgttgttgcattggaggaggaatgtatggcctgcttggaccagcaacattttggaaggaaggagcaggttgttgttgctgttgttgagggctagaccatatgagattagggtgattcctccatccgagattgcatttgttgctagagaggtcataattgttctgctatggctgattctgctgctgaggatgaggaggtctattgtaaatgtttgcagcatatagcttangctgctcaattgctccagattgctgcatagaanggcacg

SEQ ID NO: 332 - DNA, 446 bp, Glycine max
gtttccgttgttcaatttcgagcgtgtagatgagttatgtccccgaatcggacatctgtgtgaaaagttatgaccattcgattttctcgagagcttccgttgttcaatttcgagcgtctcgatatattatgaccccgaatcggacatctgtgtgaaaacgtatgaccattcgattttctcgagagcttccgttgatcaatttcgagcgtctagatgagttatgtccccgaatcgaacattcgagtgaaaacttatgaccattcgaatttctcgagagcttccgttgttcaatttcgagcgtctcgatatataatgtccccgaatcggacatccgagcgaaatgttatgaccattcgatcttctcgagagcttccgttgtcaatttcgagcgtctcgatatattatgtccgcgactcggacatccgtgtgaaaacttatgaccattg

SEQ ID NO: 333 - DNA, 400 bp, Glycine max
gagtgattcaagaacaccctgtctgtatcatatgacattcacaacctttgcgtgttgccctcgctggaaagagcgagtctttccttcctttcatctatacccgttgatctttcaaaccacaagtccagaagatacacctctgcccagaattatatcgtggccataactcccattctacgcactcacattaagtgattcttgagcctatactgaatttcacaacgagttctttcacctcagtatggaacacctcattggagccttagctcagtatgtcattctaattttgtcaccacacttactagtttacatccattatcatttatgcaagaccacttatagacacgaatacactattcaccttctataatccctttcatagttatcaacatctagcact

SEQ ID NO: 334 - DNA, 457 bp, Glycine max
  unsure at all n locations
tatacaatgttntcatgataaaagcctctgttgaccatcggaacaagatttccaaagggtgcctctggaaatgcagtccttgcattcatgaacctgaactgtgagatgaagatcgaagatcaaagatcggatggttcatgtctcgaatacttaatttaaattagattggtggagataaaatataattggtctgatcttcatacaatggttgcgattagccaaatgcctgaatatgggaaaattccctgactgccgtgaatcccaatccctctaattaaataagctttagaatgcagcactgaactaaaaaatttcttgcgtcatttatatacaatctagtaagtaatgcaccaaagttccaatttttgcatcanaggacagagctgatagcacataaactaaatggcataaaaatacaaccaaatcttatcactgagttctatcaatggaggaggcg

SEQ ID NO: 335 - DNA, 260 bp, Glycine max
  unsure at all n locations
ctatcttaaagtaagctctatgaaatttataaatcgatatttatatttctaacacgatcttccttacaactgataaagacaaagagaacaaattcaattataaaataaaggataaaggaaaaaactcttgacccacacacacaaaagagacgtattatagtaaaaaatatttaaggcatgaaggataagcaagagtggntntaatttataattctgacgttctccttgtaattcccattcataattttcttctgtacttg

SEQ ID NO: 336 - DNA, 446 bp, Glycine max
  unsure at all n locations
tccttcaaataacttgcaaattatggttctagaattctataattttctataggtttcagtctgctagctagttattagactgttggattctgaatagggtttatcccagatttattgtattttttgtttctaggtaatgtccagtcatgcttctttaaaatctaattatttgaaaccacaaaatttagagcctgcactttttaatgtgtttatgaaattcttcgtttttagctattcattatccttgcaatctcttatttcacatggtagtacaattcanattaacttcagattttgggtttattttgatgtttgctctcgaagcagtctggaattttcggtccttgtagacgggttcggntaatcctttcttatnggtntgtctgtactttgtaggaagcactcaagactagtgtggacgcttcagtcgttcccacatttgagag

SEQ ID NO: 337 - DNA, 255 bp, Glycine max
  unsure at all n locations
gatctgtgcttgcaactgctntaagtagttaatcatctcatctaacattgaagctntatctgtctgcaattttgccaagtaatccaccacgtacaggaataatcaatccacatatatagaacnntgattgtgcattngattntggatngaatatgnttntaactatgtaattnttgataaaaatgaaatgatattagtctccgattctaactttaatcaatttaatccttannatttaaaagactgttntcgtca

SEQ ID NO: 338 - DNA, 441 bp, Glycine max
  unsure at all n locations
ganaactaccaaaactacccatcatatctcccaaaaccccatacccacgaaatttaagagagaaagaagtccacccaaacctgaaatttcgaagtcccactcgtagccacgcacttcacgactccaaaaatgccctcctttcgcgatttggagcagaaatgagcaccaaaggttgaagctttgtttggagcttcaatggagaatgagggagaaagaaaggcaacgtgaggaagagagagagctgtctgaaaaaagtgtgggggctgagtgaagagagagaanagctttntggttataaaataaaagggttttctctttttctattattntattcanactctgccacgtgtccctaattgagtggagcanaagggcccactttctcttttactgtgacccacactcagccacanaagtgagaanaatctgacctttganact

SEQ ID NO: 339 - DNA, 535 bp, Glycine max
  unsure at all n locations
agagccgataggttgggngcttgnacnantcgacantatatagtactcattgctgccaagaaggtggtggatctcgaggcccgactgaatgaattatagtccatgctcaaggagtctgagctacgggctgctagagagagggaggccagcaaggagcttgaggaggagtttttcattttcaagaaggaggccgtggagcagcatgaaaaagggccttaacaagccgttgggcaggctgggttcttcaccaaggaccttgacttgggtctctttgacccttttaaggacgtgaagaatggtgttttgcttgacaaagacgatattgctgctaaagaggagtaaggcgatgatgccattggttagggtgcctttcgtttattttcttcttttctccattgtttgaatttagccgcatgggccttgtaattatgacaaattatcttcataagctttccttcgatgacaaattntgcactatntatgtatgtcttgtgtgttggccttatctatgcaatgctccatgcttgtggtagtn

SEQ ID NO: 340 - DNA, 406 bp, Glycine max
  unsure at all n locations
tacacctatactcgccactcctttcacagncaantaacacaaacaanagccttcctctactacctgtgttngtgcagaccttacaatcactgccacanatccattttcatgagcaacggatcgagcccaccgcanaacatnctctcggctgtcaatacctacaaccaatcagataatatcagttctacaacatattatttatttataaatactccaacataacgtattactaaaagattgacgcatcaacaacaatggattatcacccaattttctatttataatcaatcacttttaacataacttatcatcatgactcgcatatacataataaaattaaccataaacacccatcaactatctacatcaacttctatactctctgtaacagttataaacaataata

SEQ ID NO: 341 - DNA, 466 bp, Glycine max
  unsure at all n locations
ttctacagaatccgtanagtttcgtgaggtttcggaaggaaaacaaccaaacaacacaaaaattgggggggggggtgaacttatcaagctaggagtgtaaatagcaattttcaaatcttggcagaggattctggaccttttctttcttcctggctaagcaacttgggcgagcagggtggcaagcacctccctcattttgttgaaaaatggcttccggcgcttccgtagaattcccgtaaccataaataagtatatttcacttaatatgggtgagaaggaagaaaaaaaaagaagaaaatcaagtccgatatgcttccgtaactttttcgtaaattacgaagaaggggggtgaacttatcaagtgcgaggtgtaaatagaaatttttgaactttcgaatctcggcccttccagaacattatggaagctcgggttgcttaggagggagcagcctacctcgcttgggcc

SEQ ID NO: 342 - DNA, 444 bp, Glycine max
  unsure at all n locations
cataacatttctaagtgataaagttttcttcttgacttctctttgggttctgctcatggtttcttttacaagtctagttctaggctgatatgcagtggagttggaaatctttattccagtaatgaccttgggtattttttctgttttctttcttactttgnttgtgaggatatcttattctcctctatactggacacacttcctttctctcttcattaaactttcttctttatagagatctgaacttgtggaatttgtgtccaggttttgcaacagttgcagtctatgactctgatgaccaatctcataattttctttgtgtttctcttttggtatttctcaattacacatcgcgttgttatactctgttgattttaatcccttctatactagttgntcattgtgcttaatatagcttcttctattttaatctcatgcagcttg

SEQ ID NO: 343 - DNA, 488 bp, Glycine max
  unsure at all n locations
atctccttcttcactacatcaagaatcaccgngttgagtcttctctgtggctgtcttactgggttagctccatcttctanatntattcgatgcatacatgtggatgggctaataccaggaatgtccgccagggtccagcctatagccttcttatgcttcttgagaactgacaacaacttctcctcttgctcatcagcaagggaggcagatataatcactggagaactcttgctatcatccaagtaagcgtattntaaatntgatggcagaggcttcaattctggtgtggtcggctggacagtggtagaaggagatggtttctcagcctttacctcataaagaaagtcagaggtatgtgtacttcctgaaacatggttagtcctatctgactctatnaaatcaatctcaagaggtanaacaccaccaccaggcatgcantcaatatcactctcagaatcactctcagcatcanattcagacatatgatc

SEQ ID NO: 344 - DNA, 532 bp, Glycine max
  unsure at all n locations
ntttaatccctcagtgcccgagctccttaagaaaccccacgcatgcaagcttcacggtgaatctacagtgattcanagatgttntgatgataacaatgatgataacaaaagatgatgacaaaggtgatgacaaaaagctcaaaggtcaattaaaggatgagttcaagatgttcaagaaggaatcaagaacaattcaagactcaagacgaaaaggttgaaggacacttcaagattcaagaggaaagttgaattcaaaaatcaagattcaaggatcaagatttaagaatcaagatcaagattcaagattcaaggttcaagaactcaagagaagacttaatcaagataagtatganaaggttttttcaaaaactgagtagcacatggattnttcacanaacatgtttagcanagagtttntactctctggtaatcgattaccagattgctgtaatcgattactagtagcaaaatgttnttgaagttntcanattgaatntacaacgttccatttaatttcanaaagctgtaatcg

SEQ ID NO: 345 - DNA, 290 bp, Glycine max
catttgcgtgcttatttctgtatggtatgagatgaaatgcaaaggttacgacttgtgttagtcggttataatggaatgagcctaaacacttgagcttgagtgaaacgacgactgtgaggctgtggttgaggatccttccttgatatctgtcattctcactagcttatttcaattatgactctaatgcatatctttctatctttgaaaagttgcatgtatgtgagaagcaattgattgaagcattccatgatattcatttcatatgattgaatttttctgtaaacaaacac

SEQ ID NO: 346 - DNA, 377 bp, Glycine max
  unsure at all n locations
tatcacatatatatatatgttatgcgtacaacatatatcattacgcaatgacatttgagtataataaaaaatagttctgcagggcctaacatttcagtgcttatattaatttaggtaccacttaacatttattattgagtcaactctctaacgnatattcataatttctctttgtaatattaatttaattggntaaagaaacatatttcttatggataataatggctttcagnttcttagtgaaccacatctgannaatatacttgacaagaaatgtgttactatgtcatagntaatctttttttcttttaaatacatcatctcttatggacgattttagactcggaggacttattatatggacatacacttatata

SEQ ID NO: 347 - DNA, 396 bp, Glycine max
  unsure at all n locations
cacacatgtagtgaacatctatgataacctgcttcgtgtaagcattgtgttagctataatntatgaagaaccacttctagttctataattgtacaacatattagcatatgccanactatgtgtatcatttggatcaccagaataagaatattacctcaataaaatctccttttggcattagtgctctgcatgcatctctantcctttggtatggtgatattaaactagtgatgcaaataacaccagcatctgcaaagaagttagccacctcacctgaanatntaaatcgtgatgtctaantattaataaaacaataaaatataatcggaagatatcaggganagcatttagaaagcaacataagaaaaaacagaataactcaccaatccttctaat

SEQ ID NO: 348 - DNA, 225 bp, Glycine max
  unsure at all n locations
tagttaccttcttatgcctagccctatanatactcanaaactcttaattntaggagaattttgtagaattgaaattaagntgtgcttagagagagcattagcctcttctttggtnttgactagaaaccaaatggattcttctcaaagaagctattcctttatggcaaatcctcctactcggtatcgattcttcatggattgtggcatcgntctgtcatcttctca

SEQ ID NO: 349 - DNA, 203 bp, Glycine max
  unsure at all n locations
acgttatctatagaacatttccattggatgtaatggatgaaattgtgcatctttaggtgagaaagaggctatgttttgaattgcanaatgtagcagttgggctaaacgcatatccaccggtaagcgcaatttcagcgtgcttagtgcanaggagaatctgggagagcatcaacatcaaagccgcgcgctaagagtgggattag

SEQ ID NO: 350 - DNA, 455 bp, Glycine max
  unsure at all n locations
gacctaaatgaagactaaacatgcattgtttatgtaattgtattcattatgcgatataatttgttgtaagccattaataaccaattaatattattaagtactcgttttgttaagcaaaaaaattgttggtccaacaaaaatcatttacgcgtgtaggatacatcattgtcataattgacaacacataatgacatgcatgcgtattaaagtttgagcgcgacaccacattgactaacttgactacacattctgaaggaaacataaacacgaaacatgttcatgcgtgtctaattttttgtaaacaaagagaagcaatctgtctgtgacaaccatgtatatatatagcagacacaactaataaatcacacattatcttgctntcacatagtctcccaatggatacacanagtatgaaatttgtagagaaactagcagtcagatgattgcaactcacg

SEQ ID NO: 351 - DNA, 483 bp, Glycine max
atgttagtctgctcacatcaaagagatatattgtcttctctctcagatatatttgatcctaatcttatcgttttcttatatgcgaactcatcagctgtaacattcttatcttatctacacacttgaggttatatttatagtaattaatacaacttatatcttatctttgattaacctgtgcagattgttaagctttcgagaattaaaaaaagaattagactcttgaggatcctgaattaaacgtgaacaagtatatataggagcaagtttatccattgtaatcattagattagaaataaaaactacttgtttgtgatagaaataaatatttatagttaacccacaatgaatttcggaatattattattgataattttatagtgcaaaggtatttacattatatacacttaggctcataattgtttgcccagaataaagcaacaaactattccaactataaagggaaataagtcagaaataaat

SEQ ID NO: 352 - DNA, 448 bp, Glycine max
  unsure at all n locations
tagcattaaatgcacatccttcttgatgcaacaaaattactctgattggcttttgtgtagaatacttcagtataaaaccacttttccttggtcaaagcatgtttttcacatctgaatgcgtcttttgatgttgttttaacaattttttaactttagtttcatttattattcataggattcgacaaatcatatgagaatgtctctccaacatgaatctcagacacagaaaaataaatatagagcgaaatatcattttttaatgttgtatcaggtcatgacttggtcctatcttcatctaatacttttgacgcatgatgtatacaacatgatctgatatcgcataagatacaactattcaccctcgtatttatgtgcatcgaataagaacaattatgagtattgatttatcttatgacataaatgtcnttatcttaacatagatgaaatg

SEQ ID NO: 353 - DNA, 277 bp, Glycine max
  unsure at all n locations
cctggagatatgtncgcggggtcaggagaaccttgggacgtcaagtggngtgctatngcccanaaccaagcttgaccaatcccgacccaacccgcgcatagtcggtcagtgagaacctgtgatgtacctaagcaggcgagctcctggcagtcaacagataanaggaaaacaagaccacanagcaaggaggcttgtggtggctggccagctgtgaattttgtgtaatatgtggattgtggcctctggtaatcgattaccaagggtgagtaatcgatta

SEQ ID NO: 354 - DNA, 302 bp, Glycine max
  unsure at all n locations
cggtgatactggtttctagaagtggctccagccattcccatgntttcacatttaaagaaaagggagaaacaaccaaccttatgtactccttgctaatgttgggttntttaacaatgtcacacaacctcaagaatctcctcanatgcatcacaagaagctctgnntgaactggtactnttaatcatctggaggaacccatgtgtgaactcanaagtaactcctcgaggaagtggtggtagttcaatgggtgtggtttctcccaccagatgggtgacataatacagcaatgtcagtgtagcatc

SEQ ID NO: 355 - DNA, 436 bp, Glycine max
agatgaacaaccaaatgaaacatgacagtgaagaataaaggaggaaatatcatttccatgtggtataaagtgagaacaacttgattttgtaattagcctaaggtcttaacttccaataattaagccacctatattctattctgaatgactactactcaccaattatctgtacgcccccccctcccatccgttcacggatagcacacttgcgtgattcgttgttatattttactcagcggtcctccgcgcacccctcacgtatgcatatctgatacccctcggatcgtcttatacaccctccgtccttgcctctccgtctgactctttctaccgactatgtatcgtgatgactcgtattccgcgccgttctcgctcacgagccactctgctatctttgagtctcttatcttacttagctctacgtctttatagctct

SEQ ID NO: 356 - DNA, 350 bp, Glycine max
  unsure at all n locations
cttctagtttcactgatacttgtttactattactggacaacatatctagttctatgtctntcannattgnttattaaaaagctttcatttgtganaaagttattatctttgattaatgcactattcaacccttcattctagtgtgatnnttggtatttcatcatctattttaaaatcgagacatttgatcattctaatttaaaaattctgcaatcttggtctccctatttcataatacaaacatntggtctccatatntaagagaatctgcaattctggtccctatattntagaaaatcctcaatcttggcttaatctttaattgtgtctacattcttatttcttacttt

SEQ ID NO: 357 - DNA, 505 bp, Glycine max
cttgaaccccatctagtacccgggatcctctaagccacctgaggcatgcaagcttgaacattctctcatttgattaagatattattactctacattttaagactgagacttatgagaaaaaacacaaaagctggtgggctagactattagcctaggacaagataaggcttgaagggggccaagttttatttgctcaatcgaaaatgcgaactaacaccaatccaatccggttatacttattatgtcaatgaaatcactattaaatcatctaaagtcaatgagatatcgtatgaattgttgctattaactaacacatacaccaaagactagaacaacgaattgatttagcatcgaatatgaagagtgaggagcaccaacaacattggcagtgtggcataattttctgcagacgcagcatccaccattcgtgtctttcgtttgatggtacattgctgatgacgcccccagagaaaagaaaggattggattgaatgaccatcattgct

SEQ ID NO: 358 - DNA, 460 bp, Glycine max
caacacctattacaactcttaatgcatgctttcttgttgcatttaagctatcacccccaacaaatttgcttaaaccatatgaattcaaactcgtggtgagttaaccctcttttggaccatcaacgttgacctcaaccatatgtctctttgttcttacattagtgagtgggaattgatttgctgaattttcattaatgacaccaatgatgcatctgagttgggttattgattgtgatcaaactctggtgaatactgattgatgtaagcttttgagttaattaaggtctaaggtcaatcttctaatgattttgagctctccaacaataccaaacaaccgtgaaaagtgggtgggtacctataaaagatagaggcaaccctatgaggggggaggtgggtgatcccttttctttattttctggcgtttccttgcgcttctgtttctcttactctcgtgttctcg

SEQ ID NO: 359 - DNA, 254 bp, Glycine max
tagcataatatacaaacctaggaaacacagattcagtatgggatacatatatgatatgacatgacaagaaacagacaatatggcacattttagaagttatacagatatgatatgtatcttaattctaacatggctacatgacatgaccactggtttcaagtgtatgtacttcttatttaagaattatgagagggaaggtgtttatcacagatatgtggcactatcagatatacaaaagtaatgagctatcaatc

SEQ ID NO: 360 - DNA, 114 bp, Glycine max
  unsure at all n locations
gccttgtctctctctactctctatagtgtggtcatagatntatcatntaacgcataatatatagagaaatctaactctgggttctgatatctgaatcgaatgctgacattactc

SEQ ID NO: 361 - DNA, 456 bp, Glycine max
  unsure at all n locations
caagttgttntgataatgacaaagatgatgacaaaaagcccaaagaatgatttcaagaatgagtcaacaagttcaagatcaagtttaatttcaagtttcatgagaagaaatcaagaagattcaagaatcaagagaagattgatttcaagaatcaagagaagattgatttcaagattcaagagaagatgaattcaagattcaagagaagaaatcaagaagacttcacaagggaagtattgaaaagatttttccaaaaacaacatagcacagttttgtttttcaaaagagtttttctcanaanatttctaagttaccagagtttttactctctagtaatcgattaccagtttcctgtaatcgattaccagtggcaaagtttggatttcaaagtntttaactggaattgcaacgttccaattgattncaaaatggtgtatatcaacacaagatattggn

SEQ ID NO: 362 - DNA, 442 bp, Glycine max
taattgtttaattcttacttcttaaatgtacgttatatacttgttataggaaccttataattctaagtatatatagttgtagtatggtgctctgccttaattgcataggtagtatggttgtttgtgatttcttgttcatagtgatgctaatactctatagctggatgactcatatcaagttatatttcataaggaatactcttttgatcgtaccttctaattctagtgcaacctatctttttttgtgttgcgtgcttaagtcaaataaatctgattcacttgaaagcctgagtataattaattctgtgtgctatgagactacatcacacaatgggactacttgatgcttctatcacaatcaagtgattgctcatgtcttatacgatccaccttgcggtcatgtcttgttctcgacttcacgcaatctgctgttatctcaacg

SEQ ID NO: 363 - DNA, 358 bp, Glycine max
  unsure at all n locations
gtatgtgtatgcagaagatgataggatgaagctaacttacaataattccatgtgctcctctatagtaactgcttgntatagtcctgaatcgctcctgtccagctgtatcccactaaacaaaacacaacanatgaatccaagcttggcatgcatgtggcaataatcatgaatatgatcaagtgaaatgatgatntcgctntgattctcattacccaacaccgacagaggtgaatgcagaaattatggtaaattacaccanacaaactanaaacacaataatatagaatcggggcattatanatgaagtagtcgggtaaagacattgattcgtgtcagtgaagtgtgatactcacaatct

SEQ ID NO: 364 - DNA, 529 bp, Glycine max
  unsure at all n locations
tgcttgaatcatcgaancctggatcctctgagtcacctgcggcacgcaagcttcctcctattgttgatagagtgtgacatctatgatcctcatagtctcgtgctgtgctcagtgtacggttagattttgcgcttaagaaacaactgcagcatttgcagctgatatttctatcttctctctgcatttttcttacttgaaggacattaacaaaagccagtttttttttgtatttttcacacatttttgttttggtatttgacatttttgtcgcattaattaattatattatattaacatacaattagagcatgagagatggaatctattaacagtttcaaaattttagtttgagcctgacagcaccaaaaagacagaaattgcaaaatgaaaacagtgctaatattttcttttcttttttgcacgagacatatagttgaattggcagtatatttgcagagaatatctaaatacagctaaactatctcataatcttatctataatctcggatatagacagtatagataggct

SEQ ID NO: 365 - DNA, 376 bp, Glycine max
  unsure at all n locations
accgtgaccatgtaccttcaccgctaccgtgtacttgatggtgaccgcacctctatgagggggtgaaccactcggaagaggactgtggaatacgccacgctcggtgttgctactgctnttgtccctccaccctatcatcaccacaatgggtactttggtgctgccatgcccatggngacttacgttagggaagcgccaccaaatacagnctncttccatcaccaccaccaccaccaccaccaccatgctcgtggaatctccaatgctcatgaaccaaatgctcgctccatataanantatataattatgactaggattcagaacaagactnngatgatgatatgctaactctcagtaattggtgctagagtactac

SEQ ID NO: 366 - DNA, 435 bp, Glycine max
  unsure at all n locations
taactgtctttgggcttggcggccatgctcaacaaagtactttcgacacctactgtacgttgatttcaccaatgctgatatgggaatgctgctataatctctatcaaatcttatcgatccatgtagatagatattattcctggtcaaccaacgctaaaaattactgtctaattaatccttgctccttctactattgctagtttcaccatacttttccgtaaacttaatcgatgtatatgtttcgcgctgtcatagctgantcacagcctaagtcacgtatagacaatctaagatgcatggatgatagccctccacaagataacgatgactatgcttatgtttacctacttatcttgaatctaatcgaatggtgaatgactactatacattctatagttacctcaaattaacggcaagctcgtctgcagactaacc

SEQ ID NO: 367 - DNA, 468 bp, Glycine max
  unsure at all n locations
ttgagaatcaatttgttggctcagtgtgtgattttcgtacaagccattcttttgttctttatgttaaagcttgcattctcaacgttntgaaaggaagattctgtttttatttctttttcttttcccttacgatcttatgcttctcttgactctgcatgctnttaactntnntctttttactatatactgatgactgtactttcaatagtattattaaagggtaatttcttccaattacccttattaatggttaccttccatctcaggatcaggaanttaattaataacatgtttcattcccacttaattagcanagntntctgaattaacanaaggtanaagggactatgtttctttttgtctctctttacacataagagagtatcctggtcaatactcaactcacgtaataaagttcttattgaataacctatgacaccctataatagctttatttagatatctaca

SEQ ID NO: 368 - DNA, 351 bp, Glycine max
  unsure at all n locations
tgtccctctcaagagattntngattgatttctagttggtaagcacccatcctcttctcctatggtcccttgagtttattttcttctcccaccaagtagacatganatggngtttcacttcanattatgattggtaggtgaaaatataattganatgagcctgagtcacaccaattcattanaatgaaagggaattgctatttgcactcctcctttataataatacaatccctatttatttatatttttccaaaatatccctaanaatacattcccaatgttcactccttgcaatnntctttcgtcanatccctactgtgagtgcgagcaaagagcaacaatacaccatcaa

SEQ ID NO: 369 - DNA, 334 bp, Glycine max
  unsure at all n locations
tagaattcaaggccctgtaatccacacacatgcgtcaagttccatccttctttntcacgagtaacactgcggaggagaatgggcttcgactgtgttgcattacactggaatngagtaattccataactgtcgttcaatttccgacttctggaagtatggatatttgtanggtctaacatatngttngccttcaaaacaaattatctgctgattaaccagaaatgagaaacgagcaactcattatatatagggaaataacgttctgaagatgattcaattatgaaaaaaggacagattaaccgcatactattttacctctctcttcttctttgtg

SEQ ID NO: 370 - DNA, 215 bp, Glycine max
  unsure at all n locations
ataatcatgcatatgagcatntcatcttcaaaagccaaagactaatgagctgttatcatcattagaagttaatattgcatgatcataacaagagagatagtgaaataccagctttaccatatgctgcatcagcaggttggactttggagccaacagcagcagcaccaatgagcacagttatagctaaacggcgagagattgngctgacatcaata

SEQ ID NO: 371 - DNA, 416 bp, Glycine max
  unsure at all n locations
atgacgttatgttttgatccatttnttttaattcatattaagggtgtaaaataaagtanaaagtgtatgaaatttttatctttnttgtttanaatttcttttaagttaanactggttcgacaatttttttttataaagtttagaattatttaaaactaactgcatcactcaacannaaatatattgataaaataaacaacactaagntaaattttttngaaaaattatgtaaaattaactagtaatttagttgtgcaatgcacaagattgtaattaanaggtgaaaaattgaacaggngttctaaacaatcgagcactatnttcttaattntatcatccngatacaccacatctaaataaaaggctaaaaatatactatatatatcttagatntctttcatctccatgacatgact

SEQ ID NO: 372 - DNA, 441 bp, Glycine max
tggagaatagaaagtcgccacaaacattagtatggaaagataaacatgttatttagggtttttgtgcaaatacaaggaaaaatgctattaccatcttgctcctcttagcctcttcatcactgtcattaccatcatcaccaacagctttcctggaaaagttcatagcattcttaaatgttaagtacatcaataacaatatgcatatcagaaaagtgaaacaacaaaacaaaataaagatattggacttcaaaccttctttttgcaatggcccgatcatcatgaccagcctcagcatggccatggccatggctgtagtcaggaaccctgctaacaacgtccctcagaaagcaaagacattatagcttgacacaatgttttctgtcatttcattcccacttgtacgcttatagttcgcagattatagagcttgaaacagatact

SEQ ID NO: 373 - DNA, 333 bp, Glycine max
tattctatatttgtgatggttgctttgcagtgtgtggtgctgaatacatgatagtcgtgttattgattacaataattattagtctggggttaattttctttatgtgcgctattcacatgagatgttcgctatgaatgaccacatgttgtggaacaatgttaacaatgttagttatattgttccgctcgagcataagaggggtgcaactagacctcaaaactactgggagaggaaccttatgagaatctcaatcccactatattgaggaaacaacaacaagcaagtatcaacatagaagatgtgggagaattaaccacaatgagagaaagtgtg

SEQ ID NO: 374 - DNA, 592 bp, Glycine max
  unsure at all n locations
tacacgtccactaccatacacgatgcgtcaatctcanatctgtctaacgtattaacctacannncnnacccaagacaggttgattgatgcantctcgtacccgngatcctatacagtngacctgcatgcacgcaagcttatgcatagcatagagaggcacttggtgtacttgcaactcgccctagagctcgcccaggcaagctgttgcttcactctgaagtaacttggctcacataggtgagctggttactttagccctaagccatttgggggtgcaggtgagttagaggctagcctgtgcgagccagggcctagaaaattggcttaaatgacccttttgccccctccccttgagtagcttccgcatctttgaccaaaacatcgaatgatctttcgtcttgcgcggtaactggtgttgaacaactcaattcagctatcgagaatcacatatccatgaatgatagtccctgcacgaacttaggcctgacagtgccccttttacttatttctatcggaataaaacgaagtcatattaggcactattctattgagtgcgctgctatcactggtcaccggcaatccatggatatcn

SEQ ID NO: 375 - DNA, 347 bp, Glycine max
  unsure at all n locations
gctgctcgcgttatgcgagacggagaccaacatgctagctattatcgccaagtacctttaagagataggtctagccgcggcccacgagcataggattgcgggcgaatatgctcaagtatacgcggaataagaggctagaggaagggtgatcgactctctacaccaagaggcaaccatgtggatggatcaggttgctcttaccttgaacgggagtcaagaacttccncgattgttagccaaggccaaggcgatggcagacacctactccgcccncgaagagattcatgggcttctccgctattgtcngcatatgatacacttaatggcccacatannatagaaatcgt

SEQ ID NO: 376 - DNA, 461 bp, Glycine max
  unsure at all n locations
tcccataggaagggcttaattntcttgagcagtttgtaaaacaactttaccttttcgacgaacttcaagaggaacctggacagggatgctagcctaccatttagtatttggacttcttggtcattggtctggctgcacatctccaatatggcattgcattcattggggttggcttcaatccctcggtgagtgatcatgaagccgaggaacttgcctccgcctgccccgaaagtacatttttgaaggttgaggcgcatgtcatactcgcggagctcctcatagacttcttctaggtctgacacatgttgggctatgctttgagacttgacaaccatgtcgtncacatataccttgacgttccatttgatctgctatatanagacttggtccatcagtcgtgggtatgtagcgccttgcattttaaagccgaagggcatgaccctatagcaaanactggcatt

SEQ ID NO: 377 - DNA, 295 bp, Glycine max
  unsure at all n locations
cttgcgtcctatccttcaaccacttatgatagccaccaacgacanctgttgctgctcccctaagctccttatctcttctttccactgcattccacgccttgcggattctctgaagtatttttgcgttgccttcattgaaaccncatgcaacgaaaggcgcgatgatctcttccaacggtgcccctctcatagggtaacctagttgtcttatggctagtatgggattataattaatacaaccccttggtcccatcaaggggtcattcgggaatccttcacatgagcacaacacttc

SEQ ID NO: 378 - DNA, 434 bp, Glycine max
  unsure at all n locations
atcaatatcatttgtattcttgcatatccttgtatcagatttatttactcagtagtataaataccaagtcagttagaatatgttcatacggaaattgaatccagataatcatattatcaagtccagtcagaagatgaaaataatgtattctccaatggttctatcatgatagataattttaatgtgatgtttgagtcgtcactatcacctagntgaaggattggtccgatacatgtacatacgttcgtcatcatagagagtatatcgcgacgtcatacgcttataatactacatgacggcatgatccggttgactaatggtctgataactctccttatctatttattatcagtcatcgtactagtcggtttacagtgttttataatctgagtgtactgcaagtaactctatccataggatgaggcatgtaacgc

SEQ ID NO: 379 - DNA, 461 bp, Glycine max
  unsure at all n locations
ccttgaacgcacataccggtgccaccggagacccccacgtggtccctcgtgtcttgcacgttcaaaccctaatttcaaggctctaccctacgtntttcactgtccgaggctgtcttttgaattttcgcagattacttgggattcgcgtttcgccagacggcttaatattggaaaagccacgaccgttcgacttttcactcagtagcgcttccttaatggttattgggcgctaatgcggcatattcgtttacgcatgagaacgggtattcaaaccactattggtgcactattggtacgtactagattgaagcctgagaggtgaaaaagctcacgggctccgcacaactcgtgtgctcaaatctctagtggcttcttgcgatacatcactgttgacttatgctacactagctacgtctatgagcccttagtcatttccttcttctcgtgctgtgatatgatcg

SEQ ID NO: 380 - DNA, 244 bp, Glycine max
  unsure at all n locations
aatgcgcgcataaacccaccatcccctgttgccacctccaactgagctcacgtactcccacgtagcccatatnnctcgttctctcaacaacgggtccccatcaatccttccaagcgttcacaacatccaagcaaaacaacattcatacagcataagctatcacagcccagcaaaacagagcaaaggcagaagactctgctcaacacatcaaccagaatcacagcttttctcacttaaagaccac

SEQ ID NO: 381 - DNA, 431 bp, Glycine max
  unsure at all n locations
tatcgagacgctcganatcatcaacggaagctctcgatanattcgaatggtcataacatttcactcggatgtccgattcngngacataatatatcgagacactcgaaagtgaacaacggaagctctcatgatattcgaatgctcataacatttcacacggatgtccgattcggggacataactcatctagacgctcgaaattgaacaacggaagctctcgagagattcgaatggtcataagaattcacacgaatgttcgattcggngacataatatatcgatacgctcgannatgaacaaccgaagctctctagaaattcgaatggtcataacatttcactcggatcggtcgattcgngacataatatatcgagacgctcganattgaacaacggaagctctcgacanattcgaatggcataactttcaca

SEQ ID NO: 382 - DNA, 452 bp, Glycine max
  unsure at all n locations
acaattgattttgaatttcaacgttcaaatacactggtaatcaattacaccattttgaaatcaattggaacgttgcaaatttagttgaaaacttttgaaatcaaactttgcccctggtaatcgattacaggaaactagtaatcgaataccagagagtaaaaactctggtaacttataattttttgagaaaaactcttttgaaaaacaaaattgtgctatgtttgttttttgaaaaatctcttcaatacttcccttgtgaagtcttcttgatttcttctctcgaatcttgaattcatcttctcttgaatcttgaaatcaaacttctcttgattcttgaaactttttgatttcttctcatgaaacttgaaattaaacttgatcttgaacttggtgactcaatcttgaaatcattctttgggctttntttcatcatttntggtatcatcacaact

SEQ ID NO: 383 - DNA, 270 bp, Glycine max
  unsure at all n locations
ggagatgcagcggaagacanaggagaagaggtgagaggaggcgcatccacaagggaataagccatggaagaaggaacttcggcaccaagaatgtgccttggataagaagcttggagaggatgcttcaatggagganaagaaagagagagagaaagagagaggggggagcatganaatgaaggaagaaaagagggagagaagttgaactttgaagtgtgtctcacaagactctcattcatcanagttaccacaagtggtacacatacttct

SEQ ID NO: 384 - DNA, 173 bp, Glycine max
tatattgagacacacaatttcgtgctccttctcttcctctccctccactcatgttctccttactttaagctcttatccatgagcttctatggtggtgagcttcttcttgactcatcttctgctagaagggcatctccatcatctttcttctttttattcactgccttaaacta

SEQ ID NO: 385 - DNA, 375 bp, Glycine max
  unsure at all n locations
agatttgttctgtgaagatccacagagaccanagctngaagaggaagccgtcctgagagctngagaatgatttgtgagtgaatgtgaggtcctagaggtggaggagacatccncactacttngtattttgaaatctttcatctttcttttctctttgttgtanaggaagcttcccagttatggaaagctaaatcctctgttggatcttccttgtaggtacttgatgtaaatacctgtatatntatntaatgatngtntgtgtgttcactgtgctatcagaacttcattctaccatgctntngccttgatcacgtagatgccatgtgttttaggatcattcaacagtggaaagtggtctgattcttagaacttcat

SEQ ID NO: 386 - DNA, 453 bp, Glycine max
  unsure at all n locations
ttagctgttgatctgctttttgaaaacgtaatctttgagaccgattgtttacaacaggtcaaacaatcgatacttaaggaaaagaatggtcatgccctctttcatggaatagtttatgactgtcaaagaacgattcataggactagctccttgtgttttatcaaaagacaaggaaatagaattgcacactctttagcatctctatcattttgctattntgataaatgctggattcaggaggtcccctataaggtggatcanatcatttcaagtaatgtaatttctgccttttctttttgtactggccagggtccataaagtacactcggcaatctacatagcactccattacgcacgtcagccctccatgtcagccctatcacaagagcacggacgtccagtccttattagtcgagctctcaatagacaagttatctccgaccatttaattag

SEQ ID NO: 387 - DNA, 339 bp, Glycine max
  unsure at all n locations
cttatgttgagaggtaagtgggaaaacagcaagatataaacaaaccatacactntttcctctgttctctccttttaagactcanaattgagctgtctcctatctnntgttttgctgaatcagagattctctccaccacccttntcaagtcacagaatgaagggtagtgagggaaaataacaatganacaaatctaaaaatgaaagaaaggacaagttggtatgtaatgtgaagagatgagagaggaagagccatatctcatggcatatattttcgcaacataaccccacttatgcttccttatatgggagtgagatcatacaacacctcaactactctc

SEQ ID NO: 388 - DNA, 458 bp, Glycine max
ttcgaccttggtgatctttgactccatgtcatcgaattgcatgtccacttgtaactcaagagcatcaacctttcaccaacaaaggtttgaagaccatcaaacctatccaaaaccttttgaagaagagaggaatcttctccaccatgtaaatgtccttcttcatcaatgggttgagcaccctttttcacccaagagccatcatgctctttacgataaccaaaggatgcaatcatagtggcaccgattaagaaggatctcttgattggaacataaggttcagaatcaggagggatgttatagtgtttaaggaagagagtgactaggtgtggatatggcaatgtagcatttaatcgcaatgccttatgcatgcgatatcggactaagtgtgcccaatcaatttgtcggcctttatgaaaagcccacatgacaataagatcttcttcagagacctgtgcaag

SEQ ID NO: 389 - DNA, 384 bp, Glycine max
  unsure at all n locations
gtcacacctactcattctaaaacttaattccattccanaacgaccatatatagggaccaaagtacaacattccaaatcaccatctaaagaaaagttcaacggtgttctacatatgttccaaccaagcacacacagacaaacatgtcattaacacaaattataagcaaacaaagataggaagaccgcgagggggaatgagcgaggganaatgaaccttacaaacgatgagagagtgaagctattgtgagggcgagggcatgcaatgatgacgacgataacacacacgagcttcgacaacaacactggacaacttcgacatagacgctntntgtaacatcccattttttcgtanaaataaatatagagcanataaataaataaata

SEQ ID NO: 390 - DNA, 449 bp, Glycine max
  unsure at all n locations
gaagaagaagaagaagaggaaaagaggaagaaagcctcttgcatatgcaaaatctgaattgtgaggattagggaagggtttatgacccttataattctccttttcacacccatgctttcactcaaaacacccaccccctaacacacatcaagacccatcaactcccaaactcattgaacattatgaaaaaccaattaattaattatgacatcaccacataaataattatttacttcaaccacttaatttaaatttaattacacaggataatttattaaaaccaattaatcaaacattatgaaaaacacggtgttacaattctccccaacaagaaaattttcatcctcgaaattttcttgtgaagaanatatcgtangcactgattaagcacacaactatntcgctttctaggggtatggatctttcctctatgatatnctggatgggan

SEQ ID NO: 391 - DNA, 179 bp, Glycine max
  unsure at all n locations
gtcgaagaacgggcgaaaccttcgcgaaattcttcacggaaaacgttacggaaatgtttcggaagcgcctcggcttagattttcttcacggaaacaatctttccaagcanattcgaaagagagagaagtgcctaaggggctgaaccccttccttcttcacttcctcccctatttatagc

SEQ ID NO: 392 - DNA, 308 bp, Glycine max
  unsure at all n locations
atcttcagtttcggagttggtcccctagtaatntaattcatgaaatgggtcctnctattntgtanaatcgtgcaatattgatcacccaggccacaattggacgttgaccgttagcaagtgatgttgactgtcacgttcttattagatgatgactgtcaaagtatcgtggtctgtanagctatcttatatgttgaaagcatgatgttctacaaacatgacaccaaccagttaaatcactttcacatgatannaaagtgatatntttcgttntcttaattatgcatggataantcttatcattcactact

SEQ ID NO: 393 - DNA, 419 bp, Glycine max
  unsure at all n locations
taatgatggtccgagttatgttggggaacggttacgaacccggactgggtttaggcactcactcacgcaacttaacttgtntgacataggctaaccgtcttgctgggtaaattggatgactgtctacgactacatcttcctttccttttcgctcaatatggcaacgactagttaattgtatcgtaacgctcggcaacctcctacccgaaagttctctcattgcagtaactactctgtccctctcattccacttaatcttgcgtaagtaactgcctgatctcacttcattatccggcacctacactacatcagtgtcggatagcgattctatagacggggttccttggtgcggtattcgtatgtccccctcttttgttttcactatcaaccccactattctctcttctctactgtcttct

SEQ ID NO: 394 - DNA, 283 bp, Glycine max
  unsure at all n locations
tctctctctctctctgtactatatatatatatatatatatatatatatatatgtgcgtgtgtgtgtgtgtgtgtgtgtgtgttaataaaaagctaagtgctgagtgtgataattntctccactcatctcaaattaagttggtggtatctcaaatccttaagcaatgtagtcctanattntcaacaggcttaatatgagaganattcctacaaacagaagtatattgtcaataattntattacacataanattagacagatacatactagtggtggtccacacg

SEQ ID NO: 395 - DNA, 116 bp, Glycine max
  unsure at all n locations
accgcgatcttagcaccgagctcagctgtggacaaacaatagttcttttttacttaaatgtttccatatnatatatggtaggtcagaatgtgctttgttattaccttaccatatat

SEQ ID NO: 396 - DNA, 478 bp, Glycine max
caatggcttagtgaggatggagaggtgcaagttaggaagcatgtagagttggatatttccattggaaagtacaatgataaggtgctttgtgatgttgttcctatggagcccagccacttactcttggggagaccatggcaatttgataagagagctaatcatgatggtttcaccaacaagatctctttcacatatcaaggcaaaaagatagtgctcagaccattgagtccacaagaagtgtgtgaggatcaaagaaaaatgagagagaaaattcttcaagagaagagagaaaaataataagagagccatacacttgagagttcaaaaagtcaggactaaattagggaaacacatgacaggaaacggatgactgtatcgcttgtagtgagggacacttcttacctctactacgatatttgcataggatcatgatactactggtcattctgctccccagtattctcattagttaaattcg

SEQ ID NO: 397 - DNA, 436 bp, Glycine max
  unsure at all n locations
gtgctccttaaacctccattaattntttgctttaccttctcttccattgttttttcttcattttttctccatgtatctcctcaaatgtcttgtgctaaattctgttaacatgcttctttagatttttcacctattaaacttgctatagaagctaaattttattttctatggctcaaatttcttgctcttgatcttgaaccatgaattgtgttgagtttacgttcctttgagttttgtcttgatattttttgcggctgaaaactaaaccataaaattcttacaataatattacagtagaagaaaacctcaaaaatctagagtgacttgttcacctattgtagttntgtcatagaagtcatgtctagtcatgaaacttgtcacataagaattcttatgttgngctgaatcntattctctctgttctttcgctaactcn

SEQ ID NO: 398 - DNA, 460 bp, Glycine max
  unsure at all n locations
ctcctctttcaaaccatgctatgtgctcgcgactagtcnctctcttcccttcgcagcttgagttcactattgctaccccacagagctccgcganatttattccggccataatcttccttgcgagccctcttggtctcttgttcaagggctcttgcggtagttgcattctcttcccgtaatccggaacactccttccgaatgtgtgtagcggccaacttgaacttctccttggcaagtttcgcctttcctaactcactnttgagagcttggacttcttcgtcctcttccggtgcttcaaaactctcttcgctgatgacttntaacttggtgagccaatctaagcctcgtatatgaactntcaaccattcatggtacccaccaatgatgccattacgaatgcccctaagttcttgatctttctttaacnngggttccatgcctttatggatctttgatagtc

SEQ ID NO: 399 - DNA, 446 bp, Glycine max
  unsure at all n locations
ctccncctttgtcaagcaaattcttttttgatatcatcaaaacctgcatgatttacattctccccctttttgatgatgacaaccacctgtaggttaggagcaacaagaaagaaaaaatatctatttgcatatagtttactcccccttggtttttcaatgtttgcttatatgagacaattgaagatttcatatttttcatatataaaaagttgtctcataaaaaatagatattttttcttactattttatcttttatcttttctctccccctttgtcaacatcaaaaacaaatcatgaatagagaggagaaaaaaaatgttaccacttgttgtaatgtatgagaatcaagtgataccaaaaggcattaaaccaatcattcaatattgatcaagcaaaaacaagtatagtaacacatcaatcanaaacacaatcaaaagcaatcaact

SEQ ID NO: 400 - DNA, 469 bp, Glycine max
  unsure at all n locations
cattgacaacatgattgaccccttggcagccgaagtttaatgtgccaagctatgccttttggggttattgttgcttttgaaattttaaccaaaaatgactaaagtaggtttaaaccaaaaatggctaaaatggctaaagtaggtttaaaccaaaaatggctaaagtaggtttaaaccaaaaatggaaaattttgcttttgttaaaactggtaaaccctatcataatcccgtagatggatgtgctaaccttccttggatgtgtaatcagagtgaaccttgcacaaagtccactctcacaaagttaaattacatagtcactcaatgcacaatgcaattctttgatagatagaaattcagcttagacaattttcatatctctatatcaaacaaaacacatacaccttgttatatatctatgtatagcacgaaattcaaggcttagaattatacaatntataaattaaattct

SEQ ID NO: 401 - DNA, 451 bp, Glycine max
  unsure at all n locations
ctaaagaagctagagcttagctacacacatccnctataatagctaagctcacccccaagccaaaatacatgaaaatataaaaaaaagtccctaatacaaagactactcaaaatgccctgaaatacaaggctaaaaccctatactactagaatgaccaaaatacaaggcctaaaagaaggaaaaatctattctaatatttacaaagaagagaggatccaaccttggtccatgggctcagaaatctaccctgggattcatgagaaccncaaggccttctttagcagctctagcccaatcctcttagagtcttctatccaataccccttgtggggtaggatngcttcattcccttcaacttggaaaggatntgacctgaaaatccgaaggtcttcataatttgggctccctccctcgacacctcgaaaaaagaataaaacatatgtattagtgg

SEQ ID NO: 402 - DNA, 380 bp, Glycine max
  unsure at all n locations
gctgaatatatagctgcaggaagttgatgtgctcanagtctttggatgaagcaataactntaacactctggagtanaccttgatcacattcctctaaaatgtgacagcacaagtgcgatcaatctaacanaaaaaatcttgtcatgcattctagaactaaacacatagaaataaggcatcattntctcaaagatcatatgttaaaagttgattggtgcattgagttcatagatagtgagcatcaactaacagacgttntcactanaccacttgctagagatagattctntttcgttagaaatgaactagacatattagatgcatctagtatagaatgacattctatttgcatagtgtgtgatgcacattcttactcatat

SEQ ID NO: 403 - DNA, 114 bp, Glycine max
ctaaaaacttagttagataaaggttatagatttaggcgacagtggcagcggcaattatacaacgcctgcctacataaaactactgattctacatagatatccaggacgatcacg

SEQ ID NO: 404 - DNA, 393 bp, Glycine max
  unsure at all n locations
tcagctgaatcacttccctcttcanacactagaatagatattatatnnggtctttataacacaagtcatacctaattcngattggtctgactaaacaatgtanaagtatttatactagtgatttatgaaaaataaattcattntanatntgtgtttaattntaatttattgctggtgtaaataattttaccccatcaactaattaanaatcttaatgtaattataagaatttaattatttagcacccacaatataatatataggaaccagtacaaaaaattctttttaacattagttgnntttaacattntatatatgttttgtaatgtatgctaataagttgatatagaaacactacaagaaaaacacttaaacatgtttgatatatttttt

SEQ ID NO: 405 - DNA, 241 bp, Glycine max
ttatcctgctttgatgaatatgaagcctcgggaagatggagagataagaaagagggagaatcatgttgtgactgccgcctacatggccaaattccacaactaacaatgcaacacttagctagatagtcatttcatacccaccacctactagtaagacacttatcatcacaaggccaccttaatcagcacaaagtcacctgccgacatctatataaacaccctcttacactaccaaacacta

SEQ ID NO: 406 - DNA, 246 bp, Glycine max
  unsure at all n locations
atcatgataacaaccaatatgaattccactcanaggagttgggcatgtaaaagccaaaacttcttcaagctntagccttaagttgttcaccatgttgctcccctatctctaacaacccatgcatgtagtccaagttcaaaggattatagtatgttgatagtgggcgcataaaccatatgataagggactcaagtctgttaaactctttagacaaggctgttagaaccaaagtcaagaatggaaatg

SEQ ID NO: 407 - DNA, 454 bp, Glycine max
  unsure at all n locations
gatatccactccacaaggtttgaagtagaggagagcttcaaccctataacgcaacgtggcggacaaaagtgggcagtaaacttgaatgatcgtcattgtcaatgcggaaggtattctgcgcttcactatccatgttcacatattattgcagcttgtggttacgtgagcatgaactactaccaatatatagatgttgtttatacaaacgagcacatcttanaagcttactccgcacaatggtggcctcttgggaatgaagcggctattcctccttctgatgacgcatggacacttatccctgacccaaccacaattcgtgcgaaaggtcggccaaaatcaacaaggataagaaatgagatggattgngtcgaaccatctgagcaccgaacanaatgcagtagatgtggagccgaagggcataacaggcgtcgctgtccaatgcaatctgagcgtg

SEQ ID NO: 408 - DNA, 304 bp, Glycine max
  unsure at all n locations
tcagctatatgnggttacttatatttgtcatgttggatannatttagctttatatattgctaattcagcttataggtgagaatgaagctactntagctcctatatatnnaaccatngatnntaatagcaatatggcacttntgagcaagaattactctctataagttntcatatcaagagtcanatgctattgaaatggataaatgcacaatataattggtgtgtatcaaccctaacacaacaacactaccacaaaaacacacacnctatgatccacaattngaaacgaaagggaaaagtcatg

SEQ ID NO: 409 - DNA, 457 bp, Glycine max
  unsure at all n locations
aaaggatcgaagtgggtctgaaaagaggcaaatttaatcatcctgcttgggcgaatgagaaaactggggcaattgaagaaggtgaggatgagggagaaacccatgctgtgactgccattcctatacgaccaagtttcccaccaaaccaacaatgtcattactcagccaatgacaaaccctctccttacccaccacccagttatccacaaaggccatccctaaatcaaccacaaagcctgtctaccacacttccaataacgaataacacttttagcacagaccanaacaccaaccaagaaatgaattntgcagcgaanaagcctgtaggttcaccccanattccggtgtcatatgctaaacttgctcccatatctacttgatactgcaatggtagccataacccctactangtttcctcaacctccatttttccgagggtacgactcgaacacaatgg

SEQ ID NO: 410 - DNA, 254 bp, Glycine max
  unsure at all n locations
tagatagatgacatcnagcgataactgagccatgtgaatgctcatncgtgtcaggatggcgtacactagctaacacttcggcagggggaggtcggaattatgatcgctgggctggatgttgctgagcagcanaatcatccagatctgagtcagggtggtcatggtggtgcgcatgatccgcacncgtcttccagcagcagtccaggcanaatcctgccccggtatacatagcaactgggcgatggcctctcatc

SEQ ID NO: 411 - DNA, 455 bp, Glycine max
  unsure at all n locations
aacctatatttaaaataacttaatgccattaacctagggaattaaaacaaacttaatggctgagtgtaactgatattgtggcaaccaaaagtcacccccaacagccaacaagtcagccaccatttggtctcccaaaaggctgatgcctatgttgccaattgggcccttattacaacttgaactaaagcccttttagttgattaacccaaaacatatttttggtcagccaactttacaaggattgggccattatttagacaaactaaacactctaaaactgaaataaagtggtgtcatttagtcctcctccatttgggccatgatacaactcacaaccttggacttttctccttganacttgngcttgtattcaaatagtatggacagcactttgtgaagagcttccttggctttccttgctctaccccttgtcatangtcctccaaaagtcttan

SEQ ID NO: 412 - DNA, 352 bp, Glycine max
  unsure at all n locations
tgaggtacttctctctctctctctcaatagctgaggaaaagtagttccatgaagaagatccaagccgaggcgcttccgtaacgtttccgtgagtaattacgcgaagattctcgaccgttcttcaagattcatcgctcgttcttcgttntcttcggtcttcaacgggtaagtacctcagaccaagctnttcaattcattctatgtactcgtggtggccacattntgttcatgtattttattctcgtttcatttacttttatacccgcttttacgtgcttaagccattattaagcatttctcgctaatctaaaataaataaattccaccgatcgttgaatggtatcatcgtaat

SEQ ID NO: 413 - DNA, 448 bp, Glycine max
  unsure at all n locations
gtcaaggcagctgaaggaactagttccgctccggagtatgacagtcaccgctttaggagtgttgtacaccagcagcgcttcgaggccatcaagggatggtcgtttctccgggagcgacgcgtccagctcagggacgatgagtatactgatttccaggaggaaatagggcgccggcggtgggcaccactggttactcctatggccaagtttgatccagaaatagtccttgagttttatgccaatgcttggccaacagaggagggcgtgcgtgacatgagatcctgngtaaggggtcagtggatcccgtttgatgccgacgctatcggccaactcctatgatatccgttggtgttggaagagggccaggaatgtgagtatggccagaggaggaaccggtctgatgggttcgatgaggaggccatcgcccagctgctatgtatacttgggg

SEQ ID NO: 414 - DNA, 278 bp, Glycine max
  unsure at all n locations
actggtaatcgattaccanaacattgtaatcgattacagctnntttgaaataatcggaacgttgtaaattcnagttgaaaaacttttcanaacaatattgctactggtaatgtcataccctaatttcgtccggggacctttgcttgatgacatgcgacctttctttggtccttgtgaggtgcttggcatgcatcattangcaatntgtgagattccaggacatgccgacaaaccaacaaaatattgatgcacaaatccgtaagtttccgtgacacacc

SEQ ID NO: 415 - DNA, 457 bp, Glycine max
  unsure at all n locations
cgggccattccaagtgttggagaagatcaacgacaatgcctacaagattgacttgcctagtgagtataatgtaagtgccactttcaatgtgtctgatctatctctttttgatgcagatggaggagccttggatttgaggacaaatccttttcaagaaggagggagtgatgaggacataaccaagggcaaggaccatgaagcacttgaaggtcccatgaccagaggcagacttaaacaagcccaacacgtcatagagacaaggctggtcatttgtatagctgccattgatgatgattgaaggcccaagtggagaaagatgaaggcccagaggcagaggcactaccaagactactaattgttgttgaaggcccatactaacttgaaggcccaagttaaataagttnttagttataatttatttntattggaattctggcccatactgtntagaacgccn

SEQ ID NO: 416 - DNA, 511 bp, Glycine max
  unsure at all n locations
ngtgtgctcctgctcttacggacctatgaatctcagctntcacaagagtcttcacaaataactatcatgaagcaganaactaacaaaactacccatcatatctcccaaaaccccatacccacaaatttggagcttcaatggagaatgaagaagaagagaatggcaacgtgagggagagagagagctgtctgaaataatgtggggctgagtgaagagagagagagttgctttttgattttaaaaaggctttttcctcatttcttattattttattataaactatgccacatgtctccatttgagtggagcaaaaagggcccactttcccttttgactgtgacccatactcagccacaaaagtgaggaaaatctgacctttgaaatgctaaaatcctgccttggttggcgtgccgtttctctggttccagttcctcgcgtttctctgcgtccatcggngccagttttcgaaagtacgcaatatatatatcanaacgctcagaataaaaccccg

SEQ ID NO: 417 - DNA, 445 bp, Glycine max
  unsure at all n locations
attctattagcacggattntatcagctcaacaaaagtttgtagatgcagaacttgttatagatgctgctctagatcaaagtggcaaatgggatcaaggagaattgttgagaactaaagctaaactacggattgcacaaggaaaattaaagaatgcagtggagacatatacttttcttcttgctgttcttcaggttcaaaataaaagtttacgcacagcaagtaaggttgtgaaggtatgtgtcaatgataaatgtagaatatatcacttagattctttaataactcanattatcaacgggaaaggaatattagaagcttcgctcacagtcttanactctaccttttaacatatgtagaataatatattacttttctgatttatctttcatacagaataanggaaaccgtgacagaagactggaaatggaaatatggcttgattat

SEQ ID NO: 418 - DNA, 480 bp, Glycine max
ctcttatttcttggtaaagctctatctaaataaagttgttattactgcaagaaatcagatttatctcccacccctgtccttctcaatcattccaatccccaccccccaaagtccatgagggtacccttcattatgtggtgcttacggcttatacaaatctaataatttgtggattcaggtagatgtggagtttttgatggtactattgaaaacatgcacttgcactggaagtactgggaactggtcaagaaaattgtgaaggctaaaacctttgaacgagtaaaaaaaattgcactagcacttgaagctgagagtggaggtgttctggtctcagttgacaaagtttcaaaaggatattctgtaattgtttatcggcgtaaggattaccaacgtccttcaacattgagacccacaaatcttttgacatagagaaaggctttagcacgttcaatcgagcttcaacgacatgaggtatgtatt

SEQ ID NO: 419 - DNA, 460 bp, Glycine max
  unsure at all n locations
aatggagttgacaagaatatcttcagacttatcaacacatgcacagtggccaaggatgcatgggagatcctgaaaaccactcatgaaggaacatccaaagtaaagatgtccagattgcaactattggctacaaaattcgaaaatctgaagatgaaggaggaagagtgtattcatgacttccacatgaacattcttgaaattgccaatgcttgcactgccttgggagaaagaatgacagacgaaaagctggtgagaaagatcctcagatctttgcctaagagatttgacatgaaagtcactgcaatagaggaggcccaagacatttgcaacatgagagtggatgaactcattggttgccttcaaacctttgagctangactctcggatagggctgaanagaagagcaagaatctggcgttcgtgtccaatgatgaaggagaagaagatgagtatgacctgn

SEQ ID NO: 420 - DNA, 269 bp, Glycine max
  unsure at all n locations
accatacagaacctttgccttccatgcagcaacctggagcaattgagcaacctgaagcttatgttgcanatatttacaatagacctnctcaacctcaacagcaaaatcaaccacagcagaacaattatgacctctctagcaacagatacaaccctagatggaggaatcaccctaatctcagatggtccagccctcagcaacaacaacagggggtacggaaagtacccccttgaattgtatattcaagacatttgagaataaacaaacac

SEQ ID NO: 421 - DNA, 427 bp, Glycine max
  unsure at all n locations
ctaanaagaggtatatgtgatgtgagagaaaaaaacatactcatactccgattattaacagatgctttctggtgttgcatacgagttgcggcaggatgagccaagctttcaatggacccaatcaaaataagaacattgaagcttctaaagagtgacacgtatattatacaaatataatagttagaaatagatagtatcatattatagctgatatatatcagatgactaacataagatgatcactgctagctggacggcagcaganaattcatgccaggaaacgattaaattttgactttattaattcttctagcaccttataatggaaaaaagagttgatagatttgcgcctaaacattttatttaaaacaaacagagtttccaacatcgattgagagtttttttatatcaaacctgtgaataatgt

SEQ ID NO: 422 - DNA, 365 bp, Glycine max
  unsure at all n locations
cactcacacaccgcactctccaatccttagctcanacctatggtcctttgatgctacttcactttggaaaaatgccagttcttggtgtctcaactgctgangctgcacgtgagggtatgaaaacacatgacctcgttntctccaacagaccacatcgtaagatgtttgatatcctcttgtatggttccaaagatgtggcatcttctccatatggcaactattggaggcagataaggagtatatgtgtcttgcatcttctcagtgccaaanaggttcaatcttttggtgcagtgagagaagaagaaatctccataatgatggagaagatanngcagtgtgtcttcttgatgctgtgaattatctga

SEQ ID NO: 423 - DNA, 448 bp, Glycine max
  unsure at all n locations
ttcanagttgttttgatgataacaatgatgacaacaaaagatgatgacaaaggtgatgaaaaaaagctcaaagatcaaagaacaactcaagtaaatcaaagaacatctcaagtgaatcaagaacaagtcaagagttctagaatcaagaagaattcaagacttaagaagaaagcctagaatcaagaatcaagattcaagattcaagaatcaagactcatgattcaagaatgaagaaaagactcaatcaagataagtattaaaaagttttttttttaaactttgaatagcacatgagttnttgacaaaacctttaccaaagagttnttactctctggtaatcgattaccagtagcaaaataagtttgaataagttttcagactgaatttacaacgttccaattattntcaaaaggctgtaatcgattacaatgttntggtaatcgantag

SEQ ID NO: 424 - DNA, 469 bp, Glycine max
  unsure at all n locations
ccatcaaccccatgccaaaatacatganaatatataaaaaaatccctactacaaagactactcaaaatgccctgaaatacaaggctaaaaccctatactactagaatggccaaaatgcaaggccaaaaagaaggaaaaaacctattctaatatttacaaagaataatggatccaaccttgatccatgggctcaaaaatctaccctaaggttcatgagaaccctagggccttctttagtagctctagcccaagcctcttggagtcttctatccaatacccttggggttaggattgcatcacaccatacaacattggttttgaccatcaatcactatccctttgtggttgattcaccttcaaatcatatttatgtttggaagagagaaattgttgttgtgctgagcgtaacttctcattctttgttgatctttcacactccaccttcaccttcactaatcaactcaaacct

SEQ ID NO: 425 - DNA, 234 bp, Glycine max
tctgtgacaccatcagacctatgccttcatgcagaacctgagcaataggcagccgaagttatgctgaaatatttacacagacctctcaccttagggcaaatcaccatgcaaacaatatgaccttcagcacagaacaccctgatggggaatacctacctcaaggtcagcctcacacaacagagctgctcttcttcaaatgtgtggccagagacatcattctcacatccacacaca

SEQ ID NO: 426 - DNA, 418 bp, Glycine max
  unsure at all n locations
gctacaacaactgcagcaagacccactatccacaatgacagaacaatatttgtntataccttgcatcttgtatgaaagatgttctctctttgtgtttgggttaggtcacaagattgactcccaagtaaccttctgaccattagaagatcaccttcttcataggggtaaatctcttcaatatggtcatcaccattggcttcaccctcacttccactngaggaaggagaagatgtagcctncttttggctactatagatgtcttgaccgctcatgatcatggttttctttgtggggcaatgagaagcaatgtggcctagcaatgcttgttctttcctcctccctaagtctagctctcagaagggagtagtgcatttgtggctatattcttcacactcatactcccttngctaagcttttt

SEQ ID NO: 427 - DNA, 589 bp, Glycine max
  unsure at all n locations
ctaacggcttcctccatatgtcataggcgttaaagcggttgtaatatctcgtaacacttcaaaanncctagcactagtttgaatcatgcgtcgctgagacccntagagtcgacctgcagcatgcaagctctgtccttagatccctcttgttggactatactcataccaagcaacattattgtacaacatattataaccaacacttaatcggcagattcctcttagcagactaagattcaattctgcttcattcaaggtctaaggcaacaatacattttccaatgcttaaatcacctaaccgggcacacaaatggttgatcagaccatgagcatacaaaatttaagcactgaaagaagcattgaacacactagaaactcaatcaattagatattaaaataattacatcaggtgttctttagaaatacccaacaagggtgtttagcccaccattacagacaaacccctatcaataatgagataaataaaccgtaagatttcttgaaagctgtccttttgcttctacagagctttttccaaaaggcacttgggtgcttataatttgtgcaaagcgtgttaaatctggagtan

SEQ ID NO: 428 - DNA, 192 bp, Glycine max
  unsure at all n locations
caaccaaagatatgaagatgtgagatgtntggttctctgccatcgaataattcatatgaagtnttctntaaaatgggtcttattaaagccctatctaaaatgtagcatgcagtgttaacggcttcagcccataagtattctggaagaggagtatcattcaataaagntctagcaatctcgtccaaagatcta

SEQ ID NO: 429 - DNA, 526 bp, Glycine max
  unsure at all n locations
cgttgatcgctcgtgacgagccnnttgagtaacatcgacgcatgcaagcttgcatatgaagaanatgggtggttgggcattaaatgtgtgcattaaatgcatatactttctcatgctaagaaactagtctttgtcgcagcgtattgaacacttaaggaggaaaccacttcttttgtgttagaacaagtttatgcaacaaagttcttcttttgatggcgattgagaaattttagagcttgacttcatttattcctcataggatgtgacaaatcctaggagaatatctctgtaaaatagatctcaaacacaagagtattaaatgaagtcttacatgtcaactttaatgttgtatcagatcatgatttcatcttggctaccattgaaacatcagatgcagactntgcaaaacatgatttgatagcacataagatgcaactntaaaccttcgtatttgttttcatctaacaacatgtcttaagacataaatgtcttttaacctagcaggaatggtattcctatgaatacg

SEQ ID NO: 430 - DNA, 250 bp, Glycine max
  unsure at all n locations
acttcatatagcagtctatatggctgggtattgngaaatatcacaattcatatgtcagggaatcttgtcacctagagaaaattgagaaagattntcttagataatagtcgagaatagagagtagagacgttgggaacagagataatatgctctgtcttactgcgaccaaaactacaaagggtgtacaaaggagcactcgtctttcacaccacgatgagtgctcgtcacaacactgtacacatgttattac

SEQ ID NO: 431 - DNA, 459 bp, Glycine max
  unsure at all n locations
acatgtggtactaggtggcggtcgggcgatgatgcacaacaagctttccacatccacaatgcgcgcataaacccaccatccccttttgcccacctccaactgagctcacgtactcccacgtagcccatatcctcgtttctctcaacaccgggtacccatcaatcctcccaagcttccacaacatccaagcaaaacaacattcaaacagcacaagctatcacagccaagcaaaacagagcaaaggcagaaaactctgctcaacacatcaaccaaaatcacagcttttctcacttaaagaccacagtaacaattccttcgatccaattcgttaaccggtggatcgactccaaaattntactggaagtctatagtgcataagcctacattntgaccgttgggatctactggcanacatccagaactcattctgcactactctntccacaaccagcanaaacn

SEQ ID NO: 432 - DNA, 201 bp, Glycine max
  unsure at all n locations
agctacctagtctataaatagaagcatgtgtaacactagttgtaactntgatgaatgagagtcttgtgagacatacttcanagttccacttctctccctcttttattccttcaatttcgtgcgcccccctctntctttctcttcctctntcttttcctccattgaagcatcctctccaagcttcttatccaaggctcatct

SEQ ID NO: 433 - DNA, 456 bp, Glycine max
  unsure at all n locations
gaaacttcctgcttttattcgttgaccacagagtggtacctggagatatgtcgcggnggtcaggagaccttgnggacgtcaggtggggtgctattgcccaaaaccaagcttgaccaatcccgacccaacccgggcatagtcagtcagtgagagcctgtgatgtacctaaacaggcgagctcctggcagtcaacagataaaaggaacaaagaccacaaagcaaggaggcttgtggtggctggccagctgtgaactttgattgatatgtgagatttggcctctggtaatcgattaccaagggtgggtaatcaattacaaggcttanaaatgaagacagaaggctaagatggtctctagtaatcgattaccaagggggtgtaatcgattaccaggcttgaaaacgaggtcaggaagccatganggcttctggtaatcgattaccaagggggtgtaatcg

SEQ ID NO: 434 - DNA, 318 bp, Glycine max
  unsure at all n locations
gaataaagagggggagaagtagaactttgaagtgtgtctcataagactctcattcatcanagctacaacaagtgttacacatgcttctatntatagactangtagcttccttgagaagctttcttgagacaacttccttgagaagcttctttgagaaaacttccttgagaagctagagcttagctacacacacccctctcataactaagctcaccttcttgagaagcttncttaagaagattcgtanagaagctagagcttagctacacatacctctctaatagctaagctcacctccttgagatgagaagctagagc

SEQ ID NO: 435 - DNA, 215 bp, Glycine max
  unsure at all n locations
tatgtggactaggtggcgatcggacgatggtgcaagtcgactcttcacatccacaaatcacacataaatccatcatccccagntggccaccttcaactgagctcacgtactcccacgtagccncttatcctcgntccttcaacaccgggtgtccatcaatccctgcaagcttccacaacatncaagcaattcaacattcatacatcatgaactat

SEQ ID NO: 436 - DNA, 308 bp, Glycine max
  unsure at all n locations
gactganaatgttattcagtntgtcagaatggatgtgaagcttttgatttgttggcagcccaacctcattacanacctagaaagtccttcggattcattntgtgtgtttatttctgtatggtatgagatgatatgcanaagttgggacttctgttagttgtttataatggaatgatcctaaacacttgagcttgagtgaaacaacgactgtgaggctntggttgatgattctttccttgatatctgccattctcactaacttattntagttgtgactctaatgcatatgttcctatcattgaaaagct

SEQ ID NO: 437 - DNA, 456 bp, Glycine max
actaacgtcgtcttctgcgacctttgtcaatcgcggccgacaagcccgttgacacgtggagatttacgtcatcttccgcgctcacaagatctgtcatactgacttttgagtcacgctgacggccggaaatatccgagtggttatccgtataaactttttgctgtctgtaagacgaaaagcttgatagcacgcagagactaacgtcgtcttctgtgccattcatcaatcgcggccgacaagcccgttgacacgtggagatttacgttatcttccgcgctcacaagatctgtcatactgacttttgagtcacgctgacggccggaaatacccgagtggttatccatataaactttttgctgtctgtaatacgaaaagcctgatagcacgcagagactaacgtcgtcttctgcgaccttcgtcaatcgcggccgacaagcccgttgacacgtggagatt

SEQ ID NO: 438 - DNA, 254 bp, Glycine max
  unsure at all n locations
actcanaagtcagtatgacagatcttgtgagcgcggaagatgacgtanatctccacgtgtcaacgggcttgtcggccgcgattgacgaatgtcgcagaagatgacgttagtctctgcgtgttatcaagctcttcgtcttacagaatgcanaaagtttatacggataaccacttcggtatttccgcccgtcagcgtgactcanaagtcagtatgacagatcttttgagcaccgaagatgacgtanatcaccgcgt

SEQ ID NO: 439 - DNA, 487 bp, Glycine max
  unsure at all n locations
atgtataataaaataggtaatgtgatacatagaaggatgacaagcaataaaatcgaacataagaaagtattacaaaaagtacgaataatattaagataacctcacataatggagaaacagcattcttgataacaattcacttccatcacaagaaanaagatctgataccgtggactgatcaaacgcatattnganaaagatatagaatagttatatctttgattcagtgtatggccaaaaattgacggtacagaatgtatgaagagagtttagtctaattaactaaacagaatataccaatattgtaaactntagtatggtgttcagctagtacggataangaaacaatacaaaatttgatctaaataatatagctcttatgtcaaagcacaatangatgatttttaacaaatgactgaatcaacacgcatatatttatcaatctccacaaagatagagatcatataaacatctcttatatttatat

SEQ ID NO: 440 - DNA, 439 bp, Glycine max
ttgtcgtgattaccaagtgacagaacaacattacctgtattgagcaacttcaataagaacctttacagggatgctatcctaccctttaggatttggacttcttggccataggtatcgctgcacatctccaatatggcattgcatttattgtggttggcttcaatccctcggtgagtgacctgaagcccgcgaacgtgccttcgtctgcacctaaagtcattgttgacagtggcagcccatgtatactcccggacatctcatagacctcttttagcgccgcaacatgtagtcctctgctttgtaattcgactcctatctagtgcaaatataccttgacgccacattcgatctgatatttataggcataggctcaacctaccgtgtgtatgtcaccgctgacttatctagccccacgcgctaccctaaacaaccctcgccg

SEQ ID NO: 441 - DNA, 419 bp, Glycine max
  unsure at all n locations
caacaagtattctncatcatgcacacacacacantcatatcaagagaaaaaggacattaatccttttcccttcctanggtcacaatcaacatggcccttcaagtggaataatccactttaccaaatcacacaccaccacatatccaatcaccaaatcattactagacattcaaagtannatttttctgaaggttggacacnctttgacctaaccctanagtgcgacgaatcttaattaatatcattaataaactcatatacataacacacaacattctttaccaagtggtcacactcaattggtcttaanacatatacaatagcaattcttataatttcatattataaagtctncatcanagtanacaatacattctacaattcacatcattaatttcatgcatttcatatacattcat

SEQ ID NO: 442 - DNA, 463 bp, Glycine max
  unsure at all n locations
tcaaagccttgtatggattgaaataagctataagagcttggtatgaaagactaagtttattcttactctagatagttactctagagaaatagtggacacttcactattcagaaaggcttagaaaaaggatctgctgattatacatatatatgtgaatgacatcattttttatgtaacctctgaaaggatgagcaaggagttttctgagctaatgaaaagagaatgtaaaatgagcttgatgggtaagttgaagttctttatangactctaaatccttcaacaagattatggaattttcatgcataaagagaattcctcatggacctattgataatgttattaacggatgaagtcatacatatggttaccgtgccatccttccactatctttactatctaatcattggtatgctatctttatatgaccacttactgtctatatcgctcctttttcttaatcccc

SEQ ID NO: 443 - DNA, 433 bp, Glycine max
  unsure at all n locations
aaggttctagttgtagggctctctctctttntttttttttggttttatttttagagtgctactctcaattcgttttagtctcttttcgttttggaagaataattctagttttcttcattttctactgattaatggaaggctaagtctccagcgttattttctcttgaggattaagcacaactctctttgaggttctattattactattaaattctgataagtttttcctcttcaccaattactatgtatttgttgctattaatccatgcatgcttagtgcttgattaattgtctctgtgcttaatttacgttcatgcttactgatcgttcatgattaattggtgtatgtgttggttaatcacataatgaatgccttatgttaaatttcgcttagtaannttaattanggttggattaagtggttgaactgacn

SEQ ID NO: 444 - DNA, 161 bp, Glycine max
  unsure at all n locations
tatgaccttcatgttatgggtatcctttgcgacgcatattangntaagagctcttgtgataagcaacactccaccaagaggggaaaatggtgaatggagcattttgttggtgtaacataagtatatgcggaacacgaagaaagcaaggtatgttatggaga

SEQ ID NO: 445 - DNA, 371 bp, Glycine max
  unsure at all n locations
ctcagctaataaggaggaagtggagaggttggaagctactttggccaccgcccagagggagaggaatgctgaaaaggaggagaggattgnggttgagcaaaaaacatataacaatgtttatgaagcttatgagtgtgggttgaatcactgcatctaacaattacactttgactatgaggtcccaaatgaatccattttcaacatgaacaaagatgtctataatggagacttaatcttgattgatgacatttcggatgaggtgggatcaaatggtgggcagccaactacccctcttggtgaaacccaaatgaccaattcggctgaggaggatgtggacgatgtcccatatacgagccanaatggcgtctctt

SEQ ID NO: 446 - DNA, 436 bp, Glycine max
  unsure at all n locations
tgttcgcacatcgttcgcgtgtatgatatccactcgacaaggtttgaagtagaggagaccttcaatcctataacgcaacgtggcggacaaaaatgggcagttaacttgaataaccattattgtcaatgcggaaggtattctgcgcttcactatccatgttcacacattattgcagcttgtggttacgtgagcatgaactactaccaatatatagatgttgtttacaccaatgagcacatcttaaaagcatactccgcacagtggtggcctcttgggaatgaagcggcaattcctccttctgatgaggcatggacactaatccctgacccaactacaattcgtgcgaaaggtcggccaaaatcaacaaggataaggaatgagatggatngggttgaaccatctgaccaccgacaaaaatgtagtagatgtggagctg

SEQ ID NO: 447 - DNA, 442 bp, Glycine max
  unsure at all n locations
agcgcgggtctgggagacaaaggtcaagcgttcgcgatatgcgaggatgatattccgagtactttggatttggtacgaccatgccctcctgatttccagctgggaaattggcgagtggaggaacgccccggcatttacgcaacgagcataatgtaaacctttacggttttaaaagctctatagttgggcctaggctttagagtttttccttttgttaaggctttgtgtcttttgtttttgaatttataatacaaggatctttcttcatctgttcctggtctctacccattctcattcatttgcatgtttacttctttntctgaaacggcagatccgatgacgagtcccccgaaggtactaatacctgggacccgcctatcgacttcgagcgagaaatgaatcanacggaagatgaaggaaatgaggatgtgggacttccccc

SEQ ID NO: 448 - DNA, 410 bp, Glycine max
  unsure at all n locations
ngagttgaggaagtgtagaagggtgaaacttcctgctnttattcgttgaccacagagtggtacctggagatatgtcgcggnggtcaggagaccttgnggacgtcaggtggggtgctattgcccaaaaccaagcttgaccaatcccgacccaacccgggcatagtcggtcagtgagaacctgtgatgtacctaaacaggcgagctcctggcagtcaacagataaaaggaacaaagaccacaaagcaaggaggcttgtggtggctggccagttgtgaactttcattgatatgtgggttatggcctctggtaatcgattaccaagggtgggtaatcgattacaaggcttataaatgaagacaagaggctaagatggtctctggtaatcgattaccacggggtgtaatcgatta

SEQ ID NO: 449 - DNA, 455 bp, Glycine max
  unsure at all n locations
tagaagaacaaaattgcctcaatcatttccaaatatgcatgtgaattangaagcatcaacaagaatcaagccaaggctattgtgcaagcaatcaatggggcaaaacacaccaaatgattatgatgatggatggctcaaattctcacaaaggtaaactcatcactttcaaattgagctttcaaaactatcattacatgtagaggagaatcaaggatttcaagtcacaaaatgtcaagaacttttattttcaaaacaattacccatttcctgaacatatcccataattcaaagaaaaacatgcaaagtcgtacatgcacacaaaattgacccaaaatattaaactaaaaatccgacgaaactaacaatattaacaaattaacacaactaacaaattaacaaaaccaaccaaactagcanaaccaaagaacactcccccccccatacttaaacaatac

SEQ ID NO: 450 - DNA, 211 bp, Glycine max
ctacatgtttatgtatgagtgtgtgcatgcttgccagcatattcatagatatctattaaaaaaataaattaaattgaaaacaaataaatttaaagcgtattgttatattaaaacaaatatgtttaaaacgcatatttatactaaaattacatgattttgaatgtttatatttatactacaattatattagagcaacttaaatttgtgtata

SEQ ID NO: 451 - DNA, 384 bp, Glycine max
  unsure at all n locations
taatcaagataagtatgaaaagggttnttcataaactaagtagcacatggattnttctcanaacatgtttaccaaagagtttttactctctggtaatcgattaccagattattgtaatcgattaccagtagcaaaatggatttgaaaaagttttcaaactgaatttacaacgttccaatttatttcaaaaagctgtaatcgattacaatgttttggtaatagattaccagtgcctttgaatgttgaaattcaaattcaaatgtgaagagtcacatcctttcacataaaagctttgagtaatcgattacattgatttggtaatcgattaccagtgattgtttctaaataaatcaaaagatgtaactcttcaaaatgggttttgac

SEQ ID NO: 452 - DNA, 401 bp, Glycine max
  unsure at all n locations
tggatttccttntagtagggaatctatccttcctaagatggagccaaacccagtcaccctcattaagaactagctcttttcttcctctattgcctttagttgaatacacctttgtttggttctctattttgttcttaaccctctcatgcaacttctttacaaattttgacctagattccccttctttatgtataaaagaagtgtccagtgggaggggaatgaggtctaacagtgttaggggattgaacccatagacaacctcaaaaggggactgcttggtggttctatgaacccccctgttgtaggcaaattctacatgaggaagatactcatcccaagacttatggttgcctttcagaagagcccttataatggtggattaaaacctattcactacctct

SEQ ID NO: 453 - DNA, 444 bp, Glycine max
  unsure at all n locations
tcgtgcatgcccttctccatttcttgtatcagtgacttgagttcgtcgtttgaacggcccaacgcattgttgttccgtttcatctcttcgattttcggagctattgctttcaggatattttggaggcagaccaagttttgtttaaagagtgtggctctgcttattgttcctgaaacaaccaattctacgagcatagcctctgccatattaattcacgagctagctagtctcaataacgagaagatgtatatatatagcaaccttagactctgcacaatataaactcatgcatgcaaccaagatgcttcttgtatactattgttaaagggaagtttctttgacacttcattcccaatttcatattgcttcttatantatttgctgacttgtactgggtagcgttaatatcaacgggtgcaaaacgtctttcttttcttttgacct

SEQ ID NO: 454 - DNA, 453 bp, Glycine max
  unsure at all n locations
tctttcctaaatcaaagtataaatgattntatattataagtataaacctattaaaaaattccgttcaaaataataagataattttacctgaaattttgaaccactccacttgtttttaatgagccaattccaatcttctggagatacgtattttggtctatcattttctttaagataagcttgatgtaaatgataaagcttattcttgtattgagattgaattttcttcattgcatattctctttcctcgccagataaactaaaagcatccttatatcaaacgttttcaccagcaaaagtaaaaattaaatactatcaagatacattatcaaaccaatttgaagatataactaatattcaaatatataaataaattagatataattaacctaattatatactaacattcatatgtcgccacatttcatctacaccatccttactaatttcact

SEQ ID NO: 455 - DNA, 442 bp, Glycine max
  unsure at all n locations
tgttcttagtaagatcgatcagacgatgcttttgttccttggagagcaacccgtcttggccccagaaagtgttgccaatgctctagtggaagtgatgaacgatcctttctcacacttaatcgcctgttgataaaattctgcaccaaatatccaaacaccattaaataaactaaaattcaaataattaattgtatggatggattagtcaaataaaaatttctattagccaagatattataggaatttgtcaagtctatcacgtgagcagtgggcttagtgttcctttcattaggagattcatgaaaattntgtcggccacanaattgtgagacttcttaatcaattaaattaaaaaaaacctagtaaaataaaagttgaccagcatanactaatagtgggaatataattagtatttgaatgccaaaatcaaccacatattttt

SEQ ID NO: 456 - DNA, 431 bp, Glycine max
  unsure at all n locations
cgagaaagcccttctgattctgtttatacatttctgactctatggcatgagatgcaatgcacagattggacctcctgttagttgttatcaaagaatagcttatacacttgtgcttgagtgaaacagttgctgtgagactgtggtttgagctactttccttgatacctgtcttatgattaacttcatctaactgtatagttcacattttgttctcctctttgtctagctgcatattctgggaaaacaagtgataggtacacattgcttcatcttttacatcatgcaatcaataaattntaatgcatacacctttgaacataaacactgcatgttntaccacttgaggacaagtgagttgttctcttttgcttgaggacaagcaaaactattaaatttggggagtttgtagtcgatgaatacgactaactttt

SEQ ID NO: 457 - DNA, 357 bp, Glycine max
  unsure at all n locations
cttctcggatatctgttattgataaacaagatcaagatgagtatagtttgaggtttatacacagaatctccaagattgtttatagtacaagcggttagtaaacacagcatatatgatacgtggcaagcacatggtgagaggtgaatcggtaatcagtaatcacacagttaagtgaaatactaaagtttatggagatagtccgaaatcttacagaaagtcaaaagttcttataatagtagttaaataaataaataaataaaagtagaatttgactaagaatgaaaaagtaatattttgttcaataactcatggnggtatatatacgagtgttctgacgcgggaatcacaaacagaacc

SEQ ID NO: 458 - DNA, 479 bp, Glycine max
  unsure at all n locations
ctattaggactcttgcaactcagctcgtacatatagtttcaatccgaggtccttcaagagacctagtaaaagtatcagcctattgttcattggaaccaacaaagtcagtcatgatttcccctgacaacacctttactcttgcaaagtgacaatctatctatgtgtgtttagtttgttcatggaagaccatattagatgcaatgtgaagagcggtttgattgtcacaaataagcttagtgtcctgagtgcctaagtcttgtaatttcgcatgtagctgctaccatggcacaatgttaagctttgatgctgaatctagcaactatattttgcttcttgtttctccatgagatcaaattccctcaaagcaaaacacaataaccagaggtagatctcccgtccatggntatcgaattgaaagattcgaattgtgaatcagaaaagctatattacgaatcgtgaatcgaatcatatatgaatcg

SEQ ID NO: 459 - DNA, 456 bp, Glycine max
  unsure at all n locations
tgtcaaataaatcactgcatattgtgcagtccctatcatccttcagaggaatgtagaagagagtaggcttgcaaacaaggttccaatttggataaaagtgtaaaactacttattaattagaattttatgaatcattgtttggaatattgaagaaaaaagacaacctgacaaccagctgccctgaaggaactaaaatcatggcatccaacaagaactctgcatgcttcctgcatggatatcatcaataacttgaatagctgcaagattgagaatctagtaagtataaggagctgttaactaacttgcatagctggaagactaagctcctcaggtacatgccatgctcgatctttctcgaaggttgacaaaggctctggcccagaaagcaaccgatagaagtatctgaatagtagttccaaataactatcaattactgcanatggtcataaacaaaac

SEQ ID NO: 460 - DNA, 470 bp, Glycine max
  unsure at all n locations
tcagaccaaagcaactcanaatctaggtatctaaaacccctcaatttagtggattttcaaggtttgagaagtgaaaatgagaatggggtaaacttggagcaaactctcatctcaaacaagtctatatcatcaatctaaactcgctcaaactggttttacgacgaaaactctaccgaatcaaaatttgactcctcaacacccaattttaccctagaaatggctcttgttttcactttggtcactcatattcctcatttgcacagtctaagctttctcataagtcctaaatgacatttcaaactaggattaactccctttaacctccaaataccactaaatccagatttggccttccaactctcaagcctcactctttttccactcataacaccacattctcactntctaaccctaggttaactctacccttcatctctagcagttgtccataagcaatttcagcacataaa

SEQ ID NO: 461 - DNA, 248 bp, Glycine max
  unsure at all n locations
tctacttatgtggcagggcgggcttnctttactttctgtctcaacgcgagctttgaacactgttcttccttcccgcgatgcttcttttcatgtccgcctgagtgggcttatagcctaaaccatacttcccacgatttccttgggtatttatcacgctagttatgccgccattgtctttgcctaaacccatcccgggttcataaccgttccccaacataactcgggccatcattaccgctgcgtcggac

SEQ ID NO: 462 - DNA, 216 bp, Glycine max
taataaaaatattatttaaaatcattaattgagtattatgaattaatataattgttaaaaaattatagagtattagaagacaacatttgtattaaaagcgactctattatattgtagataaggtcaaagctgttattgtgaggttcgtatatattgttaggaagttataaatttattacctcattaagtatatttactatgaaaaaagtgactcta

SEQ ID NO: 463 - DNA, 449 bp, Glycine max
  unsure at all n locations
tctagccaaatggacttaccttgacttaattcctttgatagcccttttgagccttgtttccctttccttgttttgaagctcactacaagccttaagtgaaaaaccatgatatcactatatccttaaggaattttggagctttggaattgttttgggaataagtgtgggggattttgtttcattggataacatgttttgttggccatgcttcattatatattttgagccatacttgatacacattgcatattggttaaatgttggacatgctgaatatgatgttgtttctcaaaaggctacagaaaaaaaaatattataaaaaaaatcgaaaaagaaaaacagtaaagttgagtgaataagaaaagaatgatgagactctnggttctactctnntatgttaaaatntatctttacttctttttattttcttatggtttcttaatatgcac

SEQ ID NO: 464 - DNA, 432 bp, Glycine max
ttcaggataaggatgaaagaaggcaagattgcacgtgtatttgtctgcatcatatgtcatagctagcgataaatcgtagacagtagcgatgaagcgggcaatgtctgttcagaaatatgtcgggttgggacagttgggtctcatttcaggcatttgtcaggctggcttgcgtctcctattctcttcataggaaataattaattcccaattagcaaagaagattaattaattgaatgcttcagaaatttcctttaatcttgagtcacagctttattattattaattatattatttcttctgtctatatattatatatcgctgtaacgcgtatcattcattcatcaaggaatggtatctctcactgttaatagaaaactaccaacagtacagtttcttatctaaccctttgaagtgcggagtacagttcttatc

SEQ ID NO: 465 - DNA, 442 bp, Glycine max
  unsure at all n locations
ngaagtactcaagggatttgcattaggtagttcgagcaatactccttgcagaatatcagatcttgctgcaaattcagaaagactgaagcgactcagcatacatataggaagtggggctgtgatctaagaaggagaggttgaaagcttgagagaactgtcatcacttgagcatctcaaaatatcatggggtgtgtcagacacaaggtacggtgatattccaatcagtttgccttcagagttaaaaatgttgcaacttgaaggctttcctggaaagaattttccagaatggttgaatattcatagtaagctatccagaaaatttatgtcactatctacgatagggggaaaacttgaaagtatggatattctcaaatatgtttaccagtacatggggatcctangtttcaagcatttgattcttgacacaccacnatttggaaac

SEQ ID NO: 466 - DNA, 347 bp, Glycine max
  unsure at all n locations
tgcttggcaactggttactgctgaatcctcttgggctcttttgataagggctagattttttagagggaaccacagagttgctttccacgtttcttcttctatatggtatagnttatgccccttcttagatgttataactgataactctcaatggcaaattggttggtaaaaacattgcgctttggactgacaaatggctctcccaacccctaagtgcatttgttgcatattcctgaatcctatcataccaatttaaattccacagtggcagactatatttataatggtgtgtagcgcattcctcaatctttgcagcaattatatccgactttgatgaatgaaattca

SEQ ID NO: 467 - DNA, 415 bp, Glycine max
  unsure at all n locations
ntataagcgcgggtctgggagacgaaggtcaagtggtcgcgatatacgaagatgatgttccgagtacattggatttggtacgaccatgccctcctaatttccagctgggaaattggcgagtggaggaacgccccggcatttacgcaacgagcataatgtaaacctttacggttttaaaagctctatagttgggcctaggctttagagtttttccttttgttaaggctttgtgtcttttgttttgaatttataatacaaggatctttcttcatctgttcctacgtctctacccattctcattcatttgcatgtttacttctttttctganaatggcagatccgatgacgagtcccctgaaggtactaatacctgggacccgcctatcgacttcgagcaagaaatgagtcaaacgga

SEQ ID NO: 468 - DNA, 329 bp, Glycine max
  unsure at all n locations
ntacagcagaatttagtaatgacccactaacctagaattaaatataacttaatgccattaacctagggaattaaaacaaactaaatggctgagtgtaactgaaattgttggcaaccaaaagtcacccccaacagccaacaagtcagccaccatttggtctcccaaaaggctgatgcctaggttgccaattgggcccttattacaacttgaactaaagcccttttagttgattaacccaaaacatatttttggtcagccaactttacaaggattgggccattatttagacaaactaaacactctaaaantgaaataaagtggtgtcattt

SEQ ID NO: 469 - DNA, 359 bp, Glycine max
  unsure at all n locations
agtcggcacattctggccaattgcatgtctccctttccctttccctctgctcattcgatcagctcttaaatctaagaacatccaagtttgaacgtgaggggtgatcagaaccaaaatggccaatcttagtagtcctggatttaacctctttttggtgtctctcttggttacgttggtccaaatccaaaccaaggtgcaatgctaccagtacaaagttggagatctagattcctgggggatccccatttcaccaagttcacacctctacgacaaatggtccaaatatcacaacctcaggatcggtgattcgcttcgtaagtcctcccttgatgtccattnntttattgagacatgttaat

SEQ ID NO: 470 - DNA, 454 bp, Glycine max
  unsure at all n locations
cttggagtttccaagtgccaattcgtcttcttctttagtccagtcttcttctggcttcaattcatcagtgggctttccttctgtgtccagcatcttgggatgttcccagcctttgatgacagctttccaggttctgctatccagtgatttgagaaaggccaccatccttgctttccagtattcatagttggtcccatccagaattggtggtctgttcactggtccgccttctttctccatgttcatcagaatttatctccctagatctcactcagtgatttcgagtgcctgctctgataccaattgaaattctgatactgnggacagatgtcgtacaggatgtcacgacatcacgcttcagaacatgcagattatatttgacagtgtgaacaaattaaacaagttaataacacaagagaattgtaacccagttcggtgaacctcactacatctg

SEQ ID NO: 471 - DNA, 426 bp, Glycine max
  unsure at all n locations
ggctntgcanaatatatacttcattcagtggaaggatgagaaatactaactctntattcttacaagttagaacatacaagaatgcaatcagatgttcatagaaatatttgctgtaccttctacatcctcaaatacactatctctgattcaataaaactagagaatatcattatacccatctctgaattgataaggaaaaaggagttaagagcttgattaacatcggcctcatttattagcaatttctcgcaatatcaaggatcacgatgaaaccaaaatcgcggccacaatttaaaaccttagcacagatgaaatctcaagtaaacacataacaataagcaaacacctacagcatgattaacatttcaacattcaaagatcctcccatcacaacccacataaaactcatacctcacanaacacatc

SEQ ID NO: 472 - DNA, 453 bp, Glycine max
  unsure at all n locations
gttgaatgcattaaaggtaaacaaaccaaaagcaagaaattgtgtgcatatagagctacagacgtcttggaattgagacatacaaacatttgtgggccatttcatacactttcatggaatggtcaacaatattttatatcattcatagacgattactccagatatgcatacttgtttcttatacatgaaaagtcacaatctttggatgtattcaaaacatttaaagttgaagttgaaaatcaactccacaaaagaataaagtgtgtcagatctaaccatggtggtgaatactatggcagatatgacggttcaggtgaacaacatccggngccttttgccaggtacctagaggaatgtggaatcgtcccacagtacaccatgtcggngtcacctagcatgaatggtgtggctgaaagatgaaatagaactcttaacgatatggtaagaagcatg

SEQ ID NO: 473 - DNA, 432 bp, Glycine max
  unsure at all n locations
ntgagcaaattcaaacgaacaataacttttactcggatgtcagattgagtcccgtaatatatcgaaaagctcgaaattgaatgttgaagctctaagcaaattcaaacgacaaaaactttttactcggatgtctgattgagtcccgtaatatatcgaaaagctcgaatgtgaatgtagaagctctgagcatattcaaacgacaataactttttactcggatgtctgattgagtcccgtaatatatcgagatgctcgaaatggaataccgaagctctgagcaaattcaaacaataataactttntactcggatgtccgattgagtcccgtaatatatctgaacgctcganattgaatgtcgaagctctgagcaaattcaaacgacaataacattttactcggatgtctgattgagtcccgtatatatcttgacg

SEQ ID NO: 474 - DNA, 368 bp, Glycine max
  unsure at all n locations
tccaccggttgtgattgcgagataatattcgtggagggagaataaggaatcgtatgaagacagtacaagtggaggtttcaatctcttctccgtctctctgacttttgggaattctatcggagtagtcggatgaataattgaaagaatttctgggaaccgctagagatgttgttatcgctggctgaagacacgtgagcccgcttagaggtaagggatgagtttatcgcaaatgggattagaatgaacatgtgtanggatccttagagaactaaatttgggttaatttgcgatggttattgaaatataatttctctttatgattataaatataatattaatggggtctatgtaccaatgatgttctgatg

SEQ ID NO: 475 - DNA, 409 bp, Glycine max
  unsure at all n locations
ntgagccaaaatcctgactcaccatanaccttgacccagggtgagaatgtcaatccttaccctcggaagcgaaaagaatagaagggaaatttccaatcaaagaaaaggaaagaaggaagatttccaatcaaagagaaagcaaaaaaagaaaagaaggaaaattcccaatcaaagagtgggagaaagcaaaaagaaaagaaagaaaattcccaatcaaagaatgggagaaagtaaaaaaggaagaagaagaaggaaagatagctcctgatcagggatcgaaagaaaacagaagaaatgtgcagaaaggtctttggaccggacaatatctgaataatacagagttgtcaccaaatgaacaaaaagaaggaaaggaaaccacgacctanaatggtcttctccctttgattac

SEQ ID NO: 476 - DNA, 434 bp, Glycine max
  unsure at all n locations
tgagtgtccacatgggtgcatgcatgatcaattntgtataagtttctaaatcatcgttgttatatacgtgtcatggaaataatgtggggcacttccttttatccctgaaccgctggccaaagcaaataccctgacatacgtcatgtcttgccttctttaaagcctctttgggacaaaacctcaatccttcagccctaagcctcgacccaaggtaggaatttttacccttatcctcgaaaaaaagaagaacaggaggatctaaaaaaaacgagaggaagaaaaagtttcatttacttttaagttatgaatgtgccttacaaggaaaataaaaagagaaaatccccaatcaaagattggaggatagcaaaagaaaaagaaaaagaacaattcccgatcaaagatcggaagaaagcataagaaaaatatacagaaag

SEQ ID NO: 477 - DNA, 426 bp, Glycine max
tgctcgttaagcctgtgctttcttcttgagtggttgcgctaagctcggcttgccgcactaagcgctaatctttctttgtcttaaaaaattgtggaattaggcttagcgagcaggcttcctaagcctattctgcagaaaaaaagattttatgtgttcttgcgctaagagcatggctatcacgcttagcttatgagtaaaatttcataaggcgcactaagtgcatctgctgcgctaagcgcccaatcttaattctagatttattttttgcttttcttttggaataattcttgtctagtcttggcttttgattcttttgtttttcagatggcttcatgaaagaggaagacaacagctgcagtaccccaggccggatatgacatatctagatttacatcccaagaggcatgtgactgctacacatataat

SEQ ID NO: 478 - DNA, 514 bp, Glycine max
  unsure at all n locations
atgtctctgggcccttggacctgtanancctcttttgnncccttgaacccccgcggctatttaaaaaaaccccgccctgacaagaaagcactgtggagatgcttaccacctcttatgactggaaagcgggttctaatgactcctctgcggtctccacataaggcatataggaagggcagctcaccaagatgtcttactcgcctgatacgatgaccagatgcccttncactacaaatatcaacttttggtggagcggagagggaacaactaccactgagtggattcacggacgccccaacagacagctgtagaggaggttaatatccattatttggaaagtcacttgacaggtgggagggcctattcagtctgggagaactattctcttcccaaaccttctcggggtggtctcctggcacaacccacttttgaccatatttgtatgagaacaaagtcgctggtcactctttgggttaacccatgaattgattaatgattgtgaatatatcgagag

SEQ ID NO: 479 - DNA, 456 bp, Glycine max
  unsure at all n locations
ctattacgtgacactatgaaactaagctntaacanatgtcttcacaaataatcatcacacagcagaaacctagcaagactacccatcatatctccccaaaccccatacccacaaaaattaaaggagaaagaagtccacccaaacctgaattttcgaagtcccactcgtagccacgcacttcacgaccccgaaaatgccctcctttcgcgatttggggcagaaatgatggccaaaggttgaagctttgcttggagcttcaatggagaatgaagaagaagaaaatggcaacgtgagagagaaagagagctttctgaaaagtgtgggggctgagtgaagagagagaaaagctttttggttntaaataaatggggtntctctttttctattattntatttaagcaaatgccacatgtctncatttgagtggagcaaaaagggcccacttttccttttgac

SEQ ID NO: 480 - DNA, 519 bp, Glycine max
  unsure at all n locations
tcccaccgttttttgaagcatgctattaggacctatgaaactaagctgtgcttanaggaaaacttanataaagataactntcatttcacatgttaggtgtagctggtgtattcggcggctcctgtataaggataaggggcgaaaagtaatcaaatagaaattaaactaagaaggcaaagtgtgaatgtgttaaattgtcaataatctcacttcaaccattcaacacagatacataagattatttcagcctaatcgataatttttaatttaaatataagtatataattgtattaaatattcaaaaagaaaattttgttacacaatcatattacaatcaaataaaattgtgtctccgggtagagatacatatagtccctactcaaaaaatcccatttcaaaagtaaataaggcaaattactaatgttgaaaagttttgtaatcatgaaatatgtcgcttccttactagacctgacaggtcatttaatatattattatcaagnattgtttacgcctatgaga

SEQ ID NO: 481 - DNA, 245 bp, Glycine max
  unsure at all n locations
tgagctgcanatgttgcctcaccatctgtcaactgtcacctgtacaactctggcacgtgcccaagtgaaatgcacatgtgccttatctgtaactacacatggcttctttaacgtcatcacgagaaagagcatgtacgtgtagggcttcccaattaacaatggaagatgtaggaggcatgacatataatccantgtgtgatggagggagaggggttgggaaagaaatgaggggtggtggtaggggg

SEQ ID NO: 482 - DNA, 451 bp, Glycine max
  unsure at all n locations
ctgcccatttaagttttgccagcgaanaaatcgaagtgggtctgagaagaggcaaatttgattatcctgctttgatgaataggaagcttggggcaaatggagagaataagaaggagggaaaatcagtccttctcattacccaccaccctaccagccatgaacgcctaatcatccacaaaggccatccccaaatcagccaaaaatccacccgatgcacatccaagaccaaataccacccctaataccaatcaaaacaccaactagggaaggaattttccagaaaagaagcctgtagaattcaccccaattccaatgccatatgttgacttactcccctacctgctcgacaatgcaatggtagttataagcccaacaaaaatttctcaacctctgtttcccagaggatacaaccncaacgtgacatgttcttatcatggggganngtttgggc

SEQ ID NO: 483 - DNA, 449 bp, Glycine max
  unsure at all n locations
tctataaaaggttcgttcctaatttctctacaattgcatcacctctcaatgagctggtgaagaagaatgtggcatttacctgnggtgaaaaacaagagcaagcctttgctttgctccaagaaaagcttactaaggcacctgttctagctcttcctgatttttctaaaacttttgataatattagggacttgtatgctttagatgaacatttctctcccatttacgaaagttgtgggaaaaaggcccaaaatggattctatttggctaaggggtatttgttcaaagagggaaagctttgcataccccaaggatccattaggaaattacttgttaaagatagccatgagggtgggctcatgggccactttgggatagacaagacgctcgtcttactcaaagaanagttttattggccccatatgaagaaaaatgtccttaagcattgcact

SEQ ID NO: 484 - DNA, 405 bp, Glycine max
  unsure at all n locations
actctcttatcgaatggtgtgccacaataacatcaacatcgatttgatgattgcatgctcccttttctgatcttataggcacgttacagggacgaaatcattatttaaatatttaagtgcccaaagattttgattntaagagcaaaataaaataaaaaaaatactgaatcatgtggagtttattgaacttcatatgcccgagtagagtgtcatgcatgttaatttaaactgaatcaaactaaactgtacctttcacattagtaatgtaattagtaagactagaagcatcttaatgaggtggcagaatntaattaattatttagaaacatcctaatgaggtggcagaatttaattaattatttgatttcaatatttttcatactaatttcttctnctttatccctt

SEQ ID NO: 485 - DNA, 398 bp, Glycine max
  unsure at all n locations
tgaagagagttcttccatgccagcacgcgcccaacgtgtatgtagctcgctaagcgagatggttgtctcttctgcgctaagcgcgagattgccgctaagccaaatctcacttactcgcacttagcgcgagaatggcattaaacgcgccttcatggacaggaagccctttcttaagcctgacttacagaaaatgaaggggagggctggaagagagcgctgaatagccgtcagagtttgaagagtgaaatacacaaaggcaaataacagagcanaggagccaagttttgatcttttaggaagatttgtgagtctttgagtgattgtgagattcctagaggtggaggagacatcctcactccttttgtagcaagcaatntctcttaattcctcttctttca

SEQ ID NO: 486 - DNA, 382 bp, Glycine max
  unsure at all n locations
tcattgatcaattctgaagttcacaattgtcataagttcatgaaaggagcaaaatgttggatcaagtggcctcagaataattaagaaggggggttgaattaattattaatgagcctttactaatcaaaaacttatccttcttaatgttactagattcaattaggcttttactactaagttaagaaagtaaagaacagaaatagaaacttaatcaaatgtaaaagcaataattaaagtgcacagcggaaattaaagagtatagggaagaacaagacaaacgcaagaattntatactggttcggcaaaactcatgcctacatccaatccccaagcaacctgcggttcttgagatttctttcaaccttgtaaaatcctttacaag

SEQ ID NO: 487 - DNA, 399 bp, Glycine max
  unsure at all n locations
nttggtcttagaattaatcatcaaaagtctcatttcattgtgtctaagaatattccgagaaggaaaactcanaaatttgctatattttgggtttccaatatatactcatgatattggtaaatatttgggtttacctataattagtggaagagttaaaaaaaaccacttctcgtttattctggataaagtaaatgatcgctgagctggttggaaatcgaagcttctcaatagacttggtcgggttacactttgcaaatatgtcctcaattttatccttacatatgtcatgcaaaacatgtggctccttcaaggcatttgtgattcccttgatattgctactagacaattcatctgcggatcaacttcatctcattgggtgagttggaagactnatcattc

SEQ ID NO: 488 - DNA, 396 bp, Glycine max
  unsure at all n locations
tcttggcaatcctcattccagcgatcagtttggttnttgcgtaagagtttgaacaacggctcacaaatggcggtgagctgcgatatgaatctggcaatataattcaagcgtcccaggaaacctcggacttgcctctctgtacggngttctggcatctcaaggatagccttcaccttttcggggtctacctctatccctttctggcttacaacgaaaccaagcaatttccctgatttgaccccaaaggtacacttagcggggttcaaccttaattgatatttcttaagcctttcgaacaacttccgctggttgacaaggtgttcttcctcggatttagatttagcaattatgtcgtccacgtagacctcgatctcttgatgcatcatatcatggaac

SEQ ID NO: 489 - DNA, 383 bp, Glycine max
  unsure at all n locations
tcatggtgaatcaaaggtgattcanaggtgttttgatgataacaatgatgataacaaaagatgatgacaaaggtgatgacaaaaagctcaaagatcaatcaagaacaattcaagagttcaagataagaatcaagaagaattcaagactcaataagaaagtctagagacaagaatcaagattcaaggttcaagatctcaagaatcaagaacaagattcaagactcaagattcaagaatgaagagaagactcaatcaagataagtattaaaaagtttttcaaaactttgaatagcacatgagtttttgacaaaaacttttaccagagtttttactctctggtaatcgattaccatatagttgtaatcgattaccagtagcaaaat

SEQ ID NO: 490 - DNA, 346 bp, Glycine max
tctacttatgtggtagggcgggcttccttcactttcttgtctccaacgcgagctttgaccactgttcttccttcccgcgatgcttcttttcatgtccgcctgagtgggcttatagcctaaaccatacttcccacgatttccttgggtatttatcaggctagttatgccgccgttgtctttgcctaaacccatcccgggttcataaccgttccccaacataactcgggccatcattactgctgcaacggacagacaaggttgcccagagagggagtccacggaggaaatgctgaccacctcataagactggaaagcgggttctaacgattcttctgcggcttccaca

SEQ ID NO: 491 - DNA, 391 bp, Glycine max
  unsure at all n locations
tgaaggtaaaaggtttacacagtttcatgttaaaagttactgacatcctgctgctaatagacattagacgtagctntactcttagtaagaatattagaacaacacagcaaacaaaacactttctatgcattgagcaaatgtattcaaaaaataattatggattagaactaagttttcacaaatcttaagcaagcatcagtaacatctttacctgcagcactagaaagaacccaattgtcatcataaggaacttgccacacagcatagccaagtaacttattttcccttgcataagaaaccttcattntgacaacctcaacatcatcataacctatccaagtcgatccattggagaagtaattaactacataagtagcattgtacttgacat

SEQ ID NO: 492 - DNA, 454 bp, Glycine max
  unsure at all n locations
ctcagcttanatatgttttccctcanatgannactaatttagttntaacccatcaattaaaaatttgctttctacaaatcctcaaattcactttgaggcactgaaatcaacagtttacgaatttgagtgatttaaaacataaattatgctcatgtaacctttcatgaataaagactaaattattcattcaaaaagaataaatactgaaacagtatgaagttaatgaattcattgactaagtaaatatagaaggacaaattaaatacaaaaattatattatatgcaagtaatcttttaattttaatataaaattaattagcacacactatcacttttgaaaatgatatatatatatatatatatatatatatatattaattctaacattagtattcgtatagtatacacggattgttaataataacaagtgaacaacaataacagtaataataaa

SEQ ID NO: 493 - DNA, 386 bp, Glycine max
tgcacttcaggacgtgcaatgctggtaaagaattgtggcactgaactacttgagttgtcctcaagggtaaccctttgttggtgttcatcatccatggtaatggcctctggtaagtttgaagctgattcccttgataatggtgagtcagatgatgaagaatcagaaaaatgagtttcttcctcaagaatggatgctactgtcctgtcttgcagtaattttcttctccttttggctctgttccttcttaatgtagcttcaatctccaagtccaaaggaactaaattgcctgtgggagatctatgcatttaaaacactaacagaaacaacagttatccagttcaagaggaaaaaaaatatgaattaaaagcaaatattcacagttaatc

SEQ ID NO: 494 - DNA, 443 bp, Glycine max
  unsure at all n locations
tagccgaattcatattgaattgaagttagcttagctcaaccttggccagcttagtggaccaaatcaaccttatgcaagggttgggcgctaagcacttgagactcacaacttagcgcatgaaccgagatgcgcttagcgtaaggcttgcgcttagcgaaaggactatttttcagagaaaagttttctgttatttttcagtcctttttccaagaaattgaaacctttatgttaaacattcaaagataggttgatatactcctatgtacagatccgacagcaagttccaaatgattaaatgcatgaaaaacaaagataacaaaatttaaaactgggttgcctcccaggaagcgcttctttaacgttattagcttgacgctnttaccttactggatgatcttatgttttggttcttactttcagaacctcttgacctccttccatta

SEQ ID NO: 495 - DNA, 369 bp, Glycine max
  unsure at all n locations
nttagcttctctaggaatcttctcaaggaagtttctcaaggaagcttcttaatgaggtgagcttagttattaggtgtgtgtagctaagtctagcttctcaaggaagcttctcaaagaagcttctcaaggaagtttcttaaggaagcttctcaaggaagtttctcatggaagtttctcaagaaattttctcaaggatgctacctaggctataaataaaagcatgtgtaacacttgttgcaactttgatgaatgagagtcttgtgagacacacttcaaagttcaacttctctccctcttttacaccttcaatttcatgctcccccctctctctttctctctctctttctttttctccattgaagcttccta

SEQ ID NO: 496 - DNA, 372 bp, Glycine max
  unsure at all n locations
nggatgaagttcgaaatctcttccttcttcatctctaaatttcatccaccaccacttgcatcaccaaggagagctccaaaactgtgctttcctcaagctcttactctactttctcttaaactctctactatgagtgtttttaagtgtgttaaacccaaataatccttgtggtatttatagggtaaatgtgaggcataggtagtaaataagaccaatgagtgttaaggatcatataggtctttaggttacaaattaattgttcttatcttttaattntatttttttcttttcttttattaattagatattctagatgcttcatgggttattagagtagagattggaatgtatgtatacatgattttgatgatg

SEQ ID NO: 497 - DNA, 387 bp, Glycine max
  unsure at all n locations
tttcgcanagcttacggtaaaatctaggacatagccatggcaaaggtctacacagaggccattgcctccctcgcccagtattatgactagctgttgaggtgcttcacctttggggacttccagctatcacccatggtggaagaatttgaagagatcctaggatgccctctatggggaaggaagccatacctcttctcaggattctatccctctttagctagaatttctaagatagtccaaatctcggcgtaggaattagaccacagaaagcaagtcgaaaatggggtggttggagtaccgagaaaatgtttagaggcaaaagcaagaatcttggcaggtagaggcaaatgggccccgttcatagacatcctcgcacttttgatcttc

SEQ ID NO: 498 - DNA, 446 bp, Glycine max
  unsure at all n locations
tcagcatcttaaacagaggctaaaaatctgaagtaaagacaacatatgagacctgtgcagcatagtcaaacagcttcaatagaaactaaatgacttggagaattctatgccagttcaaccttctgaacaacaagtgaaggacctcaagaaaacccaagctgacctttgggaaaaagctactatgcaggagtctattgtgaggcagaaatcaagatgtagacggatcatagagggggacagcaacacatcctattttcatagagttattaatttgaggaggaagagaaatgctctgagggggttgcagattggtgacacctgtgtggaaaatcctaacattatanaagctgaaacctttcatcattttagaacaggttcaatgagcctcacttgaccagacctaacttggatgggggtttcatttaaagtctgacttattctcacag

SEQ ID NO: 499 - DNA, 402 bp, Glycine max
  unsure at all n locations
tcaacatgaagcaatcagctcgcctgggcaagcatgttgcttctaaactaagccaccagcttgccgggtgagctgggcggcaagatcctcccctattttggctataaaagggtgtgggaggctaaggggaaggggttcagcacccttggtcacttgcagcagacaaggaaagtgtcgttgacactgtatgcaaaaagtacgacattggcaatgagaagtgggctcaattttgtcagacccgcagagacccttcgtgggaggcaacgtttttattttcattgttntaaactctaaattcacttagtataatacattgtaatgataactttcaataatggttaacttttacaggatatgcgaaaaaaggcataagccatctaaaaacaaaacactgtccctcac

SEQ ID NO: 500 - DNA, 449 bp, Glycine max
  unsure at all n locations
tgcttgtggngcttctatggaggctggatctttgagcttcaatgaggtccttcaatggtgattttcgaccatggagatgtagcagaaggcaaaggagaagaggagagaggaggcaccatccacaagggaataagccaaggaagaaggagcttcgccaccaagatgagcattggataagaagcttggagatgatgcttcaatggaggaaaagaaagagggagagaaagagagagtgaggagcacgaaattgaaggaagaaaaagggagagaagttgaactttgagttgtgtttcacaagactctcatccatcaaagttacaacaagtgttacacatgtttctatttatagactangtagcttccttgagaagctntcttgagaaaacttccttgagaagcttctttgagaaaacttccttgagaagctagagcttagctacacacacccc

SEQ ID NO: 501 - DNA, 373 bp, Glycine max
tgagtttaacgatgacaaatattcaagaagcaaacattaagttatccgaaccaagctatctagtattgattgctttaggtgttctttataacatacgactaaacttataagaatggggaagatgtggagcagtagcctatggtagaaattttccagacatagattctgcgtaatcaaaagcaaaactactagaaagagagtggtcctaatttagatggaaaggaacacacgttttatgagtgaaactgaaaatataacaagctatatatgatcagaagcatgatgttaggtatctttggtaaagggacatatattagaagctacgcatgactaagggatcatccaaagtattctaattcaaaagtcatgagaa

SEQ ID NO: 502 - DNA, 320 bp, Glycine max
  unsure at all n locations
ntngagatcaaactntaccactggtaatcgattacaggaaactggtaatcgattaccagagagtaaatactctggtaacttagaaaaatttggaaaaacttttcttgtaaaacaaaattgtgctatgtttggtttttgaaaaatctttttcaatacttcccttgcgaagtcttgacttggtgctttttggtttcttctcttgaatcttgaatcttcttgatgacttttctttaatcttgatcttgaacttgttgactcaatcatgacattattcttttggcatttttgaaatcatcaaaactacttgaattattcttgat

SEQ ID NO: 503 - DNA, 430 bp, Glycine max
  unsure at all n locations
tgggtggtaaaaananaaatataagaaaaaggtgtatgtgtattttgggaggagccctgccgattcctaaatcctcttttcagaggaaaacgttaaagaaatgctactggaataagataagataaaaaatggagatgagagcatgctccactgattagattctgtaagcgttagctactaaacttcatcaacaacatggtaagtaattatggcaacagtgatcgaaccaaaggaatatgcagacaagatagatagagagaaagggaaaaaaagtcaagttaagtgagtgtcatcgttgaaaatcaatatagatgccagggacggctctgtaaattcagtagcccaccttacaaataagtgccctaattatctgaacactcttctcaaataatacattcacaaattaaacagttccattagtaaaaatatg

SEQ ID NO: 504 - DNA, 463 bp, Glycine max
  unsure at all n locations
tattggccgttggatgaaactccacacagtgcagttctatgttcacttgtagaggatctgaatcccagtttaccagttggttgttgccgttaaccaacaaatcttattttatgttctctntaatatttctttntaattgaagatgcttcttttacccacagaaattgtatatttttcatgcaagtataacagttaaatgaatagtagttagtttaattgtatttcgaatttttttttataattaaattataagtgattttttagtttctatggaaaaaattaagttggttaagttttttattttaaaaattaactaaatttattcattntgtcaaattnttacttaaaaattntcaaatttttaattttatctacatatttaggagtttatgaataaattgagttagaaaataattntaaaaattatangtaactttattagaaaaattagtaaatattaatg

SEQ ID NO: 505 - DNA, 406 bp, Glycine max
  unsure at all n locations
tcttcacctttgctcagagctggtaattgaacttattctaaaattntgtcccttggtccaaaattatgggtgaattttcattagattattttttcgcttcacataaaatgattctttgatcatgtgagaagagaatgaagcctcagttaggacagttgattaaattaagaatagactaataattacaggtagaggaagaccaagaaagactttggattctgctattattagaattggtttagatttaaatggcttctatgaaaaatgaaaaattgttttttaacagaatacaatggcattgtttgattgatataggttgtagatgacctcagtgggaaaaaaaactntggttatcactgctatgtataaatcattgatattatttggtagcaactcttatggtaaa

SEQ ID NO: 506 - DNA, 460 bp, Glycine max
  unsure at all n locations
tagcccctaacgaaagatgaaccgtgtcaagttgtacactatgtggagatcattgtaggagtagaagggtccgaggagttagagttggacctgagaaccaatgacgacaatcgggttaaaccaattgaagaaacatgtaactttcagctcgacattaaagaggaataggttacttgacttgggaaccaactctcaatggaatataagaatgacttacaacaaattatctgagcacatgccgacctgtttgcatggttcgaggtcaacatgctaggcatagatccgaccttccattgccataaattatccataatttaagatgccaaattatatctcagaggaagagaaagattgngaaagaaaggtgttaggtagtgcggcaagaggtttccaaactggtggcctaattatcanagaggtagagtacaccacatggctatcanatctattcctagtaaaa

SEQ ID NO: 507 - DNA, 459 bp, Glycine max
  unsure at all n locations
ggcagtanaaacaacatttgttttcaattgttatgtcaattctctgtaatatacaaagttatcattggttcatttgatgttggtgaattggaagtagaataaacacaactacagatgttattttactttgtaattatatatactagattttcaagacattcaagctttcaatgccgtcatttcctctgcacctactccttcgatttcacaacagtgtcagtagaaatgatgctaaacccggctcgtatttcctttccttatgatcttttgccccaacaatccattctcatactgagggtgaaaaatatccttaacagcatgcccatgattttatttttcctgcaagtttgtcacaacattaacaaagtagtaccttattattcattatggtgggcctacctaattcagtatggaatcaaccatagagatagatagtgaagtgggaaaacagcaagataa

SEQ ID NO: 508 - DNA, 413 bp, Glycine max
  unsure at all n locations
tgatatctcggcccaatctttcagttaaaatactccaaatcattattgtttctaccttctagtatatttcttgttggtagtgtattggaatctgaattctcagcttcacaatgactaaacttttttcttgtattgacagagcaatgaggatattaaccacacgcttgtctgtgccaagcttgaactgatagcagcataaatggaagccaatgctaagataaagaaatatgaggagacagttaaacacttgtataaacttttaaagaaagtttgccaggaaagagatgaagcaagagaccagcttcaattgataaggaatttccaagcatctactccagctgagacaagcagtactggtccacaagttgatcatcatgcatgcctncaataccaaacaaagccatcattgaata

SEQ ID NO: 509 - DNA, 363 bp, Glycine max
  unsure at all n locations
tattggaatcagccaattgctcagtgactgttcttaattctgtcatcttgaaggtgtatagttgttgcttcaagcataaccgatttgcaagagactttgtcatatacaaggattccagtttcaaccacattgaggttggtgtcctttctcttgcaacttctcttatagctttatttccaaggcatagtatgattgcacttctggctctatccatcatttcttatttctcctttgaacttagagattcagacatcctttcttcttctttaagagcttctacacagccatgctgaatcaagattgcttncatcttgatcctccataacccgaagtcattttccctgagaactctcatatcatact

SEQ ID NO: 510 - DNA, 418 bp, Glycine max
  unsure at all n locations
tgattaccctggtgacactntacttccaggaatgaaaattggagtgaacttcaaaaccggtcaacatcgagctctaagatcatggagatcctttacggatcctactccaggtaatttttcacttggtgttgatactcgtggccttcctcaattagttattacaaatgagaatactaatagtaatgacatagcttatagaccagggtcatggaatggtcttagtatcacggngcttcctggagaaataactgaccaattaacaaaatccctttttgttatgaatcaagatgaggtcttctatgagattcagctcttgaatagttcaactaaactcatgagaagcagaatgcttccagaagggtatcaagtacgttttatatggtcagatgaaaaaaaatatgggattctcaaattccta

SEQ ID NO: 511 - DNA, 435 bp, Glycine max
  unsure at all n locations
tagaagcaaatgctggcatggtatcgcagattcgtgtagcaagaccacctgctgaaggacggngaaggaatcaattgcttccacgttattggcctaggattactgatcaagagttgcaacaaatatcaggagagtatccaacattgtaatctgtcctataaattattatgaatcactgacaggatacttactggttgatacacttattattattttgatagctaatctttaccttagtatttccttaaccatgattcatgatatgttcaagttcaaattctacaatcgtgccactctttgaaaagatgcttagtgcaagtgatgctggtcgaattggtcgcttggttttaccaaaagcatgtgctgaagtaatttatcttaactcatctgttgaactggcatttactgttgtcattttatattaactaacaattc

SEQ ID NO: 512 - DNA, 395 bp, Glycine max
  unsure at all n locations
tgtgaatntatagtgtttggtgactaattgtcacaaaaaagcaaagtaaagcccaaagaagcaaaattaaagatctaaaattactcgctcagcatttctcaggtgctcagcgcaacgcagatgcttagcggacaacgcacgcttaacgccagaaagtatgaagacgtctgaatcatgaatatgtgcttagcgcgagtcactcgctaagcgcgagattactatcatactcgctaagcatgaaattgcacttagcgtgaaggttacgtaaaaatcaaactgaactacacctataaaagaaggagagagaaaaagaaaaaaaatacacttaaaattcaagagaatacaattccttacagaaggcaaaggtcgaaagcaggagaagcaaccattcggag

SEQ ID NO: 513 - DNA, 412 bp, Glycine max
  unsure at all n locations
tggtaaagaaaatgatggcatgacttttatccaatcttattatgttgaaaagctattgaagaagtttaattattttgatgcgaaacatgctcttactccttatgactcatccatcaagttaaagaaaaatttgagtaaatgaatttctttacataaatattctcaaagtatcggttctttgttgcatttgacaaacttctctatgcctgtctgatattgcacatgcagttggtagattggaaagtaattgagggatttagtgatataaaattgaagttctgattntgatgaaataaaaatgagaagtggttatgtctttgctttagctagttgtgcagtatcatgaaaatctactagacaagttattatttcacatganagcaaaaattattgctttaaatactgctactag

SEQ ID NO: 514 - DNA, 320 bp, Glycine max
  unsure at all n locations
cttgtgtgggacacccattgtgagtgtagtttccaaacccttatagaaaagttgacgatgactcctgtgttagttttgcttaacccaagagaaccctttgaggtgtattgtgatgcatcaaagatgggtttaggaggagtgttgatgcaaaatggacaagtagtggtttatgcttctagacaactcaagactcatgagaggaattatcctacccatgatctggagttagctgctgtnagttttgctcttaacgcgtggaggcattacctattcgactccagtttgaagtgtttagcgatcataaaagccttaagtatttg

SEQ ID NO: 515 - DNA, 371 bp, Glycine max
  unsure at all n locations
taggaacccanacttgtagcttcaatgcaaggaaacgtgcttatggctaggaatccaaaaatttggttttagaattagaaaagaatgaaaatagggacttgtttgtaagaatttgggctgccccatgattggtactttgcacctaaataacatgggaaatgattttcaatgctgtgtagatatatgtgtaaatatgaagggcatgaaattctttgcaaaggatgaaggaatattgaggtcacttcctaaatgaatgtatgatagcatgggattcccttttgaatgcaagtatgtgcataatgttaaatatcttgccaataggcataagtgtgagtgaaacaatgaaaagttgtatggtatatatatcttga

SEQ ID NO: 516 - DNA, 455 bp, Glycine max
tagccccctaacgaaagatgaaccgtgtcaagttgtacactatgtggagatcattgtaggagtagaagggtccgaggagttagagttggacctgagaaccaatgacgacaatcgggttaaaccaattgaagaaacatgtaactttcagctcgacattaaagaggaataggttacttgacttgggaaccaactctcaatggaatataagaatgacttacaacaaattatctgagcacatgccgacctgtttgcatggttcgaggtcaacatgctaggcatagatccgaccttccattgccataaattatccataatttaagatgccaaattatatctcagaggaagagaaagattgggaaagaaaggtgttaggtagtgcggcaagaggtttcaaactggtggctaattatcaaagagtagagtcaccacatggtatcaatctattctagaaaaaa

SEQ ID NO: 517 - DNA, 461 bp, Glycine max
tgcttgtggagcttctatggaggctggatctttgatcttcaatgaggtcctttaatggtgattttccaccatggagatgcagcggaagacaaaggagaagaggtaagaggcggcgccatccactatggaataagccttggaagaaggagcttcaccaccaagatgagccttggataagaagcttggagaggatgcttcaatggagagaaagagaggggggggagcacgaaattgaaggaagaaaaagggagagaagttgaactttgagttgtgtctcacaagactctcattcatcaaagttacaacaagtgttacacatgcttctatttatagactaggtagcttccttgagaagctttcttgagaaaacttccttgagaagcttctttgagaaaacttccttgagaagctagagcttagctacacacacccctctaataactaagctcaccttcttgata

SEQ ID NO: 518 - DNA, 460 bp, Glycine max
  unsure at all n locations
tggagaggatgcttcaatggagganaagannaaaggagagaaagagagaggggggaggacgaaattgaaggaagaaaaagggagagaagttgaactttgagttgtgtctcacaagactctcattcatcaaagttacaacaagtgttacacatgcttctatttatagactaggtagctttcttgagaagctttcttgagaaaacttccttgagaagcttctttgagaaaacttccttgagaagcttctttgagaaaacttccttgagaagctagagcttagctacacacacccctctcataactaagctcacctccttgagaagcttccttaagaagattcttaaagaagctagagcttagctacacatacctctctaatagctaagctcacctccttgagatgagaagctagagcttagctacacaccccgtataatagctaagctcacatgaaaataac

SEQ ID NO: 519 - DNA, 405 bp, Glycine max
  unsure at all n locations
ntgagccaaaatcctgactcaccataaaccttgacccagggtgagaatgtcaatccttaccctcggaagcaaaaaaagaatagaggggaaatttccaatcaaagaaaaagagaaggaaaatttccaatgaaagcaaaaaaagaaaagaaggaaaattccccaatcaaagagtgggagaaagcaaaaaaagaaaagaaggaaaattccccaatcaaagagtgggagaaagcaaaaagaaaagaaaggaaaattcccaatcaaagaatgagagaaagtaaaaaaggaagaagaagaaggaaagaaagctcctgatcagggatcgaaggaaaaacagaagaaatgtgcagagaggtctttggaccggacaatatatgaacaatacagaattgtcaccaaatgaacaaa

SEQ ID NO: 520 - DNA, 452 bp, Glycine max
  unsure at all n locations
acaattatctaatcattccaatccactcaaatcatacagttgctcattcaaatcattctcaaacactcatttcatacaaaacaatccactgcatatcgttttcaatcagttctctgttcaaacaagcttttttgtacatgcaaacaactcatagtactaaaatttaaagaacggaaacataaaaactgaaatttaaatgactgaacataaatcataaaataattcaagtaaactaaaatgttcaaaatgcacaaatttaaatgtcctgcttctgtggttgctcttgtgcatgcttattaagatccaacacctgagcaactggtaaatcctgagaggtaggtttctctaactcacatgttggtgaagatggtatggcatcatcaggtataggtgctggggatggctctgggatctggtctgtggaagtctncttctcttgagccatgtgtaca

SEQ ID NO: 521 - DNA, 391 bp, Glycine max
tcattctctatcttgagactcttgtgttattaattactgtataaaccttagggttttctcattcctatcttctgcaaattctcctacaaggctagaaatatttctgagcaaatataccagattttgattttgattcttttagcatgcaactctatattaatgctgctgcattgtaatgatcacatttgcaacttactaaaatgcggcgcagcttaagcatttgaatgctttttgaatcactgtatttggcgtatttggtttggccgttagccaattcaatgcgtggatatatatcgcacacctacaccggagatatatatcagttatggctttgtgttcaagttttctcaatcttcatcttctggtttttgtttggttgacgatagaagcg

SEQ ID NO: 522 - DNA, 418 bp, Glycine max
  unsure at all n locations
tcatttgcaattcagtgtaatcagtgccagccatattcgaatgaattggatactttgaaccagtttatgtacaaaagaaaaaaaaagtttaatttttatgtatcaagtatacgaaattttataccatcaaccaattaaaagttatatataattggaataactattataataattatcataaaaatcaataaatttatcattcatatatttcaataccaatagccactatataattactgcatgctcaatgagaattaaattgacatgtacctctgatcgtatagtgtgtatgaatctgccatctcttctgattgaagtagtgctaaccacgttaagcccttctttaagcagaatgtccaacactcttgacatgggaaacaaacttttcccanagctgtaactgcacataatctcaagt

SEQ ID NO: 523 - DNA, 393 bp, Glycine max
  unsure at all n locations
tcaggctgttcaattgctntaaattgttgcatagaagggcaaaggtctgtgtggtggtcggcagaggagcacaaaccacagagtctggcgacaggtgcagattttttattcatggccagttgggttaccaggttaaccaatgcatctagtttaccttcaagcttcttagtctcacctgatgaattcgtggctacttcatgcactcctctaatgacaatagcatcacttctggcactaaatgtgtgggagtttgaagccatcttcttaattaaatttcttgcttcagcaggggtcatgtctccaagggctccaccactagcagcatctatcatacttctctccatgttgctgagtccttcataaaaatattggagaagaagctgctttgaaatc

SEQ ID NO: 524 - DNA, 392 bp, Glycine max
  unsure at all n locations
tctaaactntaaacaaaaatgaagctaaactntaaacaagaatgaagcttcgataccacttgttagacaagtggcctcagatatcttaagaaggggggttgaattaagatattacaaactattttcccaattaaaattctactttgattttaatgcaagttcaaagttcccttaaagattaatttctaaatgatgattcaaaataaccaaactgaatgtaaaagtaaagcaacaataaataaaagagtttaagggaagagagagtgcaaactcagttttatactggttcggccacacccttgtgcctacgtccagtccccaagcaacccacttgagagttccactaacttgcaaaaaccctttacaagttctgaaccacacaaggacaaccc

SEQ ID NO: 525 - DNA, 209 bp, Glycine max
ggagaatttgtaagacttaattcacccctctcttaagttattgaggtcacttggcgcgcacacagatcaagaataaagctaagtcttactctatctttgttaaaagagtctcttagtgattggaaagaattggcctcacaacattgttcttaaattgattataaaaaggttctagaatacttttaacaatttttggataagacattttt

SEQ ID NO: 526 - DNA, 431 bp, Glycine max
  unsure at all n locations
tgagcatagcagctntgttaattaccttgtgagagtgaacaccaaggccacccaaatccgtaggcaaacaaacctttttccaaaaaacaataacaagttttgatcagttatccctttcccctgtccagatgaagttttgaatccaagagtcaattatgttcaataatgtaatcggccatgcataaatgtgaaacgaataaagcaacaagctctaaataacaaatttgatgagaaagctattgtgtgatcaacgctcttacaaacaaaattatccacactcacaacggatcgtgagaatacaacaaagattataccatagaaaaataataacaaataanaatttaacatgattcgacacatcttgcctatatctacggagctggttcaaaaatattgttttatcatataaataattacaagaatggaattca

SEQ ID NO: 527 - DNA, 330 bp, Glycine max
  unsure at all n locations
tgttgcagacaaaaatctntggctagaatgccgcanaaatggtctacaaaacatccatcggttttcttggcctgaacactgccgcaactacctctcccatgttgagtatggcaggaaccgccactccacatcccgcttggaaattacaccaatgactgaagaatcaataagtgactcattgagagatgtagaagacatttcttttagattctccacagaaggagactccaagcagaatggagagatggacactgcagcaaggcagaagcaaattatggaagcaatcatgtgcagggtctcttccactggcaagtctaatgccagttactt

SEQ ID NO: 528 - DNA, 450 bp, Glycine max
  unsure at all n locations
tatcaaaccatatacaaggatcaggatcccttttatatctaaagtaattatgttcccactgccatcgaacaaattaaaggaatacccaagaaaaaattgtagagcttaagttgatgttactttttcatttgataataagatttatttgttaaattgaatagatacttatggttaatctaatactctttatataacacaaaacccatcaatttgcaggaacttaatgttcctgagcatgatgttgagcagctattggtgtcactgattttggataatagaatccaagggcatattgatcaagtgaaccggttcttagaacgctctgataggtcttgccgttatattttgatttgttaaattaaattcgtcatattcatctttcttttatataaaacataatatntactaacatattcacggtccaggtcgaaaggaatgaagaagtacact

SEQ ID NO: 529 - DNA, 416 bp, Glycine max
  unsure at all n locations
aggatagacaaacagcgctagnccaatcaattgtggggctccaaactcgatggtggaggatgcatgaatgacaagcaattcatggggctccggataagatttgaaggtagaggatagatgaacagcactaggcaatcaattcgtggggctccagacttgatggtggatgatgcatgaatgacaagaaattcatggggctttggataatatttgagggtggaggatagacgaacagcgctaggcaatcaattcgtggggctccagactcgatggtggaggatgcatgaatgacaagcaattcatggngctccggataagatttgttggcaggactgaatggtccaccggtttttttcccaccctaaaggcgaacatgttttatcaaggaanaataaatcattcatgagagcactata

SEQ ID NO: 530 - DNA, 221 bp, Glycine max
gcagaatttagtaatgacccactaacctagaattaatataacttaatgccattaacctagggaattaaaacaaacttaatggctgagtgtaactgaaattgtggcaaccaaaagtcacccccaacagccaacaagtcagccaccatttggtctcccaaaaggctgatgcctaggttgccaattgggcccttattacaactcgaactaaagcccttttagtt

SEQ ID NO: 531 - DNA, 440 bp, Glycine max
  unsure at all n locations
tctgaacattagctagagccaggtcaagaggtgagctcggaatccctgctagaaggtactgttctgatgctaanactatctacttgctccttttaataatatggaagaactttagaatctagttcaatgatcggcgccattatattgaaaaacatgaatgctctctttctttatctctcccttgtatataatctctaataactaatttgccaatatgtatcttgccatttattgatcttttagatttgcattaaattgggtaccacttgcgtgaaagggtatttgggtcttttgtttttgttggtatcttattgctatctaattcgatgctctcataaagaactagtgctccaattgcatcatgtctaactgctattatttatagccattgcgaaacatgaatgctctctttctttatctctcccttgtatataatctct

SEQ ID NO: 532 - DNA, 403 bp, Glycine max
tagacggcaatttcgagcgtctccatatattacgggactcaatcagacatccgagtaaaaagttattgtcgcttgaattggcctacaggttctacattcaatatcgagcgtcccgatatattacgtcactgaatcggacatccgagtaaaaagttattgtcgtttgaatttgctctgagcttcaacattcaatttcgagcgtctcgatatattacgggactcaatcagacatccgagtaaaaagttattgtcgttggaattggctcataagttcaacattcaatttcgagcgtctcgatatattacgggactcaatcagacatcgcgagaaaaagttattgtcgcttgaattggctaaaggttcaacatataatttcgagcgtctcgatatatttcgggactc

SEQ ID NO: 533 - DNA, 448 bp, Glycine max
  unsure at all n locations
tattaagggatcatttgtcctttggagtgttatagctcactttgaactgcctaaagtgcacaagaagtgagatcaaaactaaatgcatgagcatgtcttcgcccagctctagcttaagcgtttaagttttgatgccaagctagacatttccattatgtactcccttatattattcttttccttatacttcggagattcatgatcataaatgttattatctctgccttcttgtttttggcaaagtattgttcaatttcctcaagaaatttctttacattttcaccctcacaaatagagccccgaaacgcttatggaatagaacacttcatggtcataatgcacattctattggaacgatccaatttctcaattttggcctcattagaggttntcgaagtggatcgttcacttactaaaaatagactttcaacatcggttattaatcgat

SEQ ID NO: 534 - DNA, 398 bp, Glycine max
ctgatgcaacatttggagaggttaatgaaacaacgagatgatgcacttcatgagaggttggatcaaatggagaatatagatcataatggagaagaaaggaggagaagagggaataatggtgttcatagacaaaaccgaattgatggtattaaactcaacattcctccctttaaaggaaagaatgatccggaggcctacttgtagtgggagatgaaaatagagcatgttttctcatgcaacaactatgaggaggaccaaaaggtgaagcttgtcgccgcggagttttccgactatgctcttgtgtggtgaaacaagctacaaaaggagagagcaagaaatgaagagccaatggttgatacatgggcggagatgaaaaggatcatgaggaagcggtatgt

SEQ ID NO: 535 - DNA, 405 bp, Glycine max
tcgtatggtctgaaacaggtaaaagggcatggtataaggaaattgacagttattttctaaaaagaaggttttaagaagagtgaaaatgaagtcactttatatgtgaagtgataaaaaaatgaagtgcaactcattgtttccttatatgttgatgatttattttttatatatagggaatcaaattccttaaaccaattcaagaatagtggaaccttggagaatctttatgatagatacaattaatgtataagaaaatgatggagagctaccatgtcgaagatcaatacaataaatataaacaacatttgacagcttctagaaagagaaaacaatcaaaaggcaattggtgtaagtgggttacaaaaccaaagtaattctaatggttcgcgaacaactcactagatg

SEQ ID NO: 536 - DNA, 405 bp, Glycine max
  unsure at all n locations
tcggctntcaatgtcgagcatctcgatatattacgggactcaatcaaacatccgagtaaaaatttattgttgtcagaatttgcactgagcttctgttttcaatttcgagtgtctcgatatattacgagactcaatcggacatctgagttaaaagctattgctctttgtatttgctacgagcttccgatttcaattacgagcgtctcgatacattatgggtctcaatcggacatccgactaaaaagttattgtcgttagaatttactcatagcctttattttaaattntcaacgtgtcgatatattacgggactcaatcggacatccgagtaaaaagttattatcatttgaatttgctcagagcttctgttttcaatttggagtggtgtcgataaatgtgggactc

SEQ ID NO: 537 - DNA, 452 bp, Glycine max
  unsure at all n locations
tgaagagcctcctcaatcaaactgaaaaacctatattcctcaatgaagttagcacccatcttttcataaaacttgatggtgagaatattccaatcaagcataacccacttgacccttttgcaccccatttttagggcttgctttgccaccacagagagcaacattctcccaagccccttcgtcttataacactccctcaagaacaagttctccatgtaaaaccctcgcttctctagaacgagagagaagttcggaaaaaacaagacaaacccaacaatggaaacacctttgagggttnttaaattgtagtttctcgagataactattacttaatgggaataataaatgaataattaataattatggactaaattataattgggttaaattggaagcagttttagagaaaactattatttgattggagtagtnggtataagggtcaatactca

SEQ ID NO: 538 - DNA, 390 bp, Glycine max
  unsure at all n locations
ngaggagacgctgaatcagttgatgcagatatccatgtccaactataggagcacggagtcctccaacaggaacctagagatacaagtgggacaattagccaaacaaatggctgaaagacccactggcaactttagagccaacacagagaagaatccgaagaaggaatgtagggcggtgttgacacgaagccaaatgagagtgcaaggagaagcagagaaagctgaaggagaccagtctgaggaaggaagggcagacaaagaagaagagaaggaggaagaagagaagaatgtcttaatctctatgaccaanatccagctagcccaagaggctagaaagaagaaccaccagccccttctaaggagcctncatatcctttagtactatcgaag

SEQ ID NO: 539 - DNA, 334 bp, Glycine max
  unsure at all n locations
tgttcttgtgtgctctcctccacctagatccttaattgagccagtaaacaagtcaaagcagtttggattgcaattgttgaagatctgatcttatggaaattgttgaagagattgtctgaggcggatgaatttttcgatgaccgtgattttcttgattaatggcactgtaaggtctatgtcttaatagtgacagctttattttattntatttaaaaaaattgtgcatcaatgtctcattgacataggacttttccttgtttgcataaaactcctttacatttacgtagaactctctcgcatttgcataaaatgttagcatatataactattatgt

SEQ ID NO: 540 - DNA, 321 bp, Glycine max
  unsure at all n locations
caagcttaatggatggttgccttctgttntacggttctttgaagggatttcttattatcctagagaaatattggtaggtcaatcccgtccttgatgatttgcggctgttttattcctctcgtttcaggaaaaactaaactatntatatgggtctttttcttttccctcttttattgcatggtttgttaatggatgtacaccaaagatagggaaacaagtctaaagagagtcattgaaaagaaatccctacttccacggatgatctatctttcgattaaaagcgcttcagcatccatcaaggagcatgttgaggtcaatggt

SEQ ID NO: 541 - DNA, 213 bp, Glycine max
  unsure at all n locations
attcattatgcgatataatgtgctgtaacccattactaaccaattcacattattaagtactcgtctggtaatcatgacacttgttggtccaacaaaaatcatttactggtgcaacatacatgattgtcataattgacaacacataatgacatgcatgcgtattanagtttgagcgcgacacacattgactgacttgactacacattctgagtg

SEQ ID NO: 542 - DNA, 394 bp, Glycine max
  unsure at all n locations
caagctttgagccanaatcctgactcaccatanaccttgacccagggtgagaatgccaatccctaccctcggaagcaaaaaaagaatagaggggaaatttccaatcaaagaaaaagagaatgaaaatttccaatgaaagcaaaaaagaaatgaaggaaaattcctcaatcaaagagtgggagaaagcaaaaaaaaggaaaagaaggaaaattccccaatcaaagagtgggagaaagcaaaaagaacagaaaggaatattcccaatcaaagaatgggagacagtataaaaaggaagaagaagaaggaaagaatgctcctgatcaaggatcgaaagaaaccagaagaaatgtgcagagaggtctttggaccatacaatatctgaacagtacagaat

SEQ ID NO: 543 - DNA, 500 bp, Glycine max
  unsure at all n locations
agcttcttgaaccgagtagtaccgtgctatgctactgtgcgcaacatcggaccacttgcttgtgcttgancgactacacattgtcaagatgttgcctgagcaagatgaaagccttggaagaacgaagtgtgcctctgtcgttgtggatgatatcttcagagatacctgagtgaactgtgtctgaggatatcagacacctttggactttcaaggagttgagtcttatactatgnatatgcatatacgtgagaatgaagacaagcatgagtgaccatggctgagagtgtgagaacagaccggttactgcattgtgatcatgtgaaagcatgactcatgagtgttatgcatacaatacaccacatcatagaggcatatctgatatgaaacacatgactatgcatgatgctgctacggtgatgcttcatgccaaacacattcgtatatctctcggtgaagcatgacacagcgtggtcatcgacacagagctcactgtgagaggg

SEQ ID NO: 544 - DNA, 375 bp, Glycine max
  unsure at all n locations
atgaagtaaccagctcgcctgagcgagcaagttactttcggatgaagcaagcagctcgcctgggcgagctactgtgcaacctctacccctcatttcctataaataggcatgaggggggctgaaggaacggtccaacatttgaaatcaagaggattagagagaaatttgcgagaagatggagaaaaaaagaagaaagataaaggttgagacgctttcgtaacgtttctgtgatcgattccgagatcatttttcatcgttcttcgacgggatagtttctattattgaagctatgaattcattctatgcacccttaggggaccatacttgctttacatatcttcatcttcattcttctaccattagngatctttcttt

SEQ ID NO: 545 - DNA, 276 bp, Glycine max
  unsure at all n locations
acaacatcctanatagattatattatattgtagcananattaanaatanntttaaatttaagagagctngataatataaaaataaataagaaaaagaaaaaatagaaatcttactaatactaacagtctctcaataaatattctacaaaaattcttgaagatcttcctaaacatttggaaagtcttgcaaaaacacaattttntntaaaaataaagtacannatttggaanacaagatcactaagaatttggaacttcttaagtccaaagatcgac

SEQ ID NO: 546 - DNA, 428 bp, Glycine max
  unsure at all n locations
atgcaagcttgtatattagacaagtcataagtcatcatgttcatanaacaaatcatttgtctaagtcactggcatctagaagtcctaattctctcgtaatggtgtagaacgaatctttgtgtagtggttctgtgaagatatttgcgagttganttttggtatctacaaattctagaacacagtcaccttttaggacatgatctctaagaagatgatgcctaatttctatgtgctcggttctagagtggaaaactaggttcttagatatatttatggcgcttgtgttgtcacattntatggngatgtggtctaatacaatcctataatcagatagttgttatttcatccacagaatctgtgcacaacaactaccagcagagatgtattctgcttcggttgtggataatgctacaataattttgcttctt

SEQ ID NO: 547 - DNA, 298 bp, Glycine max
  unsure at all n locations
acccagtcaccctcattcagaagtagctctnttcttcctctattgcctntagttgaatacacctttgtttggttctcttattggttcttaaccctctcatgcaacttctttacaaactctgacctagattccccttctttatgtataaaagaagtgactagtgtgaggtgaatgaggtctaacggtgttaggggatngaacccatagacaacctcaaaaggggactgcttggtggttctatgaaccaccctgttgtaggcaaattctacatgaggaagatactcatcccaagacttat

SEQ ID NO: 548 - DNA, 376 bp, Glycine max
  unsure at all n locations
ttcaacaagtgtatgaaatgcatgtacttctttatgatgagaaaccactcttcgtcgctgacatgttgaacactntagctggaaaacacttctttgtgagacagagcaagtctatgcaacaaagttcttcttttgatggtgattgaggaatattagagcttggcttcatttattcttcataagacttggcagatcctactcgaatgtctctacaaaatagatgttagacacaggattaaatgaagtcttaaatgtcaactttaatatcgaatcagatcatgattccatcttgcaatcgtgcgaaatatcagacgtagactctgcgaaacatgatntgataacgcatatgatgcaatcctcctaaagatggacccat

SEQ ID NO: 549 - DNA, 273 bp, Glycine max
  unsure at all n locations
ctgatcaacacatgcacagtggccaaggatgcatgggagaatcctgaaaccactcatgaaggaacctccaaagtgaagatgtccagaatgcaactattggctacaaaattcgaanatctgaagatgaaggaggaagagtgtattcatgacttccacatgaacattcttgaaattgccaatgcttgcactgccttgtgagaaaggatgacagactgaaagctggtgagaaagatcctcagatctttgcctaagagaattgacatganagtcact

SEQ ID NO: 550 - DNA, 339 bp, Glycine max
  unsure at all n locations
gactaccaagggacatcggaagaagatcgctgatgtgccattattttcttcctatttcttaaccctctttgcaccatttaagtattgattaatcttaattgtcaaattaattaagcaattntattatttgggcccattcagctcaatttgatgttttaatctaatttcacgaattaatgaagcattgcgcttgaatccagaaatgggcttggacttgaagagggcagactattntattctacaaaattntatcttatctagactntatcttatctagatatttattagaattgatctcatctagatactatttcatctagatcttatcttatcttatct

SEQ ID NO: 551 - DNA, 322 bp, Glycine max
agtgcacatgggcctgtgtactcgcactaagcctacgatgctcgcttagcacaagtgcctgtattcgcgctgaacgcggcttgagatgtgccttcctcgcgcttagcgtgtgcttctcgatgagcgggctgcgcactgagcagacagttctcactaatcctgatgtaaaaccttaccttttatattggtctatatctacgtctttttatttgtatccctcttttatatctgcgatcatagaaagagaactgtattttaaaataacataataatgctaaaaatactttaaggtagtttatataagaaaactatattacattat

SEQ ID NO: 552 - DNA, 286 bp, Glycine max
  unsure at all n locations
ggagatgaagatgattganaagtactgtatggattgtgtttntcatggcgaatatgtgaatgtatgtatacatgattntgatgatgtcaaaagaagaatcaaacaaggctcatttgattcaagattaatacaagattgtttcaacaaataaagccttgattcaagatttcttcaagatcaagccttgcctcanaatgaaaggtttcaagtcatccaaggcacatgtaatcgattaccattacatgtaattgattaccaaggcacatgtaatcattaccaatacatg

SEQ ID NO: 553 - DNA, 369 bp, Glycine max
  unsure at all n locations
agcttgttcggntgatttctttgataatgttttgctcttttgcttagaaggatttcttattntcctttgactttataatggttctcttgtaccgactaaatttcctcatttatgagggaagaatgcgtctgttttatgtactggttagatgagttcgtgccaagcttgaatgaattcttaagagggtgtgttttcaaagnttatactttactctgtatcctcttggtaatttcagggttcaagtgccatcttcagcgctgatctttttggtgactcaagagancacaacatcgatcttactgctggngaccttatcaatcgattatctttccaggtattctttaccttttactcgaattgggaaattca

SEQ ID NO: 554 - DNA, 526 bp, Glycine max
  unsure at all n locations
aggggnnnnnnnannnccgctgtcatgtnttccatttatttttcanctcggnancanccaagacnnaagcnanatcctcagatggctcntgtaggactagacttataccaacctacaccatgggcacaacatgttgcaatcgaaaactgagtccgcacacccctaacttaagactaagtggcagtgatgcttcatgcaagtgctggggcaacagtacatttaccaatgctaaagtgacgtaactaggcacacaaatggatgatcataccgagagcatacaaacattaagaactgaattaagcattgaacacaggaaacacagtcaactagatgtacaagtaatgacattagactatctacagaaatccccagcaagggtgttcagccagccattacagaaaagctctaacagtgatgagattacaaaacctaggcctntttgcgaaagatgctccacttgctgcctctagagcggtatttcgagataagagtagggcgcgctcttgaatcattgcaaagcatctcn

SEQ ID NO: 555 - DNA, 320 bp, Glycine max
agcttttactcactgttttcatcagatatcatttcccttcacgagataatcgccccttttcagatttcttataatgtcgcaagaatcagcagctccgaattctgtatttcgattctactcttgaagtagtattgacacatgccctttcgtgacaattttactgctatcgccattcttatgctcccataatatgaggctatactatgcttatcttaactccgaacagtgttgcgttatatttatacaaatatataccatttatactcacagtacgtatgtgaggggttaattcctctaactcataagcaccattcgaatag

SEQ ID NO: 556 - DNA, 330 bp, Glycine max
  unsure at all n locations
gctctagccctcgaattgtcaacataacttcgctagagaaactctagcgagtacatcgtgcatatggagaacatctngtanagcccctgcacatagaccaaataaccatcaccaaactatataattatggtggaagtgtggaacaacataaagatggcaagttattaaaatccataaagccttatatcttagcagaaaaactcagaaattagttaagcaaacatgttccacatatattttgattctatggtttattaaataacagaagtggagttnctcttcatgcacagtacacacttcaattatgagacagatgttaagtaatttaag

SEQ ID NO: 557 - DNA, 303 bp, Glycine max
  unsure at all n locations
agctntgttccctttgcttggatgtttgaaattctccaaattagtgacttaaaaaatgttcatacggcgggttttggaggttcacgtgatataccctcttcttattcccaaatgagaggaggccttacttaaaaccttcccagcttcccttccattgctatctcatccatccaaacatatctagctcaatgagaagggatccaggctttcattaactatctagctgttatacaattgttatatgtttcaatgttttttgtgtatttctttccattntcttgcccncaactccacatgtttctc

SEQ ID NO: 558 - DNA, 213 bp, Glycine max
  unsure at all n locations
gcttattattattccaataactntgtgtgcggaacaataaaaataacactcataaacatattaaaaagcatttaacaatgaggaanaaaatgtcatataccaaacaagaagaatagccacaagagaataacaataaaatagtatttattttctaaatctacctncttattacctaattagctcaatctcgcaaaattgaaaatgcacaattga

SEQ ID NO: 559 - DNA, 311 bp, Glycine max
  unsure at all n locations
tgcgctaagccactgctgtcttgcttagtgggatggtctcactaatcgcatggttcaggcttagcgagacaacactntntgaaccttcataattntctcctttttacttgaanatgaagtgaaatttacattaaattgaataggaaggcttctagtgagcacaaatgataactaaactagaaatatttacaatcctaccaaaaaataaccataaattgggagaattatntacattntggacactnttctatacaaaaattagtcgtaaaagacgactaacacatagtcatatatgttggtatgtaagtagt

SEQ ID NO: 560 - DNA, 375 bp, Glycine max
  unsure at all n locations
ttcttaataaactnttaattgggtgcaatatttatgatgataaattatttcttttgaatgatatattatttgtataacttaatanaaaatttatataatttaagaaataaattgtataattaacataaacatatttgataaataaatatatcataataactctcaatatttgtcttacgagaaatataaacatacattcactttctctttcatctcattgtgcaaacatctctctatttatttttcattagactacttatactctattacttatttaatattgagaattaatgtgcgaataactcatgagaattctatataaatatactttatactatgaaaatatatttcaaatacttaccggcttggaaatga

SEQ ID NO: 561 - DNA, 335 bp, Glycine max
  unsure at all n locations
tgtatggagatctgagcacttcttctctctatgtcttcacaatcatctcttaggcggaagttgcagaatcatcatgatgaagatactatattcngcacgttatcgttgatattttggacccttaccttgattgcattgcttaaatatgtattcatactattgtgtgctgatgacaacggtgaacgtatgctgctgataactttattctcttagataattgttcttatacataggttacgatctgtgtgagtgtgagctgagtatgatacttgtgtcatcaggtggaacatttgcctttattcgctgctgtggatgcatgccacgcttaaattact

SEQ ID NO: 562 - DNA, 298 bp, Glycine max
gatctaagaataggaaaacttaattatcctacttggatgaatatgaagcttgaggaacatggatagaataagaatgaaggaagaacccgtgctattgactgtttgtcctacatggacaaatttatcgcctacttaactatgtcaacactcaaccaatattgattcttctcattgcccaccaccctaccagtcaagaacacccaatcatccacaagggccacccctaaatcagccgcacagccctgctgtcggacatacgatatcaaacaccactcttaacacataccattacactaac

SEQ ID NO: 563 - DNA, 270 bp, Glycine max
  unsure at all n locations
cttcattcaacatgtcatatgaacagganagantatacaaattcattaacaatcaagtcacactaaacattacaggacaacataagccaacctaaaatcctagaatgcaaacctaaaaaccagtctctgaattgagcagacctaaaccctaaacatctaacttccaactctggaagcccaagaacaaacttcccaaagatcaaatcccaaacccaacctcagaacccagaaacgtatatctagctacatcatagacaaacagatgacagc

SEQ ID NO: 564 - DNA, 339 bp, Glycine max
  unsure at all n locations
tcaagcttcagactttcgattcggagtaagttcctattcttgagattgattttattatacganagtaaaggtgagggtcaccaccgatatttatgtttgaattggataaagtcattaactggtgtattggactaaaatactattaatatattttgacataacaagttgtacacatgctacaagattatggcagaaattatcctgatagattttttaaagatttatgatagatttatagttcattatatttaatggattatatgtgagaatcaaaacattcgaagtattcctatgaatctgcacgatctgaaagagttttattaattctcttttaacaaa

SEQ ID NO: 565 - DNA, 515 bp, Glycine max
  unsure at all n locations
aggggnccatgacccatatgatangcttagnattnttcaaancattttgcaagaaantctgctangactatatatatgcatttttgtgtatgaaaacaagttatcagatgaagctaggagtaggtggaggggggtttaactagtaattaccgctcttattcacaattaattagccttatatattttttcgggggacggttggtgctggttcgaatcgaatgaaatctctcttctgtagtttgccaaaaatagtttcttgagatcacttttatattttttatttgtaatttcattcttggtgaaccgtgaactacatcaccatcttctatgaataaattacctctaatttatgggcttattttctctctgtctataaaagattaattatgattcttaataaaataaatatttttcttaaagaaataaccactataacattattagatcctttaagaatgtgaagagactttataacttaggcgtatcttagagtgcattatggaatttatccaaag

SEQ ID NO: 566 - DNA, 206 bp, Glycine max
gctagacatgaggaagcgttcaagggtgaaacttcctgcttttattgttgaccacagagtggtacctggagatatgtcgcggaggtcacgagaccttgtcgacgtcaggtggtgtgctattgcccaaaaccaagcttgaccacatcccgacccaacccgggcatagtgggacagtgagaacctgtgatgtacctaagcaggcgagc

SEQ ID NO: 567 - DNA, 314 bp, Glycine max
  unsure at all n locations
ggttgaattaagatatcacatactntntcttnaataanaaatctattttgattntaacccanatcccaagaattctttcanaatgaactcctaaataattatgcannataaacttactgaatagaagcaataagcaataaccaataaaagagtttaagggaataaagaatgcanactcagaattatactggttcgcccacatccttgtgcctaagtccagtccccaagcaacccgcttgagagtncactatcttgcnaaagcccttacagtctgaacacacaggacacccttctttggtcagattgttacacaa

SEQ ID NO: 568 - DNA, 340 bp, Glycine max
  unsure at all n locations
tgtgtcgtctgcatactgcaatatgctgactntgacttcatttctgcccacattgaaaccttgaaacaggttnttatccattgcttctttcnaccagcgcgttggtccttccacaagaatgttaaacaggaacggngatagagggtctccttgtcttaagcctctntggngaataaactcaggtgtaggacttccgttaaccaatatggatatggaagcagactttatgcagccttcaatccaagttacccacctgtcacanaaacccatcctcttcaacaaatatagtacaaactcccaagatactgaatcatangccattntataatctactttgata

SEQ ID NO: 569 - DNA, 240 bp, Glycine max
  unsure at all n locations
caattggaagtgatcatggaggtgaatntcataatgagtcttttgaacacttttgtgaagaacatggaattcaccacaattcttattccccaagaacacctcaacagaatggtgttgtggaaaggaaaaatatatccctataagaaggtgcaagaacccttctaaatgaaacaaggttaccgaagtacttttgggcagatgttgtacatactatntattacaccttgaacagagtactta

SEQ ID NO: 570 - DNA, 351 bp, Glycine max
  unsure at all n locations
tgcacaagactctttaatattgaagagtatccttgtggaaccttcttccgacgaagacactgacaaaaacttatcttctccttcttggacaaggtatgtgcaggctggggcaagtaaattttcttcccatcagaccttggatgcaattgtgatcgtatacccatatcagctagatcttgatgggtattcaagccatccttcgtcttgccttgaatgttaaggagcgtnccaatcacattgtcacaaacatntttcttcacatgcataacatcaatacaatgtctaacgtcaagatcacaccagtacagaagatcaaagaanatagacctcttcttcatatgcaactctgac

SEQ ID NO: 571 - DNA, 421 bp, Glycine max
  unsure at all n locations
agctntgaattctagtaaaaaaaaactcctcatacatattctaatactcatgcatcttttacattcaaaactggaaacttagattcctagccatgagtcatccttttggcactgtagtttagcttctacaaactacccacacactcacaatgtgcacaatttgtttcgcaagctaaattccacaaaatcatccgcaaatgccattgaggcatttcaccgaacacttggtgggcatatgtttaagcatgaaaatcaagggaatgagggcaatgtggcttgccccattatctcagaatgcaccctatgcctaaggccatacnctacaaccccacaattcaacaaaaacaagcaaattcaaggatacatcccttcacgtttgagcaaatatatgcaacttagagcaccaaaatatatcaatgga

SEQ ID NO: 572 - DNA, 232 bp, Glycine max
  unsure at all n locations
atatcagtataactctgatatggcttacgaccggactcagctgcagaacatggttaaaaaggatagcgagtcctttaaagagtacgctcagctgtggagggacctggcagcgcacgtagcccctcccatggtcgaaagggaaatgattaccatgatggtagacaccttgccagtggtttactatgagaaattagtangctacatgcccttcagcttcgcagacttggtattc

SEQ ID NO: 573 - DNA, 317 bp, Glycine max
  unsure at all n locations
atctagaggtatacctaggatctctatcagacactatgctagatggcacaccatgtaatatgacaatctcactaatatacagacaggtcaactnttccaaggaagatatgatattaatgggaataaagtgagcagacttggtcagcctgtcaacaataacccacatagaatcaaaacctcttggggttctaggtagtcctacgacaaaatccatagaaatatatgtccattgtcactgggtatcttcaaggggtgtaactatcctgaagggctctgatatcttatacttatgacagactaaacatgcatacacaaac

SEQ ID NO: 574 - DNA, 180 bp, Glycine max
  unsure at all n locations
agcttgaaaaataaatatttaataaaaatatatttatttaataaaaatattaatttttgtccaaaaaaattattaaactaaaataggtgttaatttaaaantgggctttctgccttaaataagctggaccggccctggaatgaaataatgggaaataaagaaatttggtgaaaagtattc

SEQ ID NO: 575 - DNA, 380 bp, Glycine max
  unsure at all n locations
gctgccactcaagagacatctcacctatatctnntattaaaactatcatgtacatctgtccattattcanaaataacaccatctaagcaaacttaactgagtagagactagtactctccttcttccataccaatatgtcctcctcaatcagaatcaaattaatacttctaaagtcatgaccttntatctaagtaaattattatatntatttctcctaatgatatagagatttctncattcccatcaccacaatcaatntccctccctccggtcacctaaactttgacaccctggctttatggctactacaanggtgtataatctagtatacttcctatatgtgaaaataaaaccacttcacccgaacgtcttgagaaaat

SEQ ID NO: 576 - DNA, 147 bp, Glycine max
  unsure at all n locations
tcaagcttcttctggaccttgaacaagcaatcaactttctctgtcacaaccatgctatgtgctcgcgactggtccctttcttcccttcgcaacttgagctcactattgctaccccatagagctncgagaaatttgttccggccatac

SEQ ID NO: 577 - DNA, 324 bp, Glycine max
  unsure at all n locations
caccggtcacgtgtctactatcattgttataatctctntctctggtttgggggtgctacttgagttgccaagcctctccatctttgngcgtgttctttgaaagatccgtccnccctattgcacacgttctgtagttgcatcctatccgaagacattatactgacactgcctaacgaaggccaccactaggtccttccaagaatggactcgggaaggttccaagttagtgtaccaggtaacagctacccagtaagactttctcaggagaaatgtatcagcagtttctcatcttttgcgtatgcacgcatcttccgacagtacatc

SEQ ID NO: 578 - DNA, 215 bp, Glycine max
  unsure at all n locations
gatccanaatcctgactcaccatanactcttgacccagggtgagaatgtcaatccttatcctcggaagcaaaaaagaaaagaaggaaatttccaatcaaagagaaagcagagaaaaaaaaaaaagagaagataggatattcccaatcaaagagtgggagaaagaaaataaaaggagacgaaagaattttcccaatcaaagaatgcgagaaagtat

SEQ ID NO: 579 - DNA, 270 bp, Glycine max
  unsure at all n locations
ccaaaactcattccgtagatccctcttgtaagactaagtttcaatcttgcttcaatcaagttctaaggcaacagtacatttcccaatgctaaagtcacctaactatgcacacaaatggatgattagaccaaaagcatacaaacattaagcattgaacacaaaaaacataatgaattagatattaagtatttacatcagttgctcattagaaatccncaactagggtgtntagccagccattacagaagagaccctaacaataataagctt

SEQ ID NO: 580 - DNA, 440 bp, Glycine max
  unsure at all n locations
gatgcaagcttgcctctacagaggcatatatacgaanaataatccacacacacttgtacaaataaaaagaataataaatccacagcaacaaccttatctctgtagccgtcaacaccaatgggcgaggtctgtataaccattctctnttccttttcttttcttcaattaccatcaatgtatcattccgggttctgatttttttttgtgttataaatacgaagagaaaaaactagaggaaaacaaagtggaagagaaaaaagcacaggaagaagaaaagaaagaagaagagacaaaacagaggaatcaaaagatggcaagaaatccaacgaggaatctgcgccaccagaaatcgtgcaaggcacaaccttcacaatgcatgaacactttaagcacgatttctgacatcttttttaagntaaggactaaatttgcacacttat

SEQ ID NO: 581 - DNA, 368 bp, Glycine max
  unsure at all n locations
gagggagagacagagagaggttgtagcacgatatttaatgaagannaagggagagaagttgaactttgagttgtgtctcacaagactctcattcatcagagttacaacaagtgttacatatgcttctatatatagactatgtagcttccttgagaagctctcttgagaaaacttccttgagaagcttccttgagaaaacttccttgagaagctagagcttagctacacacacccctctcataactaagctcacctccttgagaagcttccttaagaagattcctagagaagctagagcttaactacacatacctttctaatagctaagctcaccttcttgagatgagacgctagaacttagctacaca

SEQ ID NO: 582 - DNA, 307 bp, Glycine max
  unsure at all n locations
gtcgcaacgtgcccttcgcgggcgagcgatggcgaggctcacgggtgcgctttccaaaggaggaaagatgcgcggagtcgccaccaacgtttatttgtggaaaacgtctgataaaaccgaaggaaactggtcaaaaggaaaattctaagttcgggagttgtatttacgcttgaggaaggtattagcacctcacacgtttgtcccataggacaacagtctattttttagaattgcggaattgtgttatcttaacctttagttctttttatcttttgaggtcaacanaagcggggcttttgctcctaca

SEQ ID NO: 583 - DNA, 361 bp, Glycine max
  unsure at all n locations
tgccggtaaatgtcgccaaggtagatataattagaagccctcgctggtgaattagtgaacccagaatcataagagaatatgaagatggaggaagccgcaggcagtggcaacagtgacggtggcaacaaatggtggtggngagtggccagcgctgctcanatgggaatgngaattcgtaccttcgccaaagggcacggaggcgattcgcgcctcatgcctttcanagccttcgttgtagcttccctcttcgtcagcagcgccgccttcgccttcgttctactcctccaagctaacggcatccacagggtactactgctctcatcttcattcccatttctggtttctaactctctntatgtct

SEQ ID NO: 584 - DNA, 201 bp, Glycine max
  unsure at all n locations
catcatcattgtaactatagctatccattataaaatagcttagacaatctaggtctgctgcttctaaaccttntatttatccttgaagcagctcaatgttttttatttcgcgtcaactagtgaagagtgaacactgaagctgttctgcagactcattgattttccttcattgcgacagaacctaaccataccctgccctga

SEQ ID NO: 585 - DNA, 198 bp, Glycine max
  unsure at all n locations
acacacccctttatactaaatgcancccccttttctattttgtttgaaattctttntccgtaacgttacgaaactttacgaatctcgtaacgatacttattntccttccgcacggttacgaatccttacggattatgtatttactctnntttggctttcaaagaagttacggacactcacggattgcgcaaaaacacc

SEQ ID NO: 586 - DNA, 399 bp, Glycine max
  unsure at all n locations
agcttggttntggtcaatagcaccccacctgacttccncaaggtctactgatcctcgcaacatatctccaggtaccactctgtggtcaacaaataatagtaggaagattgactcttccatgctttctcacatcaagcttattggattatggcgcacccgtcatatgtggtactaggtggcaatcgggcgatggcacaaatcaactatcacatttccacaagccaggcataagcacaccatccncagctgcccacctttaaatttagctcacgtgcatgtacgtagccttctcctcgttcctctcagcaccgggtccccatcaaccccctcaagctntcacaatatccaatcaattcaatcccatttgtcatgaaactaccttaaacaaagaanaacaga

SEQ ID NO: 587 - DNA, 314 bp, Glycine max
  unsure at all n locations
gcttgaatcgatacacacatactgtaatcgattaccagagcagtatttcagattatattctcatcagtcacanntcttttattggttcttgaatggccatcanaggcttatatatatgtgacttgagacancgaattgctaagagattntcagaacannaaggtcttatcctcttanaaagcanaatcgtttcatcctcttaanaattccttggccaaaacacttgtgattcaataaggaattagttgagtgctcaaattgttcaatctatctctttcaagagagaatacttcttctcttcttctntattctga

SEQ ID NO: 588 - DNA, 383 bp, Glycine max
tgagagcgcgatcttatactgtgagagaacgactagctgcgagtaataatctttgcatcaatctctgaattctagaatgaaatgtataaatgaggacatgatgaatgctatgattgcacatacacaaggcttttgaccaaaaagcttaccttgaatgataattatatccttcgcaccctttatgagctgaatgatattgtcaaagatttgaaccctgaacttaaataataacctccagataccttgttagattctaggagagcatatggctcaaggcaaattaccgcaaatttgcggagtggaactaatgggatgcaagaaagaaataaacatcggcacaacaacacatatgttgtgtataacaataaaggagaatgaaaagt

SEQ ID NO: 589 - DNA, 425 bp, Glycine max
  unsure at all n locations
gctctcttagtggtgcttcttgcaagcnnccttgttacttgtattgattgttattntcctgtgttgtcaaagccattcaatttaacatatagttgagaaattgatcatcaaatgtatgtgcatganaaatatatatgttgagagatattggccttttcatgattagttntttaatccctcccagaagctaccatggccacccataatanatgccattctaaatttttgagtttcttacaaattaagtatggacaatggacctaagtgaatggatttgacctacgatagttgatatattcttgatagttaatatctgaacactcacttattntatacactncatcaataatcattttttctctttctatcatatcatctatcttatanntttttttctttttgggtcattctctctggctctatct

SEQ ID NO: 590 - DNA, 318 bp, Glycine max
  unsure at all n locations
agcttgtaggattatggtgtacccatcacatgttgtactaggtggtggtcgggcgatggagcacaaaacattttccacatccacaatgcgcgcataaacccaccatccnctgttgcccacctccaactgagctcacgtactcccacgtagcccatatcctcgtttctctcaacaccgggtccccatcaatcctcccaagcttccacaacatccaagcaaaacaacattccaacagcacaagctatcacagccaagcataacagagcagaggcagaaaactctgctcaacacatcaaccaaaattacagcttttctcac

SEQ ID NO: 591 - DNA, 357 bp, Glycine max
catgcatgcttacattccctttagcattcattattgaatcatttcagcctttgctttcgtgtagcttaggaaaaacgccatgtattctcctttctttcttccaaagccatttctaacatgccaagcactttctccatcacccacatccaccattagccaccacaaaccatcgttgctctccggtgaaaccccacaccgataggaacccttcaaccaaagtggaatcttacaacttggcttgcgggtttggtagagaacgaaaccctaatctgaccttttgtttttatcgagaggattgcgttgaattgatgagcaacgacgaataagaatcttcaagtgacgcgacgaggaacccgc

SEQ ID NO: 592 - DNA, 172 bp, Glycine max
acttctgctttagttagaccacatatgtacctgagaatgtcgcggggtcaggagacttgggacgcaggcgggtgctattgccaaaccaagcttgaccaatcccgcccaacccgggcatagcggcagtgagaaccttgatgtcctaaacggcgactcctggcagcaacagaaa

SEQ ID NO: 593 - DNA, 285 bp, Glycine max
tcttcttgcttatggcgcttctatggaggctggatctttgagcttcaatggagtcctttaatggtgatttttcaccatggagatgcagcggaagacataggataagaggtgataggacgcaccatctattaaggaataagccatggaagaaggagcttcaccaccaagatgatccttggattacaagcttggagattgatgcttactggaggaaaagatagagagaacgagggagcacgacatttgttgaatataagagggagagatgtgcaactttgaagtctg

SEQ ID NO: 594 - DNA, 495 bp, Glycine max
  unsure at all n locations
tgcangtgaacccctttaaaaccgtggtaantnccntttggantcacgcgacactatctagtactcaagcttaatccacanagtccacgattttatctgcatctcctttaaatgaatgcgaagagaatgaagttgtgcattttgctttgccaacaggcaacccaagcccatgagaccattcctatcaaacaatcactcattcactcacatacaccacaaacctaatttggagtctcgaatgcttatcctttgagcactcacagtacgatgcccctcctcctactcccgcgagagtaacgagagcatgtttggtgaccctgtccaagaacttacttcttcttagagacacacagtcgtcgcctcccttcctgcaccgagagtacaaatgcagggtggtgagcttaccaaaaactactctcccggggccggcctggttggtcgacctgtactcggagtatgcatccgtgcctcctctgccgagggatggacctgccg

SEQ ID NO: 595 - DNA, 390 bp, Glycine max
  unsure at all n locations
agcttaaccaagaaaaaggctaacaatgttnttatgcacaattgaaggaaataaaattcagaatttaggaattcaagtaacaatccttcatacaaccaatatattaccttaaagagatttttttttanagttcttcaagcatcaaccattcaacccaaatttgtctctctttntttttttttttaattntgcttatacgaatttctgttttttttttataacaaagagatcaaaaggcttaacttttgcaatggttcagcctaaaaaaaaaacatgaacaagaaggtaatataaatggcaaagaaaataaagaaggatgttacccaatatttccagcaaaggaagtgttgatcctagaatcggaactctgataaccaaatgatatgaacc

SEQ ID NO: 596 - DNA, 318 bp, Glycine max
  unsure at all n locations
cacaagtgagtttattcgattattagagttatctctttatcttaggagagtgattctctnattcttggtgatcaagacactctgctgatcnaggacttcacaccttgtgtgtgccctcctggnagagtgttctttcttctatcatctcaccttgtcttttaccacaattcagaaatcaccttgccaaatatctgtgacatactccattacacactcaataagtattttgacctaatgaattcaaacagactttactcgttgaatacctcatggacctgacttcgtatgcatttatatttgtcgcacactaccacgtta

SEQ ID NO: 597 - DNA, 396 bp, Glycine max
  unsure at all n locations
aagctctactaaataagcctagacattaaaattttgataganaaagtcacatgcatgttccctgtatatagacaagatttgagttgagatgaactgaagaaagagagggcatatttagtactctagctagtcaaagtggtatatatatgtctaataacgaacctggtgctccataatttttgcatcccgtgtcctgttttgttgaatctctccctccaacctaaagttatatagtcagtcacaaaaagagtagtaacagggttaagcatatatatgtgtgttatgtcagttatctttcacaaagcagtatatgctatatatatcgctcacagatcaaagctgacgatagctaaacttactccaataggtctgatgcaagaacatactcattcatgc

SEQ ID NO: 598 - DNA, 511 bp, Glycine max
  unsure at all n locations
cggaatgaaccatgtagnacccatcactattacgtaataagtctacagaaataccagtcatgcatatctccaatcaatccacgggcttatataacatgcaaggtgtttgggccactaacatgaaccacattcataacccacctgtcaagattctgattaatcaatgctgctgcaaatctgcaaaactcaatatattgaagattgaagattctcataggaaaattcctaaatgcatatctataacaagaaagtaaataagacaaaaacaataccctccaaaacctgctcgcatgtccataacatttcttaatctgatttctttccagtgtaaaacacgaacatagcttgctattatttcattccagtatttcgaatctgccctaaaaagctctgatctggatgtgaaagcatcaagctntatgctttgaagcctatcatgtggggtttgcaaacgtgcatgccattagtaacatttgctcatatccgttcttatgcattcagagatgcatgt

SEQ ID NO: 599 - DNA, 415 bp, Glycine max
  unsure at all n locations
gagggactcatggtcactatgaatgacaaattccgtgggataaaggtagtggtgccatgttcccacagcccgtactaaggcatacaactccttatnataagttgaatagttaagggtacgaccacttaacttttcactaaaataagcaattggatggccttcttgcatcaacacagccccaatcccaacatttgaagcatcacactcaatttcaaaagatttttgaaagtttggcaacgcaagtatggnggcattacgtagcttttgcttaagaacattgaaagcttcttcttgtttctctccccatttgaaaccaacattcttcttgagcacttcattgagaggtgctgccaatgtgctaaaatccttcacaaatcgtctatanaaacttgctaagccatgaaaactcctcacc

SEQ ID NO: 600 - DNA, 451 bp, Glycine max
  unsure at all n locations
tattgtagccgatgctctgtctcggcgtcatgcattactttctatgcttgaaacannaatgattggtcttgaatgtttgaaaagcatgtatgataatgatgaaacttttggagaaattcttaaaaattgtgaagaattttcagacaatggtttctttagacatgaacgctttcttttcacagaaaacaaattgtgtgtgcctaaatgttctactagaaatttgcttgatcgtgaagcacatgangaggtttaatggtgcattntgtggtccaaaagactctatagacattacangaacatttnntattgcctcatatgaaaaaggatgtgcagacactctgtgaacatcgcattgtattgtaaaatgcaagtctaatggtaagcctcatggattgatactccattgcaataccgagtatcttgattgttatcatggatttgtttgggctgc

SEQ ID NO: 601 - DNA, 322 bp, Glycine max
  unsure at all n locations
tgcgcatacttcttcacgaacgttcacttgcacaagacattcttataactatgtaaaatgaacccatatactattaatgcaccttcgttacctagattatttacatgtactatcaacgtgtatgtgttacctacatcacacacattttctttgctagactcacatacatgcatactctaagcactgtggctatcanaaattgcatacgtgcacatcnttggatctctaatacctatacatacacaaacttcataatgaatcttgactatctacacaataaggcgctacatttcatgctgtctttcaagtgttgtgactacct

SEQ ID NO: 602 - DNA, 279 bp, Glycine max
  unsure at all n locations
gatgatgaccgataacccaaagaatgattcgaagaatgagtcaacaagttcaagtttcatgagaaganatcaagaagattcaagaatcaagagaagtttgatttcaagattcatgagaagatgaattcaagtttcaagagaagaaatcaagaagacttcacaagggaagtattgaaaagattttcancaaacaaacatagcacagttctgttttcanaagagttttcttcacaatttctagtaccagagttttactctctggaatcgataccagttcct

SEQ ID NO: 603 - DNA, 272 bp, Glycine max
  unsure at all n locations
gtctcaagactggactaatacatntgctgtccaagttttatggtcttgcaggtgaagatcctcataagcatcttatgaagttccatattgtctgttccaccatgaagcctcctgatgtccacgaagatcatatctttctaaaggctcttcctcattctctggagggagtggcanaagaatggctgtactaccttgcttccaggttcattaccagctgngatgaccttaagagggtgttcttggggaaattcttccctacatctatgaccact

SEQ ID NO: 604 - DNA, 512 bp, Glycine max
  unsure at all n locations
tggggnatgagactcctgatnacgtcttggantttacggacnctattcaatactcaagcttgtgaagtatgtatgttaatgaggaggagtttaatgtggcattattggacggatanacggggtgtcttagtaggatggttgtgcccgcctacacactcattaatattttataaagtgtaaaaatgtatgcttcaacattgaattctgagatagagcacgaagataatatctaactgatggcttaaatttattgataagagggagtagtctatagaaaaggtgtactttatacgatgaagtgatttttataaatgagataatggcttagtgcggctaattgtgataataaagaatttgttgtttgtgaacactattgttaggacattggggatatttttggttctaatactgtaaacgattacatgtaaattttctattgcttatatgataaggctgaatgaataggtgtaaattaatattaattataatcggagttttatgtctgtatctag

SEQ ID NO: 605 - DNA, 394 bp, Glycine max
  unsure at all n locations
ataatgatggtccgagntatgttgtggagcggntacgaacccggaatgggtttaggcaaagacaacggcggcataactagcctgataaatgccaaaggaaaccgtgggaagtatgggttatgctataagcccactcaggcaaatataaagaggagcgttgccggaaggaagagcggaagtcaaggctcgcggatgagacaagaaggtgaaggaaacccaccctgccaaataagtaagagctttataagcgcgggtctggaggacgaaggtcaagtcgtcactatatatgaagatgatgctccgagtacgctgtatttggtacgaccatgcccttctgatttacaactgggaaatcggcgagaggaggaacgccccgacttttacgcgaagagca

SEQ ID NO: 606 - DNA, 369 bp, Glycine max
  unsure at all n locations
tttctctacaatngcatcacctctcaatgagctggtgaagaagaaatgtggcattacctgnggtgaagaacaagagcaagcctttgctttgctcatagaaaagcttactaaggcacctgttctagctcttcctgactgttctaanacttttgagctagaatgtgatgcctctggagtgggagttggagctgtattgttacaaggtgggcaccctattgtcttatttagtgaanaacttcatagtgccaccctcaactaccccacctatgataaagagctttatgccttaataagagccctccaaactcgtgaacattaccgttgttcaaggaatatgcattcatagtgatcatcaatcacttaagtaca

SEQ ID NO: 607 - DNA, 367 bp, Glycine max
  unsure at all n locations
agcttgcctcanagatgtccaggaaggacaatgtctcagaaggaactagttccgctccggagtatgatagtcaccgctttaggagcgcggtacaccagcagcgcttcgaagccatcaaggggtggtcgtttctccgggagcgacgcgtccagctcagggacgacgagtatactgatttccaggaggaaatagggcgccggcggtgggcaccactggttactcccatggccaagtttgatccagaaatagtccttgagttntatgccaatgcttggccaacagaggagggcgtgcgtgacatgagatcctgggttaggggtcagtggatcccgttcgatgccgacgctatcggccagctcctgggata

SEQ ID NO: 608 - DNA, 280 bp, Glycine max
  unsure at all n locations
cttatcaagtaaatggatcattcttaacgtccaacgccttataatgatcacctttcangtaaaaagaatcgcttgattcacgcttaagaaagaactacataggttcgatttcctcatcgatggagggtacgtatgagcaaaagccccgctattgtcgacctcataatataaaaagacataatagttaaggtaatacatattccacaattctaaaaaatatgttgttgtcctttgagacaaacgtgagaggtgctaataccattctcaaacgtatatacaa

SEQ ID NO: 609 - DNA, 394 bp, Glycine max
  unsure at all n locations
agcttgtatttcaaatattatggtgtgcgcttgttgtaacatgttatgtttgctactgatttttaattctttgaccctttgaatgaccaaattggctttcgatgtcttcatgagacttgtagagaattttatcctttacattcaagcactggtatcatgttatttggaccattacaacataatcaatccttanagcattgcagttntgttatattgtgaggacaaactgacatctctatcttcatggtcagtttcttccaagatccaagccttatttgcccatgacttctccataaaagatatatatatctttctcttagctntctacaaccactgagatcatcccaaattcacttttgtagctcaagtagttntcaaattattgcacacatat

SEQ ID NO: 610 - DNA, 525 bp, Glycine max
  unsure at all n locations
agtgatgnnntttgaaaccccagtaagtanccnttgcttgtacgcgatactatacactactcaagtgcgccatgccncttgatatacttgtgggactcatggtcactatgaatgacaaattccttgggataaaggtagtgttgtcatgttttcaaagcccgtactaaggcatacaaatccttatcataagttgaatagttaagggtaggaccacttaacttttcactaaaataagcaattggatggccttcttgcaacaacacaaccccaatcccaacatttgaagcatcacactcaatttcaaaagatttttgaaagtttggcaacgcaagtatgggggcattagttagcttttgcttaagaacattgaaagcttcttcttgtttctctccccatttgaaaccaacatttttcttgagcacttcattgagaggtgctgccaatgtgctaaaatccttcacaaattgtccataanaatttactaagccatgaacacttctcacctttgtcacggacttangtgag

SEQ ID NO: 611 - DNA, 386 bp, Glycine max
atgcaagcttgcagatagatcaatgtgagtcaacttttatctttgatcaaattataaatgtttgaattgttcttaaaattataataaaatcaaatatgataaaataaaaataaattctatttctgaaaaaaaaagtcaattctactttaacctattgaataaaattattttaattcagaattaattttttcactactgctaattcaaacacacacttaccataaacacgcgcgttgcactcgaaaatcaattgtctcccgctccagcaaaatcaaattagtaaagcgattgccacataaatttatagtaacaaataacaatcatcaatgcctcaaagctaaaccccaaaccatcttcttcaccttttctctctgcacacgaatatg

SEQ ID NO: 612 - DNA, 273 bp, Glycine max
  unsure at all n locations
ctatatgatatagtgtattctctatattatgttcgtatgtggaggaggctaaattatcattctaattctcttatagttntaattgtgtaatcttgattgtataaattattaaatatataaacatttgttcttattttattatactatatagattgtctttacattattgtatatcatttaaatattatgaggatatgaaattataatttaacctttataaaaatagatgtaacgcaacatagagactgatgctactttgatattccaattgat

SEQ ID NO: 613 - DNA, 273 bp, Glycine max
tatcttgtgcattcaatatcctgatgagggtgtttcatatgttctcaagactggacaaatacattggctgccccagtttcatggacttgcaagcgaagatcctcatacacatcttagcgaggttaatagtgattgatccaccatgaagccccctaatgttcaggaagatcatatcttactaaagtatttactcattctctggaaggagagagaaaagaatgcgtgttctacattgctgatagatccatctccaactgggatgaccataagaga

SEQ ID NO: 614 - DNA, 353 bp, Glycine max
  unsure at all n locations
gagatcatccnctcaacaacattatgggtgatatctcanatggggtaacatctagacactctcttaaagatntatgcaataatatggcttttgtatccatgattgaacactaaaatataaaagaagccataatagatgataattggatcattgccatgcaagaagaattaaaccaatttgaaagaaataatgtgtggaaattagtagaacaacctggaaattatcctatcatatgaacaaaatgtgtttttagaaataaattatatgaacatggtataattattagaaataaagccaggttagtagcacaaggggataatcaagaagaacgaatagactatgaagaaacatat

SEQ ID NO: 615 - DNA, 122 bp, Glycine max
tgctattgtaacatccactttattagcaattgtggaatagattagaaggccattgatggtgacgctaatattgaagaaggaacaattctattatagaaacacaaggggaaccatttttacac

SEQ ID NO: 616 - DNA, 345 bp, Glycine max
  unsure at all n locations
cagtgtttatattgcggttccaatgtggccagagggttacccagaacatggaacggttcaagcaatgatggattggcagaggagaacaatggatatgatgtacaaggatgatgctggagcactaaaaggcaagggtaatgaggaagatcctctcaactattcgacattcttctgcctagntaatagggagctgaacaaagaatgagagtatgtgcccccagaaagaccagatcctcatacagattatatgagagcacaagtgtcccgacgctttatgatttatgttcatgccaagatgatgatacgcatgtctgttaattaagtttaccacatcttccaagatac

SEQ ID NO: 617 - DNA, 288 bp, Glycine max
  unsure at all n locations
ttctaacacaggtattttcacggattgtgactgggatgctcttatactangaagtctctgcttatatantttactttagattaaggaggacagatactaatgctccttttaacttgaaatatccttccttccttcatcagagagcaagaaaaacttactaatggatggaagcatctataccatgttgcatntacaatanaagcaaaacacacaatctcaatataacttctattcaatagttggccaaagactttcacaatgagaagagattagatattaatataaaga

SEQ ID NO: 618 - DNA, 459 bp, Glycine max
  unsure at all n locations
ngcaagctntctaaatgtttctttgcccagtctcaggtagagtacttaggacatttggtttcgcatcggngagtggagcccttagcatcaaaggtcactgcaattcagcaatggccaattcctcgtacaacgaaggccgtaaggagcttcctgggccttgctggcttttatcgcaggttcattcagaattatgccattggtgtggccccattagtcaaagccacgaccaaagaacccctgcattggacatctgagacacatgaagcctttgacactttgaaacatgccttgtcaatagctccggtgttagctttaccagacttcaaccttcccttcacagtcgagacagatgcgtcaggagttggtatgggtgccattctttcacagcgaggccaccccatagcatttttcagcaaaccttttagtgccaagtactctgatcataacatacatgcgaga

SEQ ID NO: 619 - DNA, 492 bp, Glycine max
cggaatgatacactttactatctataatctcagctctcaggagctgagctagttattaaaggggtgtgtgtagcttatctctagattctcaagaaagttctctcacatattgttctcaatataacttctcaatgaacctacctagtctatgaatagaagcatgtgtcacacttgttgttgctatgatgaatgatacttttatgagacacactacacagttccacttgtcttcctctactataacttaaactgaatctacccctgctctttttcttttcctacatttaagcatactctatatgcttcttatccaagacatcactcttgcgtgtattcctcttctttcatgagctacatacctatcggtctgtccaggccatatctatttttcttaacactttgtgcttctatagttccaacatttcccttctggctgctcttactctcttcatactgtctgctgtggcctttaatgttcctttctccttaccg

SEQ ID NO: 620 - DNA, 416 bp, Glycine max
  unsure at all n locations
ctaagaagaaagtagaaaacatatcacctttctatttaactatcttttgtattgtatgcttggcaaatctgaatggtactttcctctgtttggggtggaacttatggatttccatttcccaaaagggtgactcttctgtcacttccatcttcatatgattttggtatgtggcttcagttttagccattatgtggntgctgtggcgcgccaattgtttgacttcaatgataaattgtgtttcttactcaacatcaattcattggaaattaatgctttccttaactcagttctatttgcaagaactagagaatactatacacgtgtttctgcatgaacaccagctcatgcagctacttcattaacgcatatataattaaagttggctctcagaatntctccatatcaccaactatgat

SEQ ID NO: 621 - DNA, 328 bp, Glycine max
  unsure at all n locations
atagcccgaggactagagtacttgcataagggatgcaacactcgaantttacattntgacatanagccacaacattctttnggatgagaagttctgcctcaagatatctgattntgggctagcaaagccttgtcctagaaatgaaagtattatttccaggtctgatgccagaggaacattatggtatgtagctccagaaaatttggcagaatttcacacanatctgatgtaatcttccactttanatttaaaccacctaaaccttaatgggtaaaattaattctattatgcattanatgcatcttatctttgacttgaactctacaat

SEQ ID NO: 622 - DNA, 439 bp, Glycine max
  unsure at all n locations
ttatagacgaatgtttcacttttcttccacttctaccgagagacataaaattttcaacgtctttcatagcatcaaactgaaaatctctaactgcccttccaatactaatcgctgcctcaacaattcctttttctcccattagcttgctcctgtttagtgacacaatgcgaatgacaatgcagtttccaaagtacgttgaaggaatcgaaaattcgggacggttacggcaatctcccagaaacttcaagctgtaaatttcatcattattattattatttgcaatagtgatagcattgacctcttcttctgattgaaccttgcaaacccacatcanagcacttgtcataacaaaggttgatatgtgcaatgactctaattctaacccataagtacttctacattcaatcgacacccatttctttagcttcgcaacatggcc

SEQ ID NO: 623 - DNA, 385 bp, Glycine max
  unsure at all n locations
taaacctcttaatttagtcaatgcaatttcttttttatcccttgttctaattacatgcataatgcatctggttntcctagtttttcaattgttaaaattaggtccatgatctaatgtattttttgacatgatagtggcttgtctgacttgccacatgatacanagcaatggcatgagttcactggttatagccactgttttgtctgtcattgtaagaatgnngaaattgtgaatatgaataggatttgaacaagaatctgttcttgtactannaaatattatttttatgacacattntanaacggtctaatcgcttanaatgtcagcttgtcaatttataataatanaagtatataatgacaatttctaaatgtcttacatggta

SEQ ID NO: 624 - DNA, 335 bp, Glycine max
  unsure at all n locations
gtgtgcgttgagttggttaagggtggttcacgttgtgattggcggaagtggttggttcaactccttctaccattggtgagggaagttgaatattacattgtaaaaaaatcttacatagtgtcgcctttccctgtgaaatattnttcgcaatagaaactaatcttctgctagaattatgagtgaaaactaaccaattaaatatttatacaattaatacttacagtatttctcataattaaataaatcatgatgatcaaatatatattctcttctaaaagagaatcaattcaacatacacaagtctacaggaaaactatattatgagtaaactatca

SEQ ID NO: 625 - DNA, 514 bp, Glycine max
  unsure at all n locations
ntganncccctgttgaaccctatagtatntaccngtcactatttcgtactcaagcttatgcttctaccggttntggactaccaaattgtcaagttgtttttgcatgaacaaaacaatcatattcatctcacaaaaaaaaatcgattccaaatcgatgttgttggctaaagataatgacatctcttaactccttggcaattgtatcaattcgttcaagtaatagtttaaacgataaaatcgagtgtgagtccacaagaactttgactgtactcagagtttatatatatccaattttaagtaataaattaattgaattgaatatttgttgagtgatgacgcataaatataattttgatctaaattaaactacaaaacanagcatgtgcaagggtgagaaaacaaacactcaaaacagtgaagtaacgattgatgcagaattatgaacatgttggggctcagtcagcctaccagaactactctngatgcaacattaaggatntntctctatttaacg

SEQ ID NO: 626 - DNA, 314 bp, Glycine max
gacgaagcgtgttgtgaatggcgtctcgcgtggctagcatggtatcgacagcatcattgcgtgatgaccacttgatgtaattggagatggccggaggaggcttaccatatgtgacctcgtatggagtgaagtcggtgccggagtgctgagacgtgttgtaagaccattcagctagggctaagaattaaaccagtatgccgggttgtggtgaacgaaggaacgaagatattgctcaatcgtaccgctcatcacttcggtttgcccatcggactggtgatgatacgccgtactcatgcgtatcgtcgtcccactga

SEQ ID NO: 627 - DNA, 264 bp, Glycine max
agctgtaggacgtgaaatcatgtgcagtcatgtatcttatagtcctctcacgggggggaggttgtgccatgctctcagaatgtgcaaaatcagaatgctcagaatcagaatcctcagaatcagaacgcttaagattattacgcttccaatcgagatggtcatgagcaccaataacatactgcacagattcatcatgagcggcctgctccggatgaccaaaaggaataacatgatgcctaactcatctatgaaatgtcctatcta

SEQ ID NO: 628 - DNA, 522 bp, Glycine max
  unsure at all n locations
tggggaatgatacctnagtgagtangcgtgctattacctgtcactatcgaatactcaagctgggagaggatgcttcaatggaggaagagatttatggacagatttatagagggggtagcacgaaattgaaggaataatatacggagagaagtggaaccttgaagtatgtcttacatgactctcattcatcaaagttacaacatgtgttgcacatgcttctctttatagactaggtagctggcttgagaagccttgttgtgaaaactgtcttgataagctcatttgtgaagcattacgtgcgatgctagagcttagctccacacacccgggtgataactaaactcacctcctggagaagctcccttaacatgactcctaacgaagctatagcttaactacacatacctccctaatacttaagctcaccttcttgtaatgagaagactttaactgagctacntggcccctgttgtagctatactcacacctgtgacaaataagcaatggtatgcaatacactcg

SEQ ID NO: 629 - DNA, 396 bp, Glycine max
  unsure at all n locations
gactcattatccntnacagntattttaacagaatgtcttcctggcttactctgatttcttgaaggagaatcccccaataaatcactcaccttttcttctacgcagagagaacttctcggtggagcaatcttctttgatgcttcaggtttagaatcctttttcctccatccaccaaaccatcctttcttttcttgcttattttctccacttttgttacaatttccatcttcaataggaatttctctttcttcataacagctgtgacgatgcccaatgatcacctcatcactctcattgttcaagtctggcgactccaaccttagtgcatcttccaattgccttctttcatcctcggncaaaatatcattgagctcttcactctcttgttcattttca

SEQ ID NO: 630 - DNA, 294 bp, Glycine max
  unsure at all n locations
tcttacacgtgtaacacacaacttcagcttagtggtttaagactctaagtgtagcgtccatggaaggcgaagcatccataanagttactatccatagtgctctatggccttcaataccatcaccatcaagcaagggagatgcttcaacctccaacccagctgctgcanaatggccactcaatatacaagaatgtattcctcatacaatagcaccaccacattagaatgctcgagttgatccaaaaatgcacaacatataanaatgctaacaataaaagtcctaacccttatcat

SEQ ID NO: 631 - DNA, 365 bp, Glycine max
  unsure at all n locations
tctcttatgttgcagagtctatgaattctagaataatataacttcaaccactanaaatgacttcaaattgtatttaacatctaagccttgtcagctcanatgatcaaattcctcaatgtgaaaggnggaacagactcttctatttataagagtcttanaggtaattagtgatttacaaatatcatagcanataattaaccttctaagagctntccgccttttagcanaggctgctttagacctgatcgatgaggtacaactcccttaacaaggttccgtcaatgtggtcgattgattatggagttaattttcaacaactttgtagggatatgcatcatacatggatgatcatcatacacatacta

SEQ ID NO: 632 - DNA, 396 bp, Glycine max
tagcttttggttttggtgaacacaattaatctattaccatgtaactgtaatcgattacttgggtgtttgtgcgtgatgtaatatgttacatctctatgtcttcacctcgtcaaccactattattactacatttacttccgccacccacctcagccaactaaaatgcctcagcctctctttataagccaaccttaccctatgcacaaatcacaccaacacctgttctaaacctcctgttaccacccttctctgaatacaaatatcttatgctctcaaaccctctatctcctcttcaagatgacaaacaatcctttaagagcaaataatatggaaaaatattccaagaagaagcaaggagaatgttcataggatgttatcaacccgttggacttggaa

SEQ ID NO: 633 - DNA, 517 bp, Glycine max
  unsure at all n locations
gcgggaatgaacccatgtganaccntgttgatacgatggcatctacgtgacactgtgtagtgctccagcccgtgcgattatgaggtacccgtctcctgtggtactaggtggtattcgggcgagggtgcataacatttctgacgatccacggatgacctataagcaccccatacgctagtggcgccctatggcagagctcactatctcacacatgacacacatacgtggtggtgtaagcaccgggtacacctcaagccttctgagctttcacatcatacaagtaattcaacaattattgatccgaactcacacatgatgagctgaaggcgtaggcgcagaactctgctggaacacataccagtctcccgacttttcacatgcaaatatcccatatgcattggctatggtctacgacgttgaccgtgtggatcgactagcatagactactgtgcgtatctagtacatattctacatcttgaccgatgtgatatgctatagaatggctagactcacgtag

SEQ ID NO: 634 - DNA, 390 bp, Glycine max
  unsure at all n locations
cttgagctataattcattgtttgtgttatgagtctacatcaaacaattgtattattgatgtttctgtcacaatcaagtgatagttgatgtctccatatgtgcgtacactgtgattatgttttcgtttctaaaattcattnggagtatctactgttgattctagatgagtgatccttcttgatttacaattattgtctcctaatcaatcgagtgttcatcttattattggctgctcatattccaatcatgtctagttaaaatgcttgataatctttcttggtgttacttctaatacgaataaagagagacttcgcctttgacaatcacgttaagatgtttngagaggaaatacttgagtagacatgatcattgtacctatagacgaaagtc

SEQ ID NO: 635 - DNA, 252 bp, Glycine max
  unsure at all n locations
gattgatagttcactaagaataatcttataaagaatacctttcctcttagcaatgaaaaagtgagtccccattttgttntggacaacacacccttctttgttaaaggaaacatcaagtccattgtcacataattgacttatgctaagcannnatatgttaagctctttaacaaaaagtacattatcaatgggaggatagggatcaatacttantctttcatactccaactatttcctcttctatttccttcg

SEQ ID NO: 636 - DNA, 393 bp, Glycine max
  unsure at all n locations
cagctccattgatatcatttatttaatgcaatgcacatgtttcgaataagatttcttgtatcacaggaaaagatctaatccaagttgaattacggatcatactgattgtggtgcgaaaactggcttgaagtagccatctgggtaatatccaaaccacgaagtttcctctggtattaaaacagtgtcgcgctcacactgttaatgtataaaataagactacaaatatataagctttcctcatgaaatcaattagcaatattctattcataatatcacaataatacatttagaggacttaccatgataagtaccanattctgcaagctactcaatcttttcttgtaagaagcatttctcttatctggtatttcattgccatgcactggaagaaat

SEQ ID NO: 637 - DNA, 391 bp, Glycine max
  unsure at all n locations
gctgtctctagatagacaatcttgccctcctgaccttacggtgacttaccactttgatntctttttttgttggtgagtaactgtaccattaaatataagcatcatataagaaactagctcacaagaaaaatctggtaaagactacatatgannaaatagcgtggtcttaaacaacaattgtaacgtaatanactgaaccgctgggtaatttcttgaataaataaattcagatcttcacaatgataatttcataaactcttactgtacaacacattgactgaagacaaacattatgcataaaactatagaagcatggcatatgttcatctgcaaccaacaggaatgtatgtcacacattgaaacagatatgtnntatctcatactcattctt

SEQ ID NO: 638 - DNA, 416 bp, Glycine max
  unsure at all n locations
ctgcacaaggctcttaatatttgaagagtatccttgaggaaccttcacccgacgaagacactaacaaaaacttatcttctccttcttggacaaagtatggcaggctgggggcaagtaaattttcttcccatcagaccttgtatgcaactgtgatcgtatacccatatcagctagatcttgacgggtattcaagccatccttcgtcttgccttgaatgttaaggagcgtcccaatgactctatcacagacatttttctccacatgcataacatcaatacaatgtctaacgtcaagatcacaccaatacggaagatcaaagaatatggacctcttcttccatatgcaactntgactattatccttcttttgagtcttcccagatacagtattcacgtgttcaacccgataatatacct

SEQ ID NO: 639 - DNA, 298 bp, Glycine max
  unsure at all n locations
gttcttgaccatattgaaccccggtgacaacaattgcttcaaggacagagacaatgaagaggtcgctggacaacaggatcaacaaatgacctatagtatggttcttgacttagatcgaacctgaggacaacgatattaaccaacagaccacacaacaaatgaataacaggacaagagacaatggagctgcacaacatagggttaagagagacaaatgatgagggaataatctcanataccttgcaagcatggtagaaactccaaacccaaactgagcatactcaaattatccaatctt

SEQ ID NO: 640 - DNA, 405 bp, Glycine max
atcactatacacattagatctgagtaagatctactattgaagtactaaaatgtacacacacatacctcgccacaaagagcaatatacttggaaagcagcttgttgattctatcctgctcatctttcctgagaattcgtagtttctcctcactcacagatcgtgcaagaagattcccaactgcaacaaaatcacaaaactaagctaaaaccaataaaatttcaatgcacacacacaatcgaaattagagctgaaacataactccaacttacatggtgtatagacataatccttggtactattgtgtgtgacatggagaacagcaatggaaattggatgagactccacttcttgagagcccaattcatagtcttaagtccatcttgcacatcattaccaacagcaac

SEQ ID NO: 641 - DNA, 312 bp, Glycine max
  unsure at all n locations
taattaagcaatatggatgagatatctctctaattcaggatctaattataacatgatatgatcaaatgtaagaactaacatcactcaattaagatatgggaattaaaattacacagtatgtgaatataaagaaactcanattgtatctaaactttctcttctactaatattactattaaataatatgttttaactatgcctttaatgaaagtgtgttttaactatatattaccaaagaaacatagtgcaacctatataaaacgtgtatncgaacaaacctactatcagtaagtatactttatacgttaatct

SEQ ID NO: 642 - DNA, 482 bp, Glycine max
  unsure at all n locations
tatgacccctgannccttgatccctgattactgcggnttaagataaccgcangccgaagctgtatatgatttatgaactggccatcattgtccttatgcaagtctngcaccttatgttgctggtcgacacaaccatcatattccgactgagagtgtgtgcttaaagaacatcacgtcgaatcggccgtatcgctgtcaccgctcatatagagtaacattatgtggactacttatagcggcgattacaggtgggtggtcttttcatatatcacatgctacatccctttctcctaaatgcaaaagacttcgctcgcttcatagcttatacttactctcctttgaangacagacacatcacattgaacatcaccaaaaatatcttttggcaggctgccaagacaaagacttatgctgtatttgatgaccataacttaataggtcacttccccgagacctagagaaaccgatcttcgacttaaacc

SEQ ID NO: 643 - DNA, 514 bp, Glycine max
  unsure at all n locations
tggggatgacnccattaganancnctgtatttgcngacactatacagtactcaagctntgagaaattatggctgaggctaagacatgttgtgggcccattgttcaaatggaggcatttatttatttatttttaatttatcatttgggtaaatgtcaaattaatatgggataagtcattatagatgttgtaacttttgaatcgaaagtattttttttttaatttatgactttaagatcgtaggagtttttttttagtactctaaagtcgtaaagtctattcgttaaattttttattaaattcataaatgaatgtacaacttcaatttttttattccttttcataaaattgtaaatcattttttaattcaattatttaataaataaatgtatttttacttttcttagttttatataatattttctacatattttttatatagacttatctaatatatttcctatactagtttattcaatattgtcttaatcgctggtatattatcttattttatat

SEQ ID NO: 644 - DNA, 309 bp, Glycine max
agcttgataacaatgtctcttctgtttagcattattaacggcatgctcctcttccattttgcatcctgctacaggaaggtgccattcggtagagctaagaattctttacagggctgatggggtttatcaacaaggtagtcccaactaggatcggacacttccaccgttggatgataggcatcttctacaatatcctttatttccatgggatcttcattctccttatattgcgcatcctctttggcgctctgcttaaagagccagaaccattacccattgtctcttaaaatgcgtgaatctggggcattt

SEQ ID NO: 645 - DNA, 310 bp, Glycine max
  unsure at all n locations
agagcactcgatctatataaagaactttttcttcaacaacaacaccttaccanaactcatgagaaataataatgcanaactaacactaataagatgttgcacaaatacccattatgggtaaactcaaagaaagaagaanaaggcttaccatccaatagtggggtcacaagctcaaggaaatagatgagtgcaaattgtcctaaagggaaataagccctattcttgagagtgaatgaaaaaccttcttatggttggaggagaaaatgggaaagctctgagaaatgagtaaaggtgcatagttncaaagtat

SEQ ID NO: 646 - DNA, 297 bp, Glycine max
agcttatcgagatccgtgatggataggcaatgtttcggcataatgtggaacctgacgttgttgatgtacacatgcaaatcggagaagatggagagttatttgatggcaaacacaatcatgttgttcagcttcacgacttccgcgtgcatcaccactaaggtgaggatgttgaagccattgttgcggataagaagcatcacgtcaatcaacatcaagaataccttcgcgaaggtgttgttcttgttccaatgaagcgtatcagaggttaaagtgatgcaatggcgaagtgggttcgag

SEQ ID NO: 647 - DNA, 372 bp, Glycine max
  unsure at all n locations
ctaactgngcagtantccaaaaatgtgagtgacatcaccttgaggtgggcaacaaattaagtgccttcaccataatagcacctgcacctgaacctatgaagcttcattctacacctgagaaagatgatgagatatttcctcataagagaaagcttccaacgcacatattacgcaactgacccttttttcctctcatgacttaaccacccctcctacctctattattcccaataccatatctcactcacccgtacatcaccattctgcacctaccttacctctccttgcagacaaactctttatcgccttcacatgtaaccccgtaaacactacaatctctaatatatgattgctcaactctcttcaacctct

SEQ ID NO: 648 - DNA, 375 bp, Glycine max
  unsure at all n locations
tttgagccgtcgacgaccngngatccttagagtcacctgaggctgctgcttacatcaacacttcaggggctgtactacttacatggattgatgggcctatgcagttgaaagcctggagaaagaggatgcctatngttgttgggatgaattctccagatttacctgggtaaactctatcagagagaatcaaaaccttgagtattcaagagctgagtctaagacttcaaagagagaaagactgtgtcatcaagagaatcaggagtgaccatggcagagaatttgaaacagcaggttcactgaatttgcacatctgaggcatactcatgagtttttgcagcattacacaaacagaatgggatagtgagaggaaaacag

SEQ ID NO: 649 - DNA, 234 bp, Glycine max
  unsure at all n locations
tttgagcgtctcgatatatgacgagactacatcatacatcttagtaanaagttatagtcgtttgaatatgctcagagcttcaacattcaattacgagcatctcgctatattacgggactcaatcagacatccgagtaaacagtttgttgtttgaattgtctgagagcactcacattcacattctagcgcctcgatatatatatggactctatcacacatccgagtataaagtta

SEQ ID NO: 650 - DNA, 407 bp, Glycine max
  unsure at all n locations
tgcaagcttctttgagaaaacttccttgagaagctagtgcttagctacacacacccctctcataactaagctcacctccttgagaagcttctctaagaagattcctaaagaagctagagcttagctacacatacctctctaatagctaagctcacctccttgagatgagaagctagagcttagctacacacccnctataatagctaagctcacccccatgacaaaaaaaacatgacaatacaaaaaaaaaagtccttactacaaagactactcaaaatgccccgaaatacaaggctaaaaccctatactattagaatggccaaaatacaaggcccaaacgaagaaaaaacctattctaatatttacaaagataagcgggtcatgcttagcccatgggctcgaaatct

SEQ ID NO: 651 - DNA, 337 bp, Glycine max
  unsure at all n locations
cgcctaactaaatatgatattgagtgttttttacatgcatntacttaacaagaaacttanacattagntaagtttaaactatatggttggaaaaagaacaagtggaagagtgaaggtttccaaacaacaatccttgacaaaaaataaaaaaaagctggttctagcaaataaatcatatcacactaagaatgagaaataataccagcatccctatccaaaaaatattcaaggatgagacgtgtaaaaggtcacgaatttcatgctgctaatgatatatctaacantaataatctngtccttttataccttttanggtattatggagatggacgggagt

SEQ ID NO: 652 - DNA, 178 bp, Glycine max
cccatcatgatgctctttctgaacagaaagtacctgtgaacgtgcactaaattgcctatcaactcactacgagagaaattgaacttatcttaaactctgtgatatgagtatcattacaattatgaggcatctcagtgcataaaatggatcaggttggtccttatgaccttgctgccta

SEQ ID NO: 653 - DNA, 354 bp, Glycine max
  unsure at all n locations
tagctacacacacccatctaanaactaagctcacctccttgagaaacttccttgagaagctagaagctagctacacanccctataatagctaagctcacccncatgacaaanaaacatganaatacanaaaanatcctactacaaagactactcanaatgccctgaaatacaaggctaanaccctatactactagaatggccaaaatacaaggcccagacgaagganatacctattctaatatntacaaagataagcgggctcatacttagcccatgggctcgaaatctaccctaaggctcatgagaacnctanggtcttcctttggatctctagcccaatctacttggagtct

SEQ ID NO: 654 - DNA, 445 bp, Glycine max
  unsure at all n locations
taatagggtaagcactacaacatttataatttcaaagcaaagcacataataatagctattgtacataggtttgatcacacataacacactatagaatattattcgtcataattaacaaacaattctaaaagctatagcgtcatggtactttaagatgacatatagagttttaggtttatcaaagaatttcccataacaaatccaggactatatcccaacattgcaaatagtacaagagcaagcaatcaatatactttagaatctcacacccatattccatttcaagcattatattttttcatatttagacataacttggcttatgttctaggccaatattggactttattttacaccagcttattggactntaagaatacatcccgcaacatcaaatgactcaaatccattactgcaaaatacaaatacccagaggaactacaac

SEQ ID NO: 655 - DNA, 520 bp, Glycine max
  unsure at all n locations
atgtaattgaaacctttgtaagncccgtcactatagaacactcaagcttctaagattattaataatatatccattattcaatattttcaattaattataaaaacaaaattatttatctaaaaaagaanaattaaaaaaatattttgaaaacaaaataatttaaaattactaagagaaagagcaactaagattttgacagaaaaaatgaatgcaaaaataacacaattaaaattaaaaaataataaccattaatgtcttacatttttatgcataaacatatatattacttttaatttaaaaataaaaatattttagtcatttgtgtgaaattaaattacttacaacaaataaatttaattcaattctttaatagtaaaactctttatatatatatatatatatatatatatatatatatatatatatatatatatatatatatatatatatatatatacacacgtatcagggacatatgtgggataatatgactacgttatatatgcgagtggagatgctg

SEQ ID NO: 656 - DNA, 420 bp, Glycine max
  unsure at all n locations
agtacaataagctntatgttctaaatctactggaagatgacatcccttgccatgcaccatctagaatggggaaagactggtaggggtcttataggctattctatacacccacaaagcatcatccaatttagcaaaccaatctttactagaattctctttatctttgtaaatgagacttcaacttgaccatttttttgagggtggtaaggcgatgcaaccttctgtctgacattatagtgctccaatgccttctgtagttgcacattgcaaaaatgggaacccccattactgatgagaactctaggagtttccaacccacgaaaaatattcctcttcacaaaccgaatgactatttttgcatcacctttctgtgtggcaatggcttacacccattttgatagaaactctttaaatgacaca

SEQ ID NO: 657 - DNA, 265 bp, Glycine max
  unsure at all n locations
gtatccattcagagaaatntccttttgggaggtcatcatgaggccaacaagattccttgtgtgaagtgngacacagtttgcctttctaanaataaagggggccttgngattaaagatttgtctaaatttaatgaggctntacttgacanaatggggtgggagctggctaataattagaaccaactntgggcaagaatcttaatctccaaatatggtggctggaaggagttgatctctggtggaaagagcanattntcctctcata

SEQ ID NO: 658 - DNA, 360 bp, Glycine max
  unsure at all n locations
tgaccttgtttacagcgacgggcactctttagaactgacagaggcccataatcagagctggaaacgccaggaccctattggacttcttcgagtccactgggtgtcttatgggtgcgatccctacaaacaatagatgacatcaganatcagttgagcgatgtgcatacttacctatgtcacgatggcatgaccttgctgggggcacgggcaccctgtaagactgacagaggcccgtaacctgagctggaaaccctagggccttgttgggtttctctgagaccacggcgtgtcttgtgggcgcgatccctagcaatagtggatggcatcacaaatcaactgaaccatatgcatacttaccta

SEQ ID NO: 659 - DNA, 360 bp, Glycine max
  unsure at all n locations
ttatctagtacattgtntttgaaacaagcaccctacagtagaattgccaacaatagacattgtttcagttagggttttcaattatcattattgacgacttttagtgagcctcctaaagaatgtaaacgcgtggcttatgccaccctcttgataaactaagaagaagaaggtgaataataaataatcttttctattaaaataatacggtagttggtagaaggtatttataacattaaatagtactctcttcatttgtaaacgatatttatntatatacacatattaagaacgtcaaaggatatatattacataataagggttcattgagtgctatagattttaatattactttagttttat

SEQ ID NO: 660 - DNA, 390 bp, Glycine max
  unsure at all n locations
agcttgtagggttatagtctcacgattgtcacgtgctcatgcaacaattgttagccgtggctatacgagacatcttgccaaacaaagtcaggttcacgataacttgcctgtgctttttcttacatgctatgtgtagcaaagtgattgatccagtaatgtttgatgagttggaaaacgagaccgcaattatactatgccagttggagatgtattttccccctgctttctttgacatcatgattcacttgattgtgcatctggtcagagaaatcaaatgtcgcggtcctgtttatctacggcggatgtacccggctgagcgatacatgaacatcttatnagagtatacaaagaatctatatcatccgaaagcatctattgttgagaggtaca

SEQ ID NO: 661 - DNA, 111 bp, Glycine max
agaatgaagtccactcaaacctgaaatctccaacttccactcgtagacacgcacttcacgactaccgaaatgccctccttttgcgatctggagcggaaatgatggccaaag

SEQ ID NO: 662 - DNA, 404 bp, Glycine max
  unsure at all n locations
agcttgtaccagccactanaccttcaatttcaattgtangctntcctaatttcttgaccttcctcctacgagagaccaacttcaactcagtatgttcctgtanataattataattaattagaataaataaaattgtatataaaatntaaatatgttataattaaagaaataactacctctcttgcccacactttggctaccacatgattaacatatgatgtcaacactaatgtatcttgnggcccacctggaaaaccctatgaatcaacacctacatcctttgtaattggatcatgaggttcctcatgagtctcatcagcagcatcatcgatatgcccattatcctcgacaatagttgcaagtgttcattatctacgtgtcgacactttcaatcttcgacgctg

SEQ ID NO: 663 - DNA, 319 bp, Glycine max
  unsure at all n locations
gcacgagacatcagggtttagtattccaagatacaacatatatcgcatgaacattgttagatagagaacatccttaataacatcagtcatccagtaggaagaccaacacgttctttatctgtcttcatacaccactactcacgtgatttaattttggatagtttagttgcatacttgtccataccacgcaccanactntcatccaaaggcacttatttactgaaccacagctntaccaagtacaacagaatgctcgggagttggatactcagtattcacttaccggtttatactactttcgtgatccagtgcacttgtc

SEQ ID NO: 664 - DNA, 349 bp, Glycine max
aagcttctatagaatgttcgttcctaatttctctacaattgcatcacctctcaatgagctggtgaagaacgatgtggcatttacctgaggtgaaaaacaagagctagcctttggtttgatcaaagaaaagcttactaaggcacatgttctaactcttcttgacttttctaaaacttttgagctacaatgagatgcctttggagcgggagttggagctgtattgatacaaggcgggcaccttatttcttatattagtgaaagacttcatagtgccaccctcaactaccccacctatgataaagagctatatgccttaataagagccctccaaacttgggaacattacctt

SEQ ID NO: 665 - DNA, 295 bp, Glycine max
  unsure at all n locations
gtcacattgtcaaagctccaatcttgtnnttgaaatagagagagcaacaacagcaaanactacaatcgaagaaaataaatcataatcgaagagcanaaaaaatatcagaaacaaggttctaacgtttctctcacacaangccttttatttcctctnctaatccatttttcttttcttttggtattccaccanagacaatttttttctaatggaaaaaacactcgactggcagagaaatagtgaagtgaaaagagagactgagagaanagatattattctggtgacgctgatgtgt

SEQ ID NO: 666 - DNA, 429 bp, Glycine max
  unsure at all n locations
agcttggcagtgtgacattntcttctgagtatttaatgcagcagattaatgagttttcattcttatcactgaatttcccatcgaagcacaaacacaatcaggagcactaggtttaatataatccttagcttgagatgccaatttcctctgctccctgcgtagttatatgtcaaaagtggtaaagactctgcatcatcataacaatcaaaccaaataatgtgcataaggatttagctcttctagagtgagcaagtgtgtaaagtaagaaagtaaaagtgaatgtactgttgatttgaattgatgtacctggtggccctaactaactttaaaacaatggggaaacacccttagtttctcactttatacatttactaactttagaggagtcaaatccctgcatcagaatatgaacaagaaaacatcacctta

SEQ ID NO: 667 - DNA, 459 bp, Glycine max
  unsure at all n locations
ntatcaccaggatgatcaaaatgtttttcatcattgcttgagttggaaggttgggaatggggataaagtcagcttttggaaagataagtggttaggggaaggtcctactctacaacagaaatacaatcagctgtttctaattaatagacagcaatctgaccttatttcaatgatgggctatttctctcatgatacatggagatgggacttgaaatggagaaggaacctgtttgaccatgaaagtgatctagctgtcgattttatggaagaaataagctcttttcattttcagagaaatgttaaagacatcatgacctggaaagctgatcctagtggtgtctattccacgaggtcagcatacaaattcatgataaccccctctttcccagcctttgatctgagatcctcaactntattatggaaattgaagattccccagaagctgcagttttcacttgg

SEQ ID NO: 668 - DNA, 306 bp, Glycine max
ttgctgtgatgaacaaaatttagccaatattatcagataaatcaaatacttaccgtagaattactgaaaatagaatctacatcatcaagactaatattagcctgttcaaatacaggaggcttatatcccttcttgaaccagtcattctcaatgacctcagtaaatgtaatccgctgtgtcatattattaaaagaaaaacagatgccggttgttaataataatatatttggtgaaatggagggaaaagtaaaatattctgtatacactagattagactagagtactatataattaaacaaagaaaac

SEQ ID NO: 669 - DNA, 363 bp, Glycine max
  unsure at all n locations
gagagtcatcttgatatgacagctntggaagtcctcttacgagactatgctctagcatgaccaagcttcttatgccatacccagtgatgctctntgatttanagtaagcatgagaacctttgactggacagatcaccaagtttaatattataaagaattccttgtctcttagcaaagaagagtgaagagttgtccttgntctgaacaatacacatccttgttaaaggtgacattgtatccactatcacataatcgacttattctcaacagaatatgcttcaatcctttaacangtaanacattatctatataagggtagggaggaacacatactttacctacacanngtatcatacctttctg

SEQ ID NO: 670 - DNA, 505 bp, Glycine max
  unsure at all n locations
atatgaatcctgcangcagtnatcccttagaatgcngccggtcgnancctnggaccgattcatgcagacaagggacncctgtanagcatacataggtttttgtcagctgaactaatgaggcgaacatgctcatcatgctgacgcaactcaactcatggggctcctcgagataatgataattaagcagaaacctaagatggcctgtcaatcctatacagcaataattacagaacccctccttgccttgcccaccctttggctaaccatgagtaacacacgacgtcaacactaacgtatgctgtgcccacacctgaacaactctactaatcaccacactacctcctttggaattcgatcatgaggcttctcatgagcctcatcaggggaatgattgatatcgcccattattcttgacaataggtgccagtgngcattatctacgtgtccccactctcaatcattcnacgctgagggcgttctgctcgacccactaacctntctaccn

SEQ ID NO: 671 - DNA, 228 bp, Glycine max
  unsure at all n locations
cttattattattccaataactntgtgtgcggaacaataaaaataatactcataaacatattananagcatttaacaatgaggaanaaaatgtcatataccatanaagaaaaaaagccacaagaaaataaaaataaaatagtatntattntctanatctacctncttattacctaattagctcaatcttgcaaatttaaaatgcacaattgaccaaaaaataacttgat

SEQ ID NO: 672 - DNA, 226 bp, Glycine max
  unsure at all n locations
agcttgagatgaggaagtgttgaagggtgaattttcctgcttttattgttgaccacagagtggtacctgnagatatgtcgcggnggtcaggagaccttggggacgtcaggtggggtgctattgcccaaaaccaagcttgaccaatcccgacccaaccccggcatagtcggtcagtgagaacatgtgacgtacctaagcaggcgagcttcttgcagtcacagataaa

SEQ ID NO: 673 - DNA, 296 bp, Glycine max
  unsure at all n locations
caggcaactaactcctctttcanaaccatgctatgtgctcgcgactggtccctttcttcctttcgcaacttgagttcactattgctaccncatagagctccgcgaaatttgttccggccatactcttccttgcgagccctcttggtctcttgttcaagggctcttgcggtaattgcattctcttcccgtaacccggcacactccttccgaacgtgtgtagcggccaacttgaacttcttcttggcaagttttgcctttcctaactcgctattgagagcttggacttcttcgtgctc

SEQ ID NO: 674 - DNA, 113 bp, Glycine max
  unsure at all n locations
gctgcaagcttggattgattcggtctgacaagggattaatgnttagtaatttaggctacaacattgaacaaaagaggcaaatatgatcatcatgctttgataaaaaaaaaatg

SEQ ID NO: 675 - DNA, 320 bp, Glycine max
  unsure at all n locations
atgagaatggggtagatttggagcatactctcatctcaaacaagtctataacattaatctaaactcgctcaaactggttttacaacgaanaatctaccgaatcaataattgactcctcaacacccaatttaccctagaaatggctcttgccttcactttggtcactcatnttcctcatttgctcagcccaagctgtcccataagtcctaaatgacgattcanactaggattaactcactgtaatattcaattaccactaaatccagaattagctnttcagacccctcaagcattacactgtgtcactcatatcactacat

SEQ ID NO: 676 - DNA, 348 bp, Glycine max
  unsure at all n locations
aaaaaaataatttaatcgaactgatcgaaattcggaacatcactctaatctgtgtcaaatacaanaaataaaaaaagaacaccatatatttaaaaaaaaaaaaaaatttctccacgggacctatgcaacaggatagcaaaaaattcagtgcgctgagtgaataaatgcttccaaaagggcgtaaatcgaggggaacgaaacaaaaatgattcatatctgaaaaaaaaacagacaccaaataccaatgaaagctttgcaaaaaaagcatagatcagcgcatatcaaacatagagcatgattacataatcagatgaaaacgcggattatatatacaatagtaatatgagt

SEQ ID NO: 677 - DNA, 312 bp, Glycine max
ctcctcatacagtgaaactggcacaagtgaccagacatctgatacggtagagggtgatttattattcatgtttcatagttgtatattataatcgcacgtatatctataagaatgatgatgggtagcacttcatcaagtgaaacctctattcttaacacatgaggaagttcacagtacaagtgaaccatttggtattctcaatgacaataagttaaaaatatcagcattcaatgtagagagctcatccgaagaagtccgggagatcttcatgggtgcatgagctacagattctgcaagagttattgaagtcac

SEQ ID NO: 678 - DNA, 381 bp, Glycine max
  unsure at all n locations
cgctctgncattcagnanagaaggagggttgagtcccggtttatggtttgatcccacatcaggaacgttagcaatatcagtacttggtcttccgtatgagtttgaggagtcaactgagggtatagtctcaatggccagcttggttatagtatcttcttgcgtacctgattctggagagccctgcttctgcataaaattgtcgacagtattatttctaagttctggtggcatggattcacgctcaccagatacagggatttggttgatttcaataactgagtgctttgtgtcatcagcactcaacttattcagctgatagacagaaggcatagactgctgtccagatgggagcctcttctcagtgtttcaactgatggactg

SEQ ID NO: 679 - DNA, 381 bp, Glycine max
  unsure at all n locations
ctaaacttaaatctcgcgatactaataaatggttaatactgtattattctggttttacatttntgttctatgtggctttccagattatctcttcacctagtaaataagagactaatctaccaagcatgatctggtggtganaaagatcaaccctctctagtctcaatggtacctttctcacaaacaaagttcagaggattgaatcanaaatcacattcacatgctcaagggatgtgagccgctgtcactcacatcaatgtatggtatgtctgtaatacgttgttggagttatgttattggcaaaatggattgttcacaacataaccactatcatatggcacataactcacctattgagagcatgatcaacaccttcagtat

SEQ ID NO: 680 - DNA, 317 bp, Glycine max
  unsure at all n locations
agctngaccgatcccgacccaacccgcgaanagtttcatcgtgagtatgaaaagaggcacatgtaatcatcctgctcgaacaaatgacaacactggggcaaataaagagggtgagaatgtagaacaaacccatgctgcgactgccattactatacggacaaggttcccaccaacccaacaatgtcattgctcaaccaataacaacccttctccctacctaccacccaggtaatcacaaaggccatccctaaatcaaccacaaaacccatcttccacacaaccaatgctaagcaccacctttagcacaaaccaaaaca

SEQ ID NO: 681 - DNA, 151 bp, Glycine max
  unsure at all n locations
cttgcacttgaacgccaattgttatcatcatatactaatggatcacatccagacagcttatccgaaggtgttctaattgtgtcggaaatnttcgacagactacaaaactctggcgattaatatttctgacgaccattattctaacggattt

SEQ ID NO: 682 - DNA, 334 bp, Glycine max
  unsure at all n locations
acatgatacatgtcttggtttggctgggctcaaagataaaggagatgccccacattatttccatgacacanatgcanagatgatgatttggaaacttcatgcaaaactggtcatgcatgcacctatgtggacactcaagtgtcaaacttttatggtcatgtgatgctagggctcangatttagatcaacccaatgttgccaaaatatgttcttttatccatttgtgcattcatccgagtccatttcgggcgttcggtgaaatttcacagtgttcacccttcaggtgtagacacattntttttcaaaaactagttatgatcaatgaatttttttc

SEQ ID NO: 683 - DNA, 407 bp, Glycine max
  unsure at all n locations
gacaactctgatatcaagagacttacacacacacactntntcctagtcgatcactcacatanatntccattctcnccccttggttttgagtttatgcnttcatttgaaattagttaattacttatgtgagttcttgatttattccctatatctctccccctttggcatcaacaaaaagccaaagtgtgtaacaagtataagacacacatatactattaatcattcacaaggcatacattgaagaatataaaccaatcatgaagcacgaaacatgaatagatcanatatataataaccacatagtcatataatataattcataattgttcattcacaccatgccaatatagaaaatactaaatatccaaatgtcataataatatatggtatttggataagtcactaca

SEQ ID NO: 684 - DNA, 278 bp, Glycine max
  unsure at all n locations
agcttccttcanaaattaccatatttgcgtggtgactactaagagataggctaccaacaagatcaaatttgaggagaaagcaaattgaggtcgaagatccactgtgtccattctgcattcagctgaggagagcgcttgccaactattctttcagttggagaaggatactccgctatggtgggaatcattatcatgggtgaangtagtgggggcttgtccaaatcatacaaggcaacacttncttcaacacatatatggagcgacagatggaatgagag

SEQ ID NO: 685 - DNA, 454 bp, Glycine max
cagaggtggtggttgtgttatgttatcgattttcactctctattcatatgtttccgtatgtaattatgaaaacttcacttaatttatgcttagttttgattcttatttttggctgtgttgtttatttggggactggtgtccattaatatgcttttggcagtgctttttcatttctaacacgttcttgtgttctgcaatctttttgcatgtaatttcttatatacttagtagttggaatgggcactgtgttatcttttcaggtctaacacgttcttttgttctgcaatattattgcacatgatttcttaaataccgagtagttggtagatattgtttcttttaacagcatacatactgccatgtgccatagagatatagaactgcttgactcctggtgtgcacaatgcgattataactcaactcactgtgcttgaatctgcggacttctgaaacg

SEQ ID NO: 686 - DNA, 304 bp, Glycine max
  unsure at all n locations
agctntgctgatttagttntcacttacgaaaggttcaaagtgagtctgaaaagaggcaaatttaatcatcctgcttgaacaaatgagaaaactggggcaaataaagagggtgagaatgtagaagaaacccatgctgcgactgccattcctatacggncaagtttcccaccaacccaacaatgtcattgctcaaccaataacaacccttcttcttacctaccacccagttatccacanagggccatcctaaatcaaccacaaaacccatcttccacacaacccatgctaagcaccacctttagca

SEQ ID NO: 687 - DNA, 314 bp, Glycine max
  unsure at all n locations
gcttctctgggacctangcanaccttcaactcatccttcacgatcaaagtgtctactcgtcattggtcgctntcctccctccggagcttaagctcgctatctcagttcggcattntccttttggatcttaagagttgctgattngaacctttattttgaccgttgggcttgctcgagtcctgccctaagggactacacctcttcatcttcctccggtgcctcaacttcctccccttttgcgtgtgggatttcagccacttacggtagcctccaatgggcccgttgtctntgtctttctttgcattatttcccat

SEQ ID NO: 688 - DNA, 120 bp, Glycine max
agcttgaccaatcccgacccaacccgggcatattcggtcagtgagaacatgtgacgtacctaagcaggcgagctcctggcagtcaacagataaaaggaaaacacgaccacagagcaggga

SEQ ID NO: 689 - DNA, 224 bp, Glycine max
cttcaccttcttgtcttcaacgtgaactatgaccattgttctatcttcccgcgatgcttcttttcatgtccgcctgagtgggcttatagcctaaaccatactctccacgatttgcttgtgtatttatcaggctagttatgccgacgttgtatttgctatacccatcctgggttcataaccgttccccaacataactcgggccatcattaccgctgcatcggaca

SEQ ID NO: 690 - DNA, 209 bp, Glycine max
tctgtgtggtggtcggcagaggagcataaaccacacagtctggcgacaggtgcagatatttgagtcatggccagttgggttaccaggttaaccaaggcatctagtttaccttcaagcttcttagtctcacctgatgaagatgaattcatggctacttcaagcactcctctaatgacaataacatcatttctggcactgaattgctggga

SEQ ID NO: 691 - DNA, 386 bp, Glycine max
  unsure at all n locations
accaagtggcctagaatttgatcctggctgtcgacactctttaagtgaagagccgcacggttggggagcctatcctgtgccagcatgcaagcttaaagggctgttatgtaagggagcgggttacgcatgtaatataaaaccattggtgtgggattagcctacaactaatgctattctagttctctagataggtgggtgacaggcattggagacggcgaaaaagttaactataataccgcatcatactaatgaaaacttcgcatgctcaatgaatgcttaataagatatgtggctgcacaagaaaagtgacacttacgangaccgcgtctatagatcgactcttgccggatccttgcattgcgtctttataacgcatacattctgac

SEQ ID NO: 692 - DNA, 187 bp, Glycine max
  unsure at all n locations
gcttatattgtaattgtttaagttgtaagactctcgaaacaccttgtanatcctgagnaaaaaaagattangtgcttaatttgtatatctgtctataagacattaaggctagtttatgtgcatacaaacatcaacaactctacntaattgttagagccagaaatggcttaatagtcaaagaatactt

SEQ ID NO: 693 - DNA, 614 bp, Glycine max
  unsure at all n locations
tcgacacttcanttctccattgtatactcncganatcataattcntntactggctactgacacncaaacnannacccgaagaganaattgatgcgtctcgtacncgagatcctctaagtctacctgccgcatgccagcttgtggaagaggcaaataacatattatgcgtgttgctatataactatctcccatctctcaatcaatcctttgtatagtgtaggcttgtacaccacaaacttgcatatggggagtttgaggaggtgtacaactctatctttacgctgtgagaattgttcatattggctgtggctatcctttgtgaacatgacggtttacgtgttgggcgatggtgtgcgtgactcaccacatttgctaaacttgtgaatgttctctgatgtgacgatcaagattacgattgttgctgcataacgggttctgaaggatgtatactgtacgggtgntgactcttatctactctattccacagcacgcagcacccaagctacttgtcctccggaaccataaatcgtacgacgtatcatacgttccgattgatcaatcgaatgtaactatccacatctcggttcgatcatacctatcaccctaactatacg

SEQ ID NO: 694 - DNA, 436 bp, Glycine max
  unsure at all n locations
caagatgatgggctcaacatatnaacaaacccgctggccaatcatggaggngggcggataatgccatagatgtgagtaggncgcaccggcccatacttttgaaggatggaacgacctccagaaggtttatctacgaagccctgtcaaagacggtatgatttcccgtgccagagaacatctttgctaatgcattccgttgtactgcatgacatggaaacatgctcggcggatagagatctattgcacaaaatgatacaacacggctagctagatgtcgtctatgatggggaggaagaatcacatgttacatcgccgctaccaatgatcaagtgctcataatcctaatccttggtaatcattacctagacactattccaatgacccaacacctttgcatgatggcagcaacattctattcttacttatcgcacaactc

SEQ ID NO: 695 - DNA, 425 bp, Glycine max
  unsure at all n locations
agatgcatgcccatctattaaatgttgcgagtataatctgctctattattttacaacacccttgtttaaagtgtttcggtaattatatataatgaaatggaaactttatgcttctatatttatgattctatcgagttcaactgactatataccaatatttttgtggtataaatgcactctaaccatcttaattattactaaaaaaatgacatctaagacagattgattagaatatgtttcatcaaattatttgtaaaaaaatatatagtttaaaacgattcttagaaaaattatttcaaaaaaattatttttgtaaaatggtttttaagaaaatcgtattagaatctttaaatctgttaactttttttggtttaaaaaagacattataaaacnggttctctaaaaatcgtcttagaaaatctatt

SEQ ID NO: 696 - DNA, 532 bp, Glycine max
aacattcatctccatgtactattagtgtagcaacatgataataatccacccagcacgtacatgatgcttcgtctcggatcttatatcacctgacgcatcaagcttgagcgaaaagtgtgaagatcacacttcctacttttattcgcgaccacgagtggacctggagatatgtcgccggggtcaagagatcttggggaccgcaggtggggtgctatcttccaaaccaagcttgaccagtcccgacccaacccgggcatagtctgtcagtgagaacctgtgacgtacctaaacaggcgagctcctgcactcaaccaataaagaataatgacccaatgcaggacgctgcgtggtgctggctactatggtcttggtgatactggatatggcttagctaagatacctcggatgtaatcgatacaagctaaaatgaaaccgcagctatattccttggtatccaaccacggtggtatgttcaccctctataatggatccgagttgcatctcttgtcctcttctactggacggcgttatc

SEQ ID NO: 697 - DNA, 455 bp, Glycine max
ttataccatggatgaataacagcggctcagctacatcaaaaactaccaaaagaaacttagagttgacaagtattgcagcttacaaagttcattggatactggaacaaacaaaggctcgactaaaggaaaaagagtcattttaccttcaacctttgttgggagcccatgttacatggatcaactttattttgatggtatggcaatatgtggtcatgttggtttcctaaatctttttataactctaacatgttatccaaattgtcctaaaattcgtagattactttcacctttgaatcttaaaccaacagacaggccagacattgtctcatgaattttcagattgaaatatgaacaaatgctttctgacttaccaaagcatcagctgctcagaaaagttgttgttgcgcgtaagtttagaatgatctttgctgttgaacgtagaaatcaattgatca

SEQ ID NO: 698 - DNA, 431 bp, Glycine max
  unsure at all n locations
gcttgtaagaattgcaagatcatcttccttgactacagttngaaaaagatcgccaccaatataaagagatgacaatttagagagtgatccaagactttcaaatggatctccactgaatttattagtagacagatcaagatatcttaatgatgaatgctttccacacgatctaagaagagcaccaccttttgtgttgttggaagaatctatccgctcaatatttttaaatgcacctatataatctgtcagatggcctgaaagtcgtcaactctgaacttgaagtcttgtgagtccatgggaaatacattgagcaagaatctctaacagttcattaacctgctcggttgagtttgagattcgagatatcaatgtcccttaagtcgcagagattacccaaagaagttggaatgttttcttcatgtcgatacctg

SEQ ID NO: 699 - DNA, 381 bp, Glycine max
  unsure at all n locations
catcangaaacaatntcactttaaaagtgggtcccaattggattcctaagtttcaacttacctttttggaagtgacatcatggcagttaggtcccagctttccatcgtggattcagtcacaaaacaaacttcaatatgttggactgtctaacacggngattttagattctattcccacttggttctgggaaccacactctcaggttttgtatttaaacctctctcataatcatatccatggtgagcttgtgactacaataaaaaatccaatatctatccaaactgttgatctaagcacacatcacttatgtggtaaataccctatctatcanatgatgtgtatgggttaaacctttcgaccaattcattctctgaatccat

SEQ ID NO: 700 - DNA, 389 bp, Glycine max
  unsure at all n locations
agctntgagccanaatcatgactcaccatataccttgacccagggtgagaatgccaatccttaccctcggaagcaaaaaaaagaagagaacgaaaatttccaatcaaaggaaaaaggagaaggaaaatttccaatcaaagaggaagcaaaaaaggagagaaggaacatttccaatcaaaggaaaaagagaggaaaggaaattctcaatcaaagagtgcgagacagcaaaaagaaaagaaagataattcccaatcaaagaatgggagatagaataaaagagagaagtataaaagaagactgctcctggtcaaagaanacagaagaaatgtgccgagaggtccttggaccagacgatatctgaacaatacagaattgtcaccaaatgaaca

SEQ ID NO: 701 - DNA, 346 bp, Glycine max
  unsure at all n locations
aacacaccaaaagattatgatgatgcatggctcaaattctcaccactttcaaattgagctttcaaaactatcatgacatgtagaagaaaaataaggatttcaaatcagaaaatgtcaagagacttttattttcagaacaattacccatttcttgaacatatcctataattcaaagaanaatatgcaaagttgtacatgcaaacagaatttgacctaaatattaaactagaaacccaacatacttaaaaacaaaactaacaaaactaacaaaactaggaataccaaactaacttaaaaaattactaaaccaaaaccaaagaacaagtcccccatacttaaacaacac

SEQ ID NO: 702 - DNA, 416 bp, Glycine max
agcttggcatcaaagcgctctattcagcatttgcactccacccttctcggggatcttagcagggtttttttaccaataccttctctctccaatatttgcttgaaatacattactttaagaattaatttctaaattacaccattttctatagcaaagtcgggttctgacatcccaacttgatatttttttatcattctacacattctctctccattgttttcttacaatacactactttatatattaattctcacactagatcactttcaacaaattcacgaagatcggggtcggacttcccttttttatttataaaacactctatatattattaaaattaaatattatattatataaaattatttctaattaatatagaatttagctatctattaaattaatttatggaatattat

SEQ ID NO: 703 - DNA, 434 bp, Glycine max
  unsure at all n locations
tgataagtntatgggctaaacttggtttgattaggggtgattcataattagtcatcaaacaattaacttgaanagttaaatgacttataagagtaatttgatgaaaatactttttttgagccacaagattatacgaaagatttgataatattaaattcgagcagaatatgcttcctcgagataaaaataaagaagcaaatgacttgagacaaattgcttttggttataaaatgaatgagcagaattttgaatctcttatagcggtaaaaaaatttagcagatgagttcanaatttttaatacaaatactttaacacctcttgattgggaaaaaaaaatctttggttgattatctctaanatccaagctcgtaagtttataaaaaaagataaatatagagcattgaactatgctgatttaggagatgacgtatat

SEQ ID NO: 704 - DNA, 420 bp, Glycine max
  unsure at all n locations
gcttcttcttggttctctccccattngaaaccatcatttttcttgagcacttcattgagaggtgctgccaatgtgctaaaatccttcacaaatcgtctataaaaacttgctaagccatgaaaactcctcacctcggacacagacttaggtgtaggccattcttgaatagccctaaccttctgctgatcaacttgcactccttttgaactcacaacaaaaccaagaaacacaacatggttagtacaaaagatgcatttttcaagattggcatacaattgttcttttctaagcacagtcaagacagattttaaatgatcaatatgcaaatcaagtgaagtgctatagataagaatatcatcaaagtacaccacaactacactttctatgaactctctcaagatatggttcattaatctcatg

SEQ ID NO: 705 - DNA, 401 bp, Glycine max
  unsure at all n locations
ntataagtgcgggtctgggagactaatgtcaagtgttcgcgatatgtgaagatgatgttccaagtacttcggatttggtccgaccatgccctcctgatttccagctgggaaattggcgagtggaggaacgccccggcatttacgcaacaagcataatgtaaacctttacggttttaaaagctctatagttgggcctaggcttcagagttttcattttgttaaggctttgtgtcttttgttttttaatttataatacaaggatctntcttcatctgttcctggtctctacccattctcattcatttgcatgtttacttctttntctaaaacggcagattcgatgacgagttccccgaagtactaatacctgggacccgtctatcaacttcgagcaagaaatg

SEQ ID NO: 706 - DNA, 421 bp, Glycine max
  unsure at all n locations
ctcctacanttcatctctagcatgcattnttctttctttctttacccactcctcacgtttggttttttagggaaaaacatcataactaaacgcgccacaaggcatccctatcgcaccagatccaaatctataacgatgggtgatcaagaggagacacaggaacagatgacagccgacatgtcggctctgaaagaacaaatggcctacatgatggaggccatgttaggtatgaggcagctcatggagaagaacgccgccaccgctgccgctgtcagttcggctgccaaagcagacccaactctcttggaactgtgcccatcctccctaagcgtgtaggacgggaagggaccactgggcacgatggcacccttaccttgatacaaccgagcggctacccttaggatngccgccaactactcac

SEQ ID NO: 707 - DNA, 450 bp, Glycine max
  unsure at all n locations
tcgtgattttctggcagcattgtgataaaagtccttttagacaaagctctcataacaatttcaggtgccagtaagttagaaatgcatgacttgatacaggaaatggattgngaaattgttcatcaagaatctatcatagaccttggacgacaaagtcaatattggaaattcgagtaagtgcaagatgtattgaaatataacatggtaaaatggatattcaactgcttttattngataatacctgtgcttcttagaatgtatctagtatgatagacctgatcattattattntaatttttggttgtcatggaactgatattcgtgaaggcataactctagatttgagtaaattaaccagggatctatatttgagctccaattccttggcaaaattgtctaacatgagatttctanaatccatgatttgtgctacatgacttactgatttac

SEQ ID NO: 708 - DNA, 330 bp, Glycine max
  unsure at all n locations
agcttnncccagtccatgagccgctgaagttactcttctatcgnggngcaggtttccatgtcgtgtgattccccgagatgaaacaaacattcctcacttgtgccttcgccacgagagaccatgcatgttgcctgcagcgactggtagatgaaccgtctagacatagccacatcttctaatctctctgactctgacgacctattctttgtgatggcatttatgctaactcccccatgactggctagtggattggtttaacgttggggccctcttcttgaaaggatagtctctccacacttattatgtgtagcaccttatacttgaatggcc

SEQ ID NO: 709 - DNA, 381 bp, Glycine max
  unsure at all n locations
ttataagtgcgggtctgggagacgaangtcaagtggtcgcgatatgtgaagatgatacgtgctcatgcaacaattgttagccatggctatacgagacatcttgccaaacaaagttaggttagcgataactcgcatgtgctntttcttccatgctatatgtagcaaagtcattgatcctatcaagtttgatgagttggaaaatgacgccgcaattatactgtgccagttggagatgtattttccccctgctntatttgacatcatgattcacttgattgtgatctggacagagaaatcaaatgttgtggtcctatttatctaccgaggatgtacccggttgagcgatacatgaagatcgtaaaagggtatacgaagaatcta

SEQ ID NO: 710 - DNA, 464 bp, Glycine max
  unsure at all n locations
agcttgagaaggtggcaaaaagcttatagaaactttaacatgtatttactatggagtatgaaaagagaggacttgaacagaggtaaggtataaaacaccagttctgtggtgaaagtaaaaacgaaatatctggctcacacttgattcaatgaattgaatagctcaaggaaatataagcacccatgatggttgtggcatgtacttcaacaattaattcaatatagaaactataataattgatacgaaataaaatgtgtggaaatattgagaccatacttcanatgagtaagtaatatgcatcttgaggttccaagtatatattgatggcttcacagattcatcccttgaagttaaaatactaacaagcaatttgaagatcaactttccaggtatgtaaaacacagaattaggatcatctacagtcttatatagaactgcatcaacctagtccattgatttaatta

SEQ ID NO: 711 - DNA, 502 bp, Glycine max
  unsure at all n locations
gcaccctttgaacccctgannnccctgancccctgttgacaccttgctattcgtgacctctggatactcagccttgtgatcactgtatcaccagcatatctttcagctctattgaaagcctatctgcttcaaagaaaaatcgactcatagtcagggcgtttaacaaaaatcttctggaaaggactcatttttgaattcatctttaaggtgttcagtacatgtatggngtgagacaggtttggaaaatacaattgttccagaccccaagcgagttaattactgctcacaggggggtagagttatgctaaatgtgtcagcagatggtaccccacgcaatgcanatataatgtccactatttccgatgaataccagaagctgaagtactctgtctctcttgaaatatttcaatttactttgtgtgtgaacaaagagaaacagtccacacagatggaacttgaaagaccagatctgtctatacgaatatatgaggagaaangcccg

SEQ ID NO: 712 - DNA, 474 bp, Glycine max
  unsure at all n locations
gctttttggagtagaaacatgggaccaactcattttatttcaaaaatgttgtatctagtcaaggtctaagattccatacaagtttcctagcgatttctaattatgtgggccattaagtctatcatatgctgacaatagccgagaaacccatgaatttcttcgggggcggagtaagtgtctgccatcgccttggccttggctaacaatcggggaagttcctgactcccgttcaaggtaagagcaaaccgatccatccacatggttgcctcttggtgaaagagtcgatcacccttcctctagcctctttntccgcgtatacttgggcatactcgtccgcgatcctatgctcgtgggccgtggctagacctaactcttcttggtacttggcgatgatagctagcatgttggtctccgtctcgcatagacgctgagacaagcttcttttggaccttgaacaggcaactaactcctctt

SEQ ID NO: 713 - DNA, 427 bp, Glycine max
  unsure at all n locations
gtgcgggtctgggagacgaaggtcaagtggtcgcgatatgtgaagatgatgttccaagaactctggatttggtccgaccatgccctcctgatttccagctgggaaattggcgagtggaggaacgccccggcatttacgcaacgagcataatgtaaacctttacggttttaaaagctctatagttgggcctaggctttagagttttcattntgttaaggctttgtgtcttttgaatttataatacaaggatctttcttcatctgttcctagtctctacccattctcattcatttgcatgtttacttcttttttctaaaacggcagattcgatgacgagtcccccgaaggtactaatacctgngacccgtctatcaacttcgagcaagaaatgaaccanacggaagatgaaggagatgaggatgtggga

SEQ ID NO: 714 - DNA, 289 bp, Glycine max
atttcccccttcttctttttaaatataccatttataaaaagggaaaaacttacgtagagttattaacctatttgtggagatttaaaacatctgggttaagagatccatctaagagcctaaataaaatctggaagacagaacaagggaaatgttaaaagaagaagaagtgaatttgcatgaatagaacgcgtgagagaagaaaaagaagggacctcaatttgcccattggctgcagcaatatgaagaggagagtgacaatcatagagaagggtcagagttcaagagagct

SEQ ID NO: 715 - DNA, 383 bp, Glycine max
  unsure at all n locations
tcttctgacccccgcgacatattctcaagtaccactcagtggtcaactaataaaacgtggaggactgactctttcacactttctcacaccgagcttattgggttatggggcacccgtcatatgtggtactaggtggcgatcgggcgatggcgcanaacaaatatcccatttccacaagcccaggcataagcccaccatccccangtgcccacctttaaaattagttcatcaccgggtccccatcaacctctccaagctttcacaatatctaaacaattcaattccatttgtcatgaaactaccttaaaaacagagtgaaggtagaaatctttacacaagattcattcanactccacatagtttttccaacccacatacctcag

SEQ ID NO: 716 - DNA, 69 bp, Glycine max
  unsure at all n locations
agcttgaaggtgtgtaacccaccattttccatattatatatactggnaacgtgtctactatcatggaca

SEQ ID NO: 717 - DNA, 240 bp, Glycine max
  unsure at all n locations
agctntgtataatgagaattgtccttcaacaagctttgaaanttggcatctgaagtctgaaagctctangcagataagtctgcaaaagctggaagtggtgctgaagtaaaagatgcaaggatgccagctattggtgcanaggaagagggagcatcagctgctctgatcttggtcttccttgcctctagaaaattaactggttggtcattcgcattccaacangttcttatgatataagct

SEQ ID NO: 718 - DNA, 461 bp, Glycine max
  unsure at all n locations
agcttggttcaaccncgtaatccaaggaatggaaattctgattgccaatacttcaacaacatctcatagggatgaatgactcgggcatactttaagcttatgcacggaaaatgtaattatgaaattgagatgcccgaagaaacaccatttcctagttaaccatgcattaggtaccatgttcaattattttgttttgttgttgtgtgttttttttttagaaatgggtttatgatcccaacatggttggctcatggtgcctaacacatgcaactaagaatgtagtgtgaagtttcacgcttccccttttttgtttttgttttgtagaggaaaacgcaaggatgagcaaacatgaaaacaaatggtatgcaattntgcagatcaaaaagtttgttgaacgcatatgcatgatgatgccatgactcatgcanaatgtgaggctggaatatgataacggacaaatg

SEQ ID NO: 719 - DNA, 398 bp, Glycine max
  unsure at all n locations
ttgagggagaatgttagataatatgttttttctttaataactttcttaatatacatcgtagactatattaacacattctaagtaatcgattacgatttttttttattttttattttatgatgaatttcatgctgatcacacacactttttcactcatataatgagactaaaagaataaaatatacgtatacacgcaatataaataatggaaaggaatataaatttactgtgagtcgacactttcaattatttttatgaaatatatcaataaatattcattatcctcaatcaattatgaagtttttagacgaattttctccttttctttgcgagacttctttcatgtcgggcgatggctctcctttcaagatgattattcttatttcanaaacttttat

SEQ ID NO: 720 - DNA, 516 bp, Glycine max
  unsure at all n locations
ccggtnatatntttgaaaccctggagtttggctttaccatcgatnacccacannanaaanaanaacacatntttgatgaaacacgatgacacaatcacaacgacttgtgtcatgtattgtactacggagatccttaacgagtgaatctctctctaggagacacgtatggaactgtatgaatattacgcatacctactttagagcgaagctctactgcttgagaagacaaactagatattcacacaaccccatcttgatatgtttagctcacccgatgacatattacatgttaagtgtgctgaacttctgttgtgctgagacacatttattgactctctatgataccgtcctgcgctatgcacaggttatagagacttatcggtgacctgtctaacgaaatgccagttgatatcgtgtcatctataatcgggcttatgattggacacgggctcgaaactaacgtatggcgaagacaacatgtggactatcttggtgttatctcactgatctgggaan

SEQ ID NO: 721 - DNA, 391 bp, Glycine max
  unsure at all n locations
atcttaagtcacctgccgcatgcaagcttgcctcanagaggtccaggaaggacatggcatccgaaggaactagttccgctccggagtatgacagtcaccgctttaggagcgctgtacaccagcagcgcttcgaggccatcaagggatggtcgtttctccaggagcgacgcgtccagctcagggacgacgagtatactgatttgcacgaggaaatagggcgccagcggtgggcatcactgtgtactcccatggccaagtttgatccagaaatagtccttgagttttatgccaatgcttggccaacagaggagggcgtgcgtgacatgagatcctgngtaaggggtcagtggatcccgtttgatgccgacgctatcggccaactcctaagata

SEQ ID NO: 722 - DNA, 289 bp, Glycine max
  unsure at all n locations
tgctatgtgctcgcgagtggcacctctcttcccttcgcagcttgagttcactattgctaccccatagagctccgcgaagattattccggccatactcttccttgcgagccctcttggactcttggtcaagggctcttgcggtaattgcattctcttcccgtaacccggcacactccttccgaatgtgtgtagcggccaacttgaacttctccttggcaagnttcgcctttcctaactcgcttttgagagctcggacttcttcgacctcttccgaggcttcaaactctct

SEQ ID NO: 723 - DNA, 296 bp, Glycine max
  unsure at all n locations
atgcaaaaggtacgtatagcaacgtgccttctattcggtcaagcagacttgcacttcaacttatcatatttttttcttcttaaacaacatttttatcctaaaataaaataaggactctgtaattntattttattttaaaaaaatatttttaaatctcatatatttaaaagagatgatgaagtcagagtaattgattatggaatttaaaaatccagtttataaaaaaaatgtgattatcccatcgaatttctaaaaaaaaacatgacacatcagtgggttattaatattattgggat

SEQ ID NO: 724 - DNA, 125 bp, Glycine max
  unsure at all n locations
gtatgtgnttggtatttatgttaaatataaagnttaannataanaatgagagtttgtattaatatttaatagtatgtaaggngatgaaaaaaataaatatataaataaaatgaattnattattag

SEQ ID NO: 725 - DNA, 392 bp, Glycine max
  unsure at all n locations
agcttcttgaggaagcctcttaatgaagcttcttgaggaagctacatgagctgccttggtaaaaacgttgcccagccttcgataaccgttggatcttcgtgtaatttggtttgcagcttcacaagacaattgtacacgatctgcctgttgggatctttgagaagatgtctggagtgtgtgtgaagcttccgttcccgagagaatttctcatttaagcatttcagcctttgctttcgtgtagcttaagaattccttctcctttctttcttccanagtcatttctaacgccccaagcattttctccatcacccacaaccaccattagccatcacanaccgccattgttctccattgagacccacattgaaaggaacccttcaaccgaagcggaa

SEQ ID NO: 726 - DNA, 447 bp, Glycine max
  unsure at all n locations
ggaaggtttgtacatgaccaaatctttagttaatcgtctttacctanaacagtctttgtatttgtttaagatgcatgaagatagatcactaggagaacaattggatttgtttaataaactgattctagatcttgaaaatatcgatgtcactatatgatgatgaggatcaagctttgttattgttgtgctctttgcctaagggttactctaatttcaaagagactntattgtttggaagagactttgtttctcttgatgaagtgcaggctgctctgaattcaaaggaattgaatgaaagaaaggaaaataagtcctttacaagtggtgaagggctgacagcaagaggcaagaccttcatgacaaatagtaaatctgataagaagaagcanaagccagaaaaccagaagaatggtgaaggaaatgtcttcanaatcagaggtcatcact

SEQ ID NO: 727 - DNA, 329 bp, Glycine max
  unsure at all n locations
gatggtgagactgactctaaatttgatttctgtggaccagtcttagtgcttttgaaattntatcaaaatatacccattggttttttattaaattgcgcttgaattaaactagataaattttgcaatgaattctctattagagccccttgtgagatgaggtcaaattaaggtccatttgtgacatacaaggtggctgccctattgtgcaaattgggtttggcagtgtgtgggtctctttgattttgagtctttataagggtcgaaatgttgtttatagcttcttaaattagctcataaattctttctaaccatgtctattagaaaaatta

SEQ ID NO: 728 - DNA, 429 bp, Glycine max
agcttggtggagttcaaagagaatcgtagaaggttcgggctaagatataagcctacacgcaccgacatgaagagaaacaccctataaaggagaggcagaagtgtgggccaccagcaaggattgcaagtaaaaggaactcccttatgtcacatcaacaagagttttgtcagcgcacgctggatgtgtgaggggtgggttgccatgatccatgatgaagtccctcaagagcaatcaaactgggtgcggccatgccctcctatgttcgagttgggaaattggcaaattatcaaacaacccacaatttttgtggcaaacataatgtaatttggtaatccaaaccctatagctgagcctcggcttgtcttttgctattagatatatataaaatataatctggcttcattttttcttgcactttcatccctattt

SEQ ID NO: 729 - DNA, 265 bp, Glycine max
tctttgagaaaacttccttgagaagctagagcttagctacacttacccctctcataactaagctcacctccttgagaagcttccttaagaagattcgtaaagaagctagagcttagctacacatacctctctaatagctaagctcacctccttgagatgagaagctagagcttagctacacaccccctataatagctaagctcacccccatgacaaaaaacatgaaaataaaaaaaaagtccttattacaaagacaactcaaaat

SEQ ID NO: 730 - DNA, 254 bp, Glycine max
  unsure at all n locations
ggcacctcacataacctgttattctctngnccaagggaaagatttggagtaaaactttggaggtccacgaaacagacgacaaattatttctaatgtataataaatacttttagtttgatatatttttttaaatgaacgagaaaaaaatgatagattaacataaatggaatgttctaacaccccagtgcccggaggcttcccgctatacgaaggtatgtgggaggggtattngacacagacttacccttgcctat

SEQ ID NO: 731 - DNA, 559 bp, Glycine max
  unsure at all n locations
ctcgtaacttaactcggcttcgtactcgcaactgngctcgtatttctatcctatatgttatcncacacgctgtgtattttgttgattctgttcgaacccgngatcctatanatagacctcacgcatgccagcttaaataccaccagcatcaaagatctatggtctgttgacggaacctctccaaatgcgatctttccgcaagaattacggaaagatcttataattgaccttagccgacgtatccatgaagccattgcgacactcaacctattatacgaccagcctttgaaatgttttcattcggagactctcatctaccccacccatggaaatttgagaaactttaggtgcctctccggggaaaaaacatattttctttccggggctccctctttgaccaattgccctgtggcaaggtttagaaaaggttgaagattaaaacactcgggacggctggtgcccccccggggactctaaaactggaagggttggcaccaaggatgggcccccttttgggggaccctctatttttggggggccccttcacccccagcggtgc

SEQ ID NO: 732 - DNA, 329 bp, Glycine max
  unsure at all n locations
gagaaaacttncttgagaagcttctttgagaaaactttcttgagaagctagagtttagctacacacacccctctaataactaagctcacctccttgagaagcttccttgagaagattcctaaagaagctagagcttagctacacacaccccctataatagctaagctcacccccatgcaaaaatacatgaaaatataaaaaaaaagtccctattacaaagactactcaaaatgcccttgaatacaaggcttaaaccctatactactagaatgggccacatacaaggcccaaaagaaggaaaaccaattcctacatttaccaagaagaat

SEQ ID NO: 733 - DNA, 470 bp, Glycine max
  unsure at all n locations
acactcttaggatttgcctagtttacatttcttgcttacattcataatagcttatttcctttaccttccattgtcaaaccgcctagatagctttccttttaccaattagttntttaccttatctttcacacctcttttagtgtttatttggctagnttcaaccatagtttcttttaccttttgttntcaaacctccaacaagaaagaaccacaacttaggaaccaatatgagtcatcattcatctagtggtaatggcaagggtactagtcataaagaccctttatctagaatcttagatgagttgagttccctcacgttatggaaagaanaacaagagagaaaagaanaaggaagaataagagtggaagaaataaatcatgatgaaagaaagacaatatgagaggaagaaagaagaacaataatgaaagaaatgaanagagaaaaacatgcctnctatagtagtcataac

SEQ ID NO: 734 - DNA, 429 bp, Glycine max
  unsure at all n locations
atgatttggattatcctctanggcaatcagtattcagtattttaaattccctctcaaaaaattgcaggcttggtggcggtgccacaaagctgccatatattataagaggcttagtagaggtgcaatagttacacaatgcagatggagggggcgcatagccaggaaagaacttatgaaactgaaaatggtatgttttaccatgattcttatacattaagtagatccttcagaaatagatgacaaaagatgtaacacgtccatcctacaaaacttatggcacaaaaagcaaaagatactatttgatcaatttttaattgtaaaattgagtttcaaattatagatatatacaaacaatattcatattttttgtttcattattatcttcatgaagggaaaaacaatagaagaacttanaattctcttctgatc

SEQ ID NO: 735 - DNA, 371 bp, Glycine max
  unsure at all n locations
gcttattcttncatggcttatttcctagaggatggtgcctactctcacctctcctcctttatctttcgttgtaactccatggctgaanatcaccattgaaggacctcattaaagctcaaagatccaacctttataaaagcttctcaagaaagcttccatcaggacttttggacatcatagtgcctacagctgaggcatcaaggatcatcttggttngaggtttcataccactatggaagatatgcatatgtgcactgtcatcanagttatggtttatgcacctctgcaacaaagctttaaatctctcccatgtctcacagagaggtttgtgagatccttgggataaagtcatgatgaaggggtttacactg

SEQ ID NO: 736 - DNA, 335 bp, Glycine max
  unsure at all n locations
gagaaagtgtggaagagtcagtcttcctacttttattcgttgaccacagagtggtacctggagatatgtcgcggnggtcaagagaccttgtggacgtcaagtggggtgttattgcccaaaaccaagcttgaccaatcccgacccaacccaggcatagtcagtcagtgagaacctgtgacgtacctaaacaggcgagctcctggcagtcaaccgataaaagaacaaagaccacaaagcaaggaggcttgtgtggtggctggccagctatggatcttgagtgatatatgggttatggcctctggtaatcgattacaaagggtgtgtaatcgattaca

SEQ ID NO: 737 - DNA, 504 bp, Glycine max
  unsure at all n locations
atccttaagtcacctgcggcatgcaagctngttcgcacatcgntcgcgtgtatgacatccactccacaaggtttgaagtagaggagaccttcaatcctattacgcaacgtggcggacaaaaatgggcagttaacttgaatggtcattattgtcaatgcggaaggtattctgcgcttcactatccatgttcacatattattgcagcttgtggttacgtgagcctgaactactaccaatatatagatgttgtttatacaaatgagcacatcttanaagcttactccccacaatggtggcctcttgggaatgaagcggctattcctccttctaatgacgcatggacacttatccatgacccaactacaattcgtgcgataggtccggcaaaatcaacaaggataatgaatgagatggattggatcgaaccatctgaccaccgactaaaatgcagtagatgtggagccgaagggcataacangcgtcgctgcccatgcaatctgagcg

SEQ ID NO: 738 - DNA, 411 bp, Glycine max
  unsure at all n locations
ttcaccgacgaaaggaccacagtaggtctaataagagacaaatctgatcatcatgctttgatacatgccaaaaaaaactacggcaaatgaagagggtgagaatgaggaagaagcccatgctgtgactgtcattcctatacagccaagtttcccaccaacccaacaatgtcattacttagccaataacaaaccttttccttacccaccgccagttatccacaaaggccatccttaaatcaaccataaagtctgtctaccgcacttcanatgacgaacaccacctttagcacataccataaacaccaaacaagaaatggaatttgcagcgagaaagcctatagaattcaccccaattccagtgtcctatgctgactngctcccatatctacttgataattcaatggtagccat

SEQ ID NO: 739 - DNA, 420 bp, Glycine max
  unsure at all n locations
agctctcatctagccaagaatttacaaaagtgttacaacataacctaacgatttctaattatatgggccattaaatttatcatgtgttgacagtaattgattagcccgtgaatttcctctggggctgaacacacttcggccatgggccttgctttggctagtagtcgcgggaggtcttgacttccatttaaggtcaaggcgaacctatccatccacatggtcgcttcttgatgcaatgcatcaatcaccctccctcttgcttccttctcggcgtatgcttgtgcgaagtcctcttctatcttttgctcatgggtcanagactgggttaactcttctttgtactgtcctattatanctagcatgctctgctccgtggcttctaagtgttgggccaaacttttcttggatcttgagcaagct

SEQ ID NO: 740 - DNA, 427 bp, Glycine max
  unsure at all n locations
tgtatcgattcgctcctagtcaggatcacatcatcttgctcctttctttntcatttaacttttggtctttgtttccttctctctttatatatgttttggggtataataattcatatatgtatgtatgtgtcggaacctacccttcggtaagagggcgaggcgaaaagccaaaggagcatcttccaaaaaggaaaacccgcgggagtcgccaccaacgtttactctaggaaaacattagaaaaaccaaaaaaaaaaggtcgaaggtctgcaaattttgaaaatgagggtttgggagttgtttacacacgaggaaggtatttgcaccccacgcactcgtcacaagggatggcaacctttaatcgagtgtgcanaacatgaacttcaaaatgtgtattttccctttcatatnngtttttttatttctttg

SEQ ID NO: 741 - DNA, 500 bp, Glycine max
  unsure at all n locations
ttaagtcacctgccgctgcaagcttatgattttttanaaaataattacttctctgtgagtctccatgaacctaataaatatgaggagaatgaagatttgtgagtctccatgaacctaaaaaatctgaggagaatgaagattggggaatgaattataaaattgtgatcctgtcttttataaacctaaactgacccgctnttttcaggaaaaaagataagaatagttaaactttgcccgtatcatacatatcactctaatanaaaataaagcattggagagaccagaacatatgagatatgaatcgaattcttatgcgtttatactttaccataaaagtcatattcaatattatgtgaaccattgatntagatggctttnttcttaataactcatcatttaacagagttcagaataatataaattgatgaataaatcacattcgcgcttcttatatactgaacctattaattcaagccttaagctaatataagcaacatttc

SEQ ID NO: 742 - DNA, 412 bp, Glycine max
aatgtaataagttaaacataaagctattgattgccgtaatcaattggcctaaaggccaagtagagtatattaaatttcaggcaaacccttatttcgaatcaactggaagtcgatcagcaaatcttttaaattaacgaatttgcctactttcaggaaggaaaaaaaaaaaaagcagtgtaatacctaatatatatctgaatttatcatacgtatttgctacaattagattttgtaaactgtaaatctctctaatataattcctttatgaaagatgattgtaacattaaaaaatatattttgggtcagcagcttggatctttatagggggtggtgccaacctagttgggactactccctcgattgtatcagctgtctcaccattcatttaataaataaataaccaggatcaatt

SEQ ID NO: 743 - DNA, 361 bp, Glycine max
gagactatgtttggcaaagaaaaactatgaagaatgcgttgccatggaaaaactacaacgcctactctcttcaaaagaaataaagaaatttcaaaaattgaaaaaagatatgctgaagaggtgaatgaattaaatgataaaatccaagagatagaagataaatattatgcaacagagaaatggtagcagcagaggaaaaacactattaagaaattattggagtacaagtgtgaggtgaagtcccacattaaatagaagtggaaaagttgagcaccatataagtgaggagaagacctataaatctaagtcttaaggttttgagttaaagtgtgggtattaaatcccttatcttgttactcat

SEQ ID NO: 744 - DNA, 386 bp, Glycine max
  unsure at all n locations
tggtcaccattntcaaggatagaattcataagactaaggaaaaggattaaaaggaggtcaatgatgatgatgatgatgatgatgaagactatgtacctaaatatgaagagagacttggatcaaattctataagtgaaaattaccagcacgacaaatatgatgaattttctactacaaatgatcttgagtcacgggaaagaaagataactcttgaaaattttcaatataatgctaatatacattattgtgttaataaatgagtggggtggttttgtggttattgtgaaaattntcaatataataccataggaaattgacttcattntcttgatctatctacatctttcttaanaaaaattcaaattcactcttttgtaanaaaatag

SEQ ID NO: 745 - DNA, 244 bp, Glycine max
  unsure at all n locations
cataaaaagtcttgtggaattgattacaaggattnggtaatcgactaccaatgacaagttttgaataaaaatcacaagatgtaactcttcaaatggttttcaggctattctanagggtataactcttccaatggtttccattgaccacacataaagagtctataaaagcgcgaccttgagtngcatattgagatctgagtacaaacttttacatcttttacacacaacctttgaacatcttctt

SEQ ID NO: 746 - DNA, 451 bp, Glycine max
  unsure at all n locations
ggcttctacaatctcccnctntttgatgatgacaaccctgatatcaagaaacacatgcacatactttttcctagtcgattactcacttaattctccatattctacccctttggttttgagtttaagcttcacttgaaattaagttaattacttatgtgagttcttgatttaatccctatttctctccccctttggcatcaacaaaaaaccaaagtgcgtaacaaatataaaacatacacaaataactaatcatacacaagacattcattgaaaaatctaaaccaatcatgaagcaagaaacatgaatagatcaaatatataaaaaccacatagtcatataacataattcatatttgttcagtcatactatgcaaataaaagaaatactaaatgttcaaatgtcataataatatagccaaatacacggctagaaatcaaagtactaataata

SEQ ID NO: 747 - DNA, 476 bp, Glycine max
cgcgcgcgcgctcttattagagaacggtaacgtcttgtactattatacacacgaaactatatctacaggatgccacgtatgagtgattacctcaataatcaggcgcttagactcgatctgagagaggagagacgtataaactcatcaacttctctaggattgaagttctgatctatatcggaacattatcttctgacgcgatacctgcatacactacgctcagcataccagacctctctgcattgtatacgacggaggtcctccgagtacagttatcaaacataacctatccaattgaagcacatggacttttcaataaaaagcacgacaattccattattacacgtctgctcattgagaaagagatctctaggccgtagatatatactctcatattcaacttagatgaatgtagaaaaaatgtacttatagctgcataatgatcatgtgccggatctaacaatacacgagatgcc

SEQ ID NO: 748 - DNA, 337 bp, Glycine max
  unsure at all n locations
tctccaccattntcttataaatagggggagaagtgaagaggaatttcgttcagccctcctggtaattcagaatcacttaaaattagtgaanaaaattggttccgtgaagaanatccaagccgaggcgcttccgtaacgtttccgtgggtgatttcgcgaaggttttcggccgttcttcgacgctcttcattcgttcttcgtcgntcttcggtcttcaaccggtaagttccctaaatcgaacttttcaattcattctatgtacccttagtggtcctcatttgcttttacgtgctttcatttacatttcctttacttttcgtacccccgtttgacgtgc

SEQ ID NO: 749 - DNA, 489 bp, Glycine max
  unsure at all n locations
agcttgtctcagcgtttaggcgagacagagaccatcatgttagctatcatcgccaagtacgaagaagagttaggtctagccacggcccacgagcatagaatcgcggatgagtatgctcaagtatatgcggaaaaagaggctagaggaagggtgatcgactctttacaccaagaggcaaccatgtggatggatcggtttgctcttaccttgaacgggagtcaagaacttccccgattgttagccaaggccaaggcgatggcagacacctactccgcccncgaagagattcatgggcttctcagctattgtcagcatatgatagacttaatggcccacataattagaaatcgttaggaaacttgtatggtctcttataccttgactagatatgaattccttcttgaaatanaatgagttggtcccatgtttctactccacanagcttgtgcaaatcanatcactcctacatctcatctctagcatgcattt

SEQ ID NO: 750 - DNA, 451 bp, Glycine max
  unsure at all n locations
ggcgaccagctcgcccaggcgagtaagggtgcttcctccagaagcaacaaccttctggaggaatcttctagagggcccaagtgggcctgattgctatttgtacctccctttttactaaatccatccccttctatttttttggtaattctttttccgtaacgttacgaaactttacgaatttcgtaacgatacttattttccttccgcaaggttacgaatccttacggattatgtatttactctnttttagctntcgaagaagttacggaaacttacggattgcgcanaaacacctcttttcgatttccgccacattacggaatttcacggattgcgcaagcctgcttccttttgattnttgacaggcctcgggacttcattcattgtgcaaccaaggacgccaagtatctcgaagcggccaatcaaaggttgtatatcatcaaataataat

SEQ ID NO: 751 - DNA, 141 bp, Glycine max
  unsure at all n locations
tactgaccattgataatatcacaagtgagtttattcagaaattagagtttatgtctttatcttgtgagagtgattctcctaaattcttgagtgattanagaacaccctgcctgtatcaaaggactttaacaacctttgaga

SEQ ID NO: 752 - DNA, 131 bp, Glycine max
  unsure at all n locations
gattacctctataatcaggctcttagactcgatctgagagacgagagacgnataaactcattatcttctcaaggatagagtgtctgatatatatcccaacaatatcatctgaggtcatccctgcatatact

SEQ ID NO: 753 - DNA, 427 bp, Glycine max
taggggcaggtacgaacaggttctatgcccatgatcaatcgatcaccacccccgcgttcggctaaagatattaaagaagctctcctaggaggcagcctagtatctctaactttgctctttaatttcctgtttcatacttgttctttttcttgaactatatcctgaattcgcctaagtttatatgcaattataggattttaagagaaaaaatataacaatgaataacacaattttgtaaaggattttcttcaccaaaaaaataataattacctcgcttgggcgagtggccagctcgcctaggcgagcatggctatggtgaaaaacataaaaaggggaggggtgaagccattttcaccctattcttgcccaaaatcaaaaccttccccaagagcttacgggagccaccattggcagcagcccccaagct

SEQ ID NO: 754 - DNA, 411 bp, Glycine max
  unsure at all n locations
catcacatgtggcactatgtggcggtcgggcgatggtgcacaacaagttttccacatccacaaatcgcgcataaacccaccatcccctggtgcccacctccaactgagctcacgtactcccacgtagcccatattctcgtttctctcaacaccgggtccccatcaatcctcccaagcttccccaacattcaggtaattcaacatccaaatcatcacaaactaacaaaccaagcaaaacagggcaaaggcagaatactctgcccaaaactcaaaccanaatcacagctttttctcacttaaagaccccagtaacatttccttcattccaattcgttaaccggtggatcgactcgaaaaatttactggaagtctctagtacataagcctacattntgaccggtgggatctact

SEQ ID NO: 755 - DNA, 268 bp, Glycine max
catgcctttgacggcaaccgcccacacgcgacgtgagagatcgacctccctgtacagataagcccccatacctgtcatgatatccttcaagatatggatattaacctggcttacagctgtcttttgggacgcccgtggatgcactcagtgggagatgatccctctacactgcaccacaaattgatagtcgtagtacacgtgcactggggcattgtgtctgtggacgaagaaatcttggtaagatgcccattctctatgccatatgtgg

SEQ ID NO: 756 - DNA, 448 bp, Glycine max
  unsure at all n locations
gcttgcatataataatcacagtatctgcatatttcaattcagtatatggacatgtgttcttccttaagagagggtgttatccctgttgaagatcctgcatactacctgcaccaaaaggaacataacacagtcattaagaatcagtgttctgagtatatcaatgaattntgtgtccacaagcctgtggcagaaccagtggcttgtgtcaagggaccaagggattataattcttcacgtatccagtcgtgcttaaaagttgtctcaaatgtagatgaagaggctgatgttgaacctacatctcctgaanaggaagggatagaatgtgataatccagaatctgaaagtaggtgagaatctgacatcaagtgctgttatggttgtgaaactgatatataattgcatgacgtcttatagcagcagaatctgaagtgaaacttaatagcctaat

SEQ ID NO: 757 - DNA, 454 bp, Glycine max
  unsure at all n locations
agttagggtagtgaatgatattctgaaggcgtgttattgtgtaacccattaataaagtgtctcgattntgcttataaactctgaaatgtgctttgctcttttgctttaagattntattttattttggtacagaagattttatttttttgaaacaacaagtattgacaactttctggctgtagtaaatagaagaaggaaagtggaagaaataggaaaatgataaactgcacctccttttacttaatcttaatgattctcagttgttttgcttttcctcttgcaattgtctgaaaccaaggtggaggtagaagtttaaattccataaagcacttaaagaaactatttaatatcctttgcgtcatttcatttggatgggaaagctatatacatttagctagagcatgccattactgcataaagaataccctaattaaggatagattatgagacacac

SEQ ID NO: 758 - DNA, 88 bp, Glycine max
tgtattgagcattccttttctgtatcttccgttttgcttagtttagccctgtaattctaatatagattaagagagcattcagcttgac

SEQ ID NO: 759 - DNA, 172 bp, Glycine max
tcttacatattaccccatttatgtctcaagatttagtgattcaagcttggcctcttggttgagctcttaacatagtagaggaaagaaaactcccgaaatgatggaagaaggatatgctgtgaacaaaacccatatgttcaagggagccacctataactatgggaaggaaaaa

SEQ ID NO: 760 - DNA, 315 bp, Glycine max
  unsure at all n locations
gcttcttatccaggcaattcttgggggngaagctccttcttccttggcttattccctagnggatggtgcctcccctatcctcttctcctttgccttccgctgcatctccatgatgaaaaatcaccattgaaggacctcattgaagatcaaagatccagcctccatagaagctccacaagcaagcttccatcaagttatgaccatttgaatttctcgagatcttccgtggntcaatttcgggcgtctccatatgtcatgtgcctgaatcggacctccgtaatataatttatgaccattcgaacttctctagagctt

SEQ ID NO: 761 - DNA, 410 bp, Glycine max
gcagatctggtcttcgccagtgaaaggatcaatgtgggtccgaaaagaggcaaatttgatcatcctactatgacgactgagaaaactggggcaaataaagagggtgaggatgagggagaaacccatgctgtgactgccattcctgtacggccaaatttcccaccaacccaacaatatctttactcagccaataacaaactttctccttacccaccacccagttatccacaaaggccatccctaaatctaccacaaagtctgtctaccgcacttccaatgacgaacaccacctttagcacaaaccaaaaacaccaaccaagaagtgaattttgcagcgagaaagcctgtagaattcaccccaattccagtgtcctatgctgacttgtcccatatctacttgataattcaat

SEQ ID NO: 762 - DNA, 449 bp, Glycine max
  unsure at all n locations
gcttaataacaatgcctaaggaggagcattacatagcacccatcttggtcctgttagggataaacatgtcgttgaagtacattcaacatctggttataaaggacttttaccatggcatactacagtgactaacactgtattcagaatcattntcatcccttttatgaacttccctcttttttatgaactgccctcttttttagtctttgtttcccacctcttaaacatctgcattntcccatttaggtttcttgtttttgtgaggaatggcggaaattatgttttatatggacaagactgttggttggaattggaatgagaatcaacatggtgctcatacttttgttttcaaataaataaaagtgggcatgctactaatatttaatntattatggtgcttctattaataaagtacaccttgttaggaaaccaaaatatagaacagaaat

SEQ ID NO: 763 - DNA, 287 bp, Glycine max
  unsure at all n locations
tcttatccaacgctcatcttggtggtgaagctccttcttccatggcttattccttaatggatggcgcctcctttcacctcttttcctttgtcttccgctacatctccatggtggaaaatcaccattaaaggaccccattgaagctcanagatccagcctccatagaagccccacaagcaagtttccatcagaatgtccacgtctttagagggctacacgcccatgccttcagaggactacacgccctcgccttatgaggactacacatcctcacctttagaggacta

SEQ ID NO: 764 - DNA, 435 bp, Glycine max
  unsure at all n locations
ctgtgagaacctgtgacgtacctaaacaggcgagctcctggcagtcaaccaataaaagaacaaagtccacgaagcaaggaggcttgtgtggcggctggccagctatgtatcttgggtggtatctggaaattagcctctggtaatcgattaccattcatggataatcgattacaggggttaaaaatggagacaggatggtaaatggcctctggtaatcgattaccaagggagtgtaatcgattacacagggtgatagggcactggtaatcgattaccagctgggtgtaatccattacacagggtgatagggcactagtaatcgattaccacttatgtgtaatcgattacacagtgtattttttaattttcaatgtgcanaggctgtgtaattcgtttttggcaccggtaatcattacatactttggtatcgatacc

SEQ ID NO: 765 - DNA, 318 bp, Glycine max
  unsure at all n locations
tcatgatgatgaatgaagttgattcaagtagttntgatgatatctaagatgatgacaaanagcccaagagaatgatttcaagattgagttaacaagatttatgaatcaagagaagtttgatttcaagattcaagagaagatgaattcaagattcaagacaagaaatcaagaagacttcataagggaagtattgaaaagatttttcaaaaaacaaacatagcacaattttgtttttcaaaagagctcttctcagaattgtctaagttaccagagtttttactctctggtgatcgattaccaattaactggtatcgatta

SEQ ID NO: 766 - DNA, 395 bp, Glycine max
  unsure at all n locations
agcttctaaccttttccttcctttctaccacatatgtggagttattccacatacataaaaggccaccagcagcttccacagatggaacaaaatcccaatgaccagtggagtctcccgaaatggcctggcaaatacttttattaaagntctccctcttggtttcttggaggcagacaagatgcactttgtgcttacaatgagccttctaacagcagcccacttgactcccctcccctaacctctagaattataggagagaattatcataattgctgagatttaattcccttttctgttgccatcaaatcatctttattctccatatgcagcagtagccccttaaccttgctatcttcttncttataagacaagcccatttccttcaagatgtcaca

SEQ ID NO: 767 - DNA, 432 bp, Glycine max
  unsure at all n locations
agctntggagtttccaagtgccaattcgtcttcttctttagtccagtcttcttctggcttcaatccatcagtgggctttccttctgtgtccagcatcttgggatgttcccagcctttgatgacagctttccaggttctgctatccagtgatttgaggaaggccaccatccttgctttccagtattcatagntggttccatccagaattggtggtctgttcactggtcctccttctttctccatgttcatcagaatttatctccctaggtctcactcagtgatttcgagtgcctgctctgataccaattgaaattctgataccaatgccagatgtcgtacaggatgtcacgacatcacgcttcagaacatgcagattatctctgagtggatgaacacgataaacaagtatataacacaagagaattgtttacc

SEQ ID NO: 768 - DNA, 429 bp, Glycine max
tgtctcagcgtctatgcgagacagagaccaacatgttagctatcatcgccaagtaccaagaagagttgggtctagccacggcccacgagcatagaatcgcggatgagtatgcccaagtatatgcggaaaaagaggctagaggaagggtgatcgactctttacaccaagaggcaaccatgtggatggatcggtttgctcttaccttgaacgggagtcaagaacttccccgattgttggccaaggccaaggcgatggcagacacctactccgcccccgaagagattcatgggcttctcggctattgtcagcatatgatagacttaatggcccacataattagaaatcgttaggaaacttgtatggtctctcagaccttgactagatatgatttctttttttgaaatgaaatgagttggtcccaggtttcta

SEQ ID NO: 769 - DNA, 466 bp, Glycine max
  unsure at all n locations
gtcacctgcggcatgcaagctngagaatatcaatgcgtcanagtcgctatctcaatcacctttgtttgaagatggagttgtatcaactcacaatggagatgggaggagatctccatgaccacatcaacaagttcaatcggctagtaagttaactgttgaatgtggatgataaattctctaatgaggagcaagcgctcttgttgttggtctcactaccaaagtcttccatagctttggttcaaacgttgcttgtgggaagatcaactttgaatttggatgaggtgactgtcgctcttagagaanatgatgagaattgaaaatgctgatgatgaacacaatgcaatagctgtgatggaatctgagcgagggaggaatcattcaaggagacatgatggtctaagaggaagatcacaatcgcaatcgcatccacaacgagatatgagtaacattcactgcttctattgtg

SEQ ID NO: 770 - DNA, 345 bp, Glycine max
  unsure at all n locations
ctgaggatagagacttcctaagctatatatcttctctctcanataagttctctaactttctagctatctcactctaagaagtggattcactcttgtcttggatggttaggaatgaaggctcctacccttatttatactactccacctccacaatgaatggtggagattacttgtatcctagggtggagattaattctctagaattctccacacattctaggagtctctacacttttctactctctttcatatcattccataaggtttcagaaggttccacacatctccaaaatatttcagagggttccacattcttccacaagcttctagagagttctacactac

SEQ ID NO: 771 - DNA, 465 bp, Glycine max
  unsure at all n locations
agctntgcaactcagacacctcaacaggagagatccgacgaggctgttgctcctcttgagcctacacctgcacaggttgaaccagtgccagctgatccacattctccagtggcagatccatcttctcccgaacttgaagcagctcccccatcttcacctattattatcatctctgaagaccctacagagtcaacatttggagaagctgttgctctctctgattcccctgttnttcatctgatgaatgaggaggagacacaggatcagtcacaggattcttanattcctgtccttctgtttatgttgacaattatcataactattatattntagtacattgttttagtgaattttggtgatggttatatatacttgtgttttttggggaaagtacgatgcatggtttgaagcatacaggaatagttaacttgatcttgatgaatatgtagtgaaacacttttatca

SEQ ID NO: 772 - DNA, 397 bp, Glycine max
  unsure at all n locations
tcattgcagtcttggaagccagattagttcatggatgagatccccacttttgttgctcaacctttgcctgttggaatggatctggtttggttttggtttggggttctcaattgaatttgaattcctcttaattggttcctgcaaaattgtgtttttttgggttcggttgtgtgttgtgataatgcaaaaggttgttaaaaatgatttttatttcatttttttatgtggggggttgagtttctaggtgatttgtatgaatgcacttggtcttggagaaaaaaaattgtgtgaattttagttggaatggtcgaacagtgtgaaaaagttttaggttgcanatacacaactgtgggtgtgattatgccaaaaggtatattaaacaaattgaattttatgt

SEQ ID NO: 773 - DNA, 468 bp, Glycine max
  unsure at all n locations
ttgtcgtgagaaaaagaatacactccaattcatcacatggtaaatgaataacaatggaggacaaanagtatatagcaatattaataaataaataaaaagtatatagccattgaacgttagtgacaaattcaatccatgtcagtagtcgcatgacattcctttttcttctagaactgaaccaacatcaccgaaaatcaaagccattagccgaaagcantttaacatagaaacctataaaattgtgagttagggtttagtgataggtcatggtgagttggggtcttggatccggttcaagtatggacctttctttccattttttttatcttgactctcatgaattaatgggccagcaacacttgatttgtgcttgatacattatactaanaattagaaacctataaaaccttctcttttctttctctttttcttttattatctcttctaaatttttctttctcctctctc

SEQ ID NO: 774 - DNA, 444 bp, Glycine max
aaagatctcagttttctattatataatgatataaattagtttaaaagtgcatcagatatcagttttctattttataatgatataaactaaaatacctgtttttaacactgtcttcatggtgtaaaggcacagctccatcatcaggttcttcgtcatcttgtaccattaccgcttgatctactattcctaagttgtgaagccattcttttaacttcacaagacagcggtattacattagcaattaggctgaatcagctatatcaaatgtaatgaaggaaactaaactaatggagatatgtatcttcacttaataacaacggagtaacatgataaagaatcagggtttggaacctaagttgaagtgtgaggttggggaggccaaaaagattaaatgatagacacaatactgcaaaattaatgtgcaaacctgctcttgcttgtcat

SEQ ID NO: 775 - DNA, 456 bp, Glycine max
  unsure at all n locations
aacccatggaagctcctaatatctcccacactttgntgggtgggccattcttggatggccttgattttctcaaggtccacttggaccccatttctaccaactacaaaacctaagaagactatattatctacacaaaaggtacacttctctatatttgcatagagggtgtttttcctaaggactgaaagaacttgcctgagatgttctaagtgatcatctaggctcctactgtacactaaaatatcatcaaaataaacaactacaaatctacctatgaaatccattaagacatgatgcataagcctcataaaggtgcttggtgtgttagtgaagcccaaaagcatcactatccattcatacacaccatacttggtcttgaaagcgcgttccactcatcactctttttcatcctggattcgtgataaccacttttaagatcatattttgaagagatat

SEQ ID NO: 776 - DNA, 442 bp, Glycine max
gagctgaacacacatacctctataatagctaagcacacctccttgagaagagaagctagagcttatctacacaccccctataatagctaagctcacccccatgacaaaaaacatgaaaataacagagaaaagtccttattacaaagacaactcaacatgccccgaagtacaaggctaaaaccctatactactagaatggccaaaatacaaggcctagacgaaggaataacctattctaatatttacaaagataagcgggctcatacttagcccatgggctcgaaatctaccctaaggctcatgagaaccctaaggcctttccttggatctctagcccaatctacttggagtcttctagccaatgcccttgcggggtaagagtgcatcattacttttcactcagatgtgcgattcaggcacatcagatatcgagacgctcgaa

SEQ ID NO: 777 - DNA, 286 bp, Glycine max
  unsure at all n locations
gagcccgagtagtcaaagagaagttcaagtctatagccatcanagtctgaagagagtatgatgaactaagggacgtcaatatggccaccgatgaagccttggaatgagaaaccaagaatgccctgaaggaagaacacgaccaatacaagttttgaggggctttatagggcaataatagtgagctcatactccgaagaggtgaaaggagtcatcacgggtcacaggtatgatctgtaaggacgagctataggcttgccttatgacgagaagaaatttgtcccgaccg

SEQ ID NO: 778 - DNA, 193 bp, Glycine max
  unsure at all n locations
atcagaccacttccagngtgctggaactacttcacactgatttgatggngcctattctagttgaaagccttggaggaaagaggtatgcctatgtcgatgaggatgatatcttcagaattacctgagtcaactttatcagagaaaaatcagacacctttgaagctttaattgagttgattcttatactttaaag

SEQ ID NO: 779 - DNA, 281 bp, Glycine max
tcacacttacaaaggatatatgggtccatgagggacctcgggctttctacagagggcttgttccatctcttcttggtatgattccttatgcagggattgatctcactgcatatgacaccttgaaagatctatccaagagatatattctttatgacagtggtatggtattactgcaaccacattatctcttgaacttaatggatttattttaccactctgaaatttttagtgacacataacacatgtaaactcaacctttgaacttaaatatgtaatttttt

SEQ ID NO: 780 - DNA, 247 bp, Glycine max
  unsure at all n locations
ttcgctactaaagttggcgactntgaaaatatttggagtagtttttaacagattttatatggatatgtttgaattagtgtactatattcattctatatatatgggcgtgtctcaaatgaagtgcatcaataagtgttccagaaggtttacgagtaaagaaaagcccacgtgattcccctaactatttcgcgttcatctccacgtgactcccccaaggctgcaactctactactaccatgtgctagaa

SEQ ID NO: 781 - DNA, 118 bp, Glycine max
agcttgttggattatggcgcacccgtcatatgtggtactaggtggcgatcgggtgatggtgcatatcaattctttcacatccacaaataagacatgaacccaccatccccagttgtcc

SEQ ID NO: 782 - DNA, 260 bp, Glycine max
  unsure at all n locations
tcagaccaaagcaacatanaatctatgtatccgaaacccctcaatctaatggattgtcaagggttgagaagtgaatatgacaatgagcgttatttggagcaaactctcacctcacacaagtctataacatcaatctaaacttgctcaaactggatttacacctaaaactccacccgaataaaatttgattcctcatcaccaattttaccctagaaatgactcttcgttcactacgtacatccttttcttttattgcaaag

SEQ ID NO: 783 - DNA, 449 bp, Glycine max
  unsure at all n locations
agctntgcggaattggccttcgctggcgaaatgatcgaagtgggtctaaaaagaggaaaatctgatcatcatgctttgataaatgcaaaaaaactggtgcaaatgaagagggtgagaatgagggagaaacccatgctgtgactgccattcctatacagtcatgtttcccaccaacccaacaatgtcattactcagccaataacaaaccttctccttacccaccacccagttatccacaaaggccatccctaaatcaaccacaaagcctggttaccgcacttccaatgacaaacaccacctttagcacaaaccaaaacaccaaccaagagatgaattttgcagcanaaaagcatgtataattcaccccaattccggtgtcctatgctgacttgctcccatatctacttaataagtcaatggtagccataacctcaaccaaggttcatcaa

SEQ ID NO: 784 - DNA, 399 bp, Glycine max
  unsure at all n locations
tattatgattacgagctataaaaccaaactcatatctaatgagtttagagttaagttaattattttatattttctcttttttctgctcanagtaagatataactttcaattcatcttatcttggctagcaaaggaagaaatcaattcttgcacagtcgattttgttttatagatttacctacatggagaaacaaaagtcaatttgaaatttcattggtacaaatatttgataattggatgcttaaatatttctagcattaaatattcataaattgcatatggcttcttttgactcctcaaaaacataggtaacaaaatacattgcanatccaatgtagattactggctcattattatactaatattgttattccaacgtagattgctanatatagtagt

SEQ ID NO: 785 - DNA, 333 bp, Glycine max
  unsure at all n locations
agctnggaaggatgcttcgatggaggataagaaatagggagagggagagagaggggggagcacgaaattgaatgaataaaagagggagagaagtggaactttgaagtatgtatcacaagactctcattcatcagagttacaacaagtgttacacatgcttctatgtatagacttggtagcttccttgagaagctttcttgagaaaactttcttgagaagcttgtttgataagacttccttgagaagctagagcttagctgcacacactcctctaataagaaagctcacctctttgagaagcttccttgagatgatcgtacataagctagagct

SEQ ID NO: 786 - DNA, 200 bp, Glycine max
gcttcacaatgacacaagggagtgagactgtgactgaggagaggaggggtcaggtctatagggtgcgagactgaggagagggaatgaaaatctgtatgacgtgagagtgataacaacacatgatggccctttacatgatggttttaataaaaccgatgttgagtatctcattgtcacaatggttatgacaaaaaacatct

SEQ ID NO: 787 - DNA, 365 bp, Glycine max
tagtgacacgagtagccatcccatcctagcgagtgtccatcttatcaagatgctcacccacaaatgctcgaagatcgctgagctttgtgaggactctattccacagagaacaacaagcatgccttcgtggtggaggagatggggtacgtacatcaagaacaggtggtggcaagtcttgttagcgaactcactgaccattaacatcctttcgataaccaaaggaggtaacaacaccggcaccaatggagaaagaccttttaaccttgacatatggttcatcctccaaaggaacattggattgatgacgacatagagtatcaaggcggcgatacatgagaggtgcattgacccgttatgccctatgc

SEQ ID NO: 788 - DNA, 117 bp, Glycine max
agcttgtcggccacgattgacgaagggcacatgatgacgacgttagtctctgcgtgttatcaagcttttcgtcttacagatagcctatagtttatacggactaccactcgggtattt

SEQ ID NO: 789 - DNA, 115 bp, Glycine max
ctataaatctaagcttaacatcagacccctccaggtgtctgaactacttcacatttatttgatggtgcctatgcaggttgaaagccttggatgatagaggtatgcctatgttgtt

SEQ ID NO: 790 - DNA, 61 bp, Glycine max
  unsure at all n locations
agctntggtacctattgatggatacctaatttgttgatctaattnttagcattaacaaact

SEQ ID NO: 791 - DNA, 405 bp, Glycine max
  unsure at all n locations
agctncacggcacgactgttaggattaatgcaatgattgctgaactacaagctctacagtcgaatgagacctggaggctcactcttcttcctccacagaaaaccgccattggctgcaggtggatttacaagatcaagtatcgcgctgatggctcgattgaaagatataaagcacgtntagtggcatagggctacacgcagatggagggtcttgattatcttgatacgttctctcctgtagcatagttgactaccggtcgtcttcttcttgcccttgctgccgtgaatcaatggcatctgcggcaactggacgttaataatgctttcctccacagacaacttgatgaagaagtttatatgcaggttccaccgggattgaccgtttcacatcctcaactggtatgtc

SEQ ID NO: 792 - DNA, 411 bp, Glycine max
tcaagaaattgtgaaaagaataaggtaatatacatatacatttagtacaaatagatatagctttacacactactgtatgattgtgataattaaaaaagaaaaagaaaaacagttttcttctagtaggaaactaaattcatacctaggtaaagttttaagaatatctaattacccatgcaaaatttcagcaaccgaggcaagatataaacattgtattttaaggataattagccactgaatgtgtccttattcttcgcacagcaatgaggaactaatccaaatgatatcagaaaatgggataacaccagtgacaaatagacaatagtactaacagcaatcaactacggaaagttaaggaatattgtattttaaggataattagacacatgtgtccttattcttcacagaaca

SEQ ID NO: 793 - DNA, 502 bp, Glycine max
  unsure at all n locations
tgatctccgccggactaagcacgcgctgcacttagaaattaaccgacggctatattaccttaactattgaaataaaaataagtgctatattaatgacctttggggtaaatacaaaataacattactcacacattttaatattttgtggtggagaataaaggtggtcgcgactatagcaacttctagggccggcgctactactggtatagtataaaacttccgaccccattggccaaaggctcttcgctatgcgaaggtatgggggagggatgttatacgcacccttaccccttgcatatgcaaagaggctggtttcggattccaacccatgaccaacaagtcaccaaggcacaactttacgggtgcaccagggctcgccctcctactacttgcatatgatacttaacagaaattgcgccatcagctgccagcagaattcacatagagaagtattattaaattagatggcatcaatatacacagtctgatgagtcagcttggn

SEQ ID NO: 794 - DNA, 454 bp, Glycine max
  unsure at all n locations
ttaaatcttcaaaggtagtccgtctgaattcaattcaaatcccttgcctaggattcacaagcaggctgctaactcttgctgatttggccttagcaaagcaaatcttgcatatgccgaaagactntatccttcctctataaccactggtgattccaaacgagagttgagggcagctgagtcaaatggaatccattgccccctaactttgacctcttttggtgacttgtcttcatgatcataaacatttgcataaaactcctttacaagtgccacatctattcttccctcttccaaattcgcgattntcttatgctagttcctcctgtttaactccctttgaaattcctcanagtcattgaacgacaattgcacattcctttcaggaatgatctttctgccgaagatattgtttgtgtaatgatcccatgcttcangggaagaaaatttgtgtcta

SEQ ID NO: 795 - DNA, 306 bp, Glycine max
agcttgtcgctagagctgacccatcaactgccctaactcttttagactggtgatccctaggctcttgaccttgacttgatagaacctctttctaagcgaaggcatttgacttgatcccatgttttactaaagtgaacaaaaatcggtgcgaatcaaaactccaacatctatcatgggtggaatggatgaatgcatgaagaaatgcatatgacacatatgcaatttatgaatacgggagcccgggaaatggtctccttcttagatacaacgtcttggggtaacaaagcgcccaacgtatgtatttaa

SEQ ID NO: 796 - DNA, 399 bp, Glycine max
tacccatcacatgtggtactaggtggcggtcgggcgatggtgcacaacaagtttttccacatccacaatgcgcgcataaacccaccatcccctgttgcccacctccaactgagctcacgtactcccacgtagcccatatcctcgtttctctcaacaccgggtccccatcaatcctcccaagcttccacaatatccaagcaaaacaacattcacacagcacaagctatcacagccaagcaaaacagagcaaaggcagaaaactctgccaaaacaccaaccaaaaatcacagcttttcccactcaaagaccccagtaacaattccttcgattcaattcgtaaaccgttggatcgactccaaaatattactggaagtctatagtgcataagcctacattctg

SEQ ID NO: 797 - DNA, 417 bp, Glycine max
  unsure at all n locations
gcttctgagcatcatcaaaataggcatacttattgtgctcaggtaataattntagttccaaggaaggtggctgaacagtggaaggcaagggaaggttgacagttggtggaagagaaatagaaggatctgaacctgcacctgcatcacaatcagaattgcagaagaaatctctacacatatattacatacagtagtagactcataagaatcatcacaagtacgatcaanagaactaagatcaaagtcataaaaatcagaaagtaaatctgtacaaatatccacactatctattgcatcatcaatgatatctataaggaaaacataatgctcatgtgtaggatgtctcatgtgcctaaaaatgttgaaatgcacaacatcatcaccaaactccatggaaagagttcctacatgcacatc

SEQ ID NO: 798 - DNA, 172 bp, Glycine max
  unsure at all n locations
gcagcttgctacgattattgtcagacnataattatttatttaaaataaatgttgttaaccgattgtcatagagtatgctaattagttatagtattatatagtcagggatgcacaaatctctccccaagcaatttttcatttgtatctgctctcacagcaccagtagtgttgc

SEQ ID NO: 799 - DNA, 106 bp, Glycine max
ttggcagagagccagaaacaataaatgatgacgtttaagctaatattagaaagaaaaattgcaggaagcgaagtgatcctttttatggctacataccaaaaacccc

SEQ ID NO: 800 - DNA, 372 bp, Glycine max
  unsure at all n locations
gcacctgccgctgcagcttggacagtaaatggaatggtagccctccatacatggtaatattattcaacggacccatactatgattaaaagacactgaaactggntctcgaaatgtgatcccatttgatcgttgcatcgagattctgaatgttctttccaattctatttcttttctcacttcatcttccaggtctcgttgttgtgcaaatgtcatctcgcgagcaatgatttctctcctgattccttccttctctagctctcgccatattttctctttctccaactctcgttggaacacttcattgacattgatcggcatggccattagaaaaactctaggcactgaaacatttctgggaaagccacctgata

SEQ ID NO: 801 - DNA, 438 bp, Glycine max
  unsure at all n locations
nngggaataatatntaacaactgtagtattgaacttaacccacaacaagtttctagttatatgaactaatatatgtgtcacttctaatgtttctatggctgttacttttaggtaaagactgggaagaccagcttggagcaaatatcaagagtttattggaatcaggtaagctaaaagctaatagtcttgtccattcttttttcttatccatgcacctttatgtacttgagaatccctaaacatacatgtaacaataatttttccccatatgtaaaataacttgacaccctcgaacttctcaaagtcattccaatttctattcgattcgccattggtactggtattttctacagattatgctcctgtcagtgttttgtacaatcaattgtctggagttcctctattattcatattcccaatatgaatatttaaaatgaa

SEQ ID NO: 802 - DNA, 451 bp, Glycine max
atcctcttagtcacctgccgcatgcaagcttgaaattgacaacggaagctctccagaatctcatatggtgataacttatcacacgaaagtctgattcaggcgcatagtatatctagaccctcgaaattaaacaacgaaagctatcgagaaactcatatggtcataaattgtcacacggaagtccgattcatgcgcataatatatcgagaaggttggatttgaaccaccaatgctctcgagaaattcagatggtcataacttttcaaacagaagtccgatatatgcgcataatatatcgagaacgttgaaattgaaccacgaatgctctcgagaaattcaaattgtcataactcgtcacacgaaagtccgattcaagcgcatactatatctacacgctctgaacttgacaacgaaagctctccagaaattcatatggccataacttgtcaca

SEQ ID NO: 803 - DNA, 377 bp, Glycine max
  unsure at all n locations
ggccgccacggagttntccgactatgctcttgtgtggtggaacaagctacaaaaggagagagcaagaaatgaagagccaatggttgatacatggacagagatgaaaaagatcatgaggaagcggtatgtgccggctagttactcaagggacttgaaattcaagctccaaaaactaacccaaggcaacaagggggttgaggagtatttcaaggaaatggatgtgctcatgattcaagcaaatattgaagaagatgaggaggtaactatggctcgatttcttaatggtttgactaatgatatccgtgatattgttgagctgcaggagtttgttgaaatggatgatttgcttcccaaagcaatccaagtggagcaacaat

SEQ ID NO: 804 - DNA, 153 bp, Glycine max
agcttgttcttgattattcctgagttctgtaacttgcttagaacaataaacttggccttctcttatttgtctttgggcttggcgaccacgatcaacaaagtactttcggcacctactatatgttgactcgaccaacggcgttattggaaagtt

SEQ ID NO: 805 - DNA, 246 bp, Glycine max
  unsure at all n locations
gcttccttttaagtgcgtcancgtttaanaaccgagtctctgatggtggtggcgaagcctttgatggtaccctcggcgggaagtgaatggnggaacatcgacacttcctcattcagaatacnggcccccacactttgcaatggtgtgtatttcaaggtaatgggatataatatccctgcctatatgcttgcctcttgggaagaaccttggattcatgcccctgggagtggtcccttcaacgattca

SEQ ID NO: 806 - DNA, 368 bp, Glycine max
  unsure at all n locations
actaatgtagttnctaaacaaaaatcaattgaggaagcttcgccaagtatccccattgaaaaacctttattcaaacctttcaaagttagtgaaaaggctaaacgaaaaattagggaacttagaaaaactaaatccttaattgaaggcgtaggtgacaatcatagtgaattactaaacaagaatggtagtttacttaaggtcattccagatactccccaagcctcggaaaatacttccaaaatggtaacaagaagtacctccaaattaattaatattattaatgaagatagtgaccaaaactcagataacacaactgagataggatcagtgtcagaaaagaatataaatccaattaatttcaaacactg

SEQ ID NO: 807 - DNA, 223 bp, Glycine max
agcttgagatgaggaagtgttgaagggtgaaactttctgcttttattggtgaccacagagtggtacctggagatatgtcgtgggggtcacgagaccttgcggacgtcaggtggtgtgctattgcccaaaaccaagcttgaccaatcccgacccaacccgggcatagtcggtaagtgagaacctgtgatgtacctaaacaggcgagctcctggcagtcaacaga

SEQ ID NO: 808 - DNA, 427 bp, Glycine max
  unsure at all n locations
gaggtccaggaaggtttggcggccgaaggaactagttccgctccggagtacgacagtcaccgctttaggagcgctgtacaccatcagcgcttcgaggccatcaagggatggtcgtttctccgggagcgacgcgtccagctcagggacgacgagtatactgatttccaggaggaaatagggcgccgacggtgggcatcactggttactcccatggccaagtttgatccagaaatagtccttgagttttatgccaatgctcggccaacagaggagggcgtgcgtgacatgagatcctgngtaaggtgtcagtggatcccgtttgatgccgacgctatcggccaactcctaggatatccngtggtgttggaagagggccaggaatgtatggcgcctactangcaccctttggacccagataagtncaaca

SEQ ID NO: 809 - DNA, 361 bp, Glycine max
  unsure at all n locations
agctttgatatggaaattaagttganagtaaatgatggtatgtataagacatcaatcagtgtaatgaatgcagaaagttgtactgcgcctgagtgggtagcatagacaagatggccatttggtaatctaaccgtgatgggattaatttgatgatatgagtgaaagtttgttaaggaggaggaaacgtgatcagtggctcctgaatctaatatccaggaggtagagtttgctttttcgtaagataggattatacctgttgcatcgttattggaacaagataaaatggaagcgacctgtggtttggtggatgctgagtttccagcagatggctgttgtattaatgctagccatgccttgtact

SEQ ID NO: 810 - DNA, 360 bp, Glycine max
  unsure at all n locations
ntgcggatatggtcttttcaatgaaaggatcaaagtgggtctggaaaaaggcaaatatgatcatccttcttggatgaatgagaaaactggggcaaatgaagaggatgagaatgatgaaggaacccatgttgaggctggcattcctacaaggacaaactttccctccagttcaaaggccacctatttaagcctgaaatcagaaatagaagtggacgttgggcttttccttgagcttttgcatttttagatatttctatagagagaaaggtccaagttccaaagagttttgagagcttttgttgtgcgaagactgacagagaactgagagtgaataggaactcattctgagacatgagatga

SEQ ID NO: 811 - DNA, 462 bp, Glycine max
  unsure at all n locations
tgatgatgacaacttctganatcaagaaacacacacacacacacacacacacacacacacacacacacacacacacactttttcctagtcgatcactcacataaanttccattctcccccttttgttttgaatttatgcttatcttanaattaagttaattactcatgtgagttcttgatttaatccctatttctctcaccctttggcatcaacaaaaagccaaagtgcatatcanatttgaagtattcaaatataactaaatatccatacaacattcatggaaaaaaaatatcaaccaaatcatgaagcaagaaccatgaagcaacaattatgaatagattataaaatccacatagtcaaacaacatacttaatattngttcanataccataataatatagccaaaatacaaggctgaagatcagagtactaataatattaanatagacatctaagatgag

SEQ ID NO: 812 - DNA, 297 bp, Glycine max
tggcactgcagatctgatctgcgtgatcctcatccacgtacattgtgtatgctccggttgagtcggtgtaccccttcttcgtgtacacaacctcgttgctaaccctgctcttgcattgcaacataatctcagcacctgcaaacaatcattaatcaaacaatacgtgttacaaactagcaacaactactaaggtaatgtttccattcacattaaatcattcaaaattaccttctaatatgtaaatttaaatatatgttcacatgtttagtctcatgccaaaaaaatgatgttagatct

SEQ ID NO: 813 - DNA, 420 bp, Glycine max
  unsure at all n locations
gcttcatatatatataacataacattatgtggtaagacctaacacgccaacaaattattctcaattagttgatgaacttccaagatcccatttcactaaatttccttagntattagatacctctaaatatatgacaaagcatggatttgaatatatagataagctcatccttatctttgggatccaccttagaatcaatagaatattcaaaatagtgttaaggagcaacgaaaagaaactaagaacaatattaaaaggaataaagtgctaaccatctcactcaatgaatgaatgctntgacaacctcaatggatgcagacaaaataatcagaaattctagtactaatgtatctttagcagcttatgggtacttgaatggagaataagtgtnttttctgagcttatggctcaacttgatat

SEQ ID NO: 814 - DNA, 432 bp, Glycine max
  unsure at all n locations
tttcattntgctattntccttannattttaaattntcatgttgtaatattgtcacgaatggacagtttttagttacatttctttctttnttctgctttgtattattaaatagaatttattgttgagaggaagcagagaggggtgttatcgttgagaggatgcagagaggggtgtggcaaaatgacgtaagcgggttccttttacaatctatttatcccacagggtctatttttaaacaattgtcgaagagggtctgttttttaaaggtgttccaccacttggactggcggaacccttgcttgcataaattcccatgcatgcatggttctgccagtggtgttagcgtaaatcaacccaaagggtttcgccaatcccactagtgagataccccatgccattcatcccatcatccatcaacgccatccatccatg

SEQ ID NO: 815 - DNA, 429 bp, Glycine max
  unsure at all n locations
ctaaaccttgaaaacttgtgctattcattcttttcatctcttctccctttgccaaanagaattcgccaaggacctaaccgcctgaattcttttgtgtctctcttctcccttttccaaaagaacaaaggactaaccgcctgaattctttagtgtctcccttctcccttgtcaaagaattcaaaacgacacagtctgaaaattcttttgattcttcccattccctaatacaaaagtgttcaaaggactaaccgcctgagaattcttttgtatccccattcacaatgtatcanaggtttaacagcctgagatctttgtctaaacacattggagggtacatcctttgtggtacaagtagatggtacatctacttgtgtttgactgagaacaagagaangtacatctcttgtggatctgttctagtggagggta

SEQ ID NO: 816 - DNA, 529 bp, Glycine max
  unsure at all n locations
cgcccatcatgattgaaacgccatctatntangtgtgactacagataactcaagctgtacggtattgcgggcaagttatgtgctgaagatntattntataaaattaattaattaattgatgtgagttaaatttgaaataaaataaagaaacaggacatccatttaccagaacgtgtcccaattaatttttgttactatttttaattacataaatgatatatatatatatatatatatatatatatatatatatatatatatatatatatataattggcatgaatcgaaaatattctttttttcttttttatcgtaattttaaactgtaaaaaagtaggacatttttttcctatagcgtgatacatacaaagttaacagttaacaattgtgtntatataatatataaatatatattaattaataatatatattacttctagtaaaaataaaataatatactgcttaatagatntgatgattaattccatcgattatatactaatctntntaatataaaaaaataaaactn

SEQ ID NO: 817 - DNA, 501 bp, Glycine max
  unsure at all n locations
agtcacctgcggcatgcaagcttctggttgctgcgatgatcgaccagaactgttccctgaactcatccaagtcctcaaaggcttgagactcacagcagttaaagctgacatagccagtgttggtggcagaatcaaaagcatattggtgctttgttctaaggatagagaagacagtgtttgccttgccactctcaaacagtccctcaaatctgctgtcaccaaaattgcttcatcatccatggcttctagntgtcccgctagaagtaagaggcagagattcttcttgccttctcactgcctacagttaattatttattgcaaanaatatttttttccccactattcattgcagtatggggcaattatttgctctattntcaatatatatatatatatatatagactccccattaggaagataaaatcatgaaatattagttctgtgcaaccaattaaggcatagttaaattganaggaaaggacgcacagcatagtatgagt

SEQ ID NO: 818 - DNA, 447 bp, Glycine max
  unsure at all n locations
cgcttaattatctttagaggaggataccgtccaatggaggataaaaaaatgatgttgataatcttttccttttttacatttgaaggtattaaaaaaaagtgtcttcatgacattattaagaaattaaaaaaattattaaaaatcatataatgcatttaaaaatcattggagaagacatttttatgcatttcaatgaaaatatttttctttttattttttttaaccgctgttcttaaaacattagttaatatttaccttaaaaaatgctaacaaaagatattaatgccttgttaattagaagtattaaaataaaagattgattctttntaaaatgtatatattgtttataatattttattgataatacttgtaattagtgtcacaattaaaagtagctttttataaaaattgaaaatgaaaacttccatttgaagtcagcaatgttat

SEQ ID NO: 819 - DNA, 429 bp, Glycine max
ttcgttggcgaaaggatctatgtgggtctgagaagaggcaaatttgattatcctgctttaatgaataggaagcctgcggcaaatggagagaatgagaaggagggaggaacccatgttgtgactgctgtcccaacacgaccaaatttcctactagctcaacaatatcaatacttatccaatatcagcccttctcattacccaccaccctatcaaccaagaacactcaatcattcacaaaggtcatacctaaatcagccacaaagcccgcctaccgcatatccaataccaaacaccacccttaacacaaaccacaataccaaccggtgaatggaatttctagaaaagaagcctgtagaattcaccccaattctggtgttgtatgctaacttaactccatatctactcaataatgcaatggtagctataatc

SEQ ID NO: 820 - DNA, 466 bp, Glycine max
  unsure at all n locations
nttccctcattctcacgttgcttttcttctccccttctcatccaccattgttgcccattaaagctccaaactttgctcaccatttctactccaaatcacaaaaggaagccattttcggagtcgtgaagcgcacctctacgttgtgggacttcaaatttcaggtttgggtagacttcttctcacataaattttgtgggtattgggtctttgggagatatgatgggtagttctactaggtttatgccttatggtagttatttgtgaaggaatttgttgaaagcatgctaaactcgtcatgtttgatgtgagccaaatatacccattctgttttagggttttataatgatgctttgtgatgcttgtgtgctgaaatcattggtagaaaactggtagagatgatggggagagttaacctanggttaaaagtgagaatggtagtgatgtgagtggaaaagtgaggttttga

SEQ ID NO: 821 - DNA, 483 bp, Glycine max
  unsure at all n locations
gcttcacacttgataatggagacacatgaacagtgctatgtaatgacattcatggtgctccaaacaaaggtggagtatggaggattgccttgagggtccgcacttaggcaatcatgaaactcaactccaaactcgaaagtggaggacacatgaacagccctaagcaataacattcatgtggctccggaataggatgagaatggaggattgccttgagggtcctctcttaagcaatcatggaacacaactccaaactcgaaagtggaggacacatgaacagccctaagcaataacattcatgtggctccgaagcangatgagaatggaggattgcctcgagggtcctctcttatgaaatcatgaaactcaactccacactcgaaagtggagaacacatgaacagccctaagcaataacattcatgtggctctggaacaggatgagaatggaggaatgcctngagggtccctcttaagctatcat

SEQ ID NO: 822 - DNA, 412 bp, Glycine max
  unsure at all n locations
agtctcacgattgtcacgtgctcatgcaacatttgttagccgtggctatatgagacatcttgccaaacaaagtcaggttaacgataactcgcctgtgctttttcttccatgctatatgtagcaaagtcattgatccagtcatgtttgatgatttggaaaatgaggccgcaattatactgtgccagttggagatgtattttccccctgctttctttgacatcatgactcacttgattgtgcatctggtcagagaaatcaaatgttgtggtcctgtttatctacggtggatgtacccggttgagcgatacatgaagatcttaaaagggtatacaaagaatctatatcgttcagaaacatctanttgtgagaggtacattgcagaagaagccattgaattttgttcagaatactt

SEQ ID NO: 823 - DNA, 453 bp, Glycine max
  unsure at all n locations
agctntaggagaaaccatataaactaaggtagttcctanacaaaaaacaattgaggaaacttcgccaagaatccccattgaaaaacctttattcaaacctttcaaagttagtgagaaggctaaaagaaaaattagggaacttagaaaaactaaatccttaattgaaggcgtaggtgacaaccatagtgaattactaaacaagattggtagtttacttaaagtcattccagataccccccaagcctcggaaaatacttccaaaatggtaacaagaagtacctccaaattaatcaatgttattaatgaagatagtggccaaaactcagataacacaactgagataggatcagtgtcagagaagaatataaatccaattaattccaaacactggagaacaacctccatattatattatcaacgtccaactggccctgaccttctattagaggaaag

SEQ ID NO: 824 - DNA, 457 bp, Glycine max
  unsure at all n locations
ngaaacaactcgttacataatttgatatggcttgggcaacagatttcataagtatttcgttacccattctagaaagagattgctccatccacttgttcaatttttattacacactcttctaaatgctagagaaaatcatcttaaactttcccaataaagtggtagcccaagatatttgtcatgaaaattgtaacgacctgtcttgtcgttatgatatcaccactctaaagtacgtaaattntaatttttaaatgaaaatttcattaatttgcttatgaaaaatgagagtaaatttttcgcgatatagattcaccaaacaacgcacaattatttaaatgaaatatatatatatatatatatatatatatatatatatatatatatatatatatatatatatatatatnaacttagccacactcacataatagaaaagtaaattagttcatacatatag

SEQ ID NO: 825 - DNA, 479 bp, Glycine max
  unsure at all n locations
agctngaacacctattagtatttatatttcttaaataataaatgtatgacatcaactcgtcattggctcccaggttagtggattaagcaaaatagaccaatacaaactcacgggttaagtcacctaacccattgatccaaagtttacattgtcacctctacattagtgactntttgttgcctttgtttcctttaagctttntgtgtataaaaatatattttttcttgtgtgaaatatttgtttggaattcagttttaactatataataaaattgatggttaagtttaatatatatttaaacagtcttgatcatttgattatgaggacttggataaaatatatattcttcaaagttttgttaatataacttggtaaatataattctaattttataaactatganaaaatacaaaagttagatgaattcaagctcaacacaatagaacaagtaccaacanatactatcatacatttgacat

SEQ ID NO: 826 - DNA, 430 bp, Glycine max
  unsure at all n locations
tctgtctgcagtagcaccaccaccagccatgttaattaatttgctctcaaacaaccaattaattctctagcctcaacgtcggtacgagcttaattagtatattaagaatgctattattagtaatatatattcagttctatagagaatgatgttttgtcatatgcttacagaccgtaatggtattgctcttgcgggaaccacatacactctagctagaaaacaagacatacatagttaattaattaataatgttaaagccggcccttggaagacaatttacatgcttaagtttcacgggtttaggtctaaataatgccattaaattatttnttttgtttggaatataatttatttattatcatttaagttgcaacaagccttggtcgttacttgtttgttctattatgcgtggagtcttattcatcgaacg

SEQ ID NO: 827 - DNA, 309 bp, Glycine max
  unsure at all n locations
agcttntgaccggctgacaagcaacaatctaagttataatatctacaccacaagctgtatcattgtaataacttactcatattcttcacatttggacagacgataatatctacaccaccagctgtcctcgaataacctgaattgaaacagaataaacagcagtaatggaataaaccccatcgaagcatctgcgtaagaaacccacttggaggtgtgatcaaatatcaaaaaggaggctgctgtaaaagccacaaccatatcatcaacatagataaaaagtaacacggtcccaaaagtcaagctcggatg

SEQ ID NO: 828 - DNA, 222 bp, Glycine max
cttctgaaccttcctaaggaaatccttgataggattgagactcaggaagatatgaactatattgaaggttggtagcaaatctttacttctacattaacgcttctcattatgtataggatacgagtgaaaattcatatctgggatggggtatttcggatgaatctttcttgccggcgttcgtcattcgatgccccatatataccctcattaaagggccacaac

SEQ ID NO: 829 - DNA, 406 bp, Glycine max
  unsure at all n locations
cccgctgagttctttgttatcaccganactctaggaggaggccaagaaactactgtgtaagattttctttatttccttgntagtgttcttgatttgtgaatctcacttaaattttgagcttaatatgtggcatgcattgtgaatcacatttttaatctttatcagctaagttgagttgtttatgtatgttgtagggcctttcaaggagaaacgaagcaatgagcttatattctaatagctcanaatcacatataattctcacatttgtcattgagtctttgtgtaagggactgtcaaattttgtaattctacctaacattaccagcagttgtgtatggaaattgtntgtttcctaagattcaagccaggtttatattttctctgttagttctattgctaaacatga

SEQ ID NO: 830 - DNA, 399 bp, Glycine max
  unsure at all n locations
gggtgtacgtaaaataattagcactaaagcttatattattntatgtatttatcacaatgtgcaaatgagatgattgtgtctaactttttccataacatataggcctgatgttttattttagaagtttataatctgatcttcagaatttgaaattttttctttacattcttatcaaaggaacgtcgttttaatcaggtagagtacaattataaacatataaattacaaaaattaaatataacattntatggtttatgatgatgagtgagatgtggtaatgggagagcaataaggaaagcattntggatccacanaacaggacatgaagcttcttgcaagttttcaaataatcccttcacgaatcggtttgggatctttgcaaatttcttgtctcanatcc

SEQ ID NO: 831 - DNA, 440 bp, Glycine max
  unsure at all n locations
tgcccaagtcagcaacatacacactgtgtatattgtggattctacaataaaaggtaactttgaatacttcacagtcatgaagtgtctaccaatctctgttaagatagttgttacaactttatttaagcaaagaaatagctcctttccttaaacaccaaaacagaagcaacaaaagttagcaaagcaagaaatacaaccgcgaaccataaaatagtgctcttatagattcatgattcttaatattttcaggtgtgttaaaaacgatttttctgaaaaatttgtcacaaatcaagcttgaaccagagaatcaccacgcgcagataattaactgcacattaggtgccgtagctatcgagataaagaaaagtagaggctattgctcgagaagaanagaggaaaagcttatgaacaagaaagcanataaattgagcaaaatgatc

SEQ ID NO: 832 - DNA, 313 bp, Glycine max
tctcctaccactgccttacaatagtcatcaagcaatatgttggcagccttcacatctctatggattatctttggatcacactgctcatgaacgtatattagctcccttgctgctcctaaggcaatttgctttcttgtgccccagtccaacactggcttacctgcaaatatccatcactggtatatggatcagccactcaacttacatagcacatgcatgttcattctagttctggttacataaacttctctatatgcacctttgagaagaacataagaagttagaatcaatttatgtaccttagttattggag

SEQ ID NO: 833 - DNA, 336 bp, Glycine max
  unsure at all n locations
tgtacgcacatcgttcgcgtgtatgatattcactccacaatgttcgaagtagaggagagcttcaaccctataacgcaacgtggcagacaaaagtgggcagtaaacttgaatggtcgtcattgtcaatgcggaaggtattctgcgcttcactatccatgttcacacattattgcagcttgtggttacgtgagcatgaactactaccaatatatagatggtgtttatacaaacgagcacatcttaaaagcttactccgcacaatggtggnctcttacgaatgaagcggctattcctccttctgatgacgcatggacacttatccctaacccaactaca

SEQ ID NO: 834 - DNA, 252 bp, Glycine max
agcttgtctcgctaagcgataatccacttttggctctaaacacgacttttcgcactaagcacaatttcctctcgggttgggatttgcgttgagtgtgacaattgatgttgagcacaattcattttgcgttgagtgcaataattcgcgttgagtgcaacctttcatcccgagagcaattccttcttgggttggaattgcgcttagcgtgcttctcgtgctaagagagatgtaaaaaattgttgttctaaatcc

SEQ ID NO: 835 - DNA, 254 bp, Glycine max
  unsure at all n locations
tgagatgaggaagtgtagaagggtgaaacttcctgcttttattcgttgaccacagagtggtacctggagatatgtcgcggnggtcaggagaccttgnggacgtcaggtggggtgctattgcccaaaaccaagcttgaccaatcccgacccaacccgggcatagtcggtcagtgagaacctgtgatgtacctaaacaggcgagctcctggcagtcaacagataaaaggaacaaagaccacaaagcatggaggctt

SEQ ID NO: 836 - DNA, 402 bp, Glycine max
tgcagcttggttaatattaggccttgataatcaataaagcctattggaaattaatatgtaaaaggtagtgactaaaaatgcaaaattacactttagtttttcataagcataacatccaatacaactcataagtttataattagtcacataagtttttcataacatatcacaagtcacaactaaaataaaagaaaacagtccaagtgtgcaattatagaatctagaattcttgatatttagactagcaccaaatcgctaattttttccaaataaaaacacaaaggtagtaatagagatggtgaggggcacttgatgtgagagaaaagcttatctctgctaagcctcaggccaaagtccaagggtgaatatggagagatcaaaagttacagagcaatgggtata

SEQ ID NO: 837 - DNA, 433 bp, Glycine max
  unsure at all n locations
tgatttagttntcgctgacgaaaggatcgaagtgggtctgataagaggaaaatttaattatcctgcttgctgcttggacgaatgagaaaactggggcaaatgaagagggtgagaatgaggaaggaacccatgttgtggctgccattcctacatggacaaacttcccttcagcccaataatgtcatcgctcagccaatatcgacccttctcattacccaccacccagtcatccacaaaggtcatccctaaatcaaccacaaaacccacctaccacacaaccaatgctaaacaccacctttagcacaaaccaaaacaccaaccaaggaagggaatttgcagcaaaaagcctgtagaactcaccccaattctggtgtcctatgctaacttgctcctttatctacttgataatgcaatggtagcgatcacccctact

SEQ ID NO: 838 - DNA, 111 bp, Glycine max
  unsure at all n locations
agaggtaaatgacatatgatcatttctcctacttgctgttgcacttttggctatttttgatacctaaagntttcattncgaatttaattacacgatgatgatgctggatga

SEQ ID NO: 839 - DNA, 402 bp, Glycine max
  unsure at all n locations
agctngcgaataattaacacagaatngtacaaaattcttatgatacatgatcaaatttatcaaaaaanataataatgacccctgaagctatcttggtgacagtgacaataagttgagccttgtgcagcaaaacttagtgttgagtgaaggatgacttgttgcttgtgaattgacttaaccagtttttgacagctttacctttggcaatgaagcagccattgttcttcctatcaaccttcaacggactccccattttgaccatcatcttctgaaccaacactctcaccggcgactctcctctgacactgctatgctttcccaacccacanaccaccgtaaattccgcaggaactccataattggaatcattcaaccttcttccatctcctcaaccaaagcaca

SEQ ID NO: 840 - DNA, 116 bp, Glycine max
  unsure at all n locations
taatacagtagtctttatttactttcaaattnttttactgttatggtgtctgtattgattntgttttggattgtattttcggagtttgctttgtctttaattattgattatttgat

SEQ ID NO: 841 - DNA, 303 bp, Glycine max
ccaacgccagctctgaccactgttctttctttccgcgatgcttcttttcatgtccgccggagtgggcttatagcctacaccatacttgccacgattaccttgtgttttgatcagactagctatggcgccattgtctttgcctaaacccattcgcgggtcataacgggtgctcaacatcactcgggctctcattacctccaggtatgaccgacctgctgcagcgacacgtgcacctcaggaggaaatgctgaccacctcaaaagactggagagcgggttctaacgattcttctgcggttccaca

SEQ ID NO: 842 - DNA, 289 bp, Glycine max
  unsure at all n locations
agcttcaacanatgttcaccagaaatcctaagctatcaccatcaacctctaatgacattagtttctttttctttgttnttcttccataatcattttccttttcattctttcattgtgtggtgaactcctttccatggtgaagcatacactgcaacaatctttagcccaagatatggagtttgattctaaacgtaagttgacttttctttaggaaaatatgcttcattntttatacaacatcttgttctgttgcaacatacattacaacctnttatatatatatatatat

SEQ ID NO: 843 - DNA, 436 bp, Glycine max
  unsure at all n locations
tcttagatagcaacttgttntgtgctagtaatgcatcttgagaggaaagctccaggaagcttctttttgtgggaatatgagtccgatcacacaagatggcatgatcacttgcagccatgttctcaataagctccatggcttcttctggggtcttcaatttaatttttcccccagcagaagcatcaaataactgcttggactgtggccttaacccatctataaaaatgttgaactgaattggttctgaaaatccgtgagtcagtgttttccgcagcaagctatggaatcgttcaagtgcttcgcttagagactcatccagaaactggtgaaatgaaaagatggntgcttttccttctactgtcttagactcggngaaatatttcttcaaacatttctccaccaattcatcccatgtcttgagactgtntcccttaaa

SEQ ID NO: 844 - DNA, 434 bp, Glycine max
  unsure at all n locations
agcttcatgactagacatgacttctatgacaaaactacaataggtggacaagtcgctctagatttgtgaggttttcttctactttaatatttttgtaagaattttatgatttaggtttcagccacaaaaaataacaagacaaaactcanatcatttgttcatgagtgtatgaaattcttttagcctattatttgatttgagtcaaatctttcatgttaattagtccttaacatgttcatgcaaaatgcttagagagtctttgattgtgaacctttgcttgaacttttatgcttccttatgattgcgtctattgtgaatatgagtcttggtgattgaattgctggctgaaatgttgatcctaagtgaatattgaactcctataactgtcgtaaacagtcctagtgagttcaacatacatatgaagggtgaaagta

SEQ ID NO: 845 - DNA, 376 bp, Glycine max
  unsure at all n locations
ngaagctcaaggaaaagcttgaagaagttntggctattacatgcccaactctcttaagtggcatttgtattggttgttatcttnggtgtttcttcttagtacatttgatatttgtattgcatcatgcatcatcatggtttgtgtgaagaaaagtttctaagttagaaaaatttcttcagaggcaaaaacactattttaatcgattacaaccttattgtaatcaattacgacaagctgtctgaagcttatagagttgagtctcgtatcaaattaatcgattacagctatctcacaattgattacattattgttcgagacaatgactgatttattcaagagtctctgctttaatcgattacttctttctcgtttaagt

SEQ ID NO: 846 - DNA, 415 bp, Glycine max
  unsure at all n locations
agagatacaatctactcttggatttgcattaaaanaaaatctttgcatctatctttcttctgctccctgcctgaaaacatgcatgtatagcctggtaattggtcaatgtctttgctaaagattatctgggctgttgactcgaagcttttctaatttattcaataagatgcatgaataatttaatcataaatcataaattccatacatgatgtaattattcatgtatcttattgaatatatagatcttatggttatttcatataattagttaattaactggtgattattttctgaccaagcctggtgattatttcatacgcttacgtaattaactgattctgttttatattttatttattaattcttcataatggagatgaantctacacaattcatgtttgaacacaggatgcat

SEQ ID NO: 847 - DNA, 455 bp, Glycine max
tctttgagaaaacttccttgagaagctagagcttagctacactcacccctctaataactaagctcacctccttgagaagccttcttgagaagattcctatagaagctagagcttaggtacacacacctctctaatagctaagctcacctccttgagatgaaaagctagagcttagctacacaacccctataatagctaagctcacccccatgacaaaatacatgaaaatacaaaaaattccctactacaaagactactcaaaatgtctcgaaatacaaggctaaaaccctatactactagaatggccaaaatacaaggcccaaacgaaggaaaaacctattctaatatttacaaagataagcgggctcatatttagcccatgggctcaaaatctaccctaaggctcatgagaaccctagggccttcccttggatctctggcccaatctacttgga

SEQ ID NO: 848 - DNA, 349 bp, Glycine max
gcgagctctgaccactgttcttcctttccgcgatgcttcttttcatgtgcgccggagtgggcttatagcctaaaccatacttcccacgattcccttgggtttttatcagactagttatgccgccattgtctttgcctaaacccatcccgggttcataaccggtccccaacataactcgggccatcattaccgccgcatctgacagacaatgttgcccaaagagggaatccacggaggaaatgctgaccacctcaaaagactggaaagcggtttctaacgattcttctgcggcttccacataaggcatggaggatgggcagcttaccaagatatcttcctcgcctgacac

SEQ ID NO: 849 - DNA, 106 bp, Glycine max
gctgatgagtactattgtggagatgattgaccattctcaaagccaaggaacatatggatgcgtattttgaaatgatgagatcattatccaacaacatgaatttatc

SEQ ID NO: 850 - DNA, 358 bp, Glycine max
  unsure at all n locations
agctttgccaaataaacaagttctctattgttgatactcagatcattccattttaattntaaatacttggcgacccgatgcgcttgccggtatatcacttctgctttgatgtaagtctttgtaaatttaagaaaaaggaactgtgtggggagacgaacagtaccacattgcatttgagagttgaggtcaggtacatatatcatactaagcatgagtgattgaaactatggacgaatgatgactactctgtgagtgtatgttggactaatggatggttgcgtatgtttatgggatctgataatgttttcttactaattattcgagttttgtattaacttcttttataataaactcaccc

SEQ ID NO: 851 - DNA, 435 bp, Glycine max
  unsure at all n locations
tatccttatggcttgccttcggacttcactccccgtaccaccccggaagatttaagccaagcccctactttcgaggggcagctcccaccttatgacgactatcccgggcaagacgatgaggaaggagatacccatctcggtcccctgctccacctcaaagatctgtccccccatgaactaccccaaccaaacatagtccgccatatcccgacttcacccacactcgtaaaagaatctgttcccttcgtggaacataagggaaagattgaggcgcttgaagagaggttgagagcagtcgagggcctcgaaaattacccattcttggatctagcggacttatgtctcgtacccaatatcgtcattcctcccaagttcaaagtaccggactttgataagtacaaagggatgacatgtccganagggcatcttcggatg

SEQ ID NO: 852 - DNA, 187 bp, Glycine max
  unsure at all n locations
agcttgaataggtgtcgcgttctactgaactatatatattntggtggntttgcaatgttgctatcctagatttgntattttctctcttggatattttagcgtcgacatagtgtaatatacaggtatgagcttatcaagatgaatcattttaggggattatcacttggcattgttcagctattctcta

SEQ ID NO: 853 - DNA, 333 bp, Glycine max
  unsure at all n locations
nttaggtggagcatattanaataaactaagttcatagaaaggtaataagacaccttcataagcccaaatgagatcttctaaacaccctctttatccatataactctcaaagtattacttaacaaaatttcaatgaatccttcaaatatgggaactgtcatttcaatcaaagaaaccaacaaagtccaccataaaaaagctgtcttcactctttagactgttttacaaattcactagaaaatattctacgaagaagatatcatcatatgatgtaaagcgtgctagttaactatgcaatgacacaagccgtccaaatgcacccattttaagatct

SEQ ID NO: 854 - DNA, 315 bp, Glycine max
gatgatgcagatgggtttgtagctacctcatgcactcctctaatgactatggcatcatttctggcactaaactgctgggagttggaggccatcttctcaattaaatttctggcttcagcaggagtcatgtctccaagggctccaccactggcagcatctatcatacttctcttcatattactgagtccttcataaaagtattggagaagacgctgttctgaaatctgatggtgggggcaactggcacatagtttcttaaatctctcccagtactcatacaggctctctccactgagttgtctaatacctgagata

SEQ ID NO: 855 - DNA, 303 bp, Glycine max
tcagaagaaagtgatgaggtacaagctctaaaggcagagcttgaaagagcccgagtagtcgaagagaagttcaagtccatagccatcaaagtctgaaaagagtatgatgaactaagggacgtcaatatggccaccgctgaagccttggaacgagaaaccaagaaggcccgaaaggaagaacacgtgcaagcaaagttttgaggggctttatatggcagcaatagttagctcaagctcctaagaggtgaaaggaatcatcactggttaaaggcatgatcttgaaagacgagctaaaggcttacc

SEQ ID NO: 856 - DNA, 415 bp, Glycine max
cccatcacatgtggtactaggtggcggtcgggcgatggtgcacaacaagttttccacatccacaatgcgcgcataaacccaccatcccctgttgcccacctccatctgagctcacgtattcccacgtagcccatatcctcgtttctctcaacaccgggtccccatcaatcctcccaagcttccacaacatccaatcaaaacaacattcaaacagcacaagctatcacagccaagcaaaacaggacaaaggcagaaaactctgctcaacacaccaaccaaaatcacagcttttctcactcaaagaccccagtaacaatttcttcgatccaattcgttaaccgttggatcgactccaaaattttactggaagtctatagtgcataagcctacattgtgaaccgtgggatctactaac

SEQ ID NO: 857 - DNA, 591 bp, Glycine max
  unsure at all n locations
agggcacgacggtnaattgatcgcatctattangcgacactatagatactcaagctngtaatcatgtgacaccctctacccctcacatgtatactaatatatgaataaaattcaaatattaattaaaagtatttttaaaacattnttttttccgaaacaagtctttcaaaggggaaaaaggctcacattcattttcttctacatcatattcaaacttgtccaaataaataataaagtaatctcgtctcanacaaggtcgtctaaacttcatacaattaatatagaacttatatcctaatgtcacatcctatcatagtgttgtgttcctgtgtcctctagcatgaggttcttcatagtcatccacctattcatctgtttccccgaacacaagttcaagatcatcacaggatccanacacaacaacacacagggagtgagtcatcacattcatagctaatagagagacaagacaattaaatatagatattatataaatgagataccacttgcttaaacatagctcacgtaatntcaccactntgtcattcannaatcacttttcaatcatcaatcacattacacaagaatccn

SEQ ID NO: 858 - DNA, 416 bp, Glycine max
gtgtgattcctttctttttcttatcattctcctcatgttgattcagtctcattagttccatttcgtgttcctataactttccaaataaagttgcaagagacatgttagaaagatcccttgattctgtaatagttgttacctttggttgtcattccctacttaaacatcttagaactttattaataagatcctcattgggaaatatctttcctaatgatgcaagatgatttactatgtgtgtgaatctcttttgcatatcatgtatagtttcatttggattcattctaaacaattcatattcatgggttaaggtatttattctagaaccttttacatctattgttccttcatgggttacttgtaaggtatcccacatatcttttgcactcttgcaatttgatactctaaagtattca

SEQ ID NO: 859 - DNA, 487 bp, Glycine max
  unsure at all n locations
catgcgcctatntccttacgaacgttctctngcacaagacatttagaccgaaaaatgcacccatatacaatcaaggcagtttcgttacctagattatttacacgtacctccaaggtgtatttgttacttacatcacacacatctccttggctaaattcacatacatgcatactcaaagcattttggggcaccaaaaattgcacctgtgcacatcttggcatttctaatacctatacatacgcaaacttcatgatgaatcttgactatctacacaataaggtgctacatttcatgctcttttttcaagttnttgctacctaaagccgcatgccaattcaagcatattttcctttgctgactaanatngtattcaaattaaaaggtatatanctttttgtaatatagtttcttcacataacatgcaacatatttatatatatttttctgtgagacatcttgactaccaacaatatatatacatacattc

SEQ ID NO: 860 - DNA, 502 bp, Glycine max
  unsure at all n locations
cgagccncngnnnttgtagcatctcgaccgcgatccttaagcacctgggctgcagcttgaccaacagagagccataaagtttgtctaggaagtctaagcctatagtgcctggaggcgttgcactctcataccgtatgcgaagagcttgaagcctttgcttggaagacgccatagtggatttcatcctctattctttacccgatcactatgatagctctgcaggtacgcatgtattgtgcatacctatgttattgtagctctggcacgacgttcttcactacatgcgggactgcccacctcagacataggccacgagtataccactgttgatcatatgggactccctctcttttttaatcgcgatggcatcccactccgctgctcgtttatgacatgataagacagctgcttcgattcantgtttaccgtaatagaagagcacaaccctattccagcgaggcacatattattacttgcccaccatgggtctgaattcttgtcn

SEQ ID NO: 861 - DNA, 311 bp, Glycine max
  unsure at all n locations
tgagctctntcagctacacatggcggtgacttgtagaggagtgtgatggacgaacctgcacccgacgataacactgacaagagcttatattctccatcttggacaagatatggcagactggtggcaagtctactatcttccatcagccttggaacaactgtgatcgtgatcacatatcagctaaaacttgatgggtatgcaagccatactctcactgtgcttgaatggtaacgagcagcccaatgacactgtgacccacatgtttctccacatgcgttacatcaatgcagtgtctaacgtcaagatcacac

SEQ ID NO: 862 - DNA, 80 bp, Glycine max
tcctaacgatttctaattatgtgggccattaagtctatcatatgctgacaatagccgagaagcccatgaatctcttcggg

SEQ ID NO: 863 - DNA, 440 bp, Glycine max
cggagaggatgcttcactggaggagaagacagagggagagatagatagaggcgggagcatgaaattgaacgatgataaacggagagaagttgaactatgagttgtgtctcacaagactctcattcatcaaagatacaacatgtgttacacatgtatctatattatagactatgtagcttccttgagaagctttcttgagacaacttccttgagaagcttctatgagaaaacttccttgagaagctagagcttagctacacatacccctctaataactaagcttacctacttgagaagcttccttgaatagattcctaatgaagctagagcttatctacacacacctctctaatatctatgctcacctccttgagatgagaagctagaacttatctacacacaccctataatagctaagcttacctccatgacacattaca

SEQ ID NO: 864 - DNA, 566 bp, Glycine max
  unsure at all n locations
nttgacgcatcttgangcgacactatgatactcagctgggtatgtcaggccaaatatgggtggagtgacaaaagctntaatttactgcttgaagtagtgcacgatctgcttccagagganaacacgttgcctaaaagctactatttggccaagaagatactatgtccgatgggtatggagtatcagaagattcatgcttgccctaatgattgcatactgtacagacatgaatttgaagaaatgtccaaatgccctaggtgtggngcatcacggtacaaggtgaaggatgataaggagtgcagttctgatgaaaactcanagaagggtcctccagcgaaggtgttgtggtatcttcccatcattccaaggtttaagcatctttntgctaatgaagacaacgcanaagaccttacctggaatgcanatgggagaaactctgatggaatggtctatcatccggctgatntcctctagtggaagaagattgatggtttgtattcggatttcagaaaagaggcaagaaatcttaggcttggactagccagtgatggaatgaatcatatggn

SEQ ID NO: 865 - DNA, 441 bp, Glycine max
  unsure at all n locations
ataacatccaagaaatttcaacatccaaacatcatgaactatcaaaactaagcaaaaacagggcagaggcagaaaactctgcccaaaacacaaaccaataccacaacttttcttattcaaataccccaatcacattctttttgttccaattcattcaccgttggatcgactcaaaaattttactggaggtccctagtacataattctaaattttgaccgttgggatctcctagaaaacgtccagaacccaatctgtactactctttccacaaccagcaaatacacatcattttctgcatgcacaaagccaaaattctgctgcacatttcaacagcaaaactctgcataatagtgcaaaatttcgaaatcacacttgcccttgtcctaatttgcccaaatngaatcctacaagtcctaaatcatgtataaatcatgtctaaa

SEQ ID NO: 866 - DNA, 318 bp, Glycine max
  unsure at all n locations
ataaagagggtgaggatgagggagaaacccatgctgtgactgccattcctgtacggccaagtttcccaccaacccaacaatatctttactcagccaataacaaaccttcttcttacccaccacccagttatccacaaaggccatccctaaatctaccacaaagtctgtctaccgcacttccaatgacgaacaccacctttagcacaaaccanaaacaccaaccaagaagtgaatattgcagcgagaaagcctgtagaattcaccccaattccagtgtcctatgctgacttgctcccatatctacttgataattcaatg

SEQ ID NO: 867 - DNA, 471 bp, Glycine max
  unsure at all n locations
agctntgcatggatgccacacgtgaatcttctgtatcatccatcatttctttcattcacaaccccaacaagatgtagtacactagagttatgggcaaagcaatcagcatcccaaaaataacactgcattgggttaaagaagaagctccattggttaggattaaaagagaaagtaattgaatgaaaaggaaaaaggaatggaggggagagaaagttctaattgagccatataagaattagatttgaatactcacgctgtgctgagaatatcaggatgtacattatattccttagcaaagacaaatgggacaattccttggggaagagctgcctatatttttttgacattcagttgccaaacaaacaggacaagcaaacaaacaaacatgtcaactgcagtttcaaatccttggtgtacaatcacaaacatgatcattngaatcctcactactagtactaagatcttcaattt

SEQ ID NO: 868 - DNA, 338 bp, Glycine max
  unsure at all n locations
ngctngaganactntcttgagaaacttctttgagaaacttcattgagaagctagagcttagttacacacccctctaataactaagctcacctccttgagaagttccttgagaaacttccttgagaagcttccttgataaacttccttgagaagcttccttgagaatattcctagagaagttagagcttatgtacacacacccctctaatagctaacttcaccttcttgagatgagaagctagaagttagctatacacctcctataatagctaagttcactcccatgccaaaatacatgagaatacaaaaacattcctactacanagaactactcaaat

SEQ ID NO: 869 - DNA, 375 bp, Glycine max
  unsure at all n locations
tctatggaggctggatctttgagcttcaatgaggtcctttaatggtgattttccaccatggagatgcagcggaagacaaaggaaaagaggtgagaggaggcgccatccactagggaataagccatggaagaaggagcttcaccaccaagatgagccttggataagaagcttggagaggatgcttcaatgaaggaaaagaaagagggagagaaagagggaggggggagcacgaaattgaaggaagaaaaagggagagaaagagggaggggggagcacgaaattgaaggaagaaaaagggagagaagttgaactntgagttgtgtctcacaagactctcattcatcanagttacaacaagtgttacacatgcttcta

SEQ ID NO: 870 - DNA, 457 bp, Glycine max
  unsure at all n locations
ntttagaaaaaatcttataagttagtacatacctaaatagttctttaagatgactatattatgcttaaataatctttagaaatttcaactcaataacccctaaagtcatgatattcaattaaaactatcaattattntaaaagagaatgtcaacatttgtgatattcaattgagacttttcacaactaataaaaaggtattcttctattaaaaaatatataaattttgattaattattttctagagtgaattttgtgtcaattctttagtatgatgtataaattctagactcatccaacaatttcaccaaaactttcctcatttctgttgaaacatacttaatatgaagttntgatgatgtcacaagataagcgtttctcaagtttaatccaagttaagaactcagaaattcaagataaatgaagaagtagtccttaagagtcttagaaagcattct

SEQ ID NO: 871 - DNA, 417 bp, Glycine max
  unsure at all n locations
gactaaacattcattggttatttatttgtattcattatgcgatataattcgctgtaacccgtcactaaccaattaatattatcaactactcgtttggttaagcaaggaaattgttggtccaacaaaaatcatttacgcgtacagcatacatcattgtcataattgacaacacataatgacatgcatgcgtgttacagtttgagcgtgacaacacattggtngacttcagtacacattttgaaactagcagtcgctcaacaacacattggttgacttgactacacattagcgacaacacattggctgacttgactacacatttacgcgtgtctatttgttgtgaaacanagttaaacaaaggctcggtcacaaccatctatatatatggcagactangctactaaatcacacattatc

SEQ ID NO: 872 - DNA, 412 bp, Glycine max
  unsure at all n locations
cttgacagctctatggaccatgctatcattcttcctgctagcttagtatttcttagcaccttcttgatggggtgatccttcttgacgatgatctaagggctctggaagtacggcttgaggcgttgagcagaggttatgagtgctagcgccactttctcgatcatttggtatctctttccaacatcatgaaggatgtgactgacaaagtagatgggtgtttggtactttccatcttcttggacaagggttgaactaatggctttttctgccactgaaaggtataggaatagggatgctccangcttangtcaacttataacaggtggtgttgcaatagttntctttatagctagganagcttgcttacaggcttcgtttcacaagaacgactcggttttcctgagtagcttat

SEQ ID NO: 873 - DNA, 408 bp, Glycine max
  unsure at all n locations
agcttgcttctacactaagaagcactctatattgagtgaatcaccaaagagagaacaaccaccaaaattgaggaccgttttgtaattntgtaatttacaatttacttaccttcatttctttcaagttttgtaacaaaaaggcctttcattggaagtgtgttgggagcctccaataagttaccaaacttccatttgtgtgtaataattctaggcaatttttccttaagatagtgagtgttttgttgggaaccttgaatgtggtcatccaaacactcttangatttgcctagtttacatttcttgcttactttcatagcttatttcctttaccttcccttttaaaaccacctagatagttttccttttaccaattagttnttttaccttatctttcacacctcttttagt

SEQ ID NO: 874 - DNA, 321 bp, Glycine max
  unsure at all n locations
tagccctagaggngatggaccttntcatgttntggagaggatcaataacaatgcttataggttggacctcccataagagtatggagtcagcaccacttttaacatttctgatttaattccttttgcaggtgaagctgatattgatgaggaggaactaacagatttgaggtcaaatccttttcaaggtggagtggattttaatagcacacaaaagtcaagtcaatttaactcctttttaatagcaaaacaagtcaattctacatgtaataatacaatagaaattgtctctagctaaattaaaactaagttaatcttgtatct

SEQ ID NO: 875 - DNA, 463 bp, Glycine max
  unsure at all n locations
gctttgatcaaagtgttcgagggggagcaagcaaagatagaggataactttcttcttgggaagtttgagctttttgggttcactacatcgccaagaggagttccacaaatcaatgttttatttgatgttgacgttgatggcatcgtagaattcattgctagagataaaatcatgaggatgaaaaaaaggatcatgatcgacaacaagtactggaggttgagtccctaagagatgaggagaatagtgagatatgcaaagaggtataaggcatangatgtggaggtaagggcaaacggaaggccagaacttgcttgagaattgtgcttttgaaatgatggacaaagtgaagaatcttaagaaattagtacccatagcaacaatgttattntttttagtttcattaacaattcagtaaaaaaaaataccgtgcgctaacttgaaatgcccnctgcacacatggata

SEQ ID NO: 876 - DNA, 510 bp, Glycine max
  unsure at all n locations
atccttatggcctgcctncagacttcacccncgcgtgccaccccggaagaattaagccaagcccctacttttgacgggaaactcccaccttatgaagactatcccgggcaagacgatggggagggagatacccatcttggccccctgctccacctcaaagatccatccccacatgaactaccccagccgaacatagtccgccatatcccggtctcacccacacccgtaaaagaatctgttcccttcgcggaagataagggaaagattgaggcgcttgaagagaggttaagagcagtcgagggcctcggtaattacccattctcgatattggcagaattatgtcttgtgcccaacattgtcatcccttccaattcaaagtaccaaactttgattagtaccaagggatgacatgttcaaangggcatctcggatgtatttgctgagatggngcatattctgcggacaannagtcgtggtcatttcttttcagacaggttgcttggacngctg

SEQ ID NO: 877 - DNA, 383 bp, Glycine max
  unsure at all n locations
agcttagccctagaggggatggaccttttcatgttttggagaggatcaataacaatgcctataagttgggcctcctagaagagtatgcagttagcaccacttttaacatttctgatttaattacttttccaggtggagctaatattgaggaggaggaactaacaaatttgagatcaaatcctcttcaagggggaggggatgatgcaatcctccctaggaagggccagtcactagagacatgagcaagaggctccaagaggattgggctagagctggtgaagaaggccctanggttctcatgagcctcatggtagatttctgagcccatgggacaaggttgggtctaattatctttgtacatattaaactangatgtcattata

SEQ ID NO: 878 - DNA, 490 bp, Glycine max
  unsure at all n locations
ngttgttgttgtggacctctatnntgaaaacctccataagagttgttagaaggacctacaaaagaagtgttagtgggacccacatattgtggtttccagccataaggctgatttgatcttgagccacctctatagccttggtagcttccttgaaagttntgttgaggtctagcttggttctgtagatattcggcttcctcttcttgttgccatcaccaggtgctgaacagtggccattctgatggataccaccacaaaaatcacatctcanaattntttgaacttggtgggcttgatatgttttctatggtccaccttcgtgatattgctgagtcagttggcctatctactttgttaagggcctcaattgttgcgtcaagagnttgttntgagctagaatntcactctgagtgtccagctccattatacctattctttgagtcggatcntcatcatgatgactttgatatcactagctactatggagtta

SEQ ID NO: 879 - DNA, 472 bp, Glycine max
  unsure at all n locations
agctatgtggcaagtacaaaggtcataaacgcgcccgttatattatcaggtcttgctttggtggccttaagcaagcttttattgctagtggaagtgaggattcacaggtatgaatcttcaatcatcattgatcaaaatgggaaaatattcgccagtgtaattttttataatttgcaaattgaaagccttgatgtttatatgtctctgttaaatgtgttttatttgctaagtttttatagctgtctcaataatttgttaaaataagttcaacatgcacttgatgcatgctatcgaggatcactaaaatattggcataaaagacccatgaaatggttctttgtggtctgatntactggacttgaatgaattgaactacacatcgctataatgttcaagagttcctggcttctgcaatattattctagtttatcttgataaaactaggaacatctcgattgataatgctggaagt

SEQ ID NO: 880 - DNA, 284 bp, Glycine max
cagcttctccattatctatgttctcgattgtatctagcaaccaagttagggtggagttcttattatgatcttgtaaagctgagccattggataccaattcatccttagcttgcgaggataagtgcgttaatcctcccattagaatatgcatatgcgctatcgcgtgatctctatcaacaaattcgtctctgtcttcgtagtccatggtgtccatcaacataccatcaaacatctcgtctaggcataaattgtctatcatcttttgtcgatcctgcctaggatct

SEQ ID NO: 881 - DNA, 410 bp, Glycine max
  unsure at all n locations
tattccatattggggaatctaaaataacagacaattgattgtacaaaacaatgataggagtaaaatctagtaacatcataatttaaactcactgcaacggataaatgacaatcaccatactcaagagcctcatggataatgataagatcttcactaccctaatctaagaaaattagacgataaaacaatntatgtttggtgattacatagtggcactaatatgtaaatgcaaaaatgctgacctggccatgttcattgaaagtatcgagtccaacaattccaaggtcaagatctccagataacaattttcttgtgatgtatttgggcctctaaaaccaaactttgagtttggatagctgcaataatgcaagagaattggtttatggtcatgtagagatatagtacattga

SEQ ID NO: 882 - DNA, 371 bp, Glycine max
  unsure at all n locations
tcccagatctgatcatggaaggactnggcaactgccttcattatgcagtaccagtacaatacggacatggctcccgatcggaaccagcttcagggtatgactaaacgagagcatgagtccattaaggaatatgcccaaagatggagagattntgcagctcaagtcgtaccgcccatgatggagagggagatgatcacaattatggtagatacgttacccacattccactatgaaaagctgataggctacatgccagctaactttgcggatctcgtcttcgccggcgaaaggattgaatccgggctacgaanaggcaagttcgaatatgctgccaatatggcccccaacaacaagagaagagccccagtagt

SEQ ID NO: 883 - DNA, 254 bp, Glycine max
cgcgaactttgaccattgttcttccttcccgcaatgcttcttttcatgtctgcctgagtgggcttatagcctaaaccatacttcccacgatttccttgagtatttatcaggctagttatgccgccgttgttttttcctaaacccatcccgggttcaaaaccgttccccaacataactcgggccatcattaccgctgcatcggacagacaaggttgcccaaagagggagtccacggaggaaatgctgaccacctc

SEQ ID NO: 884 - DNA, 101 bp, Glycine max
  unsure at all n locations
ntgagggtgcgtagcccaccatctnttcatagtagagtatcgataatgtgtctaccatcacgattatcgtctccctttccatcattgggggtaccacttgg

SEQ ID NO: 885 - DNA, 300 bp, Glycine max
  unsure at all n locations
tttccatatgtcatcaaacataaaaaggggaaagggaatgtagtggctgatgcactgtctaggagacatgctttacttgctatgcttgaaactaagttggttggtctcgagtctttgaaagacatgtatgtgcatgatgtggactttgctgaaatttttgctgcatgtgaaaagttttctgaaaatggttactataggcataatggattcttggttaaagcaaataaattgtgtgtgcctaagtgttccattagagagttgcttgtgagtgaatcacatgaggnggggttgatgggacac

SEQ ID NO: 886 - DNA, 331 bp, Glycine max
tccattgtcgaatttcgagcgtctcgatatatgatgcgcctaattctgacttccgagtgaagagttatgaccatttgaattactggcgagcttccgttgatcaatttcgagcatctccaaacattatgcgccttaatcggacatccgagtgaaaagttatgaccatttgaagttctcgagagcttccgttgttcaatttcgagagtctcgatatattatgtccgtgaatctgacattcatgagaaaagttatgaccacttgaatactcgagagctttcgttgtcgcatttcgagcgcctccgtatattattcgcattaatcggactttcta

SEQ ID NO: 887 - DNA, 233 bp, Glycine max
  unsure at all n locations
aactggggcaaataaagagggtgaggatgagggagaaacccatgctgtgacggccattcctatacggccaattttcccaccaaacccaacaatgtcattactcagtcaataacaaaccacctccttacccaccacccagttatccacaaaggccatccctaaatcaaccacaaagcctgtctaccgcacttccaatgacgaagaccacctttagcacaaaccananaaaacac

SEQ ID NO: 888 - DNA, 336 bp, Glycine max
  unsure at all n locations
tccattcccgagagcatntcttatttaagcacnttcagccttgctttcatgtagcttaggaaaaacatcatttcttcttctttctttcttccaaagccaattctaaagttccaagcactttctccatcacccacagccaccattagccaccacaaaccatcgttgttctccattgaaaccccacaccgagaggaacccttcaaccgaagtggaatcttccaacttggcttgcggtttcggtagagaacaaaaccctaatctgacctttcgttttcttttgagactatnttagtctcaaaattatcaagaactacgtaggtctgagttcctcatcac

SEQ ID NO: 889 - DNA, 563 bp, Glycine max
  unsure at all n locations
attgaacccatttaangccctctattagctgaactctcatacatacgtctgagccggactctgactctgcattaccttgtcccangtgataatgtcaatccttactcttcgaagcancgaggaaacgagagaaggataatttccactctaaggacataaggagaggaaaggatattcctcatcaaagagtgggagatagctatacgaccagatagataattcccaatccaagactgtgagagagaacaagagaccgagatgacngaaggatagctcctgatcaatgatcgaaagataacagaagaaatgtgcagaggggatctctggacagacaatatctatacaaatacagaattgtcaccaaatgaacacaagagagaaaggaaaccataacctacaagtggtcttctgccttcgattaccaaccaaaatactgtgcgtcngtgacttttgtcgctcgcgtcagacaanaactgaaaacgaaaacagccacactaaaactatcaaaagccataacaacaanagccgataacccactaaagagtcatcgcacgggagtctat

SEQ ID NO: 890 - DNA, 471 bp, Glycine max
  unsure at all n locations
agcttccatcanatggtatcaaagcacaagagcttaaagtacgtgctccttaaacctccattaacctttattggtgtttcttcatttttctccatgtatctcctcacgtgtcttgtgctaaatgttgttcacatgattttttagaatttcgacaattaaacttgctatagaagctagatttgattttctatggttcaaatttcttgttcttgttcttgaaccataattgtgttgactntangtttctttgagttttgtcttgctatttatttgtggctgaaacttaaaccataaaattcttacaaaaatattaatgtataagaaaacctcaaaaatctagagtgacatgttcacctattgtagttntgtcataaaagtcatgtctagtcatgaaacttgccatatatgattctttatgtngngctgaattctcattttcttggttctttgtctaactcatttgctcctgag

SEQ ID NO: 891 - DNA, 461 bp, Glycine max
  unsure at all n locations
tcaacatcagaccacttccagggtgctggaactacttcacatggacttgatggggcctatgcaagttgaaagccttggaggaaagaggtatgcctatgttgttgtggatgatttctccagatttacctgagtcaactttatcagagagaaatcagacacctttgaagtattcaaggagttgagtctaagacttcaaagagaaaaagactgtgtcatcaagagaatcatgagtgaccatggcagagagtttgataacagcaggtttactgaattctgcacatctgaaggcatcactcatgagttctctacagccattacaccacaacaaaatggcatagttgaaagggacaacaggactntgcaagaagctgctanggtcatgcttcatgccaaagaacttccctataatctctgggctgaagccatgaacacagcatgcttcatccacaacagagtcacac

SEQ ID NO: 892 - DNA, 465 bp, Glycine max
  unsure at all n locations
agcttgaccaatcccgacccaacccgggcatagtcggtcagtgagaacctgtgatgtacctaagcaggcgagctcctggcagtcaacagataaaaggaacaaagaccacaaagcaaggaggcttgtggtggctggccagctgtgaatcttgtgtgatatatgggtttttgcctctggtaatcgattaccaagggtgggtaatcaattacaaggcttaaaaatgaagacaggaggctaagatggtctctggtaatcgattaccaaaggggtgtaatcgattaccaggcttgaaaacgaggtcaggaggctatgagggcttctggtaatcgattaccaagggggtgtaatcgattaccaggcttaaaaatgaangcagcangttgtagaggcctctggtaattgattaccagtctgtgtaatcgattacacagaggaatgggtcactggtaatcgattaccacgtat

SEQ ID NO: 893 - DNA, 238 bp, Glycine max
tttgggctagcccatgttcgatactctacatagaggtagcgtggaacataccttgcaacagtgtgtatacataggtaaatataatgagcatgaaattcctagtaaagtgtgaatgattgtcttcctaaatgaatgtatgatagtgtggaatgcctttttgaatgcaaatatgtgcatgatgtaaatagctatccaatatgcatataaataaatatgagtgaaacaataacaatttgta

SEQ ID NO: 894 - DNA, 419 bp, Glycine max
  unsure at all n locations
agcttgtttccctctaagtacttgattcttggaaagtgatgtgccatcattttcttctattttctagaccctttttgcaccattttaattactgattggccttaattgtcaattaatcaggcagttttattatttgggctcatttagctaatttgatgtttttaatctaattttaggaattaatgaaacattgggcttaatccggattttggttatggacttgaagagggcaaataaagcagcgcttatcttagttaatttctaattaggaaattttgcaattttattttatgttgttcagtgtttatttcgttntgggccagagtattgtaatagagcccagtgactttgagtgactctttntaaatagcagccttgggattcgtgcaaggcattctattatgctattttcattattc

SEQ ID NO: 895 - DNA, 402 bp, Glycine max
  unsure at all n locations
tatccncataagagtgcagaacagctggcgagtcagcattgattataggaggctaatccaggtaaccaaaanagatcattttcccctgccattcattgatcanatgcttgagcgcttggcaagtatgtctcattacaatnnttttatggttnttctggttatttacaaattcatattgctcctgaggatcaagaaaacaccacattcacctatccctttggcatttttgcctataggaggatgccctntggcctatgcaacgcctctggtaccttccaacggtgtatgcttagcattntcaatgattntttagagagttgcatagatgtgtntatggatgattntactgtttatggatcctcttntngatgcatgttggatagtctagatagagttcttaat

SEQ ID NO: 896 - DNA, 396 bp, Glycine max
atcctctgagtcacctgcggctgcagcttctatccaggctcatcttggtggtgaagctccttcttccatggcttattccctagtggatggcgcctcctctcacctcttctcctttgtcttccgctgcatctccatggtggaaaatcaccattaaaggacctcattgaagctcaaagatccagcctccatagaagccccacaagcaagcttccatcagaggaggagctcacccctcttgagccttcttattttgatgcaggtacgcacatggctaaggaggaggatacctccacaaaccagattcatgagccatcttctacacttgtacctgatgatgccacaccatctgcaccagcacctgagtcagagcatcctatctcttaagattcaccaact

SEQ ID NO: 897 - DNA, 354 bp, Glycine max
  unsure at all n locations
tgtcatgaccacgctctctggtgcataattgatctgtccaaacttaacagctcattctnttcgaacatactgaataatcagccaggagcttacaagcgtacaagtggaaaaattactcaactcttacagtatgttctaagtctgagtaatggaaatacatattgcttactatttaactacaacgcttacttgacagatgagcagttcatcatagctatcggaaggtgacattatctcttattcttaattaccccttaatttgtacatgcattattaaacaaccttttaaaacaaaaatacttcatcaatattagctctcaagtctaaattagatgccatgtatcatatttatat

SEQ ID NO: 898 - DNA, 446 bp, Glycine max
agcttatgctgcaaacatctacaatagaccttctcaacctcaacaacaaaatcaggcacaacagaataactatgacctctccagcaacaggtacaatcccggatggaggaatcatcccaaccttagatggtcgaatccgtcacaacaacaaccttattttcaaaatgttgttggcccaagcagaccatatgttcctccaccattccagcaacaacaacaacaacaacatccccagaaacagcaaacagttgaggcccctccgcaaccttcccttgaagaacttgtgaggcaaatgactatgcaaaacatgcagttttaacaagagaccagagcctccattcagagcttaactaatcagatgggatagttggctacacagttaaatcaacaacagtcccagaattctgatagataccttctaatctgtcagaatcccaaaatgtgag

SEQ ID NO: 899 - DNA, 360 bp, Glycine max
tgtccgcaaaagatcactaacaacgattctaatgttcgagacctcaattttctctcaccaagtaaaaatggatcattctaaggtccaacgccttataatgaacaccttccaagtaaaaaaaatagcttgattcacccttaaaaagaactacgtatgtctgatttcctcttcgatggagggtacgtagaagcaagagccctgcttttgtcgacctcacaaataaaaaagaaataaaaagtttatgtacacaatttcatacaattcaataattaaggctgttgtcctttgagacaaacgtgagaggtgctaataccttcctcaaacgtaaatacaactcccgaatctggaatattcttcatg

SEQ ID NO: 900 - DNA, 449 bp, Glycine max
  unsure at all n locations
agctnttaaccttgcttctgtgtatgcaattttaacaggggacatattttatgatgctagtgaagatttttctggcactgtatctgttgatgatggtgatgataatatctgcagaattttgactgttgaagatagtttgggtaccaatgttggagtatatactgatgatacagaagaaacaacagacatgctacatgcacctcctccttctggaccgaataagagaagaaaattaatgaattcctttagtgctggagttgaagttgatagctactcgacagctgaaattgataactcattggattattctcagacctctagctgtgtttctgatgatacagttgaaaccactcaagatgatacactngaaaccactcaagatgatatagttgaaactactcaagatgatacagttgaagcaacacaatatagtgatggtctactgtcat

SEQ ID NO: 901 - DNA, 399 bp, Glycine max
  unsure at all n locations
ntgagggtgcgtagcccaccatctnttcatagtagagtatcgataatgtgtctaccatcacgattatcgtctccctttccatcattgngggtaccacttgngccgccagatccctcaaccttttgggcgtgttctttgaaagatccgtccccctttntgcaaatgttctgtagttgcatcctatccagaaccatatcaaaattgtactaatactgcctaacaaaggcaaccaataggtccttccaagaatggactcgggaaggttccaagttagtgtaccgggtaacagctaccccagtaagactttcttggaaggaatgtattagcaattcctcatcttttgcgtattcccccatcttctgacaatacatctttagatggttcttgggacaagtagtc

SEQ ID NO: 902 - DNA, 565 bp, Glycine max
  unsure at all n locations
attgacgcatctttangcatcactatcgatactcaagctngcctanagaggtccagganagacaaggcggccgaaggaactagttccgccccgtagtacgacagtcaccgctttaggagcgttgtacaccagcagcgtttcgaagccatcaagggatggtcgtttctccgagagcgacgcgtncagctcanggaggacgagtatanctgattccaggaggaaatagggcgccggcggtgggcaccactggttactcccatggccaagttngatccagaaatagtccttgagttntacgccaatgcttggccaacagaggagggcgtgcgtgacatgagatcctgngttaggggtcagtggatcccgttcgatgccgacgctatcagccagctcctgggatatccgatggtattggaagagggccaggaatgcgagtatggccagaggaggaaccggtctgatgggttcgatgaggaggccatcgcccagctgctatgtatanccgngtanngatttgccngactgctganggagagagtgcgatcatcncaccatatgacacccg

SEQ ID NO: 903 - DNA, 381 bp, Glycine max
  unsure at all n locations
taggggggagaagtgaagaagaaaagggttcagcctctaaggcacttctctctttctcgaaattgctgaggaaaattattttcgtgaagaaaatccaagccgaggcgcttccgtaacgtttctgtaacgtttccatgagtaattacgcgaagattctcgaccgttcttcaagattcatcgttcgttctgcgttttcttcagtcttcaacgggtaagtacctcaaaccaagcttttcaattcattctatgtacccgtggtggtccacattttgtttcatgtatttttattctcattttcatttactttntatacccccttttgacgtgcttaagccatttatttaagtcatttctcgcttaatctaanaataaaataaatct

SEQ ID NO: 904 - DNA, 387 bp, Glycine max
  unsure at all n locations
cccatcacatgtggtactatgtggtggtcgggcgatggtgcataatgattctccacatccacaaatcacgtataacccaccatcccctggtgcccacctccaactgagctcacgtactcccacgtagcccttatcctcgntcctctcaacgccgggtccccatcaatcctcccaagcttccacaacatccaagtaattcaacattcaatcatcacaaactaacacagccaagaaaatagggccaaggcagaaaactctggccaaaacacaaaccaacatcacagcttttcacattcaattacctcaataagagtctctgtgttccaggtcggtaaccgctggatcgaactcgaaattatactgggaagctctagtacataagtctac

SEQ ID NO: 905 - DNA, 130 bp, Glycine max
gagccttgtttccctttccttgttttgaagctcactacaagccttaaatgaaaaaccatgatatcaccatatccttaaggaattttggagctttggaattgttttgggaataagtgtggggggggggggg

SEQ ID NO: 906 - DNA, 417 bp, Glycine max
  unsure at all n locations
tattacggacctatagatactcagcttcaagacaaccttgaaaagatggtaattagctttntccttcacattcagcanattcagcatttaaatgtgatatttaatgttatgctnttttatgccatgataattggtggaatgaatattatttatttgtcaaggtttcatgatatcgaatattgatacctaanaagggtaatatttcaagttgtgtgattagtgttattttgagatgaaacaccaactatatgtaatcttatctttgcattatcaagttggtattaaaaatttgtaatctattcgttggatatgatagtagtagggactcataaggatntacttagtaagaggcttaacctaaagtaagaatttgtttttctgagacaaaactgcagagatcatcntgttttattatta

SEQ ID NO: 907 - DNA, 465 bp, Glycine max
  unsure at all n locations
cgtgcattcaatatcctgatgaggaggttccatatgtctcaagactggactaatacatttgctgtccaagtttcatggtcttgcaggtgaagatcctcataagcatcttaagaagttccatattgtctgttccaccatgaagccccctgatgtccacgaagatcatatctttctaaaggcttttcctcattctctggagggagtggcaaaagattggctgtactaccttgctcccaggtccattaccagctgggatgaccttaagagggtgttcttggggaaattcttccctacatctaggaccactgccatcaganaagacatttcaggcatcangcaacttagtggagagagcttgtatgagtattgngaaagattcaagaaattgtgtgcaagttgtccccaccaccagaattttgagcaactctttctgcaatatttctatganggacttancaacatgga

SEQ ID NO: 908 - DNA, 588 bp, Glycine max
  unsure at all n locations
gggaccacggggnnnnaattgatcgcatgctattangccatactatagattactcaagctcgagttgaggaagtgtagaagggtgaaacttcctggctttattcgttgaccacagagtggtacctggagatatgtcgcgagggtcaggagaaccttgggacgtcaggtggtgtgctattgcccaaaaccaagcttgaccaatcccgacccaacccgggcatagtcggtcagtgagaacctgtgatgtacctaaacaggcgagctcctggcagtcaacagataaaaggaacaaagaccacatagcaaggaggcttgtggtggctggccagttgtgaactttcattgatatgtgggttatggcctctggtaatcgattaccaagggtgggtaatcgattacaaggcttaaaaatgaagacaagaggctaagatggtctctgngtaatcgataccacggngtgtaatcgattaccaggcttganaacgaggtcaggaagccatgagggcgtctggtaaatcgataccaaggggtgtaatcgattaccaggcttananagggggatggacattgtganggctctgtaatcan

SEQ ID NO: 909 - DNA, 267 bp, Glycine max
  unsure at all n locations
agtatgacagtcaccgctttaggagcgttgtacaccagcagcgcttcgaggccatcaagggatggtcgtttctccgggagcgacgcgtccagctcagggacgacgagtatactgatttccaggaggaaataaggcgccgacggtgggcatcactggttactcccatggccaagtttgatccagaaatagtccttgagttttatgccaatgcttggccaacagaggagggcgtgcgtgacatgagatcctangtaaggggtcagtgga

SEQ ID NO: 910 - DNA, 361 bp, Glycine max
  unsure at all n locations
tacggatggaatacttacttggtgtgatgaacaagagcgcgatacagaatctataaatgtgcaaaatgatgaccctanggctgctaactcgtaaatcccgtgggtatggctcttgaaaggcggaaaaagaagtttatgaatgcaaaaacgcgccccctttcgtcattcttatatattggtgcangggtggctcgcccaggcgagctaacctgcattattttttttgagaggaacattaaccatgtccactccttccttttagcgctttgcctaacttgaacttacttaagttagaatcaagcgttgattacttatttttaataacaaacagatagtaagataactgcgaatacaaaggata

SEQ ID NO: 911 - DNA, 471 bp, Glycine max
agcttctcctactgcaattgtcaaacacggtgtctaaatgtgagttcgaataacaacttcttttacatggtgatcgcggatgtacatcccaactttagtcatattcagattctcgttcaaactagcgtccaccattgcactccaacctactcaatataggagggctccatatttcaattgtgctataaccacgcattctctctaatctccccctgcaccttttttcattgaaccaatcctagaaaaaatatttgcataatgaatcacctccgaatctgtactatccttattgctccaaagcttttcattccatctcctccaaacactccataacatcatagcaacacgtttcccttgccggactgataggacttgaattaatctgaatatgaattcaaagcacgaactctcatcaaatatcgttaggtcctcaacaacatcccaagtggaagactcttaagttaaatattt

SEQ ID NO: 912 - DNA, 409 bp, Glycine max
  unsure at all n locations
tatgcattgtggaatttcaccagagagagcattgtttgaaacatctcaacttgttgatgctttcagcttaaccgacttcaaagggtaggctttccattgaacgagttgtgggacaagttcaataacaatgacaagtangaaagaccaatgacttgcaaaggaatagttccactaattctgttgtgtgaaaggtcaagggtattgtaaatttggcaattcccaacaccaggatgtatgcttccttccaacacattatttgacaagtcaagttgaaacaaaagactaaggttgccaatggataatggaatttctcctgacagtttgctcacatttaaattcaatgactgcatcttttggaacatgacaaaagaagcaggaatagtcccagtaatctgatggccaccaatat

SEQ ID NO: 913 - DNA, 442 bp, Glycine max
gatcttaagcacctgcggctgcagctttgcttaagacattgtcttggttgtttgcttctttatttttttctggaaattgctagtttagtataggtccttgatttttggtttatttgtaataaatgtgtactccttgtgtttgaggcttaaagcttaagtatagagtagttgctttcaagaatagtgttgctatggaaatttcctttaaatttcgcggcaacgtcaaaccaaaatcctacccaatgttttgaaatccatcatactgcgcctttagaattcgaagaatggtacaatgattttaatgggtcccaccactgggttatactgtattaaatatccaataaatatacataaataatggaatcacgtcttagacagaaatgttacataacaatactacaaataatcacatactactatgctacgaataatcactgatctg

SEQ ID NO: 914 - DNA, 524 bp, Glycine max
  unsure at all n locations
ngagatgaggaagtgttgaagggtgaaactttctgctnttattgttgaccacagagtggtacctggagatatgtcgcggnggtcaggagaaccttgggacgtcaggtggngtgctattgcccaaaaccaagcttgaccaatcccaacccaacccgggcatagtcggtcagtgagaacctgtgatgtacctaaacaggcgagctcctggcagtcaacagataaaaggaacaaagaccacaaagcanagaggcttgtggtggctggccagctgtgaactntgattgatatgtgggttatggcctctggtaatcaattaccaagggtgggcaatcgattacaaggcttataaatgaagacaggaggctaagatggtctctggtaatcgattaccacggngtgtaatcgaataccaggcttgaanacgaggtcaggaagctaaggaagcctcttgtaatcgattaccaaggggtgtaatcgattaccaggcttanaaagggaactgggagatgatggaagcctctggn

SEQ ID NO: 915 - DNA, 305 bp, Glycine max
ggctgcagcttattgctacaagccacttactcttctagccccaagagactcagcataaggatgcacagaccaaagttgtgtttgtaaaaaaatgtgttgaccaatggaaggtgctaatggcaaaaacaaatgaaagctatgccaagcaagcccaaaaaaaaaggaaggaagtggttcttgaacccggagatgatcttggacattcgaggacaaatgttttccaagagggagggaatgatgagaatcatgaaacaggccaaatacagtctaaaggcccaagtggagaaggacgaaggcccaagtgg

SEQ ID NO: 916 - DNA, 353 bp, Glycine max
tcattgcctaacaagccaacttacaacatctagccccaagagactcatcataatgatgcacaggtcaaagttgagtatgagataagattgtatgaccaaatgaaggtgcatattgcaaagaacaatgatagctatgcctagcaagccaacaagataaggaatgaagtggtacttgaaccctgtgatgatcctggacatttgaggacaaatgttttccaagaaggagggaatgatgagaatcatgaaactggccaaatacacgctaaaggcccaagtggagaaagactaatgcctgagtggagaatgacaataaccctgagtggagaatgatgaaagcccaagtggagaatgat

SEQ ID NO: 917 - DNA, 404 bp, Glycine max
actcagcttgtcatgacccgtctctttggtgcattattgatctgtccaaacttaacagctcattctttttgaacatactgaataatcagccaggagcttacaagcgtacaagtggaaaaattactcaactcttaaagtatgttctaagtctgagtaatggaaatacatattgcttagtatttaactacaatgtttacttgacggatgagcagttcatcatagctattgaaaggtaacattttctcttattcttaattaccccttaatttgtacatgcattattaaacaaccttttataacaaaaatacttcatcaatattagttctcaagtctacattaaatgccatgtataaatattatataaaagttgttttcatatgggattgataagcgtgtgtgtgtct

SEQ ID NO: 918 - DNA, 453 bp, Glycine max
agcttggcggcaaccacctccctttttttctctataataggggaaaaagggcagagtaatttggctcaacccttctggaatttaggattctcttgaaattagagagaaaaattgtttccgtgaagaaaatcaataccgacgcccttccgtaatgcttctgagacattttcgtgagcgattttgtaaagattcttcaccgttcttcatcgctcttcgttcgttcttcgtcgctcttcggtcttcaaccggtaagttcctgaaataaaacctttcaattcattctatgtgcccatagtggtccccacctgtttcacgtgcttttattttcatttcgtttgtgttccgtacccctttttgacgtgctttaaccattatttaagtcgctttctcacctaatcaagtaataaaatgagattccaccaatcatttgagttgtaatatcgtttaatctct

SEQ ID NO: 919 - DNA, 419 bp, Glycine max
  unsure at all n locations
gcngcaccgctnaaggtaaagactcttcctgtggccttcaaacttccaatatggtcattcaggccctcaccattctgctccttcttgggatatgggcaatctctctaaatatgcccctcttgtcaatagttgatacaagtcgcgcctttatcagcataattcgaggaaatgtgccctggcttaccacatttgtaacaagtgatctgagttgataaagaagtgggtttgctaccattaccaccagcaaaccccatagcatcagtcctctgattgttggggcgattaccatatgtcttaagaggggttgagtacgatcttccccgttggtgaggtccattctttttgttcttcattgngcctgcactcctataatacgctgccttgtatcagaagcttcatcccaatccggacatgttacc

SEQ ID NO: 920 - DNA, 245 bp, Glycine max
  unsure at all n locations
cacaacaagctttcacatccacaatgcgcgcataaacccaccatcccctggtgcccacctccaactgagctcacgtactcccacgtagcccatatcctcgtttctctcaacaccgggtccccatcaatcctctcaagcttccacaacatccaagcaaaacaacattcanacagcacaagctatcacagccaagcaaaacagagcaaaggcagaaaactctgctcaacacatcaaccagaatcaca

SEQ ID NO: 921 - DNA, 397 bp, Glycine max
  unsure at all n locations
cgcctaattaacctgatattgagaganaatgattattaaatacacaaaatggaagtactaagtatttattatctatatttaatagaaaatacttataacattacaaaataaccataaattggaagagtttgatacaatttacacaagttttatacacaaaagttcgtcgtattcaccgactaacatagcacaagacatatccgtggagggtttcgagggtatagtcaataacatcacgaccaacaattacctcactttcgctgacaaagagatactcgtcgagggcaggggacacaatgcacgtgtctgtcaaatgtttggacaacatangggccaaagtgctcatcgacaatggctcttccctcaatgtcatgcncaaagctactttggacaagct

SEQ ID NO: 922 - DNA, 406 bp, Glycine max
ggctgcagcttctcgatatattatgcgccagaatcggacctcagtgtgataagttatgaccattttgaattttcgagagcttccattgttcaatttcaagcttctcgataaattatacgtctgaatcggactttcgtgtgataagttatgaccatttgaattcctcgagagcttccattgttcaatttcaaacttctcgatatattatacgtctgaatcggactttcgtgtgataagttatgaccatttgaatttctcgagagcatccattgtttaatttcaagcttcccgatatattatgcacatgcatcagactactgtgtgaaatgttatgaccattttaatttctcgagagcttccgttgttcaatttcgagcgtctcgatatattatgcgcctgaatcgga

SEQ ID NO: 923 - DNA, 393 bp, Glycine max
  unsure at all n locations
ctattacggacactatagatactcagctagaattgaacacggaagctctcaagaaattcanattgtcttatactttcacacggaacaccgattcaagctcataatatatcgagactctcgaaattgaacaacgaaagctctcgagaaattcaaatggtgaaaacttttcagacgaaagtcggattcagacgcataatatatcgagaagcttgaaattgatcaacggaagctctcgagaaattcaaatggtcataacttgtcacacggaagtccgattcaggcgcataatatatagagacgctggaaattgaacaacgaaagctctcgacaaattcaaatggtcataactattcacacggaagtctgattcaggcgcatactatatcgagactc

SEQ ID NO: 924 - DNA, 382 bp, Glycine max
  unsure at all n locations
atgccccacattatttccatgacacaaatgccaaaatgatgatttggaaacttcatgcaaaacttgtcatgcatgcatctatgcggacactcaaatgtcaaatttttatggtcatgtgatgctaaggctcaggattcatttcctctatttttaatcaacccaatgtttccaaaatatgttcttttatcaatttgtgcattcatccgagtccatttcgggcgtccgggaaatttcacagcattcacccttcaggcgtagacacatttcccaaaaattggttatggtcaatgaatnttttcaaagaaaagttggaaatcgtctcttttcaaaagcatgtcatttttagctagacaacttattttctttntttctccttcttctt

SEQ ID NO: 925 - DNA, 386 bp, Glycine max
  unsure at all n locations
nggttcgaggtacttacccgttgaagatcgaagaacgatgaataacgaatgaagaacggttgatacctttgcgagattcctcacggaaaacgttacggaaacgtttcggaagtgcctcggcttagatnttcttcacggaaacaattnttccaagcaaattcgaaggagagagaagtgcctaaggggctggacccctttcttcttcatttcctcccctatttatagcaaaataggggaggtggttgccgcccagctcgcccaggcgagctcagctcgcccaggcgagcagggttgcttcctccagaagcaaccgccttctggaggaatattccagagggcccaagtgggcctgggtgctatttgcacccnncattttactaagtaca

SEQ ID NO: 926 - DNA, 419 bp, Glycine max
  unsure at all n locations
cgccatnntttgtttaatatgtntnntttttcaataaatggaacttcattttatacataattggtattagtataactatcaagtttcaactattagaaattaaactagacattataacttttaaagcagttactattataagaattaatattttttcataatatatagcaatccatgattagtttacagtatacaaaatatntatttcattaatatatttcaattaaattcttgataaataaagacacanttttaacatgatctatcgtgtatatgaaagtgtcttcgggcagaatataactctaacaaaatttctaaaacatagatatatacaatatcatataaaatataaaataataaaattttaaactacaatggcaaggtntataatgttataacttcgggtaacaaaaaaaaaa

SEQ ID NO: 927 - DNA, 438 bp, Glycine max
  unsure at all n locations
ctggtttaatgaaacatgcagnccatgtgcgccactggtgcgagtagaacctgaaagtgtggcgtagctgcttactgtgaaggcgccgaaactgtgatgccacaaacttcaagtcatcggctttcagggcaaaggcttccacttctgaaagggtttggacagtcctggttgaggtangaaggttgggtgaagaatgaggatccaaagcccacgtgagaagctcctctccacagaagtcaccagccttgaggtactcagagttgaagaagccggttcttccaccgttagttgtcatggtcaatagcttgccacgcattatgaagagcatctcatcaaccggatctccctcccggacaatgtagctttcttctgtgtaagcactggcttgagaaagcgcacattgatncagaagtgttcgtcatttctcaacattggacn

SEQ ID NO: 928 - DNA, 491 bp, Glycine max
  unsure at all n locations
tagtagcagttaccagaagtcaatattgtgccaatgactatcatcatttctatcttacctantttgaattatggccttggtttgtgtgtctagattgacaccagactcctaaatacacaatatctttcattgcaagcttagcaactgtcccaaaacccaagtttattcgaaaccaagtgtcatgatttctatattaccaattntgctagttgttaatgttgaatcatagttttgctctctcatctgccctttgtctcatctctttaccttacaacttagtcaattctatcattaccctttttcaatatgcagaatcagcaacatgcaaacatatctaatccagcaaatgccaccatcaatagccaggctatggtccagaaccaacaaaatgcctcatgtcccatttctttcatcttctaaatntattggagcttctgcagattaaaagaagcattngttcttcatttcacatgaatctactgggttagtta

SEQ ID NO: 929 - DNA, 348 bp, Glycine max
agaagaagttcatagagattgattggattgtcagaaagattgaattgattgaaaatgcaaaacaaagccttgcttttatagactcttcgtgtctggtcaagaagaccacttagaagagttataacttttagaaaaacttaaaaccaatttgaaaaagtcaaaacctttttgaagagttacatcttttgatttattcagaaacaaacactggtaatcgattaccaaattagtgtaatcgattacacaaagcttttgtgtgaaaggatgtgactcttcacatttgaatttgaatttcaacgttcaaaggcactggtaatcgattaccaaaacattataatcaattacaac

SEQ ID NO: 930 - DNA, 408 bp, Glycine max
  unsure at all n locations
ctgatcanatgactaanattaatcggcacaacagatatttagcagtaggagggaggcctccaacatacacccgcctagcatatcatgtaccctgtaaattcaatacataaagacaggccataatcagggaaagtcatgctaaacttaaaatgaaacttatataagactgtacttagtctcggcatgcctccatactcggaaagactaaacttaaaacgttttgtgttgaggaagttagtgtgtctctactctgtatgtataatgactctnttcttctcaatgaaagagaatatcttcttccagtagcacaatgatactatacaaacaagagcgcaatatanagaaacacatggtaaaagaagaccacacacctttcatctacagcagcacatgatactgtaatatatg

SEQ ID NO: 931 - DNA, 455 bp, Glycine max
  unsure at all n locations
agcttctcacatctgactctctagttccaacgtggtgttttctcttgatgcacttcctccgatcaccttgaccaatggaatctccttccctcttaggtgctttgttcgcctatctttgatcctcaaaggcaatgttccatatgtcaagttcttcttcacttgtacgtcatccaatttgatcacacgagatggatcatggatatactcacgaagttgagacacatgaaagacaatgtgaaggttagaaagagacaggggtaatgcaatttggtatgcccacagtaccgactttttttagaatttggaaaggacagataaaatgaggtatgagttattgngatttcaatgctcgaccaactccagtccacaaagtgactctcaagaatacatgatcactaacctcgaactccaagtctttcctccttcttgtcctgatagctttctacctactctga

SEQ ID NO: 932 - DNA, 328 bp, Glycine max
  unsure at all n locations
tctacttcataaccccttgaactacttcacattgatctatctggtccctctagaacaatgagtttgggtggtaattactatggcttagttatagtagatgattactcaaggctcatatggactttgttttaaccaaaaatgaagcttttggtggcttttaaaaacttgccaaggtgattcataatgaacaaggtctcaacattgtttcacttagaagtgatcatagaggtgaatntcaaaatgagtcttttgaaaactnttgtggagaaaatggaattcaccataatttntcttgcccaagaacaccccaacagaatggttttgtgga

SEQ ID NO: 933 - DNA, 445 bp, Glycine max
  unsure at all n locations
agcttggagatgatgcttcaatggaggataagtaagagagaaggggggagcacgaaattgaaggaataaaagagggagagaagttgaactttgaagtgtgtctcataagactttcattcatcaaagttacaacaagtgttacacatgcttctatttatagactaggtaacttccttgagaaaacttccttgagaagcttctttgagaaaacttccttgacaagcttgagcttagctacacacactcctctaataactaagctcacctccttgagaagcttccttgagaagattcctaaagaagctagagcttagctacacacacccnctataatagctaagctcaccccatgccaaaatacatganaatataaaaaaaagttcctattacaaagactactcanaatatcctgaaatacaagggtaaaaccctatactactagaat

SEQ ID NO: 934 - DNA, 458 bp, Glycine max
  unsure at all n locations
nttaactgaatntgtagcgttccaattgttttttanatggtgtaatcgattacaatatattggtaatcgattaccagtgtatctgaacgttgaaattcaaattcaattgtgaagagtcgtatcttttcataaaatgctttgtgtaatcgattacatggttttagtaatcgattactagtgacaagttttgaataaaaatcaagagatgtaactcttctaatggttttctcaagattctctcaagtttataactcttccaatggttttcttgaccagacatgaagagtctataaaagcaagaccttgacttgcattgtaagaacttgatataactttntacacannattttgaacatcttcttgaacttcttcttcttcttcttttgccaaaagctttctaagttatttggtttcaaaccttgtttttcacaaanacaaaagtgtgtattatcttttta

SEQ ID NO: 935 - DNA, 401 bp, Glycine max
  unsure at all n locations
agctnttctttacaatcaatctgtctgctaactaacaattctaaatgcaagttcacattcttgttctttctttgtctaacatacatactagctcaaactcatgaaaagaaacacaaactccatcaaaatcatgcactcaatttaagtacttgtagtttttcgtgagggaaaatacttgtacttgggggcatgtcactcggtttggaactcccttgtgactcgggcttatcaccattgggggtggggtggagttgcctgtgcacaacaggatgaccttgacacttgctacccagctttcttgggtgtgagtgtcgtgtgggaatgctcangctatttcatgacgaatggtactacattgcatttgagagttaaggtcaagtgcatgcatcatactaagcatg

SEQ ID NO: 936 - DNA, 422 bp, Glycine max
  unsure at all n locations
tcacacttgataatggagaacacatgatcagcgctaggcaatgacattcatggtactccgaacaaaggtggagtatggaggattgccttgagggtccgcacttangcaatcatgaaactcagctccaaactcgaaagtggaggacacatgaacagccctaagcaataacattcatgtggctccagaaaaggatgagaatggaggattgccttgagggtcctctcttangcaatcatgaaacacaactccaaactcaaaagcggaggacacatgaacagccctaagcaataacattcatgtggctccgganaaggacaagaatggaggaatgccttgagggtcttctcttaagcaatcatggaacacagctccagactcgaaaatggaggacacatgaacagccctaaagcataacattcatg

SEQ ID NO: 937 - DNA, 506 bp, Glycine max
  unsure at all n locations
ntttgctcatctcgtccagngatccttgagtcacctgcngcatgcagcttgaagaaaaattagtattaatgtatgtaatgtataatntagtggngaatattaaggctatattaatgatgatatangatttcattagaattagaaaaaggggtaattaacgtcatatagagtctaaaagtggagggcatttttggtaatgactatacaactagtttaaaaataggattttaatttaattaattggtgactaattaaagtgtctaattattatgatgtaaataattaanataagttagagttgaacaccctgaanattataactcagactgacataaaactctatgtngggcatctgtgtgtgtatgaagttaatttcagtagctataccgttttaatcatagaantntcgtgctatgatatatgtatgtgactggtttagtaagcttgactgngaatagaactacctttgctagattcatcagtgcacatttgactgtgattaagcn

SEQ ID NO: 938 - DNA, 397 bp, Glycine max
  unsure at all n locations
ngtanggttaaagtctcacgatagtcacgtgctcatgcaacagttgttagccatggctatacgagacatcttgccaaacaaagtcaggttagcgataactcacctgtgctttttcttccatgctatatgtagcaaagtcattgatcctgtcaagtttgatgagttggaaaatgaggccgcaattatactatgccagttggagatgtattttccccctgctttctttgacatcatgattcacttgattgtgcatctggtcagagaaatcaaatgttgtggtcctgtttatctatggtggatgtacccgattgagcgataaattgcanaagaagccattgaatttttttcagaatacttagagaatngctaaacctgtggccttctgagtctcgcatga

SEQ ID NO: 939 - DNA, 422 bp, Glycine max
  unsure at all n locations
agcttgtaacttatataatatatacattttattgtaattatattttaacacatcagaatggtgcgcccataacccacaggtcccaggatcgaaacctggttctgataaagagtggcttccgatctatcacatatatatatattttatgcgtaaaacatatatcattacgcaatgacatttgagtataataaaaaatagttctgcagggcctaacatttcagtgcttatattaatttagttaccatttaaattttattattgagtcaactttttaacgtatattcatattttctctttggtaattntattttaatttgcttaagtaaacatattttttatggataataatggcttccagtttcttagtgaaccacatctgaaaaattatacttgaacaagaagatgtgttcactatgtcatag

SEQ ID NO: 940 - DNA, 427 bp, Glycine max
  unsure at all n locations
ggtagagtccctntgtgtctctagcttcacacacatgtagnggaacatctatgnaaacctgcaacgtgtaagcattgcgttagctataatttatgaagaaccacttctagttctataattgtacaacatattagcatatgccaaactatgtgtatcatttggatcaccaaaataagaatattacctcaataaaatctccttttggcattagtgctctgcatgcatctctantcctttggtatggtgatattaaactagtgatgcaaataacaccagcatctgcaaagagtttagccacctcacctganaattntatatcgtgatgtctaattattaataaaacaataaaatataatcggaagatatcagggaaagcatttagaaagcaacataagaaaaaacagataaactcaccaatccttctaat

SEQ ID NO: 941 - DNA, 119 bp, Glycine max
tgcttgagagacttctatggatgttggatctttgagcttcactatatgtccttcaatggtgattttcaatcatggagttgcatcggaagataaaggagaagaggcgagaggaggtgtca

SEQ ID NO: 942 - DNA, 473 bp, Glycine max
  unsure at all n locations
agcttgtgtcattaagcgatattccactnttggcgttgagcacgacctcttgtattgagcgaattacctcctcgggttgcaattgcacttagcgcacaggtctcgttaagaaagttgtccaaagatgttatttgaaaaatctcaatagtaaaaaatgtaggcatgaatcaagaaagttgcagttcatgtttgaaggtgatccaacggttaacgagtctgggatcatggttttactgaaataggttaaacaaactccacataaccttattgttcacaccaagcaaccgcacacaaataagtcacacaacacctcaactaatccaacttaatcaaagaatgcaagaattatattaaacatctattttcagttatcaatattntaggctgttacaaaagaccttttcttgggtatcaacaccaaagtattcaagaatcttggagatcagaactgcatagggacacctganaaaaac

SEQ ID NO: 943 - DNA, 357 bp, Glycine max
  unsure at all n locations
tagatactcaagcccattcaaatgaaaggaattcataattaaaaagttgagaagggttcacngaagagaatntcaaaatgactctgaattgttttgtgaacaaaatggcattaatcgtaacttttccgctccaagaacaccacaacaaaatgggattgtggggaggaaaaaaaagtcccttgaggaacttgttagtgtttagctctactgagctntaaaagattggctaagatcttgttaaaacataagcacttagacaatgaatgaaagctggagttgctgcacatgatgtccaacgctatgtcaaggaataagatncggctgcacaatgcacaaggcaagataaaatgtcaaatg

SEQ ID NO: 944 - DNA, 437 bp, Glycine max
  unsure at all n locations
tatctctagcatgcattgtatgttggtctcgtcctttgtcacgggaagccggaaggtccatatcaccttcttaattgtacacatggggcacttgccccccaaatgcgcgaagtagaagagataattttccgggctctcgtgtccgtaaaatgcattcatatcatgcatcgcataagcatctcttcataacatcataatggacatatcctgcatttgtccgttatcatattccagcctcacattttgcatgagtcatggcatcatcatgcatatgcgttcaacaaactttntgatctgcaaaattgcataccatttgttttcatgtttgctcatccttgcgttttcctctacaaaacaaaaacaaagaagggggaagcgtgaaacttcacactacattcttagtttcatgtgttaggagccaaccatgttgggatcat

SEQ ID NO: 945 - DNA, 349 bp, Glycine max
  unsure at all n locations
ctaacctcatcatctctcatagtctntagatntgngagccaatccaatccttgcgtccagactctcagccacttatgatagccgccgatgctcccattactgcttcccctaagctctatgtcctttcttcacgccgcatcccatgccttgcgaactccttggagtaccctcgcgttgtggtcactgaaaccccgtgcgatgaaaggcgtgatgctttcgtctgatggcactcctctcatggggtagccaagctgtcttatggcgaggacgggattataattaatacaaccccttgttccatcaagggaacatttggacatccttcgcatgaagatagaatcctgattct

SEQ ID NO: 946 - DNA, 156 bp, Glycine max
cattctctctcattatcatattagcattgtaggggggttcagagcatttatacttcttctgtatctcgaggaatggtctacaaaccttgaagcctagcgttagttgtcttatacgactaaattctgtatagaaaaacctttgtcacagcatgtata

SEQ ID NO: 947 - DNA, 387 bp, Glycine max
  unsure at all n locations
atctaaggggttcaaaatggaattgtgcatcgaaaactagttctcaaaacttggatacagtagtgtagaagtaacttatagaaaagagatagttatatagaagagtaaagaaaacactaaggttttataccggttcacctcaactcttgggctatgtccaattgtctttcaaaccttgaagggttccattaatcaattctttgattacaatcaggtattctctatgtcacttctggctataatgagtactttgtaccactcatggcactacccttaatctcctcatgagttaagacttaagtattctttgtcactaagtcattcctagccttcacaaacaatatatgtttgatagaaaatgattctaatcactcanagagtgttaca

SEQ ID NO: 948 - DNA, 400 bp, Glycine max
  unsure at all n locations
tcacacatacacacaacanatcanagcanaacaaacatccaatcactgtataattacatactacaaaagcctccataacataacatcatcctcaattctcaaaccctaaacaacaaagcacccccgccaccaaacacgcacacacaagcagctaaatatcattcaagaagtaggatattgccataatccacaaacctaagaaaccacaaaactaaaccaagcaccaacaccattccaaaaacacctcacaaaacattcacacacacacaacaaaccaaataaaaaacacacccaccaccaattcacatccaaatcccaatcaaacaccaatcaataacaccaaaatcaacttccaacaaatccaagccaacanacagccatcaactactacanaccaact

SEQ ID NO: 949 - DNA, 384 bp, Glycine max
  unsure at all n locations
cgccagcttcttatccaaggctcatcttggtggtgaagcttcttcttccatggcttattccctagtggatgacgcctcctctcacctcttctcctttgtcttccgctgcatctccatggtggaaaatcaccattaaaggacatcattgaagctcaaagatccatcctccatagaagccccacaagcaagcttccatcaagtggtatcagagcacaagagcttcaagtaggtgctccttaaacttccattaattnttttgctttaccttctcttccattgttggttcttcattntttctccatgtatctcctcacatgtcttgtgctaaatgttgttaacatgattctttagagtttccaccaattaaacttgctatagaagcta

SEQ ID NO: 950 - DNA, 341 bp, Glycine max
  unsure at all n locations
tttctacttcttccctgccattgtacaataaatgtagcttatagcatattccatagaagaatctcatggctacttatatctgtgtaatgtgatattcgacaaaataaagtttcccattgtgtacttttaagctaatagttgaagacactcattgtgattgtcgttgcgctttatctcctttatgtttaattactcatttgacccctatagttatagaaactttctcttttagtccctatacttaaaaacatcccctnttagtccctacacattccatttttattccctttcagtctctacacatcattntaatcccttgtagccgctatggtgaggactaa

SEQ ID NO: 951 - DNA, 464 bp, Glycine max
  unsure at all n locations
agctntngngatacttggttcatagcaatatgttgtttgtcttgaaatgatattttagcagatatgtgatgcagctctgggatctcttgatttccttgagtttcaatatttgttagcatttactactgttttgcatcaattttgtcttctgtgacccccttataatgtggattaattcaattgagcaaatctgttcgttntatgctcagcttctataagtcttttcatttacagatatattgtaatattgttattgagttcttggtttaaaactagttattgttattgtatctacccttgatttaaaactagttaaatttataagatactataattcaaaagggcagatagatccaaacttgatacacattttcacttgagagaatccnagtctgtgtgtaatcatcgccttccatttcaatgggattaggtgatggttttactcatgttatgactctatcata

SEQ ID NO: 952 - DNA, 309 bp, Glycine max
  unsure at all n locations
tgagcttaatgaattaattgattgattgaacctggagcctattcagttgtatcttctgctaccttattttaagttgtaggagagcatcatccacagaagatggttcaaggaaaatttgtcccaaatttgggggaggtattatcaacgtaaatntgttccaaatttggggaaggcactcggtaacgattgaaatggtcaaagaaaatagtatatacacactggctctattatctgtgttaaaaaaaaaccaataaaaaactgtacgtataaataaagttaataagtgtgtatgctataaattcaggcatg

SEQ ID NO: 953 - DNA, 481 bp, Glycine max
  unsure at all n locations
ggatccttaagcactgggctgcagcttaagaaaaggccaaactctcctttccaaaatttgattttaggcttaaataggtggctttgttcgtgcttgagcgcttagcgcaactctgaaccgcttagcacgaattagtgaatttcggcttaacgcgtgcttttctcgctcagcggatggactaaagcggtgcgcttaacgagatgaccctttgctcagtgaacatgcacagctcatccttcttctagattcttcctcgcgctcagcggatagctcgctaagccagtagattggcttagcgagaaggtgaaaatcagcacctcacaaactttcctaattaacctgaaattgagagaaaatgattattaaacacacaaaatggaagtactaagtatttattacctatctttaacaaaaagtaattacaacacttacaaataaccataaattggaggattntgttacaattatgccagtttataca

SEQ ID NO: 954 - DNA, 436 bp, Glycine max
  unsure at all n locations
gggattcctagggcctaagtcatatttggcactntattctagcttctacaaactgtccacacactcaaanatgcagtcacatatgtacaaattntttccacaagctaaattccatataaacacacgcaaatgccattgaggcatgtcaccgaacacttgatgggtgcatgtttagacatgaaaaaaataaggaacggngggaatgtgacatgcccattcatctcagagttcacaataggcttgcggccatcccatacaaccccccaattcaaacaaacaagcatgaatccaaacattcatttcctcatgaaatntgaaaatacaagcaaacaaagcactaaaatacagcaatggcaagccaaagatcanaggagaatgacacttaattgtanggagtggaacaaaatgcataaaggagaacaaaaactcaacaatg

SEQ ID NO: 955 - DNA, 384 bp, Glycine max
  unsure at all n locations
agcttgtcttctctagcctctnttgngcttttctacatttccttagtgacaagtcatctgcctagaagtttcttgtcttgacctggttgttgtgtctttctcatctgccatgcacttccatgtttaatttcgagtgtctcggtatattatgcgcctaaattggacatccgagtaaaaagttatggccatttgagtttgcctagaacttttgtgttcaattntgagcatcttgatatattattggcctgaatcggatatccaagtcaaaagtaatggccatttgaattttccttctgcttccatatataattntgagcgtctcgatatgctatgcacccgaatcggatattcgagtgaaaagttatgaccatttgaatttcttga

SEQ ID NO: 956 - DNA, 437 bp, Glycine max
  unsure at all n locations
ntgaacaatatacttggtcttcatttaactgtctttgggcttggcggccacgctcaacanagtactttcgacacctactatacgttgatttcaccaatgttgttatgggaatgttgcgacaatcctttanaaccttattgatacattctgagaggttcgttgtcatatggccatatcgacgtccttctctatcgtaagtcatcgtccattnttcctttgagatgcgatcaatccatgttgttatggctggactcagttcacgaaattnttctaaattttgatcacaaatgtgcttgcatggagtgtangcctgcataaataactatgaataacactttaagtttaatgaagcaaacatacgtgacatcaatatgaatctacccatttgtcacattttttttgttacttattgaatttcattgaagtcgcttgtatgt

SEQ ID NO: 957 - DNA, 525 bp, Glycine max
  unsure at all n locations
atttttatgatgcgtctctgtacacagccatcctctatagtcgcactgcntcantgcaagcttgaacacacattgtgcgcgtgggtgatatccactacacaaggtttgaagtagaagagaccttctaccctatcacacaacgtggaggacatacgggggcccgctacatgaatggccatcattggcaatgctgaagggattctgcgcctcactatgcgagtgcacacaataatgcagattgtgcgtacgtgagcatgaactactaccactatatagatgtgtggtacacacaagagcacatcttagaagcttactccgcacaatggtggcctacttggaatgaagcagacatatctccttttaatgacgcacggacacttatgcctgacctaactacgattcacgcaacatgtcagcgcagatcaatacggataangactgatatggactggatcataccatntgatcgccgacngacacgtaatacacgtggagcctaaggggctacatgcatgctgcctacga

SEQ ID NO: 958 - DNA, 523 bp, Glycine max
  unsure at all n locations
tctaattaacctacatatgagagaagatgattattaaacactcataatgaagatactaagtatttattacctatacttaatagacaatacttataagcttacaaaatagccatatattgagagagtgtgatacaatttatacaagtgttatacgtataagttagatgttctcaccgactaacatcctatcaaggtcatcaaaattagaccagtttccattcttgaatgaccctaacaaagcatgcatgtacgtgatcaaggtaaaggcatactagaatgaatagctgatagcacagagaacacaccaaacatcattaaatagatagaatgatatttacatcaagtacctacaaggaagatccaacagaggattntagctttccatatccaggaagccttctttacaacanagagaagaataagatgacagagtgctgctatacaagcggtgaggatgtcttcttcacctgtaggatctcacaaccactcaagaactcatctcagactcatagaaacggcttcg

SEQ ID NO: 959 - DNA, 304 bp, Glycine max
atcggtgagagtgtaaccttaaactgtgagtgaacgactagctgtgagtaataatctttgcatgaatctctgaattttagaatgaaatgtataactgagaacatgatgaaggccatgattgtacatatacaagctcttttgaccaaacaacttaccttgaatgataattgcatcctttgctccctttttgagctgaatgatgttgtaaaaaatttgaaccctaaactaaaataattatgtcttgataccttgtttagattttaggagagcatatggttcaaggcaaatctactctaaatttggg

SEQ ID NO: 960 - DNA, 344 bp, Glycine max
  unsure at all n locations
tctggtgggacatcttgacttgctntccaatctgacattcaccacanattctgccttcttctattttcagaatgagaatgcctctaacaacacctttgtcaatgattttcttcatgcctcttaagtgcagatgtccaaatctttgatgccatattctgacttcatcttctttggaggatagacatgtggaggagtaactggtttcttgaggtgtccataggtagcagttgtcctttgatctgctgcccttcattagaacttcactcttctcatttgtcaccaagcattctgactttgtgaagtttacattgaatccttcatcacacagctgactgatgctgatc

SEQ ID NO: 961 - DNA, 385 bp, Glycine max
  unsure at all n locations
gtccatgaggaatctccttgggaaagacatctttaaattcctgcaataagggttgaacactaggagaaacataaatagtttactgattagaattatcactctctctctcttgtgtatcactccatctctcaagtgtatcactcttcctttttctattcctctgtgatgcctcactattggccctctcttggtctctcttttctctccttctgattcggacatcacacacttctctgagggataaagttttatgaataattttctggtcatggtgctggagagaaatcttgtttgagaacccatcatgcactgctttggagtcctcctcaatgatggccctcactagtgccatctccatctncttatcactaacaatcaaactttc

SEQ ID NO: 962 - DNA, 247 bp, Glycine max
  unsure at all n locations
ggtagaatggccagacatgatacatgtcagggattggtttggttcataggtaatatggatgtcccacattatttccatgacacatatgcaaaaatgatgacttggatactntatgccaaactggtcatgcatgcacctatgtggacactcatgtgtcaaatttttatggtcatgtgatgctagggctcaggattcattctctctattttaatcaacccaatgtttccaaaatatgttcctttatcca

SEQ ID NO: 963 - DNA, 357 bp, Glycine max
  unsure at all n locations
agctttaaagtttaaaaaatgtaatgtaacatttaatagagttcaaattcataactaacatggcataatcaaactaaaataaataataaccaagagtcaataatcctttcacgtgtcatgaggacgataaacctgagcatcattaacatggtcctcagttccatctgttatggtagtggatggactangagctagcatgatagactgaatatgcaagtgttgtagtatatgctgcatttgctcattntgttgacaaatttgctcattntttcttacatctgttgtcgcatctcttgactntggtggtcatgagtctccattagttgcaacatcttttcctcaagtgtcttctcctta

SEQ ID NO: 964 - DNA, 406 bp, Glycine max
  unsure at all n locations
cgatgtacactaagcctcacatcttaggctaagcgcatattgcagaaagaattttggtgttgcagaaagcgctaagcaccgctgctgcactaagccccaaatgcttattggaagttacaacttcaagttgggcttagcgcggngctaggctaagcaccagtgttttaaactcaaatgtcatgttggcacgctaagcgcaccatacgaatttcagttntttaaaagtagaggcagaggcacttgggttgctaccttggcacccaaacctctgcactctctcatctctgagcatatttctatttctgctttgtgcttattgatcctctacatctntcttcacactctgcattacacaatccaagtaagtaacttgatttcttttcacttttattttcatgtttcacag

SEQ ID NO: 965 - DNA, 330 bp, Glycine max
aaaaaaaattaaaaattaaaaccagggtaagggagcttacttggtggtgaccctttttcacatttcctttttcccaaatttggaattactctttttatgccgaagccggttaccggaaagtggctcggatcggccaagtaataattaaaacggaatgatccgagtgtcaacacagggaacttattcctttggcaaagctttgttcaacaatcatgcattttggtgacagaaaataataattgtgaattgaagtaaaagtatgatatatcctaattgaaaagcagtaaacgtgagcaaataagtgtgaaaacagtgatctaaaagcattgg

SEQ ID NO: 966 - DNA, 421 bp, Glycine max
  unsure at all n locations
tgattntngttctgattgcatgatgctaggatagttgatagttaanatagtgttaggaattatattttcatacaatgtatgttgttctggttaggaattgatggcctaattgtagaagcaagcttcatgatgatgaacctagcaattttgacgatgccaaaagaccaagtgattgattcaagacttcaagatcaagcatcaagaatctaatccaagattcaagattcaagagaagaaatcaagaagcaataagtcaagacttcatataggataagtattaaaagaatttttcaaaaacaaaatagcacagttttggtatacaaaagaattntctcaaattntttaagttaccagagtgattactctctggtaatcgattacctgttatcagtaatcgattaccagttgtcataccctaatt

SEQ ID NO: 967 - DNA, 488 bp, Glycine max
  unsure at all n locations
atccttaagtcaccgcggctgcagcttataaactgtttttaaaactacctcatattttagtttttagaagtaaaaaacaaaaacagctttaagatgttntgcttttcagtttttgtttttctttaaaatctacaaaatacaagaataaacagagaatttacagttttcattaatggaatttatttaaatatcttctctttatcatttctgaaacttttgtaagcattnttttgggatatgattatttcaattggccatgatgttatgttggtgccttgctaattatgttaatgggtggtttaatggcctattaatatgagaaatatagcttgagtgggtgacactcactcagctgaagcttcttatattatcacacaaaagccaaccagtacatatgtatatagagaggtgcagactaagcaccttatcaaacggctacagcagagaanaagacatgaaaggactgactattacaatntacaagaata

SEQ ID NO: 968 - DNA, 355 bp, Glycine max
  unsure at all n locations
ttgaattgctttntggccttctggngtctccctgcctccaattaagactcgatccgggttgaaaagatcttggattgcagttccctcagcaaggaattcacggtttgaaaggatttggaacttgattccctttccattgtgagtcaaaatcttctctatggcctcagcagttttcacagggacagtggatttctccaccacaatcttgtcactcttgnagacatcagcaatcatgcgtgctgcactcttccagtaagtcaaatctgcaaccttgtcggcttcaagaccacgagttnttgncggcgtgtngacggagacgaacactatgtcagcctcatagacatgtttctcaaca

SEQ ID NO: 969 - DNA, 483 bp, Glycine max
  unsure at all n locations
cggggattgatgcatctgcactcgagatcctctgagtcacctgaagctgcacgctctctcaactactggacacatggttcacagatgaaagcaagaagaatgactacaagatgatttatgttgtaaaaaatgtaaggatcaccaagtatttgaacttgtaatggttctctcggtaagcttcaactttcccaatctactcgaagcacaagattgtcaaagttggtggaaatgaaaggagcctttcatccacagctagtcaagggtttctacagctatgcacttgttgacccttgaagtaacctctcttctaaataaatggagtaaaatagtcttgatctattgatggaagaagtactggctggatatgggggagtcacaattctataaacgatgatgggacaacagatgagactatgangatgttctgacctttagaactgaaaatcctaaagtgtggctgttgagagcaaatgtgttattctt

SEQ ID NO: 970 - DNA, 376 bp, Glycine max
  unsure at all n locations
ntgtcctcagatcactcttgttggactcagcccaatcgagatactcctcttaggtttagactaacttaaactgagtttcatctgcagatccctcttgtaccaatgccaaatagtactctaacaggagattctttggtggaagtagtggattataccatcaagacaagagagcagataacaaagttaattacttcaccacaacttgcttcgcgcccaggaaagaatgaaacattatgctgacctcaaacgagtggacaaggagttcaaatgtggagacctagtctatttaataattcactcatacaagcagcttactttggcanactatgctttccacacatagcagccactagcggtctatgtaaagaaacatcat

SEQ ID NO: 971 - DNA, 338 bp, Glycine max
  unsure at all n locations
ngttatatacggaagacaagaaaatgggatatgaacgaaatgatgatgaaagcttagaatctagacatgaattgaaagtctcagattcgaaaacttacccgttgaataatgaagaacgaatgaagaatgaatgaagaacgacggaaaaccatcatggatttgctcacgataacgtctcggaagcattacagaagcacctcggcttggattttcttcacggaaacaattttttttcaccagaacagctgaaatgcatagccaggggatccgggatccttggaacaaccccctttttctctctttataagaaaaggcgagaggatgttgctgcccagctc

SEQ ID NO: 972 - DNA, 393 bp, Glycine max
aagatctaacagattcaacctaatgttcatgagaatgattgttgcagataatattaagataactctccctaagactgataatgctaaaaagtttatggggttagtgggagagcgctctcaaatagcttataagtctcttgctgggacattagtgagtacattgaccatcatgaagtttgatggttcacgtactatgcatgtacatgtcacttagatgacaaacattgcaataagatttaagacctcgggaatggttgtgaataagaacttccttgttcagtttattttgaactcattaccatttgtgtatgacctgttccaaatgagctataataccatgaaagataaacggaatatgcatgaattgcatagtatgttagttcaagaagaaac

SEQ ID NO: 973 - DNA, 277 bp, Glycine max
aggattgatggcgacccagtattgagagatacgaggatatgggctgcgtgggagtacgtgagctcagttggcggtgggcaacaggggatggtgggtttatgcgcgcattgtggatgaggaaaacttgttgtgcaccatcgaccgaccgccacctagtaccacatgtgatgggtaccccataatcctacaagcttgagatgaggaagtgtggaagggtgaaacttccttgctttagttgtgaccacagagtggtacctggagatatgtcgcgggggtc

SEQ ID NO: 974 - DNA, 457 bp, Glycine max
  unsure at all n locations
agcttctagagagttctacactactctaatattctcctttctacactntnttaaaaagttataaaattttttagaacctctccaatcaagaaggaatcccaacacattccttaatgcggatatcttcatttcaagaagaattaagtgatgaaaatataaggttggcttgatgataaagggtgaaggaagagagggataggaatcttccggttaacaaaaactaataaattaacaactaacatttaccgataaaaaaaaaaaagatagaattaagtgattagttttatctccttttcacattataggttcttcaatgtttcttcacaatttctaaaacattgtctgtagactgctccaagcccagttccttctcaaacagccccagagaaatgacattgatgtgtctaatataagttctctcttagtcttaaaatttcaaatgtagtgtttactatac

SEQ ID NO: 975 - DNA, 577 bp, Glycine max
  unsure at all n locations
attgacccatgtgaangcgatctattangcgacactacagaagactcagctcagtccacatagtcggcagacttatctgaatcttttgaagatgagagaacacgccaattaanaagagaaagggagaaacttcaagaacatggtcttcactcttcacgtccaagagaagaatccccacaaatatcacaaacaactcttccacggatttcaccaatccaagcactcacgttcaaagcaaataacaagagcaacagaatcaaacccatcattgtcttttgtttttccatgggtgagattgaaaaaaaaacaacaaanaatggtatctttcacaagcactatgtctttggattctatgagtagttttcttataaccataatgctcctaaaggatgtttatggctcatagtgcatggattntttcaccgacatgatatcttatattatgtgtaagactatctgaactntatgttaagatcacttggattctcaattttaatggatggttntagctaataaaagaatcttatattgtacgcctacaaataaaagaacaaatcgtntaactttacattctttn

SEQ ID NO: 976 - DNA, 460 bp, Glycine max
  unsure at all n locations
agctnttagcattntaccatattatataatggctagcttgttatatattctcctaactacatggcatgccaagatatcactaatatgtttaatgtccacggttgtttctgttaagtttgggctacgtgagttgactctgataccattatcattatcatgatgtactgttcatggacccaactatatattatattattaattactaaaataagagttagttttaaaacactacaacttttctactataaatgtattggtgaaatcattcattgaaatgataatgctacttacatatattaattatttaaaaatgtatattataactntaccacttctctaaaaaaacaaaaaanaaaacttttccattttacataaatatgtaatatggtgttaattgatatgtatcaagcatttattttcactaacccaagtctgcaggaattctatgtactttgtcatt

SEQ ID NO: 977 - DNA, 307 bp, Glycine max
  unsure at all n locations
tgcataaatgagaggaaacttgagtaagttntatttataaatatatattacagatgatcatcttttaatttcgaaaaattatattcacttttattctgcaataaatgtttagttattttctgttgaattagaatttaatgctgatttttcaattaatcatttctaaactaatatcatggcttgtggacattggaatctattacattagtttccccacgctaaaaaaaaaatagtgatggtcaacaattgcggcgttattccatgtgcatggagatcaatacaccgacaaaatagtgaatgcacccat

SEQ ID NO: 978 - DNA, 260 bp, Glycine max
  unsure at all n locations
ctttgatagccctttntgagccttgtttccctttccttgttttgaagctcactacaagccttaagtgaaaaaccatgatatcaccatatccttaaggaattttggagctttggaattgttttgggaataagtgtggggggtttttgtttcattggacaacttgttttgttggctatgcttcatgatgtattctgggccatacttgatgtacattgtatattggttaaatgttggacatgctgaatgaaatgttgtttctc

SEQ ID NO: 979 - DNA, 401 bp, Glycine max
  unsure at all n locations
tgaagggaagagagagatcgatcacgagcacatagcatggtcttaanagaagagttagcagcttgcttaaggtccaaaaggaacttgactcagcgtttgtgcgagacagagatcaacatgttggctatcatcaccaagtatcaataagaactaagtctagccacagcccacgagcatagggtggcaaacgagtatgcccaagtgtacgcggaanaggaggctagaggaagggtgatcgactcgttacaccaagaggcaaccatgtggatggaccaatttgctcttaccttanacgggagtcaagaacttccccgattgctagccaaggccaaagcaatggtggacacctactccgcccncgagggagatcacagacttctcgactattgtcagcatatgat

SEQ ID NO: 980 - DNA, 363 bp, Glycine max
gcagctaactaccatgcactacggatatactctaaggaacgcaaaaagtaacaacaaagaccacattaagaactacatatgcagcgacctcaacgcaaaagtattaccttcactcctcgcaaccaaagggaacaacacaccaaaggaaaaatggaaaacaaagggaacttatccaaaaacaaagcatgaaagtcagcaaacaacaaaaaaggacgcgaaaagatagaacaagaaggaaaaatttagtaaagaatcatagaacgtgaagtaaacaacaaaacaataacaaaccgggtagaaaaacagctacagccgcgccaaacacagacatgcacaacagacgtaaaaaacttacaccttgaa

SEQ ID NO: 981 - DNA, 366 bp, Glycine max
  unsure at all n locations
cgctcgtggagcttctatggaggctggatctttgagcttcaatgaagtcctttaatggtgattntccactatggagatgcagcgaaagacaaaggagaagaggtgagaggaggcgccatccactgtggaataagccatgaaagaaagagtttcaccatcaagatgagccttggataagaagcttggaaggatgcttcaatggaggaaaagacagagggagagaaagagatagggggagcaagaaatcgaaggaataaaagagggagaatagtggaactttgaagtatatctcacaagactctcattcatcanagttacaacaagtgttacgcatgcttctatntatagactaagtagcttccttga

SEQ ID NO: 982 - DNA, 514 bp, Glycine max
  unsure at all n locations
tgcnttattgctctatctactcccgngatccttgagtcacctgcggcatgcagctntcnggtgcggtctaggacacaatgtcaattcatacgatatgcgaggatgactccccgagcaagttggatttggtatgaccatgccctcctggtttctgactangaaattggcgagtggaggagcgcccacacatttacgcgacaagcataatgtaaccctttgtggctnttaaactctacggnggggcctangctntagagattccttttgttatggcattatgtcttttgttcttgaatttataaatataaagatctttcttcatctgttcctgcacctctacccattctcattcatttgcatgtntatttctntacgcttaanacactagatccaacaacgagtccctcnaaggtactaatacctgngaccctgncatcgattcatgcaagaagcgggcacacagagagtgagaggacgatgatgtgtactttcccacagtngagaaatagtactn

SEQ ID NO: 983 - DNA, 369 bp, Glycine max
  unsure at all n locations
gcatttggacacctattatgtatctcctatgctgtacctacatacgtatcagcagggccaccatctcaatatttacgagatcatattcatacaccattggggcatttcaccaagcacttggtgagcgcatgtttggacatgaattgcaagagaatgggagcaatgtggcatgccccattgcttcaaaatacaacctatgcctaagaccttttcattcagattctcaattcaagataacaagcgcctaagctaaccataactgcctcacaaatataatgcatgttctcacaatttagggcaccaaaagatgaagaaaacacatcantgggaagcatatacatcaaagatcgaatacttacttgttggagt

SEQ ID NO: 984 - DNA, 419 bp, Glycine max
agcttcgctgatttagttttcaccgacgaaatgatcgaagtgggtctaaaaagaggcaaatctgatcatcatgctttgataaatgcaaaaaaaattggggcaagtgaagagggtgagaatgaaggagaaacccatgttgtgactgccattcctatacagccaagtttcccaccaacccaacaatgtcattactcagccaataacaaactttctctttacccaccacccagttatccacaaaggccatccctaaatcaaccacaaagcctgtctatcacacttctaatgacgaacaccacctttagcacgaaccaaaacaccaaccaaaaaggaattttgcagcaaaaagcctgtaggattcaccctaaattccggtgtcatatgctaaacttactctcaaatctactcaataattcaat

SEQ ID NO: 985 - DNA, 423 bp, Glycine max
  unsure at all n locations
nggatggcaatagaattaaccaattattagtttggccataggaagttcgattgccttattntatttcgattntgatttcattatgtttctttaattntgtttcttacgtaaacaaagcaactgccaaatgcatttccctggaacaaatttatttgaatatgtctttgggtttgttaaatcaattnttaactnttagtagacttacacaaatatgttatgttatccaatgggcatatgtaacgggtctaaagattagacaacgtatattcttcattaagaaaaaggaaaaggcgattataattntgacttaagaagttgttntgattctgtttactgattcanaagttggctgattgtttnttagttntctactggattttattatccttgaggacttgtggtgtcctcacatagtgtattttc

SEQ ID NO: 986 - DNA, 311 bp, Glycine max
  unsure at all n locations
tctgttgttcaatttcgagcgtctggatatattatgttccatattcanacatccgagtgaaaagttatgaccattagaatttctcgagagcttccgttgttcaatttcaagagtctagatgagttatgtacgcgaatcgaacatctgtgtgaaaagttatgaccattcaaatatcttgagtgcttccgttgtgcaatttcgagcatcttgatatattatgtcccacatttggacattcgtgtgaaaaggtatgaccattcgaatttctcgagagcttccattgtttaatttcgagagtctagatgagttat

SEQ ID NO: 987 - DNA, 575 bp, Glycine max
  unsure at all n locations
attgcacgcatctattangcgcactatacgaatactcaagctcttccggagcccatgaatcngcgtttcgttcatgtgtctccacctttcgagttggagctatgcgtagggattgcttagtgcaattctccattctcaacctttntcggagccccatgaattgcgttttcgttcatgtgtcctccaccctcgagttcggagctatgcgtagtgattgcttagtgcaattctccattctcaaacttttttggagccccatgaattatgttttcgttcatgtgtcctccaccttcgagtttggagctatgcgtagtgattgattagngcaattctccattctcaaccttttacggagcccatgaattgcgttttcggtcattgtgtcctcaccttcgagtttggagccatgcgtagagattgcttagtgcaattcttcattctcaaccctttttcggagcccatgaattgcgttnntcgtcatgcgttctccacctctcgagttggagctatgcgtagtgattgcttagtgcaattctccattctcacaccttttcagagcccatggattatgtttg

SEQ ID NO: 988 - DNA, 415 bp, Glycine max
  unsure at all n locations
gtatatgacatgtcccacttgtactttntttttttatctaatttgcatcccacaaaattagaatctctggatcttgattcatccactgatttacctttctcatttaagtcaaggtaggttgatgtagccataagaatggacgcttctttgcattnttccataccaaatttttttattagttctatgcagtatttattttgaccgaggaaggttccatgtttcattttcttgacttggagtcctagaaagaaatttaattctcccatcatagatgtctcaaattcttttttgcatacaacatgaaaatcccttgcataaggtttcattagtatagccaaatataatatcatcaacatatatntgaacaattaacaaatcattgtttactttcataatntaacaaagtttgtcaact

SEQ ID NO: 989 - DNA, 260 bp, Glycine max
  unsure at all n locations
cgatgataaagactccccaagctatntatcttctctctcagagaggctntgtctcactctaagaagtggatcactcttatcttggatggataggaatgaaagctcctacacttatttatactactccatctncacaataaatggtggagattacttgtctcataatgtgaagattaattctctataatgcttcacacattctaagagtttctacactcttccatattctttcataaggttccagaaagttttacacatct

SEQ ID NO: 990 - DNA, 181 bp, Glycine max
  unsure at all n locations
tactttgtcaggtacatggtcacttgcaatttcattccttagctccttgtcccttgtcaagatcttccaagatactattataacttctttaggaatctcttctgaagcctatccttcaagggtagcagccttcttttttgcttcttcttctgctntcttcttcatggtcttttatgctctt

SEQ ID NO: 991 - DNA, 585 bp, Glycine max
  unsure at all n locations
agggtacacagcacaaaaggacngctgcgtaangctacctatcattactcaagctcgaatgaggaagtgtagaacggtgaaacttcctgctnttattctttgaccacagagtggtacctggagatatgtcgcgggtatagtcagtcagtgagaacctgtgatgtacctaagcaggcgagctcctggcagtcaacagataaaaggaacaaagatcacaaagcaaggaggcttgtgtggttgctggccagttgtgaaacttgattgatatatgggatgtggcctctggtaatcgattaccaagggtgggtaatcgattacaaggcttanaaagtgaagacaggaagctaagatggcctctggtaatcgattaccaaggggtgtaatcgattatcangcttgaaaatgggattaggaagctaagagggcttctggtaatcgattaccaaggggtgtaatcgattaccangcttanaaatgaangcagcatgtggtggaggcctctggtaatcgattaccaggctgtgtaatcgattacacaggggaacatgccactggtaatcgttaccaggtatgtgtaatcgatan

SEQ ID NO: 992 - DNA, 320 bp, Glycine max
  unsure at all n locations
atcctctgagtcacctgcngctgcagcttacatggagctacgtcattgacggtttctcatattccttgctacgttaataagcatacctctgtatgtctccatcttgatgtagccttncattgattcctcaaacttgcagactcccccatatttagtcctgcaacttgctttcaaactgcaacatcaatgatcatctctacatcattaacagtagagtataaattgccttccatatcaacacgggcacatgtgtagaaaacctttaccaactcaaggtagaagattnttatcttctacaccaatcttaacaaaccatatgc

SEQ ID NO: 993 - DNA, 126 bp, Glycine max
tatatcatccagttccagtcatggtatatagtataaaaatttaaacatcaacacaacatgcaatgaagcctagcttccaaagacaacaaggttagggttcaacaagtggaaagaccccccccccct

SEQ ID NO: 994 - DNA, 248 bp, Glycine max
  unsure at all n locations
attcccttagcaatcccccaaattaagaacttatcataacttgaaacccttatactctcttagaaccctaaaacaagatcaaggttatcaaaattaggctcaggggtttattcaaacaaatcattattacttttggctcaataggggtgcaagggataaattcatcacaggttggctntttggctgagtggctaanataaaaagaaacnatggcttgatcatatccaccttatgcaaataatcaaata

SEQ ID NO: 995 - DNA, 305 bp, Glycine max
tatagatactcagcctcattggagcttgaggcctaggatcttcttatcaatggattctcttgcttcttggaagatgaatggaagcggaatggagaaagggagagagagaggagacgccacttcaaagagaagatgagtctagaagaagctcaccaccataggaggccatggataagagcttggaggaagaaggagatgaatgaagggagagggagagaagagcacgaacatttgtgctctacatgagctttgagatctgaagtttaatattcaaatgatcaaagttgaaaaaaatgcacacacat

SEQ ID NO: 996 - DNA, 362 bp, Glycine max
gcttgttggccgcgattgacaaagggtgcatatatacgacgttagtctctgcatgctatcatgcgttgactgttagcgatagcaaaagaatgtttatactaataaccacttgggtatttctgccggccccctaacttcacgacttagtaccgacagagtttgtaagcgtggaagacgacgtaaatctccgcatgtgaacgagcttgttggccgcgattgacaaagggtgcagaagacgacatttgttttttcatggtatcatgcattgagtcttagagatagcaaaagaatgtttatagggataaccacttgggtatttccgccgacccccaacatcacgagtttgtattggagaggttttt

SEQ ID NO: 997 - DNA, 416 bp, Glycine max
  unsure at all n locations
nttaggaccttatgtttagttnnttggcttctaaatcttttgacttgtaaacaaaaagtttctttgtaatatttcaatgcttaagtgaagtgttcagattatgatgtttacaattacttcaacaagtccttcgataataaattgttctttctttttgcataagcataatcatgcatcattctgcattcatagtttccgcatcaagtctcacactgtgttcaccacttcaaaaggataatcagccgccgtccgaagaaagtggcccgacgaattctccgcanaccaactcgcattttcagaaatggatctaattgagcaagaaaatcagagtctcaaggaggaggttgccactntacgagaaggaatggataggttgacgaccatgatgaatgcactcctgtccgcccagaattctc

SEQ ID NO: 998 - DNA, 435 bp, Glycine max
  unsure at all n locations
agcttgaggcacttgccttttaacctagtgtctccaaagtggccttacccaagtatcttgttttccattgatgtgccatcattttcttctattttctaaaccctttttgcaccattttaattattgattggtcttaattgtcaattaattaggcagttttattatttgggcccattcagccaatttgatgtttttaatctaatttcaggaattaatgaagaattgggcttgaatctagcattgggcttgaatctagaattgggcttggacttgaagagggcaaactaatttattctataaaattagatcttatcttatctagatattatttagatttgatctcatctagatatcatttcaattagatcttatcttatcttatcttatctagatntgatttgattntacttatgggcttggatttaaaacatattt

SEQ ID NO: 999 - DNA, 243 bp, Glycine max
tgacactacttatcttaccctacttctaccaccaaaattaagtataacctatagaattttactcctgaattaattaattaaacgaatgtgtatagaactttctattttcttttcataagtaaacattcctcgcttagacgcttcgctatcttcatagcgctccaatcatattaatagttattccaccccattctgtgatatacaacctgaaaagctctgaatatgcttgatacggaattagtt

SEQ ID NO: 1000 - DNA, 257 bp, Glycine max
taatttatctcaccctcatttgtcacaagatagtgacatggagttgatggtcaatatttgtcacaacaaagtatgtttatctcaacctaatttgttgcagcactccatttctatatattacaattattcatgttcggcattagcatgtacgtccctgcaactattgttccacccatagcaaggaataagctaaccataacatgagcccaacaaaggaagaatgctgatatagatgatgcagtataaagaaaactgaa

SEQ ID NO: 1001 - DNA, 522 bp, Glycine max
  unsure at all n locations
ntanatatntcagatgaagtcattcaattattgttacttcatatgtagcagctgggaggagatttatatgtttgtcaaatgttgttgacaatgtagaaacattgttaggcatgacaaccggatcgggttctgcttatcctatctcagtccccgattcctcatttccttctctacccctgtccccgaaattcaatgggagtgcatatttatgtccatcccagtctccagtggggttgagtttttcccgtcccgtcctgcccccgacatatttataaaattntattaaaaaatctaattnttcataaaatgaagaatatagatttaaataaaaatcacaatattgtacatgacaacatanaatccaattcaacattagcatanaattcaatataataatttcatggtttaatgtgttatatatatatatatatatataatgatatntttgtacaataattattagcgtggaggaattggaggcgggtattaataatctcatccctgaccccgaacctgattttg

SEQ ID NO: 1002 - DNA, 267 bp, Glycine max
  unsure at all n locations
ctcgctgcanaattcatttcttggttgttgctcttggtttgtgctaaaggtggtgttcgtcattggaagtgcggtacacagactttgtggctgacttaaggattgcctttgtggataactgggcggtgggtaaggagaacgtttgttattggctgaatcatgacatcgttcggttggtgggaaacttggctgtctatgaatggcagacacagcatgggcttcatcttcatcctcaccctcttcatttgccccagttttctcattcgt

SEQ ID NO: 1003 - DNA, 360 bp, Glycine max
tattccgaggacagttcattatcatgcacagcctgcaagagttggctcacaatacgccaatcatatctatggagcattttctagagccagtagcctcgcctgaagctcaacttccattggtgaaaccaaacgaggttgctccgcctgagctcacacctgagtaggtcaattcagagccagctaacccacaatctccagtggcgaatccaccttcttcgcttgagcttgaagcaagtcccccatctcctcctctgaatgtcatttctgacgcatcattagatgaagcatttgctccttctgatttaccagctgcagatacagctgaccaccttgtttccccaatcggaggacatgctgatc

SEQ ID NO: 1004 - DNA, 237 bp, Glycine max
agcttgcttgagaagcttctatgtaagctggatctttgagcttcaataaattccttcaattgtgattttcagccatggagttgcagtggaagataaaggaaaagagatgagaggagacgccatccactagagaataagacatggaaagagaagcttcaccaccaagagagtgtcttggataagaagcttagagaggaagcttcaatagaggaagagaatgagagagagggagggggg

SEQ ID NO: 1005 - DNA, 243 bp, Glycine max
  unsure at all n locations
cttganatcgaanactaactggttgaagatngacgaacaatgaatatcgatataagaatggtgaagaacactagtataattcatcacgaaaacgtcacgaaagcatctcggcttggattattttcttctttcttcttctcctcactaattgtaagtgaattttgagtgccaaaggtgttgaaccctttttcctcagccccccatgccattttattgaaaaaattgagggggggggggggtctc

SEQ ID NO: 1006 - DNA, 315 bp, Glycine max
  unsure at all n locations
gcttcctccacaagcaacagccttctggaggaatcttctggaaggcccaagtgggcctggttgctatttgcacccccatttttactaaatacacccccttctatttttttggtgattctttttccgtaatgttacgaaactttacgaatttcgtaacgatacttattttttcttccgcaaggttacgaacccttacgaattatgtatttactctnttttagctttcgaagaagttacggaaacttaccgattgcgccaaaacacctcttttcgacttccgtcacattatggaatttcacggatcgcgcaagcctg

SEQ ID NO: 1007 - DNA, 446 bp, Glycine max
  unsure at all n locations
tattatggtctaagctggttacacgaacatntattcccatcatatataataaataaaaacaaaaattgagctccaccaaaaacaatagtttgaaaatcaacttcactaatgttggagaagtcagagaaagttgctagacaaaaaatatctttgtcatatagctggaatgatcatccgtgagagaaaattcatggcaagcatagcaaggttcattcttcttgaaaccacaattggaagcttcaaactaataatcttggagaccatattatttaagcttcaaattaatgcatcttgaacttagtcacgactagtacactagagacacgataaagtcaccaganaacacgcaaaagtacttaataaanacttataagttaatggttagattaataacatttagtttaacatggttttaggttgtcaaattggtccgtcaaaaaagtttc

SEQ ID NO: 1008 - DNA, 497 bp, Glycine max
cgcatgatacatctgacccgcgatctctgagtcaacttgcagctgcgcagcctggtggcccatgaaggatggcttgcggttatattgcatgaaaaagcccttcgattatatggatatatgtgaatgggtagcataaaatggcttgcgaaatggtgaataaaatggcttggcaaatatgaatatatattgcctggaaatggcttggattatatgaatatatattgtatgaagtggcttaccaaggggtggatggatagccgaaaagtggttttcaaaatatgtggatttgtgaagagggagcaaaagaagccttccaaaaaaatgtgtgatatatataggatgtaacgtgaaagggttgcaaaaaatatgacatggatgtgtgtcgaaagtgctttcacaaattttatgtgtgcaatgatatgtgtataaaatacatggcccaaatgtgatttataagtgctgtgacactcgccccatgagtgtgtttgctcttgttg

SEQ ID NO: 1009 - DNA, 441 bp, Glycine max
  unsure at all n locations
tattaagaagcttcctccagaagcttcctcatggcttctntgagaagctntctcaacaagcttctttgagaagctagatccttatctatccacacccctctattaactaaattaacttccttaaaaataattacggatgaaaataatgcaacaaataatcaaacatcaaacataattactaataatatatatatcagggtgttacacatggtatacttgagaccgtatagtaagcataaaattgagtataccaagaacaatgcctttttattgactacaaccaaagctataagggtcgccaatgataggcactaagttgtaagatcaatatttctatacatgttgaatttcaagagttgtagttcctttctaaactangaacaaaananaaaggataaaaaacatgccacccctctaaaatatcacacaactntntttaaa

SEQ ID NO: 1010 - DNA, 444 bp, Glycine max
  unsure at all n locations
agcttctagccaaatattagtctctcaaagagtcgtcttttcatggaggattatctgtttctagagtctcatcaattcgaggtgtccttggttttatggagactcatttctatttaactatcttggagtgccaatctttcctggaaaatcgagcaaaatatatctccaaagtgtgtttggatgagaaaattttaaattctgagaaattttaaattctaagaatttcaaatacttcaattgaaattcttttatttttaaaattgtgtttggataaaaaaaaataaaaattgtgagggtgaaagaaaatgaatgcaaagggaagagaagatatgattggtgtgtttttaaagagaagaatattgacacggcatggagagtcacacganaactgggacacgacgacatacaccaccatacccgaccacaacattcagtcaatgacac

SEQ ID NO: 1011 - DNA, 470 bp, Glycine max
  unsure at all n locations
tactcaagcttcaacaacgaggttcagtgaatgattacctcactgagtctgaacgtttagcgaatcggattgttggtctgtctcccacggtgctcctaagctgttttatttcgggcctttacccagacctccgtcgtgaagtccgggctctgcaacctatgtccatatcacaagtcgtggcgcttgccaagttgtaggaagaaaagattcaggaccgccatcgccatttccgcacatcctataccccttctggtccgccactgtcaccgccaccacccaccgcggttccttccatcgttctcaccccggtacgcccttcagttaagcgcctttcagcagaagaacttggtgtctgtcgtgacaaggggttatgttatcattgtgacgagaagtggattctcgacaccgttgccgtcctcgcctccacttacttattgcanacgatgatgatgatgactgcacaaatccat

SEQ ID NO: 1012 - DNA, 417 bp, Glycine max
  unsure at all n locations
ttggcttattccctagtggatggtgcctcccctctcctcttctcctttgccttgcgctgcatctccatggtgtaaaatcaccattgaaggacctcattgaagctcaaagatccagcctccatagaagctccacaaccaagcttccatcaggacgaagtttggattgattcaatctaactagggattgaggtttagtaatttaagctatagcatagaacacaaaagcatgatngattagagaaacatctttatatacatcagttggttggttagaaagactcaacatctttacctactggctgcaatcttacttactttgcattttactggttttagcctagatntagtntaattctattctaaatcatccattatcaatggttctctcacaatgacttattctgaattaaccctatc

SEQ ID NO: 1013 - DNA, 391 bp, Glycine max
  unsure at all n locations
tctcaagggaagtttcttaagaaagcttctcaaggaagctacctagtctataaatagaagcatgtgtaacacttgttgtaactntgatgaatgagagtcttgtgagacacaactcanagttcaacttctctccctttgtcttccttcaatttcgtgctcccccctctctatttctctccctctttcttttcctccattgaagcatcctctccaagcttcttatccaaggctcatcttggtggtgaagctccttcttccatggcttattccctagtggatggcgccgtctcttacctcttctcctttgtcttccgcttcatctccatgggggaaaatcaccattaaaggacctcattgaagctcatagatccagcctccatagaagctccac

SEQ ID NO: 1014 - DNA, 332 bp, Glycine max
  unsure at all n locations
ngaccaatcncgacccaacccaggcatagtcggtcagtgagaactctgtgatgtacctaaacaggcgagctcctggcagtcaacagatcaaaggaacaaagaccacaaagcaaggaggcttgtggtggctggccagctgtgaaacttgattgatatgtgagatatggtctctggtaatcgattaccaagggtgggttatcgattacaaggtttaataatgaaggaggctaacatggtctctggtaatcgattaccacggggtgtaatcgattaccaggctcgaaaacgaggtcatgaagccatgagggcttctggtaatcgattaccaggct

SEQ ID NO: 1015 - DNA, 348 bp, Glycine max
  unsure at all n locations
gcttctatggagctggatctttgagcttaataagggccttcaatggtgattntcagccatggagttgcagcggaagataaaggagaaaaggtgagaggaggcgccatccactagagaataagccatggaaggagaagcttcaccaccaagagagtgccttagataagaagcttagagaggaagcttcaatggaggaagagaatgagagagggagagagagagaatggtgtggaaattgaaggagaatagggagataagttgaactttaaagtgtgtctcacaagtttctcattcatcaaaagtatgacaagtgttacacatgtttctatttatggcctagcacatggg

SEQ ID NO: 1016 - DNA, 375 bp, Glycine max
  unsure at all n locations
cgaagaagttntttcttttacatgcccaactctctcgagtgacattngcattgattggtgtattttatgttgcatcttagtctctatcatatcctatgtgcatcatgcatcatcatgtgtgagtaaggagaaaatttctaatgttataaaatttcttcagaaggcaaaactttttggtttaatccattacaaccttacagtaatcaattacacaaagttgtttaagcttgcatagctatgtcttgtatcgatttaattaattacagccttatcctaatcgattacaccaattgttttaagacaatggtttatttatntaatagtctatgctttaatcaattaccatgtgatataaatcaatacttctctttctat

SEQ ID NO: 1017 - DNA, 400 bp, Glycine max
agctataacctcatcgtccctcacagtctttattattgggagccaatccaatccttgtgttcggactctcagccacttatgatagccgccgatgatcccattactgcttcccctaagctctctgtcctttcttcacgccgcatcccatgccttgcgaactccttggagtaccctcgcgttgtggtcactaaaaccccgtgcgatgaaaggcgtgatgctttcgtctaatggcgctcctctcatggggtagccaagctgtcttatggtgagaacgggattataattaatacaaccccttgttcccatcaagggaacatttggacatccttcgcatgaagatagaatcctgattcttccttccttctagcgagggaaccaattaacagacgcccccccatgc

SEQ ID NO: 1018 - DNA, 267 bp, Glycine max
  unsure at all n locations
tattacaagccttaagtggaaaaccatgatttcacnctacccttaaggaattntggagctcttgaaaatgtttgggaataagtgggagagggggtatgtttcattgggtgatattgttttcgtggccatgcttgatgatgattttggccatgcttgatgtatatacatataatgcctatatggtgctttatattttaaatgctttgcaatgctactggtcacgttcaataaaaaattaaatagaagaagaatgatgttgaataaatg

SEQ ID NO: 1019 - DNA, 389 bp, Glycine max
  unsure at all n locations
gcttgcgagtctcctttggcatttccttgacatatgttctccttatgtctaaggtctcaaggttatgaagtttgccaataaatttcagaagctgcgttggcatcactgaatatcgtaagtttaaatacttgaagtgtgctagatttccccaattttcaggaacagaactcaatggactatcttgaaaatcaagtaccttcaatagcctgtactttgtagggattttttgcacaaagttgttcattaatgctgattctttatctgcaaaaacaaacagtgatcgggtgtgtgaattntccgtactccccattaaaaatcattggagaacggtgctattgataagcgttgaatcatcccacttggcattggctcatcttctttactaatat

SEQ ID NO: 1020 - DNA, 291 bp, Glycine max
  unsure at all n locations
cacagacacacttagtggttgacattaactattagtagtggaggataatacaaccagtttaatgcgtggttggtttgacgttggagaattgattntgagtctaaaattaatattagatatatttgtaaatatctggttttatgttggaaaagaattcgaaattaattctaggtccataattgattttggattgaaacaatattgagtagtatctgccctagattcaaaaatttgtattgaattttatttctaacttgattttataattaaacattcagacataaatcatat

SEQ ID NO: 1021 - DNA, 383 bp, Glycine max
  unsure at all n locations
agctaggttntgggcaatagcaccccacctgacgtccccaaggtctcctgacccccgcgacatatctccaggtaccactctgtggtcaacgaataaaagcaggaagttcacccttctacacttcctcatctcaagcttgtaggattatggggtacccatcacatgtggtactaggtggcggtcgggcaatggtgcacaacaagttttccacatccacaatgcgcgcataaacccaccatcccctgttgcccacctccaactgagctcacgtactcccacgtagcccatatcctcgtttctctcaacaccgggtccccatcaatcctcccaagcttccacaacatccaagcaaaacaacattcanatagcacaagctatcacag

SEQ ID NO: 1022 - DNA, 396 bp, Glycine max
  unsure at all n locations
ntatcanatggatgtaaagagttcattcttatatggctntattcaagaggaagtatatgtagatcaacctcctagatttgagaattcagacaagcctaatcatgtttttaaattaaaaaaaaggctttatatggcttaaagcaagcccctagagcttggtatgagcgtctgagtaagttccttttagaaaaggatttctctagaggcaaggtagatactacccttttcataaatagaaaatcacatgacattntactggttcaaatttatgttgatgatattcattttagatctactaatgaattattatgcaaggaattctctcatgacatgcaaagtgagtttgaattgtcaatgatgggagaactctaattgtttcttggatacaaattaaac

SEQ ID NO: 1023 - DNA, 325 bp, Glycine max
agtgtttcttttgcaagaagaagggacacatgaaaaagaattgccccgggttccacaaatggcttgagaagaaaggtgaatcaatctcattagtatgttatgaatctaatatgggtagtggtaatattaacacctggtggattgattctggatctactattcatattgcaaattctttacagggtatgcaaaacctaaggaaaccagtgggaagtgagcaaagcattttatcaggcaataagctaggctcacatgtggaggccattggaacttgcattttgactttaagtagtggctttattttaaaattagaaaggacttttta

SEQ ID NO: 1024 - DNA, 381 bp, Glycine max
  unsure at all n locations
taggagttntccaaccatcaagttgaccttgcttgaagacctccatccttcatgttatacttgagagttttccaaaaatatcagacaagatggaatatgtaagggaacttcatttgcagtacactgccataagtatatctgtctatttgtggagttgttcagttaccaagtagcactgtcatgttaccagaactgactgatattatagctnttggatggaaagggtagcaatggctaaatcacgaagatggtgaagaaaaagcgggttcaatagtatcttcaaaggtagaacggctntgtgcctaatgatgcaaccatttattaatttttcanaacggttcatgcacgttgttcatgtgaaagatttagactgattgatat

SEQ ID NO: 1025 - DNA, 289 bp, Glycine max
  unsure at all n locations
gcttatctttggttntacaaccaaagtccatgtgaaccttgagtaatcatctactataactaagccatagtaatttccacctaaactcagttctagagggaccaaataaatcaatgtgaaaaagttcaaggggttttgaagtagaaacaacatttttactttgaaaggagtttttaacttgctttcctttnttacaagcttcacacaatttatttttctcaaacttaagttntggaagaccaattactaagtctttcctaactagatgattaagatgatgcatatttat

SEQ ID NO: 1026 - DNA, 410 bp, Glycine max
  unsure at all n locations
ctcaagcttatgattggatngataaatgtgaacgtgagagacctctgagtgatgcagagagtagctgacgaagagatatcgataggtgaggggagtttatttttggtttatagctcttgataccatacttggngttagtaaacccaactatggggatgtatgattctccctatgcatgctagttttcaagaaaactgtgtttntgactaatgggatgcgatatatttcttattgatgaatgaaattgtgaatgatattgttgttttatgaaacttgtgttgtctgaagacctgtgaaatgtgaatcctangcatgaaattatatgtatatatgtggaatgcgattactgatgatgttaatattgatgataatattgatatgaaatgatgttgatattgagatgagatgat

SEQ ID NO: 1027 - DNA, 360 bp, Glycine max
aacaaaacttgtgctattcatctttttcattctcttctccctttgccaaaaagaatttgccaaggactaaccacctgaattctttttgtgtctctcttctcccttttccaaaagaacaaaggactaaccgcctgaattcttttgtgtctcccttctcccttgtcaaagaattcaaaacgacacagtctgagaattcttttgattcttccctttcccataaacaaaagatttcaaaggactaaccgcatgagatatcttttgtttccccttcacaaagtttcaaaggactaaccgcctgagaactttgtcttaacacattggagggtacatcccttgtggacaagtagaggacatctactt

SEQ ID NO: 1028 - DNA, 409 bp, Glycine max
  unsure at all n locations
tctatggaggctggatctttgagcttcaatgatgttnttcaatggtgattntccaccatagagttgcagcggaagataaaggagaagaggtgagaggagacgccatccactatggaataagccatggaaggagaagcttcaccaccaagacaatgtcttagataagaagcttagataggaagtttcaatggaggaagagaatgagagagagaaagtggcatggaaaattgaaggaagaaagggagagaagtttaactntgaagtgtgtctcacaagactctcattcatcaaagttgtgacaagtgttacacatgtttctatntatagcctangtcactaacatttcacgtgaatctaagaggaatattccaagaatatcccanatgcatcttaacatattccaagaata

SEQ ID NO: 1029 - DNA, 521 bp, Glycine max
  unsure at all n locations
ctttcgttccgtctatngcgngcccgcgatccttagagncgcctgctgcatgcaagcttgangaganaaggngaatattctttttcttcttggatgacccaangtggcaacgtgcttcatttagttaaatatcgtacacaggctcattcattgtggacggtaacccagcggggaattctaagacaatgatgactcacaccttcaattcgttggaagctcttctaacctaaatttgacatactacactggaagagcacttattcatttgcaccgangggtggcatatgctgccatgatgaatcgaacatctagggaaccatgcccaactcacagaatttaatatgcggcacactactaagcccaacgtgaattgcacaggaaatcatggttgcgcgctttagaattgacttcatcacaagggtagatacgataagacatgtactgtgtttgatacacctcaagctccaattgatcggcgagtcatctaggagatgatcgtgaatgcagacacaacctcacct

SEQ ID NO: 1030 - DNA, 87 bp, Glycine max
accttcaggcgactttctctaagcgccgcaccggaatcttcaagaacgcaagtgagcttgccaccctctgcgacgtggaccttgctg

SEQ ID NO: 1031 - DNA, 460 bp, Glycine max
aagcacctgagctgcagctatgctgctatattacaatagaccttctttacctcagcagcaaaatcaaccacaacagcacaattatgacctcttcagcaacagatacaaccctggatggaggaatcaccctaatctcagatggtctagccctcagcaacaacaacagtagcctgctccttccttccaaaatgttgctagcccaagcaaaccatacattcctccaccaatccaacaacagcaacagccccagaaacagccaacagttgagacccctccacaaccttccctcagaagaacttgtgaggcaaatgactatgcagaacatgcagtgtcaacaagagaccagagccttcattcagagcttaaccaatcagatgggacaattggctacacaattgaatcaacaacagtgccaaaattctgacaagctgccttcttaagctgtccaaaatcccaaaaa

SEQ ID NO: 1032 - DNA, 419 bp, Glycine max
acaggcctatatgacatctcggactatgattaactccctctaacctccaagtaccagcaaatccagaggtaactctacaaactctcaaagcatcactctttatcactcatagcactacattctcactatctaaccctaggttaactctaccctacatctctagcagatttccataagcaattgcaaaacacagacatcacatgcatcatcatagacacttctaaaccagaacgggaaagcgtgactcacacctgacatgacgaagttaacatgtttcagtgagattctgacagataccatccagaacataaacctagttgactacccatgatatttccaaaacaatcccacagaatatgtgagaagatgctaccaacctgaaattgaagtcccactatagggcgcttacgactccgaaa

SEQ ID NO: 1033 - DNA, 448 bp, Glycine max
agctcgaacttgaaatagggtcaggattgatcttatcgttcctcatggctcttgaagaaataaagagaatgaaaagtacaaataaatattattttatttgtaaggattaaaaatacatttaaacctaaaaattaacacggattatgactattttttataaaattatattgttgttttttttttaattttagataacttatgattgcaatattggttaatgaatataaacttcaccaaaagttaatagttgattttatataattaaaaccaaaagttaatattttataatatatatatatatatatatatatatatatatatatttcatttcagtaagaaaaaatcatattatatataaaaaaagctctatataaatttgcatagagggtctcaactctcaagcaccttaagtcagcctactagggtcatcacaggtacccgaagataa

SEQ ID NO: 1034 - DNA, 356 bp, Glycine max
  unsure at all n locations
cgccagttnttacgtatactttggaagtatatatattaacatcacgcacttatatgcgagtaagagcagctcttctacgtggtcattgaaggaagatttaagtgttggtattttttgttaacttacataatgttgctctgatgatattccgtgaagaatgttaacgacttctcgttttagccatcctattggtcttttcattcgccgtacatatatatgaattatacttattgcatgagaatattctttacttacttgagactattctaatttgtgtgcctttaccagaatatcttcacgctacactggaatgacaatggtggatgcctctctatgagaaataatgaccacatgtg

SEQ ID NO: 1035 - DNA, 449 bp, Glycine max
agcttgtcatggtatatatatgtttcctaatagtctactctgtgttatataatacttagttaaatatattgtgtatactaaaagcaaatgcttaacattatacgtctttcgtactcaaggatataccaacattgaagggcggactgtcttgatgtagcgattttaacagcgatgacactatctttgttctatatattaactgtcatggagatggagctgtctttgtaaacaatctttgtcattatcagctgaaagatgaacatgttgttcgataggaaaataatgaaataccttatataaatgtattgtaaagttttaagaataaactgctcaaattgccagcagtttgtcgtagaatagtagtgcaaattcatgatgtaaatgtattagaatacagaataaacctatggtgccgttattaattgttatgagaacatcttgggtcttgc

SEQ ID NO: 1036 - DNA, 82 bp, Glycine max
tagcacatgttgttgtccaatgaactcttcttgacagagcatgtgttgaacaggaactcttagaatgatgtgtagaatgaat

SEQ ID NO: 1037 - DNA, 264 bp, Glycine max
gagcaacgcacagctcacattctctgtttcaactcctaaacaatttttaattggtggcttctggatttatgtcaatacatcaaaatcttatgttatacttgtgtcatcatgtaatgcttcctctactactgattcgataaaacagataaaaaaacactaaaaaatgaaacctaatatcatcaacgacataaagcataaattctagtattagtatcaccaaaagttttggctgctggttttgtgcccattcctcacatttgatct

SEQ ID NO: 1038 - DNA, 429 bp, Glycine max
agcttctacttatgtggcagggcgggcttccttttccttcttgtctccaacgcgaactttgaccattgttcttccttcccgcgatgcttcttttcatgtctgcctgagtgggcttatagcctaaaccatacttcccacgattaccttgggtatttatcagtctagttatgccgccgttgttttttcctaaacccataccgggctcataaccgttccccaacataactcgggccatcattaccgctgcatcggacagactatgctgcccaaagagggagtccacggaggaaatgctgaccacctcaaaagactggaaagtagtttctaacgattcttctgcggcttccacataaggcatggaggatgggcagcttaccaagatatcttcctcgcctgacacgatgaccaagtgcccctctactacgaatt

SEQ ID NO: 1039 - DNA, 437 bp, Glycine max
agcttcgaagggatgaaagggatgtgttgagggtgatgagtatgatattagaggataagttgaaggcttgcaaaggtcataatagagtttgaccgagcagttgagttatacagacgagaacatcttgacaatcattgatgggtataaagaagagctaagcctagctgccagtcataggtagagactagaggatgagcacgcgaaggtagtggctctgcaagcggaaggggaagcaagagagagcgtgatataatcattgcacagggaagccgtgaaatggatggatagattcactctcactctgaataggagtcaagaacttccaaggcttttagccagagccaaggaaatggcggatgtgtacccagctctcgaggaagttcatgggcttctcgattattgccaacacatgttcgaatagatgtgcctcataatta

SEQ ID NO: 1040 - DNA, 408 bp, Glycine max
  unsure at all n locations
tcatgatgatgaaccaagcaattttgatgatgccaaaagcccttgtgattgattcacgacttcaagatcaagcatcaagaatccaatccaagattcaagattcaagagaagaaatcaagaagcaacaagtcaagacttcacacatgataagtattaaaagattttttcaaaaaccaaatagtatagttntgttttacaaaagaattttctcacattgtctaagttaccaaagtgattactctctggtaatcgattaccagttatcagtaatcgattaccagtgaccaacttggtttccaaaatgttttcaaatggtttgcaacgttccaaaatgattttcaacagtgaatcgatacactatatattaatcgttacagtgaatctgacgttgaatcaatctattggaga

SEQ ID NO: 1041 - DNA, 423 bp, Glycine max
agcttctgaagcatctacaagatgtattaactgtgttagttgtcagccatgattagaggttgcttcaatatactctattagtttttgtttatctggctattcagtcattattgatgctcatttatcgttatatgtatgggtttgtctttctcgtgattgatgatttgcgaataccattagaaattctaacttcgattgttacgaaagactgatttaatgtgagcttcaaaattgtgctgatatatagatggataaacacatgacgttgatacttatatgactgtggtgcttcaatgtatacacttggttttatgtaggcaacaacttctagaatgtggaggctatgagctcgtgcacatcatgaactcaataatcacttatgtgataatgtatggctggaagtcagtaaacggaatcttgagc

SEQ ID NO: 1042 - DNA, 437 bp, Glycine max
tctcgccattgacaatggcggtacgcgtatctcgccagtacttctggcgacatccatggtaaaacagaccccctctgtaaatacttataaaagagacccctttacgtaaatagtttgtaaaggtgaccctctacagtaaatttaccactttaaaataacgtttggacattggattttcatataagttatggatgcttatataaatagtgtgttggaagcaatgcttgataacccatttttatgcatctaagttaagttacaagaatatacctattacttccttggacgcatgtttagcttgcgtagttcaataaactatatcaattcaccaaagtttaatatctcttattatcattagaactatgaaatctttacgggcttcacattattcatgtttttggttccggcaaaatgttttgaccaacttgccatgtaag

SEQ ID NO: 1043 - DNA, 407 bp, Glycine max
taacttgagcatctctgactatgaatcatgcaacataatagggaacaaattcatagtaaccctcgagtacaagaccgagatgactatagagtagtatcccctcatatttgatgtccccattagcaacagacttagcatatgttttattttcatttgaaaatgttgtgacatgtgtcgcactaaatccaacgaataaacacaaaatacatgttataacaaggattctgtgataaaattatgtgcacctcaggacgtaattctataacatgttcttagttgagtacgaggctttacaccttttgcttgacaatggcaaaggagatgcacatatagagtaactagcgagctatctaaataacctctcgtgacattagaccagcggaaagaaacatgatgaccaaactctg

SEQ ID NO: 1044 - DNA, 325 bp, Glycine max
  unsure at all n locations
ttcggccgacactggcgtgttcccatgcactccggcgagaacacattgacccacctcgatcagataaaaagacattaaccaccggtcttgatcggaaaaaatgctggttgacgtcggccatgatagatgaccgatcgaggtctgaaaataaaagaatcaccggatgacgccgatcgagcatatcctaattgacatcatccaaatattatccagggattggatagaaaaaacaatagctgataccagtcgttatgtagtcccgactgacatttgtcagccgacattgcacagtatttntttcaaacgctggccgataatatatctt

SEQ ID NO: 1045 - DNA, 344 bp, Glycine max
gctttacggacctatcaaactcagctaggaggattttggagacccgctgttgcgatatacgaggatatgggctacgtgcgagtacgtgagcttaattggaggtgggcaacacgagatggtgggtttatgcgcgcattgtggatgtggaaaacttgtcgtgcaccatcttccgaccgccatctagtaccacatgtgattggtaccgcataatcctacaatcttgtgatgatgaattgttgaaagaggagacttcctgctttattgttgaccacatagtggtacctggagatctgttgccgaggttaggagaccatggggacgtcatgtggggtgctattgcccaa

SEQ ID NO: 1046 - DNA, 420 bp, Glycine max
taatgacattgattatgacatcacacgacttgctatttttagtttcattttttcccaagaaatatcgtgtacctttcgtaaaagaattctgttttcgtccttttgtaaggaaaaaaaaaaaaagagattctgattgaatttgagtaaactattttctaaaataatattattatgagtgacaacttttttcttatcttaacactctgttttgctgtatattaagactctgactcaaaatcatcagacttgtctataaaataagtatcttctacttccatcccagtaaaaatcccacatgaaggacttaacaaagctagattactttgtgactcttataaatataactaagatgattattacgaacacatgctatgggtttatcttcgaaaaggaacacatgaaataactcgattttaattt

SEQ ID NO: 1047 - DNA, 376 bp, Glycine max
agttggaagcaaaacaagggagcaagctttgggaacactttcttcaagaactaaaacaaagtcctttaaccttttccattttcattccttttactatcctcatgtatttctggattggattcttctccttgcatcagtagttctacaaaatagaaggagcagaacacaaggaaattagattatttaggatagtcacatatctcctatgtgtttaatttaagtagcttgaaccattacgtactaactctgatcactctatatgtctattgcttgctatatgattcgctaacacttttgacaaggaactggatgagatgaagcacataactactggaatttgtcgcaagttattattacatcattgtagtttatgttt

SEQ ID NO: 1048 - DNA, 448 bp, Glycine max
  unsure at all n locations
agctgtgcttctacactaccagcaacaatatgttatcaaagagaanaactctagatgagggttcactgttatcaagcaagtcggagacccagcatgaccacaaattcacctccactccttatgttcccatggacccgggtatagggccccttttcaactcaccgtgtgtacaaatagtgttggtgtttatgtgcatcaaatgaataaatatctatctcatgcttacatttcaaaagcacactaaaagcaaaaaagagttatatacaagaacgtaaaggaaataaaaggaaaccgacaaaagaggaagtcatgatattgcacgagattagaaggcctaactctctaaaaacagtccccagtggagtcgccaaatgtcgcaacctacccttcggcgggagggcgacgcggngctcacgggtgtgtcttccaagggaggaaggctcacgga

SEQ ID NO: 1049 - DNA, 447 bp, Glycine max
  unsure at all n locations
tgtaggccttgaatcttcttcatcaatggagtcctttgcttcttgaagataaattggaagcggaatggagaaggaggaaaggtgattagagatgccacttcaaggagaagatgagtcaagaacaagttcaccgccatatgaagatatggatataagagcttaaaggtacgagaagatgagtggagggagagggagagaaagggcacgacatttatgcctcagatgaggtatgaaatgtgaagtgtaatttctcanatgatcaaagttaaaaatatgcacacacaaggcctctatttatagtttaagtgtcatacaaaattggaggaaaatctgaatttctattcaaatttcacttgaatttgaatttgtggagccaaatttggagccaaaatttcactaattaggattgcatcatcccttccnctctgaaaatgaattgacctcaaa

SEQ ID NO: 1050 - DNA, 448 bp, Glycine max
  unsure at all n locations
agcttgtgcaaatcaaatcactcctacgtctcatctctagcatgcattttctttctttacccactcctcacgtgtggttttttagggaaaaaacaccataactaaacgcgccgcatgggatccctatcgcaccagatccaaatctagaacgatgggtgatcaagaggagacacaggaacagatgaaggccgacatgtcggctctgaaagaacaaatggcctccatgatggaggccatgttaggtatgaagcatatcatggagaagaacgcggccaccgccgccgctgtcagttcggctgccgaagcagacccgactctcttagcaactacgcaccaacctccctcaaacatagtatgacggngaagggacacactgnggcacgatggcagccctcacctgtgatacaaccgagcggcttacccttatggattgccgcccaactattca

SEQ ID NO: 1051 - DNA, 399 bp, Glycine max
  unsure at all n locations
ctgagggaagaagccacaagaacacttatatgaaggtcggatgtataagaagaacatgtattgctctccctcccttgaagaactcgtgcacaacaatggagaataaaggttctaagtttgttttttcttggagaagcgaggacatataaggctttatgcttgcttcaaatgaaacttggttacgcttaatgttgacaagatcaaactgatgacatgaataatcatttgatagccataatgctgccatatatgcatattctgccttttgattntttaactagaaatgactaaagtcgacttaagcaaaaatggtaaaaactccttctgtaaaactgaaaaccttatctaatctttagatagtgtgctacatccttggatatgtgactcataggaacttgc

SEQ ID NO: 1052 - DNA, 448 bp, Glycine max
agcttctccctataacagcttcaaaattctatattcagcacactactgtaatttcaattcactcatgttaggtggcatccctaaattgggaatctatagcctggccatgcttaaatgcttataattttctagatgttccagcttaaatgttttgactgttctcagcatgagaatttacttctcacggtgctcaaacaagtgtgttgggtacagctataaagatctgagtcaatgaggttgttaggcaagcttgtctctgggccctctctttaaattccttgtttcgtccatttgggctcccttctactttatttgttaatgattaatggtgatgggtatttatatatccatttggaaaatgactaatagagtctttgggttagagttcaactgaacataacctactttttttaaaacaataaaatctaccagtgttattacttctcta

SEQ ID NO: 1053 - DNA, 440 bp, Glycine max
tcatcaaggatcttgttgaaatcatccaattgttcagtggttgttttttactctgtcatcttgaaggtgtacagtttttgcttcaagcatagccaatttgcaagggactttgtcatatacaatgactccagtttcaaccacattgaggttgttgtcttttctcttgcaacttctcttaaagctttatctccaaagcatagaatgattgcactgctggctctatcaatcatctctgatttctcctttgagcttagagattcagacatcctttcttctcctttaagagcttctgcacagccatgttgaatcaagattgcttccatcttgactctccataacccgaagtcattgtcccctgaaaacttctcaatatcgtattatgatgatcccatctttcttggtcttgatcttgtccccatagacggcgccacttgttgatt

SEQ ID NO: 1054 - DNA, 447 bp, Glycine max
agcttctaccccattttcctataaatagggggagaagtgaatggtaaaaatgttcagccctcctggtaattcgagaatcacttgaaattagcgaaaaaaattgtttccgtgaagaaaatccaagtcgatgcgcttccgtaacgtttccgtgggtgatttcgcaaagattttcaaccgttcttcgacgttcttcgttcatgcttcgccgttcttcggtcttcagccggtaagtttccgaaatcaaacttttcaattcattctatgtacgcttagtggtcctcatttgttttcacgtgcttctattatcatttcatttactgtccgtacccccttttgacgtgctttattcatttgcttaagtcattttgtcgcctaatcaaatactaacataaatttccactgatcgcttgaattgtaatatccgataatttctgttaaaatgaaatc

SEQ ID NO: 1055 - DNA, 446 bp, Glycine max
gctctctaagtgaaatcaggtgcagccatctccctaagagtcctctcaaaaggtggaggttgagccatgttctcagtatgaaaattagtagtcgaatgctcaaattcagaatgttcagaatcaccatcaacataatactcagaatgcttaaaatgctcaaaatgcacagaatgatcaggatgcacactatgcctaagtaatccatgaaaggttctatctatttcaggaagggttctaaatcacctggattgcccctagtcatgcattatatgcagcaaatcatgtgtttctcaaacaagcaccagtggagggttaaaactacaactatagtcaaatgatatccaaatgagctgaaattttatgagtaacaccctaaaatcatgaaaagatagaacaaaaatttgcagactaaaattcactaactatgaaaactgactaaagaaagt

SEQ ID NO: 1056 - DNA, 204 bp, Glycine max
tgctggtggagcttcgatgtatgctgaatctttgagcttcaatgaggtccttcaatggtgagtgttcaccatggacacgccacggaaagtcataagataagaggataggggaggcacctttcactatggaataatccaaggaagaaggagcttcaccaccaataattgccttggataaaaaacttgcacaagattctttcctgg

SEQ ID NO: 1057 - DNA, 369 bp, Glycine max
  unsure at all n locations
agcttctagtcgtgcatagaccttctctngggtctgactatcaaacgttgcatctgtgcattcatcgcattcactaacagacgttgagcgccgtccaactgatggtactcgtgaccaccaccacctgctacagccataatttaacaggaaaaaaaaatgtgcaataaaaactattaaggtttcaagacctcacaacactctactcacgtctgttagatgtgagtacactcgtgtttaacgctctcaatatgctatcgtgaaatgtattccctcttgccttttaccactcgagtggactcttaagttcctggatggaccaaattacacacacatggtaatatttaatcagaggagagactatatgatgat

SEQ ID NO: 1058 - DNA, 441 bp, Glycine max
agcttgcctcaaagaggtccaggattgataatgttgccgaaggaactagttccgctcccgagtatgacagtcaccgctttaggagcgctgtacatcagcagcgcttctaagccatcaagggatggtcatttctccgggagcgacgcgtccagctcagggacgacgagtatactgatttccaggaggaaataggtcgccggcggtgggcatcactagttacccccatggccaaatttgatccagacatagtcctcaaattttatgtcaatgcttggccaacagaggagggcgtgcgtgacatgaggtcctgtgtgaggggtgagttgatcctgtttaatgcagatgctatcggccagctcctgggatatccgttagtgttggaagagggccaggagtgtgagtatggccagaggaggaatcggtctgatgggttcgatgagg

SEQ ID NO: 1059 - DNA, 407 bp, Glycine max
cgcatgataaatactgggacagtctcaaaccctgatgtatcagtttcagatccgtggagccaatgcgcagtgggacaagtagagtcgctaaaatcattggtcagactcctacctatgtgtgcctcgggcgtcttgatgatggcgtcccaaggctcattctctaccctgcaagcaactaccttggaccgaaagctatttggcaatttcaagatgcctgcagggtccttcaatcttatcatgatattgaccttatcaatagacattcccttgtatgaccgcataatggtacctctactagccaaatacaggggcttgccgaatggattctgtagtaaaactccaattgggattggattgctgtttgtatgcgcagctaaaggaacatcagctgtagttgaaactattag

SEQ ID NO: 1060 - DNA, 430 bp, Glycine max
gttattcgcgcatattttgctcggtgcgctccatcatacgatccatgacacgccatgcatcctatctgcggaaaaacacaaaatgcttagcgtactaatcaccgtagcttgttaacatgaacgtattaataaatctagtactgcgctcactcacctatgattccggccctgagaagaaaatgaatctggaaaatgagaaggcaacaacaacagcgcgtgacgtaaactcttatgataaggggagagaaatgagattagacgcttacgctatatagaacgatgcattgccgttctttagagatgacgtgacacactaggtgacctcttttgcaaaactaaatttggggcccttgtactaggtactataccttacaacgggttttcggtgtaatgttttctaagatttacagagagttatacatattgttct

SEQ ID NO: 1061 - DNA, 380 bp, Glycine max
  unsure at all n locations
atcaattcatattggatgcactccaacttgtaatgatgccctattcctttcctcagagactgatgccatgacaccgtcaccctttctttcagaattcagtgaaaacccctctctcttgtgacaactttcgcgccttataacgacattcaaatgttctaaaaattaattggagagtgaagaacaaacctcactacgtgataattgttcccccatccgggccttgtgcaaacattcatgtgataagattttgaaagtgggaatagtagatcgaggccacctaaatggaaattgaaaaaagggtgtcaggtacaattatcacacactnttttacaatgatatattgcttagaattcaaaacattcctaatgtacacaacaccg

SEQ ID NO: 1062 - DNA, 439 bp, Glycine max
  unsure at all n locations
agctntgtttcatagatacatatatacaactaatataaaatgtaacaaaaatgatgaatgaagataaaaaaaaatattggaatgaaatggctatgacaatgatgaagattaacaaataaccacacgaaatattcaacacaattcatattaaggatcaggttatgaatttcaagactattctcaaataaacatgacatgatataacacatcagtattgcttatattagtttactttaaatgtagccttatggtgaagtaagtaggtcctttgctgtaagatggaaggattaactagaagacacatggcatctgttagatagtaatgacagcatgcactatgttatatgcaacaaagatctggtgaacccaactatactggctggatggacaaaactcggagatttctatggactcacaggatatcatcaagtgaccatga

SEQ ID NO: 1063 - DNA, 410 bp, Glycine max
ctatattttcagtagatgaatatgaatccgcggccacctcatgtactcctctaaggacaatagcatcatttgttgcactgaattgttaggagttggaagccatcttctcaatcaaactcctagcctcagcacgggtcatatcaccaagagctcccccactagcagcattaatcatactcctctccatgttgctaagtccctcatagaaatattgaggaaggagttgctcagaaatctggcggtgagggcagcttgcacacaatttcttgaatctttaccagtactcatacgagctctctccactaagatgcctaatgcctgaaatgtcttttctgatggcagtggtcctacatgcaaggaataatttctgcaagaacactcttaacgtcgtccaagctgaaaatggacct

SEQ ID NO: 1064 - DNA, 432 bp, Glycine max
  unsure at all n locations
agctatgcggatttggtcttcgccagtgaaatgttcgaagtggatctganaagaggcaaatttaatcatcctgcttagacgaatgagaaaactgcggcaaataaagagggtgaggatgagggagaaacccatgctgtgactgccattcctatacggccaagtttcccaccaaacccaacaatgtcattactcagtcaataacaaaccacctccttacccaccacccagttatccacaaaggccatccctaaatcaaccacaaagcctgtctaccgcacttccaatgacgaagaccacctttagcacaaaccataaaaaacaccaaccaagaaatgaattttgcagcgaaaagcctgtatgattcaccccatattccggtgtcatatgctaacttgctcccatatctacttgataacgcaatggtagccataa

SEQ ID NO: 1065 - DNA, 422 bp, Glycine max
tctatataatctgaaccattctatcaataaacacacgtcgagttgtattcagaatattagagtttatctcttattatcttagtgagagtgattctcctaaattcttgagtgattcaagaacaccttggctgtatcaaaggactttcacaacctttgtgtgttgccctcgctggaaagagtgattctttctttactttcatcatcacccttgttctttcaaatcacaattccagaagatccacctctgcccagagatatctcgtggccataacttccattttacgcactcaaattaagagattcttgagcctatattgaatttcaaaacgagacccttcacctcgttatggaatcacctcatttggagccctgtagcttcagtattgccatttctatatttctgtccagccaccacttaacct

SEQ ID NO: 1066 - DNA, 435 bp, Glycine max
  unsure at all n locations
agcttcataaatagactgaatcaaggagaaaattatcgtcgacccccanaacataagttatttaacaccacttgtcacgttgttgactagttaatagagtttattatgtttgcatgaaagaacatgtttctaaatgtattaaaaagcttgccctggaaaaatcaagttatgagtatggactagagatgagatgcaaactgcaatcaacatagggtacaataacaaggcttgttctagattttttttttttggaagttgaataaagtttaatctagttgtctttttacaggtatgctttaggtttacttagataagacatgaaacagaaagtgaccactcttgattaactagatattgaggcccttgtaaaaggtactagaccttacaaagtttttcgcatttaattttctctaaatactatagatatttgataca

SEQ ID NO: 1067 - DNA, 428 bp, Glycine max
  unsure at all n locations
ntgatctagtgtaaaattaactttccctanaagataaaacattcacaggtccagatgattaccgaatttgtaagaacaacaactaagtcatcttgaaagtactcaaacagataatagtgcactatagcttccctcagagacagaggccatgaaaccttcaccctttcttccaaaattcagtgaaaaatcagcattcaaaagtgaaaacttttggcatggtaaaggacattaaaatgttaaaaaaattaattggtgaaggaagaacaaacctcactagtgataattgttccccaatccgggccttttgcaaacattcagctgataagattttgaaagtgggaatagtagattgaggccacctaaatggaaattgaaaaaagggtgtcaggtacaattatcagacactnttttacaatgatatattgctt

SEQ ID NO: 1068 - DNA, 442 bp, Glycine max
agcatttacaatgattaagatatactctttcaagttttttggccataaattagtctgggatctcaatcaagtctcgagactcttgaaggtcaatggtctttaaactcacgaggttctgtaaaaaaaataaaaatacatcacattgaccataaatcattaaaataaaattcttagtatacattgaagctcatcatcctaggtgtggctcttgtgattgtgaatgagtttcattcgagtaagcaaaagactagttaccactttgtcttacgattctctaccctacctttgcaaatagaaagaaaaatgtagtatgtatattcacaatcatacctgaaccccatcccagagctttttgagcttgctacgaggcatggaaatctctacaagtcgttcagcgcagaagttatacggcaaagactcaagacaacattcatgccaatga

SEQ ID NO: 1069 - DNA, 450 bp, Glycine max
gagctttatggaggctggatctttgagcttcaatgaggtccttcaatggtgattttccaccatggagatgcagtagaaggcaaaggagaagaggagaggagaggcaccatccactatggaataagccatggaagaaggagcatcaccaccaagaatgtgccatggataagaagcttgaagatgatgctttaatggaggaaaagaaagagagaaggggggagcacgaaattgaaggaataaaagagggagagaagtggaactttgaagtatgtctcataagacgtccattcatcaaagttacaacaagtgttacacatgcttctatttatagactaggtagcttccttgagaagctttcttgagaaaacttccttgagaagcttctttgagaaaacttccttgagaagctagagcttaactacacacacacttctaataactaagctcacc

SEQ ID NO: 1070 - DNA, 448 bp, Glycine max
  unsure at all n locations
agcttctcnncctatttgctataaatagggggatatgtgaagataaaaagggttcagccccttaggcacttctctctctctcgaaattgctgaggaaaattatttccgtgaagaagaaaagggttcagccccttaggcacttctctctctctcgaaattgctgaggaaaattatttccgtgaagaaaatccaagcagaggcgctttcgtaacgtttccgtgagtaattacgcgaagattctcgaccgttcttcaagattcatcgttcgttcttcgttttcttcagtcttcaacgggtaagtacctcaaaccgagcttttcaattcattctatgtacccgtggtggtccacatnttgtttcatgtatttntattctcgttttcatttgctttttataccccctnttgacgtgcttaagccatttatntaagtcatttctcgcttaatct

SEQ ID NO: 1071 - DNA, 107 bp, Glycine max
tgctgactgcaatcatcttcgggtacatttacaaggctggtagtagaaatcttgtaaatggaagtcgagtcaaccttgatgcagatgactttatacacgcatgcttc

SEQ ID NO: 1072 - DNA, 384 bp, Glycine max
tggatctgactgccctgctttatgtgatatacataattgggtataaagacgactagggcgcagtaactgacgtttgtttttatatccaaattgtataacctgtgataaatcatttaaagccattggtcctttattattcattatatgatcaattcttttaccacttctagattgtgagtatcaatgattattcatgatcacaaagcatatgccaaactcagatgatagtatatcaaattactatacttctgatcatgagggcgagccctggtgcatcggtaaagatgtgcctcggtgacttgttggtcatgggttcaaatccagaaacagcctctttgcatatgcatgggtaatgctgcgtacaacatccctaccccatacctt

SEQ ID NO: 1073 - DNA, 318 bp, Glycine max
agctcctgcctcagttaatactcatccgtggctgtgtgatcagcttttagaagatggccacctaggattcttgtgtgcattttccacacgcaagagggttaaccgaaacacatccagcatctaagtcgggaatcgaagttcatggaataatggccgacattctcaaatgggtctatactagattgccttggatgagttgaaactgtcggtgcattatctgaaaatgtgcgtgccctgtaaaggaccatatggataaaggagctgaccacgccatacttatacagatgtacttgtgctacctacttttccctgattacc

SEQ ID NO: 1074 - DNA, 356 bp, Glycine max
agcttgaggtctggaagcagtgcttttactgtttctggatgctatctacaataaaaagaacccatcagtttattagaccagaagttattaagattaaaacagaaaataaaaacgaaaattggcgatgtgcgcttagcgagatgcagctagcttagcacgccttagtaaaaacaacacaccggcttagcgcaatatggttgcgcttagccagtcatgacaaagaaattttctctgcataattggctttgcgagcagtgctagcttagccttatgcatgccgcaacgaatagtgcttagcccatggggatggcacttatcccgagcaacacttccaaaaatttgactatgtaatctgg

SEQ ID NO: 1075 - DNA, 252 bp, Glycine max
tgctagctagggttaatctcaaagcttcataagcatatccttgtcagaggactgtctttagtcatcatatcaggatgattctctatgtgaagcttgccctaaagggaaacaagtgaaaagccattgctataaccaaaaaataccgtttgcacttctacgcccttaacgcctatgtggcccaactataactacatccctctctggacacatatatggtttggtcatcgaggactattacaccagatggacatg

SEQ ID NO: 1076 - DNA, 412 bp, Glycine max
gttgcttcctccagaaggcatcgccttctggggaactacctggaaggccctagtgggcctggtttctatttgcaccccctatttactaaatacacccccttacctttttttgctgattctttttccgtaacgatacggaactttacgaattacgtaacgatacttgttttctattcgtaatgacacgacaccttacggattacgtaatcatcccttctttatcttacgaaatgttatgatactttacggattgcgcataaacactttcttttgacttccgacatgtcacgaaacttcacggattgtgcaacagtgcattctttagacttccagcatgtcacggaactgcacagattgcctaacgatgtgtgctaactacctacgagtggtcatacgagggtctcatcccact

SEQ ID NO: 1077 - DNA, 382 bp, Glycine max
acacagaccaataccacaactttccttactcaaataccccagtaacattgtcttcgttccaatttgttcaccgttggatcgactcgaaaattttactggaggtccctagtacataagtctacattttgaccgttgggatctgctacaaaacgtccataacccaatatgtacaaccctttccacaaccagcaatgcataagcattttctgcacaagcacaaaattatgctgcacatttcaacagcaaaattctgcataatagtgcagattttcgaaatcactcttgccttcttccaatgttgcccaaattggaccctacaagtcctatatcaagtataaatcatacctaaaccacagacaagcttcagaccaaagcaattcaa

SEQ ID NO: 1078 - DNA, 434 bp, Glycine max
  unsure at all n locations
agcttgtccactacttgaaatgacttagtntaatttataaataacatgccattgcagataagatatacttatattcagttctgtagatgttgtttgcgctgatctcccattagaattagagttctaccctgataatccatcttagtcctttaatgcagactatattttgtagattaccaaaaatgaaactctgattctaattgaataacaacatcaacagccaacaataccaaacaaaccttatctaagttttattcttgaaaatatcacccgtgatcacaagttcacagctatgatattgccataattgataaactgacctgggataagaaatggctggatattatctcatgcgatgttaatgaaccagacaagttattattccttactccaccaagctaagaacggcccactagtttgattttcaacacatg

SEQ ID NO: 1079 - DNA, 440 bp, Glycine max
agcttctttgagaagctagatccttatctatccatacccctctattaactaaattaatttccttaaaaataattacggatgaaaataacgcaacaaataatcaaacatcaaacataattactaataatatatagatatatatatcagggtgttacatcagcacctgcacaacctaaggcgcccgcccccatccagagggaggctccccaagctccggctccaaccacgactcgttctgtcggcaatgcctactttggatccggttccaatgccatgaggaactttcccccgaagccaactccagaattcaccccactcccaatgacgtacaaggacctctttccgtccctcatcgccaaccaaatggtcgtaataactcccgggaagatctaccaaccccctttcccaaagtggtatgatcttaatgcaacttgcatgta

SEQ ID NO: 1080 - DNA, 432 bp, Glycine max
  unsure at all n locations
agctntgatattatgataattattgctagaagatctcatgccatgatttggaattcctattgactccagtggagtacaatgggtggggcaacattcatcaatataacgtggaacaagtgcacccagtcaaggttatagaggactgaggagaccatacgaacatgttgccttaggagattgaggagtactgagagcttcagaggcaattggagaagacgtctgagaaggagagtgagattcttttaaggacgcatcttagatagttcagtactcttggtgtgataagtggtctattttagtcctagttttcttcattgattttgatgtattctaagagaggtttctccacatatatgtattttgttgaagcaaagatgtaaaaattgattctgcttactttcatattatcatgggttgcgttcgtattatttc

SEQ ID NO: 1081 - DNA, 436 bp, Glycine max
  unsure at all n locations
taagctccttcaactgcacaatgctcttaatatttgaagagtgtccttgtggaaccttcacccgacgaagacactgacaaaaacttatcttctccttcttggacaaagtatggcgggctgggggtaagtaaattatcttcccatcagaccttggatgcaaatgtgattgtatacccatatcagctaaatcttgacaggtattcaagccatccttcatcttgccttgaatgttcatgagcgttccaaccacactgatacaaacatttttctccacatgcataacatcaatacaatgtctaacgtcaagattacacctgttcggaagatcaaagataatggaccttttcttgcatatgcaactctgacttttatccttcttttgagtacttccaaatgcagtatntaagtgatgaacccgctgatatacctgctcacc

SEQ ID NO: 1082 - DNA, 456 bp, Glycine max
tctgagtcacctgccgcatgcaagctgaacccaaccgatgagttgtgaacttttactgtgagtgaacgactagctgtgactaataatctttgcatcaatttgtgaattttagaatgaaatttataaatgaggacttgatgaaggccatgattgtgcatatacaagccttttgaccaaaaagcttaccttgaattataattgtatcatttgcaccctttgtgagctgaatgattttgtcaataattgaaccctaaacctgaatgattatctccagataccttgtttagattctaggagagcatatggttcaaggcattaccccaaatttaggggagtggaactaattgggatgcaaagaaagagataaagcatcagcacacaacaaataagttgtgtgttaaaaaagaaaaaagacaaagaaagcaatcgaaggaaatgtgtgttgatgtaataagg

SEQ ID NO: 1083 - DNA, 432 bp, Glycine max
agcttatgagcatgagggttagccttttcttgactataaaaataacgttgtttagttcccttgcttactcccataataccaggagccttgtgcatatcgctttttatacataagctaatgagtttctgttgtaacaaaagtgtttgcactacactatttgtcactacattcgcggtacgggctaaggctgattcatttatgcaggttgtcattggtcaagctgctgtgcacaggtgtaatgcaactgtcaacttccttgatgaaacaagaccttcatatcctgcaactgtaaataatggtgacttgcacaagctatctgttgatgtagctggcaatttgcttggcaccaataatgttaatattgacaagacacctatcatggccgctgaagactatgcattctatcaagaggtcatacctggctacttcatc

SEQ ID NO: 1084 - DNA, 433 bp, Glycine max
agcttcggaagatagtgatgaggtacattccctataggcagagcttgaaagagcctgcgtagtcgaagagaagttcaagtccatagccatcaaagtctgaaaagagtatgatgaactaagggatgtcaatatggccaccgatgaagccttggaatgagaaaccaagaaggcccgaaaggaagaacacgaccaaagcaaagttttgaggggctttatagggcagcaatagtgagctcaaactccgaagaggtgaaaagaatcatcacgggtcaaaggcatgatctggaaggacgagctaaaagcttgccttaggtcgaaaagaaatttgtcccaacagttaaagtgagactgaagggaatatgtgggccatcatcgatgagtgcaaagagaagctaaatctagcggcaactcacgagcaaaggctataggatga

SEQ ID NO: 1085 - DNA, 428 bp, Glycine max
  unsure at all n locations
ntccactcctttggaagatcattatttgcttgagtttcatagtcttgagaatcctcattgctttcatctcttttccttttagaatccctttcatgattatgtatctcttctaagaaatctgaaacatcatctaacacattctttcttggagaaataacattagactcatcaaaggaaacatgaatggattcttcaatattcatagttctcttattgtatattctatatgctttactatgcaaggaataaccaaggaagattccttcatttgccttggcatcaaactttcctaagttttcttttccattatttaatacaaaacatttgcaaccaaagacatgtaaatgtgaaatgtttggttttctaccattgaataattcgtaagggagtttctttaagatgggtcttattaaagccttatttaagat

SEQ ID NO: 1086 - DNA, 442 bp, Glycine max
  unsure at all n locations
agcttgcaaatggcattatacattaccatgtgactatttnttttgttatatatcagtataccatgtgaccacgagttcaaactcaatttaagccaatcacggtagaagattttatgggtaaaaatagtagaagaattaatggcaagatgattgattggtgtaactacaataaacagtccccccactttggctttaatctgttntttttttttttttcaatccttccactccaaagtagtcatgcaatatgccaccaaataggagaaagtctgcaaatctccttaattactggttggcaagtggagtccatttgacccaccttacctgagcaatggccacagctacttgtccttttcaagttctgggtaaaagggtgactcttcatgatcatatcccattggatatcatattggcctaaaagcataaaatgacataacatcta

SEQ ID NO: 1087 - DNA, 455 bp, Glycine max
  unsure at all n locations
cgaaccanaaccggtgaaagtgtgattntaaactgtgagtgaatgactagctgtgagtaataatctttgcatcaatctctgaattttagaatgaaatgtataaatgaggacatgattaaggctatgattgtgtatatacaagccatttgaccaaaaaacttaccttgaaattataattgtatcatttgcaccctttgtgagctgaatgaatttgtcaataattgaaccctgaacctaaatgattatctctagataccatgtttagattctaggagagcatatggttcaaggaaaatttaccccatatttgggggagtggaactgattgggatgcaaagaaaaagataaagcattagcacacacgacaaataagttgtgtgttaaaaaaaaagcaatcagagaaaatgtgtgctggtgtaataaggtcaaaagcaaatgaaagtgaaaagctagtg

SEQ ID NO: 1088 - DNA, 422 bp, Glycine max
agcttcaacattcaatgtcaagcgtctcgatatattacgggactcaatcatacatccgagtaaatagttattgtcgtttgaattggctcagagcttcaacattcaatttcgagggtctcgatatattacgggactcaatccgacatccgagaaaaaaattattgtcgtttgaattggctcagaggttcaacattcaattatgagcgtctcgatatgttacgggactcaatcagacatccgagtaaaaagctattgtcattcgaattggctcagagattcaacattcaatttcgagggtctcgatatattacgggactcaatcagacatccgagtaaatagttattgtcgtttgaactggctcagaggttcaacattcaatttcgagcgtctcgttatattacgggactcaatcagacatccg

SEQ ID NO: 1089 - DNA, 406 bp, Glycine max
agcttcttatccaatgctcatcttggtggtgaatttccttctattctggtattagaacgagtggatggcgcgtcctatggaatataatactacttattgggctgctgtttctgagaggaatggcaccataaagtgacctcattatggctcaaggattccaccttttggtcttccacaaagctgatgcttaagctgacaattgtgaactgaatgcaatttgagccaatgtcctttatggtgactaacccaatacttgtattaggtgtatcaatttatacttgattgcgtcattatttagacagactaaactctttaaaattgtaataaagaggtgtgatatactcctaccttagggccatgatacaacggcatatcttggacttttctacttataacatgggcttgt

SEQ ID NO: 1090 - DNA, 464 bp, Glycine max
tgagctctgatggtgcgcagcccaccatcttttcatagtagagtaccgattatgtgtctaccatcacgattatcgtctccctttccattattgggggtaccacctgagccgccagatccctccaccttttgggcgtgttctttgaatgatccgtccccctttttgcacatgttctgtagttgcatcctatccggaaccatatcacaattgtactgatactgcctaacaaaggcaaccattaggtccttccaagaatggactcgggaaggttccaagttagtgtaccaggtaacagctaccccagtaagactttcttggaaggaatgtattagcaattcctcatcttttgcgtattcccccatcttctgacaatacatctttagatggttcttgggacaagtagtccccttgtacttgtcaaagtccagcaccttgaacttgggaatgaccatgtttgggtatta

SEQ ID NO: 1091 - DNA, 449 bp, Glycine max
ctgcagcttgcaagtttaataaagaaactcttaaatctctcttttatctttagatttaaacatgttcttagttacattcaattgtgcatcatcgattcgttttgttattcctagcgaacattttgttttatattgatgattcacaactgtgtaggtaattgtcgttgataaagttttaaccttcatttttcacatcccctatatttctagtcttacaaaatgtcatttctcttgtatctattaattaaaacaaacttttattaaaaaattattatgagcgtgtttcgatccgcaccaaaggcccttggacgtgcgtatttcatggtcaaacatgagaaagtcagttgaccgtgatgtttggcttctccactatactcgattcacctcgtcgaaatcgattttgaagcacagcatggttgaggcagcttccacgtcaagttaaaattgat

SEQ ID NO: 1092 - DNA, 436 bp, Glycine max
  unsure at all n locations
ctctgttaattgaaagtntaaaatgatgcttattaaggaagtatttgttaattgaaatctcttttaattgaaagtttggaacgatgcttagtgttgaattctggcaatgctaaggtggtcctctgaacatggacaaattatctgttaatggaaattctggctccttcaagggtgggtggagggttctgatactgccttttgagtagtgggttttgttgtggccctttagagtaaactctcacaatttcacaatccgattctacaaataaagtttatggaacttccacgattctacgtaaaatcgagagtttaacaaccatgattggaagtatccgcgctctctatctctttatataccccattaataaagataataattgttgatcagcagactgcctgcgttaagtgtgattactgctggaaatgcagatattat

SEQ ID NO: 1093 - DNA, 425 bp, Glycine max
atttatttaaacctcccactgggcattaagttaggcctacttggttaaaaggaaaaatatatattttttcatagaatggggaacaactaactcaaattaatttacaatgaatatttaaaaatgtggagtgactgagttaaaatggattcacttaatcatgctatatcgagtgactgagttaaaaatttagagctatatatgtcgctagacgcttatcaacagtatatttatctggtttataaattaaagtaaacgacaagaaattacttcttatacattgtgcctacgtgcaatcacaacgatacaaaattccatattataagaattgcgagtataactatgttttcattgagcatttatttattaatggtattgtgctacggcatgtgaggctgtgcgacaagttcatcagatataaatattgt

SEQ ID NO: 1094 - DNA, 192 bp, Glycine max
tgaagctccatagctacgattgacgccaatgactgtaactaacatgactaccatactggacaggactgcctccggatggaattgaggctatctaatacatacaccagattgaactcatgcaagctgttcacttgtcgcgcatgtagaggctgctgtagacgcagtgaacgatgattcttgactaaatgatct

SEQ ID NO: 1095 - DNA, 429 bp, Glycine max
  unsure at all n locations
agcttgangattatggggtacccgtcatatgtggtattaggtggcgatcgggcgatggtgaaaatcaactatcccacatccacgaatcaaacatgaactcaccatccccagttgcccaccttcaactaagctcacgtactcctacgtagcccttatcctcgttcctttcaacaccgggtcctcatcaacccctccaagcttccacaatatccaagcgattcaatttccaaatatcatgaactatcctaaaccaagaaaacagggcagaggcagaaaactctgcccaaaacacattcacatattacaactgtccttactcaaagaccccagtaacattctcttcgttccggtacgttaaccataggatcaaattgaaagttttactggaggttcctagtacataaatctacattgtgaccgttgggatct

SEQ ID NO: 1096 - DNA, 334 bp, Glycine max
agagatctacaaacattgttgtgcctacaacactactactaacgaggaatgtggtagtgtattacaccgagtttgatgagtactaggaggaactcgagagaagactctgggatgagaagttaactgattttgcagacgatcgcatagacattgctattatgaaggaatcttacgccaacctctatgaccccaagggtaaatcacttattctggtgaaggtgagaggacatctaacgaagtttgatgaagactgcttgaacacattgtaggagaccccgatgactatggaagagggggagaatttgtgtgctgattccaagtttgcactcctgag

SEQ ID NO: 1097 - DNA, 439 bp, Glycine max
  unsure at all n locations
agctntacagcagatnttagtaatgacccacttttctagaattaaaataacttaatgccattaacctagggaattaaaacaaactaaatggctgagtgtaactgaaattgttggcaaccaaaagtcacccccaacagccaacaagtcagccaccatttggtctcccaaaaggctgatgcctaggttgccaattgggcccttattacaacttgaactaaagcccttttagttgattaacccaaaacatatttttggtcagccaactttacaaggattgggccattatttagacaaactaaacactctaaaattgaaataaagtggtgtcatttagtcctccatttgggccatgatacaactcacaaccttggacttttctccttgaaacttgggcttgtattcaaatagtatggacagcacttgttgaagagcgtccttg

SEQ ID NO: 1098 - DNA, 380 bp, Glycine max
aggctctgagcaaattcaaacgacaataacttttgactcaaatgaccgcttgagtcccgtagtacatcgagatgctcgtaatagaaaagggaagctctgagaaaatgaaacgaccattacttataactacgatgtcggatagagccccggaaaatattgagacgctcaacattgaaaacagaagctcttaggatattccaacgacaatatagtttgactcggatgttcgactgtgtcccgtaatatatcgagactctcgcaaatgacaagagaagctctgcggaaattcgaacgacaataacttctgactctagtttccgcttgtgtcccgtaatatatcgagaggctcgttatagaaaagggaagctctatgataaact

SEQ ID NO: 1099 - DNA, 149 bp, Glycine max
catgcgtgctgggattgatctgatgcctgccttactaacgccatagacgtactcttatcgacatggctccccatcgcactcaagtgcataacatgggaaataaagagagagatagctctatacactacggactatggcgtagagacctg

SEQ ID NO: 1100 - DNA, 376 bp, Glycine max
catgagctagtgaacactctcttcgacatcatgtctgtgctcatataagtgatcatgacgtgcattgagatgttcctgctcaactcgcacgtcgtgcactgtgatacctcgctcctgaagacgcttctttctgatcttcgatggcactacactcttgaggggaacattctgaagaactgcctaccttgtcttcatgtttcctctgacgctggttacgatctttggagaggttggacatacctctcctgaagatatgatacgcattgtacctcacttgtagacagggaaccaagtcacagacacccctccatgctagcccagagttggtcccaattagcctttcattttctacgcacgagcagtgaccttgtggcgg

SEQ ID NO: 1101 - DNA, 438 bp, Glycine max
agcttatcgagaaaagaaattgtataatgtttgtttacaacattgttaagttcaactaaaaccctttgtagagcattattcccaagtgctgtaagaccaactgtaaaagaaaaaaaattaaacacttgacaatggatgcatgcactactatcactataccagctagcttcattcgtctctttcaagcatctatagcaattctttgcaataaaatcttgaaactaacacttggacagctagatctaaccgttgttgtcggagtgtgaccaaattaatggttatatttattatgaataattgaatattaaaatactcttggcagtgcatacctacaaagctcacttgtggacaaaaacattacgggtcttaatggatagataagaattaaaatcaatcaaagtaaagatcagggaggatcatcatcaattttcagcaccc

SEQ ID NO: 1102 - DNA, 447 bp, Glycine max
tacggacctatgatactcagcttgcttccacaaatagtctcggccgaaagacgctgacatcttctggaaaggtgcagatgaccacattggtctctgcgtgtcatcggacttggggtctccgaataacgaggtgcggataaccgtaaagtgctctgcatgccatcgaactcttgggtcgctggatagcaagaaggtgacactaaatagtctcagtcggaagacgctcacagctccaggaagagtgcagattaccacattggtctctacgtgtcattggacttggggtgtccgaatgatgaggtgctaataaccgtaaggtgtctccgcattccaccggactcttgggccgctggatagcaaaattgtgagacaaaaattgtctcgaccggaagatgctgacatctctgttaaaggtgcagatgaccacattggtctccatgtttcatc

SEQ ID NO: 1103 - DNA, 436 bp, Glycine max
agcttccttgagaagaacttaactacacacacttttctaataactaagctcacctccttgagaagcttccttaagaaggttcctagagaagctagagcttcactacacatacccctctaatagttgagctcacctccttgagatgagaagttagagcttaactacatacaccccctataatagctaagctcaccctcatgccaaaatacatggaaaaacaaaaaagtccctactacaaagactagtcaaaattccctgaaatacaaggctaaaaccctatactaatcaaatggccaaaatgcaaggcacacaagaaggaaaaacctattctaatatttataaagaagagtggacccaaccttggcccatgggctcagagatctaccctgaggttcatgataacgctagggccttctgttgcagctctagcccaatc

SEQ ID NO: 1104 - DNA, 429 bp, Glycine max
  unsure at all n locations
tcaagaatcngatntcacagaatcaagattcaagaatgatcttttttcaagattcaatcaagcttcatgaatcaagattcaagagcaatcaagatcaagattcaggaatcaagaaaagactcaatcaagataagtactaaaagtttttcgtaacattgagtggcacaagaatttttcacaaaatctttaacgagagagttctactttctggtaatcgattaccgagagccaacattggttttcaaaactgatttacaaagcttgtaatcgattaccatgagcatgtaatcgattaccaatattgtaaaatgttagatttcaaatctcaagagtcacaactagtgataaaacattgtcaaatcattgtaaacttgtctaatcgattacacaatacttgtaatcgattaccagagtttctaaacggtttga

SEQ ID NO: 1105 - DNA, 430 bp, Glycine max
  unsure at all n locations
agctngcttgtggggcttctatggaggctggatcttcaagcttcagtgaggtcctttaatggtgattttccaccatggagatggagcagaagacaaaggagaagaggtgagagaaggcactatccactagggaataagccatggaagaaggagcttcaccaccaagatgagcctaggataagaagcttggagaggatgcttcaatggaggaaaagaaagaaagagagaaagaaagagggggagcacgaaattgaaggaagaaaaagggagagaagttgaactttgagttgtgtctcacaagactctcatttatcaaagttacaacaagtgttacacatgcttctatttatagactaggtagcttccttgagaagctagagcttagctacacacacccctctcataactaagctcacctccttgagaagct

SEQ ID NO: 1106 - DNA, 429 bp, Glycine max
  unsure at all n locations
ntaacctcatcgtctctcacagtctttagatttgggagccaatccaatccttgtgttcggactctcagccacttatgatagccgccgatgatcccattacggcttcccctaagctctctgtcctttcttcacgccgcatcccatgccttgcgaactccttggagtaccctcgcgttgtggtcactgaaaccccgtgcgatgaaaggcgtgatgctttcgtctgatggcactcctctcatgaggtagccaagctgtcttatggcgaggacgggattataattaatacaaccccttgttcccatcaagggaacatttggacatccttcgcatgaagatagaatcctgattcttccttccttctagcgagggaaccaattaacagacgcccctccatgctagccaagagttggtcccaattcgcctttcctt

SEQ ID NO: 1107 - DNA, 438 bp, Glycine max
agcttgtccttggtttaaacatgattggtacatgatttgggacttgtatgtattaatttgggaaaaattggatgggggaaagactggttttcgaaatctgcactttatgcagaattttgctgttgaaatgtgcagcagaattttgtataagtgcagaaaaatgcttgtgtatggctggttgtaaaaagggtagtacatatggggttctggacatttgctagcagatcccaacggtcaaaatttacacctatgtactagagacttccggtaaaattttagagtcgatccgacggttaacgaattggaacgaagaaaatgttactagagtatttgtatgtgaaaagctgtgattttgagttgtgctttgggcagagtgtctgcctttgccctgttctgcttggttgtgttagtacatgatgatgggatgtggaattacct

SEQ ID NO: 1108 - DNA, 469 bp, Glycine max
  unsure at all n locations
ctaagctctgctgcaatattacaatagacctcctcaacctcagcagctaaatcaaccacggtagagcaattatgacctctccagcaacagatacaaccctggatggaggaatcaccctaacctcagatggtccagccctcagcaacaacagcagcagcctgctccttccttccaaaatgctactggcccaagcagaccatacattccttcaccaatctcacaacagcaacaacctcagaaacaaccaacagttgaggcccctccataaccttccctcgaagaacttgtgaggcaaatgactatgcagaacatgcagtttcagcaagagaccagagcctccattcagagcttaaccaatcagatgggacaatnggctacccaattgaatcaacaacagtcccagaattctgaatagctggccttctcaagctgtccaaaatcccaaatatgtcagtgccatatcattgag

SEQ ID NO: 1109 - DNA, 585 bp, Glycine max
  unsure at all n locations
ctgtacatccttactngactctaacctcactattccctcaatactaataactctcacaccactcaccatccgacgctgacacattgangaccgtcgaactgtagccgcgcactctatacatgctactgcgngcatgctagcatgcttgaggtgctgttatggacgctgtatttacaagcttcaatgaggtcctttaatggcgaatctccaccacggagatggagcacaagacaaaggacaagaggcgagagaacgctctatgcactagggaataagccatgtgaagaaggagcttcaccactcagacgagcctacgataataatctcggacaggatgctacaatggaggacaacaaagaacgatagatagaaagagggggagcaccaaattgtaagaagaaaaagggagagaagttgaacttcgacgtgcgcctcacatgactctcatttataaaagtaccactgaggctacacacgctattatatatatactacgaacgcttcttgagaggcatagacctaagatacacatcacgcttcttatagcgaagcgcacctccctcgagaagctcccttaacacgacg

SEQ ID NO: 1110 - DNA, 368 bp, Glycine max
ccgccgatgatcccattacggcttcccctaagctctctgtcctttcttcacgccgcatcccatgccttgcgaactccttggagtaccctcgcgttgtggtcactgaaaccccgtgcgatgaaaggcgtgatgctttcgtctgatggcactcctctcatgaggtagccaagctgtcttatggcgaggacgggattataattaatacaaccccttgttcccatcaagggaacatttggacatccttcgcatgaagatagaatcctgaatcttccttcttctagcgagggacccattaacagacgcccctcctgctagccagagttggtcccatttcgcctttcttttcgaccacacggtgaccttgagcg

SEQ ID NO: 1111 - DNA, 459 bp, Glycine max
ctgattgtattttagagtgagtatttatgtcaactacagtcttgctagggtcaccacaaccaatatatcaacctaaagtttatgagcacagtcatggtagattttgtacggacatgttattcacttgtcaaaattagtcctaattgaagatagtaaataggaaaagttgtaaggactacgaatgtggtaatcagcgtcgtcaaaattatggagcatgtgaagttaatgtcttgagaatgattactttttcttaagactgagagaagctagatcagttttttgaatttgacttctctattatcccttttcattctgtcccatgaaaataacattgcatgacatgacaattatattaatatttaattataacatttaattctaaaaatcatcaaaactgtataattttaaaaggacaacacaaggacaaggacaaggacagtacaaggagggacaatagac

SEQ ID NO: 1112 - DNA, 185 bp, Glycine max
acaaaagaggatcttttgcatatctatcttatgtaccggaagctccacattcattatgactgaattatcgctgatcacatgttggctacccccatgatcgtgtacctaatatgtgccttagccatatttaacactacgataactgactactacataattgatacccataaaacctttccagctgt

SEQ ID NO: 1113 - DNA, 612 bp, Glycine max
  unsure at all n locations
tctctctctaactaccactcaacactcgtcacataattctagtttatattgctataacagatacctgtgtatcgcatactcgcactctaactgcgcaactatctcacatccctacaccattacacatcttaatcactctatatctgttccacctactacactcgataacacatatttcttcttattaaacctatacatctacaatctctatgnaactgcgaatcaccctaacctcagatggtccagcccttaataacaacatcatcagtcctgctcacttgctttccaaacatgctacctaggcccaacacaagactcattacattccttcctaccaatcacaacaactagcaactaactctctagaaacaacacaacacattgaggcccctctataaccttccttcgaagaacttgtgaggcaaatgactatgcacaacatgcagtttcatcacgataccaatacctccattcatagcttaaacaanccgatgggacaattggctacccaattgaatcaacaacagtcccagaattctgaatagctgttcttcttaagctcgccaaaatccataaatgtcatgccatatcattgacgtcgctacacaatct

SEQ ID NO: 1114 - DNA, 394 bp, Glycine max
  unsure at all n locations
tgtgtaagttattatcattngaatttctcacgagcttccgttgttcaatttcgagcctctcgacatattatgcgcccgaatcggacatacgtgtgaaaagntatgaatatttgaatttctcgagagtttccgatgtttaatttctagcgtattgatatttataagcttgaatcggatatacgtgtgataagctatgaccatttgaatttatcagagctttggtgttcaattctaatctctctcatataagcgcccgatcgcgcattcgtgtgaatgttataccatttgaattacttagagttacgatgcttaattcagcgcttgtttatatttccttgatatccttcttgtataagttgacctctctgcctgcacatctctgtgatataatagg

SEQ ID NO: 1115 - DNA, 372 bp, Glycine max
aaagctctcgagaaattcaaatggtcataactgttcacactgacgtccgattcaggcttataatatattgatatgctcaaaaataaacatcggaagttctcgagatattcaaatggtcataatctttcacatggatgtccgattcgggcgcataatatgtcgagaggctcaaaattgaacaacggaaggtcttgagaaattcaaatggtcataacttttcacacgagatgtcgattaacgcttataatatatcgatacgctcgaaattgaacaacggaactcttccaaaatatagatggtcataacaattaccatgatagaccattctgggcctctattttcatcaggtcgaataaacaacctagctcttcc

SEQ ID NO: 1116 - DNA, 438 bp, Glycine max
agcttatataccaccagcatcgttgtaatagggctgttgatggaacctctccaaatgcaagctttccgcatgacttacggaaagatcttagagttgaccttagcagaggtatccatagaaaccattgcatcactcacccaatactacgaccagcctttgagatgcttcacattcggagacttgcaattagtaccaaccattgaagaatttgaggaacttctaggatgtcctctcgggggaagaaagccatatctttcatccgggtgtctcccctctttgagcataattgcaactgtggtctaggatacaacaagaggtttggaccgcataaaacagactcggaacggcatagcgggcctaccacggatgtacctagaagacaaggcgaggggtatggccaatcaaggagattgggtcccgtctatggatagtgtagct

SEQ ID NO: 1117 - DNA, 368 bp, Glycine max
atatgcgcatacttccttacatacgttgtgtagcacaagacattatattaaccgtaaaatataatgcccccatctacgatcaaggcagctccgacacctaaattatttacacgtacttgcaacgtgtagatgatacttacatcgcacacatgtccttggctaaattgacatacaagcatactcaaaacattttggggtacgcaaaattgcacactgtgcacattatggcatttcttaaacctagacatacactaactcaatgatgaatcttgactatctacacaatacggtgctacatgtcatgctcttttcacatttgtgctccctaacaccgcatgcaaattcaagtatatcatcctttgctgact

SEQ ID NO: 1118 - DNA, 494 bp, Glycine max
  unsure at all n locations
cgcgctgaccttgtgaccctgtgtgcgcgagcttaagacaacccagcatgctgcttgtttgataaagaacatactacattgtcgttgagctgaagagacccgcattacgtaagcctgtgtcttatatgacacacatattagcttgacttatatatggcaagggttggcgcatgaacatatatatgaacaatggatatgactgctacgtacgcctctctatttcatggacttgacatcatacgagttcttctctcccccttcttgcgtctaagatagctaacgaatatcactgacttatgcactgcgacaagaactgccatacactactgaactatcacaactctgagtccaacatataccttggttaacattattatgaacttctcaagccagggagaaccttgagcaagataccgagtaccgggatgacaatgacaaggatctgagatccatctttactggttctatactgtcatgatcactacgcacgttan

SEQ ID NO: 1119 - DNA, 222 bp, Glycine max
tctcaatatctgttcttgagtctttaacgcgctctgaccggttattgaagccgtgcttgtcgcctgaaagagtgataaaagaatacccaccgagcatatgtggtgcacactcatttactcactttacaaacgaactctggccgatcgtgcacgctataacctacgctaaaccgctgagaggaaagtatgcaatgtatcttgtaacatggttgttaactgatc

SEQ ID NO: 1120 - DNA, 423 bp, Glycine max
  unsure at all n locations
gtatgatacctgttaactttatgcccaccccggatttcgacattctcaacttgaaacagggtttaggggtgggggaacataacaaaagcgtttaatcggaatgcattgatagtttaagtattttataatgaaatgcaatatatactaatatagtcgcttttcctagcgattcttctaatacatatatttgagatgattatgtaaaaatcattatattaaattagtaatgtatcaaaactaaaattctaaatatatgttgaggcatgacttaatttatgttattttatcaaaataaactctaaaatttattttaagaagctttaaggtcaacactataatataaactatntagtgatactaaactcgctcattcatgattatttgtcgcgttacgaattcacttttactattaactcaaaaagt

SEQ ID NO: 1121 - DNA, 412 bp, Glycine max
  unsure at all n locations
ttcatgggctaagtaatataaaaagctctctctgatatagtaccagattgcttacattgtaaagcttcatacgatacatactanaggtacccaactttggccatatggtccaatattactaaacaatagaaagggatttataaagttatttctcagaactgaatagattagagctaaacgactatctattacctgagatatgttgatgacaattacgtctacacaaattttgaatatatgttcttctattgttgaaatcaattaaaaattataaaaatttgtcaatattattgcttcctaattaatactttctataattctataattgataatatgtgcgaactaactaataaaacagaatgttttataatatactaccatgttagaaatacttatatactatcagtttcat

SEQ ID NO: 1122 - DNA, 392 bp, Glycine max
agctagaccaatcctgacccaacccgggcatagttaatcagtgataacctgtgatgtacctaaacaggcgagctcctggcagtcaaccgataaggggaacaaagaccacaaagcatggaggcttgtgtggaggttggccagctgcgaaactttgattgatatatgggatatggactctggtaatcgattaccaaggggcgtaatcgattacaaggcttaaaaagtaagacaggagactaagatggtctctggtaatcgattaccaggcttgaaaactagatcatgaagcttggagggcttctcgtaatcgattaccatggcgtgtaatcgactaccaggcttataaatgagacttgaatgttgaaggagcctctggaaatcgataccaagct

SEQ ID NO: 1123 - DNA, 379 bp, Glycine max
tggtgaggtagccatggaaaagcagagcgtttggaatgatttcgtaaatttcagaaggctattgtgaaatgctggtaaaaacacgaatgccaagcagatataaatttgaatgaggaatgtatagggtcgtgtgaagcaacggtcgaattttccttggttcagtagtgaacgtgctattaatgttaagtgattcgtttgggcacgttcagattgctgtagttgctataattcctctagcacacaaatgcccagcttgcccctcagttgttcaaactgatttgcatccaaagcctttgtgaaaatatctgctattctgtcctcaatgtcaacatgcttcagcgtgatcactttatcatcaacaagatctctgatatagtgg

SEQ ID NO: 1124 - DNA, 449 bp, Glycine max
agcttcgtccgcagatccctcatgtaagactatgtctaaactattcaacattatgtaacaacataattaaaaccaaaacttaacccgcagatccctcatgtaagactaagttttgatcctgcttcaatcaagttctaaggcaacagtacatttcccaatgctaaagtcatctaactgtgaacacaaatgggtgatcagaccaaaagcatactaacatcaagcattgaaggaagcattgaacacagaatacacaatcaattaggtattaggtatttacatcatctgttcatttgaaatccccaactagggtgttccgccacccattacagaagagaccctatcaataattagcttactaaccctaggtatctctgcaaaagctgctcctcttgctacctccagagctcctttccctaaataggcaatgtggctgctgtggaattttgtgc

SEQ ID NO: 1125 - DNA, 459 bp, Glycine max
cgccacccagctcgcccaggcgagcaaggtttcttcctccagaagcaacagccttctggaggaatcttctggagggcccaagtgggtctggttgctatttgcacccccatttttactaaatacaccccctgcctttttttggtgattcttttttcgtaaagttacggaaacttacgaatttcgtaacgatacttgttttctttccgtaatgttacggaaccttgcggattacataatcatcccttttttgacttacggaatgttacgaaacctcactaattgtgcaacgatgcttccttttgatttccggtgtgtcacggaaccttacggattgtgcatcaatattttcttttgatttccggcacgtcacggaatttcacaaattgcctactgatgggtgccaagcaccttaaaaatgaccaaacacaagttgcatgccaccaagcacaggtccctgga

SEQ ID NO: 1126 - DNA, 461 bp, Glycine max
gtcacctgcagctgcagctatcatgccctcacacaatactttgtatgtatattacaccagagatgtttgtttcaccccaggtaaaacaatatggagttatcaagcatttgcccggaattcaaatgatgggtcaggacgaggctgaatgattattccatgtcctatggccaattgaacagtccctttgacaagtgtttcgcacaagggattcaaggatttatattctttcattttccccaagatacagagtgtcctatatgagagagacaggaattgtatggttaagggacagaccatcacccatgcaacagtccaccagtcatacatagacactattagtatatttctctcttacatcataacactgccctattcttaagagataaaaaagggaaaggatccagaatcaggacgcaatacttcacatttgttcataccaattcacattggcctctgctcaa

SEQ ID NO: 1127 - DNA, 449 bp, Glycine max
  unsure at all n locations
tatctggtcaaggtgaaataaaaatggtctttcaaactaatagttgccagattcaatattctatattttaatccaagtgaacacttccataaggtttggttcagtttctatcaagaacatacatcaaataaaggatgcacagcttttagataaaaagtttatgaactccaacatacctgcaaaagacaactacattcgactcgtttttttgatacactgccacaggtctttataacattcctgtagaacagcttctcaacaacaatgacattcagatggttgaaaatatcaaaaccagactgcttgagtttatcatatttatcaatatgaaatttatgaatgtagcgctgggcatatggcagagtccagtttaccaatgactntttcaaactacaatcagcaagaccataatatattggttcccgagttaccacctgcacaaagtcata

SEQ ID NO: 1128 - DNA, 457 bp, Glycine max
  unsure at all n locations
ctcatctttatttcgttcattctcgatttcttttcttttgtctttaacgcgcttttaccgtttatttaagccgttttctcacctaataaatgataaaatgaatttcaaccgatcatttgtgttgtaatctcattcaatcacttttaaaacgaaatctaaccgatcgttcacgctataacctcggttaaaccgaaaaaagtaaaataatcaaaatatcttgaaaaataataataaaataatcaaaatatcttcgaataaaataatcaaaaaaatcaatcggacgttnttctttggaagtttccttgaatgaattgattaataactaaagttaaattaagactaaaatcaactcacaaatcaagttttgtccgaaaaatcactaaaaaccgttttaaggtccaacgccttaagcggtcctctttgcttttatcggttaacatggaccgttcaaaagcat

SEQ ID NO: 1129 - DNA, 338 bp, Glycine max
atgacaatgcttaccaagtggagctggccggtgagtataatggtaattccaactacaatgtctctgattcatctctttgtgatgcatatggagaatccgatatgatgactaatacttctcatgacggagagaatgatgatgacgtgaccacaagcaacggcagggatccacttaacgacttgtatgacctatgacaagggctacagcaaggaaagcctaggacgctcttctacaattgctgtccatactatgcgaatacaagctcaagtttgaaagagaaaagtccatgttgtgacttgatcatggcccatatggaagactaaataacaccactttat

SEQ ID NO: 1130 - DNA, 414 bp, Glycine max
  unsure at all n locations
ttctacaatctcgagccttcanataaccctcctcaccttcttccgcatcattatcatcagtatgaggacgaatattacattcttctctatgccaaatttcagattgatctatccggttttcctcattgggctccacctcaatgctatccttttctgagctagcatggaccaccttatcttctgcacgtgcctttgtcttataaaccatttcagactcattaaaaataacatcatgacttataatgcatcttttgtgtcctggctctaaacaccacaatctgtaccccttaaaaccctgaggatatcctataaacatacacttgatagctctaggttccaatgtgtcttgccttatgtgagcataagcaacacatccaaacaccctacgtctatcattatttggaggatgccctg

SEQ ID NO: 1131 - DNA, 435 bp, Glycine max
  unsure at all n locations
ctcatctacactgtacttctatataatttgtatgacatagtgcatgatgtataatgatgcctatagtctcgagatgaggcatatacaaattgctatcttgaaaacctaagaccatgcccattaatgtgataaggggacataacaatcaacatgcaaaggataaatagtatacatgacaaacctgtactccaaatgtcggacactattacttggcttctacaaaagccaagtncaattaggatgtaccaaaaaataaagacctaaattaatcaacagtgaaacatcacctactaataaagaatacaccgacaatatggtagggaaccacacaaataaagttggcatttaaagtcaccaaagagatgaagagaaaacatatattgccatcatctgctccatcatatggtaaacacactaaagttaggaaaggaatga

SEQ ID NO: 1132 - DNA, 438 bp, Glycine max
  unsure at all n locations
agctttcttgcttcttagatntcattcctgttcttggttactgttatcgtccattcctaaaactgccacatcacaacttagatcttaattgaatttttgagcttaccgaaccatattaaataatttcagattagggactatactgattatttcaactgttgttttcatatggtgtttatttgtgcatgttaatctccctcatgacattctgttattcatcattgtatcaacgtaacaaagaaaacagtattattgtgttgtcgaccaatgccacaattaaagagggccaccctgtactatgatatatagttacttatgttgtctttctttcacaacaaatatgttgtttgattattttattatctatgtagttgtttggttattcatatttcttcctggtattgatttcttcagctggagacgagttcttcttacata

SEQ ID NO: 1133 - DNA, 380 bp, Glycine max
aaccctacatggagtgatttgctacatctaaatagtaataacatagacgtctgttatgccgctttaaacacttaaatattataaacatactcaaagagaatgctgctccttatctataattaagggttcaatatgctccttctacctgcttttaattcactctgattcattcaagtgtgcctactataccacatgactatattagatacctgtctgacagcttttctacttccactacctaactatattaattatgtgtcatgcagcatgactcatatattatcacgtgtcattaagatgacatagttagtatgcatggcaatattgacttgatctaatacggatcacagtgaatctttcaaaacttaagaccactttat

SEQ ID NO: 1134 - DNA, 380 bp, Glycine max
acatcttacatagcgagttgatctctctcttagcgcgcggccataaatcttgtgctcttccagatactctcatgctgctaagcacgctgtatctacgcttaacggtagatgctagctgagcccactggatccgcttatcgcgactgctccttgtggaagcaatgacttccaagagtattttgatgatgccaaagaatcaagagtcaagcacgttccattgaatcatgactctggttgctggaagaaccttgtttctgagattcacgattcaagaataatcaagtctcaagaggcaatcaggtctcatgaataatcaagaccatgagtcaagactgttgattcaagacccatgagaagactcaatcgggataagcactaaa

SEQ ID NO: 1135 - DNA, 333 bp, Glycine max
tgcctaacaggccaacttacaacagcatgtcccaagagtctcagctttatgatgcacataccaaagttgactatgtgaaaggatgttatgaccaagtgaaggtgccatttgtcaagaagaatgatggctatacctagcatgcctacatgatgatgtacgaagtggttcttgaacacgatgatgatcctgtacatttgatggctaatgtgcttcaagaatgatggaatgatgagaatactgattctgaccaaatacaggcttcaggcgcttgaggagatggacacacccctggagtggagaatgatgaatgcccatatggagaatgataatggc

SEQ ID NO: 1136 - DNA, 433 bp, Glycine max
agcttgtgatgttgttgttagttggtttggcctctggctctttcacttatagggacagtattttgtattgtgttatgttctgtaatttccttggctctggtacaagtttctaactaatgctctcatgaatgaaatatactgttattaggtgatccttgaacagataaccagttccccatggaacaactttttgttcatgatgtactatggcttggttatagaagctatgctcattcataaaatatgtttgaatttgtatgttacgttacgcctcaatttacacataataattttgaaatatttccattaaagcttaatgtcatcttttgttgttaaagtctcttctgctctgcacccgacatccctactcaaaacaggaaccattcatttttttgctcttccttaattacctgcttttatgtgtatatcatga

SEQ ID NO: 1137 - DNA, 436 bp, Glycine max
attctttacaatcaatctatctactgaataacaattctaaatgtaagtccacattcttgttctttctttgtttgacatgcacatttgctcaacttcatgaaaggaaacacaaatctcatcttaagcatgcattcaatttaaaacaaagtcatacacccgttttcacaaaaagataaaagtgtttcactgccatgtcatctaaaataagttaaactgttcaaaatgcttcaagataagcataataattattcatatataaaactagtagtatatatagacataaaggaaatactgtacgataaccaaaattataataataataaatcaaaaagtgaaaagtgtcaccaggaattaaaattcctgtgactagtcctgagtctcctgtgtttgaccatcctcctcatttgtcagctgaagaactggagtagtgggagga

SEQ ID NO: 1138 - DNA, 280 bp, Glycine max
gtatgacagtcaccgctttatgagcgctttacaccagtagcgcttcgaggccatcaaaggatggtcgtttcgacgggagcgacgcgtccaactcatggacgacgagtatactgatttccaggaagagatagggcaccggcggtggacatcactggttacccccatggccaagttcgatccagaaatagtccttgagttttatgccaatgcttggccaacaaaagagggcgtgcgtgacatgatgtcctgggtaaggggtcagtggatcccgtttgatgcc

SEQ ID NO: 1139 - DNA, 354 bp, Glycine max
  unsure at all n locations
tctatataagctgaaccattntatcagtggactcaagtggtgttttcttcgcaaactaagagtctatctcttgtatcctactgagagtgactctgcatatttcttgagtgggtcaagaacaccttggctgtcccaaaggactttatcaaccttagtgggtcgccctcggtgggacgagagatgctttccttccgtttatcgtctaccttgttctttcaaatcacaattgtagataatacctcctatgacaataaatatcttgtggtcctaactctccttttatgcactccactttcgtgattgatgggcctcaaacgaactcaaaacgataccttgcacctcatattggaatga

SEQ ID NO: 1140 - DNA, 434 bp, Glycine max
agcttaactgctttgtaaaacgaaatactcgatctatataatctttgttatcattaaatatatttcaaactagttcaatcatatgcatcaaagtatgaaagctttcaaaaaaacatgaaaaccttgaagtagtattctaaacaatatttttctgagtacaatattatgaaaaataactttctaagtgtagtagcaacataataagaatcgttataacataaactaaatttgtcataataacaatgttttgagagatacatttatttatgtaatgatcttctaaacaagagcaaatgcatattgacattaggttctcataatcaagtcaaacattgaataatgagtgttatgactaaccacttagagagcttagttgtcttagtacttgaacctctatgtcaagaatttctggacaccaatgtagtcttgaataa

SEQ ID NO: 1141 - DNA, 425 bp, Glycine max
atactgcattgttgactaattgttgttgttgttatttacatctattttcagactcccaatttgcagattgagttttggggctgctttcttgctgaacaatgtttgttggactatgattgtataatatccttgtcttctatcgcggctgcgtctgttatatttcttttcaaacttattctggctctgaatgcatacttaaggaaatattatgttatggataatgatatacacatctctttaatggaacgatattacccgtgtttcaacgcatgtgttctcatgtgatgaattgatgattaactgttcgccaatataataaaattattgctctttactctaatatatataggtaacgacttaatgttgaagattagagaaggtgtatcccttctactccatcaccattaactatcagctaccttctt

SEQ ID NO: 1142 - DNA, 453 bp, Glycine max
agctggcttgtggagcttctatggaggttggatcttcgagcttcaatgaggtcctttaatggtgattttccaccatggagatgcagcggaagacaaaggagaagaggtgagaggaggcgccatccactatggaataagccatggaagaaggagcttcaccactaagatgagccatggataagaagcttggagaggatgcttcaatggaggacaagaaagagggagagaaagagagaggggggagcatgaaattgaaggaagaaaaagggagagaagttgaactatgagttgtgtctcacaagactctcattcatcaaagttataacaagtgttacacatgcttctatttatagactaggtagcttccttgagaagctatcttgagaaaacttccttgagaagcttctttgagaaaactgtcttgagaagctagagcttagctacacacaccct

SEQ ID NO: 1143 - DNA, 459 bp, Glycine max
  unsure at all n locations
catgtcctggttacatacttacatagcattaatcacaacatacacgccaataaatacttggtaacaaggaattataccctgcaaacaaagctatttgaaatggaaccacctcccctaaacccaagtataagttaatagggttaattataaaatttgtccccttattttcttatttcactaaatggatcctttaagggaagactagaattgtcttttggagtaaaaggtatactcttttatcataaaattaaatcttatatattacattttaagagataatatattatattataaaaatataataaattaaaaaaattaaattttgaattatttttcttaaaacttacattaatactatattttgtaacatatatttaaatgaacactntgatatagtgataaaagaatatatttcttatctcanagatcatgattcattaaaaaataaagtgatgaaat

SEQ ID NO: 1144 - DNA, 333 bp, Glycine max
accacagagtggtacctgtagatatgtctcgggggtcatgagaacctggggacgtcatgtggggtgctattgcccaaaaccaagcttgaccaatcccgacccaacccgggcatagtcggtcagtgagaacctgtgatgtacctaagcaggcgagctcctgcaatcaacagataaacgataacaagaccacaagcatggaggcttgtggtggctggccagctgtgaattttgtgtaatatgtggatggtggcctctggtaatcgattaccaagggtgggtaatcgattacaggcttaaaaatgaagacaggatgcatagatggtctctggtaat

SEQ ID NO: 1145 - DNA, 461 bp, Glycine max
cggagaagatgcttcaatggaggaaaagaaagagggagagaaagagagaggggggagcacgaaattgaaggaataaaagaggtatagaagtggaactttgaagtatgtctcacaagactctcattcatcaaagttacaacaagtgttacacatgcttctatttatagactaggtagcttccttgagaagctttcttgagaaaacttgcttgagaagcttctttgagaaaacttccttgagaagctagagcttagctacacacacccctctcataactaagctcacctccttgagaagcttccttaagaagattcctaaagaagctagagcttagctacacatacctctctaatagctaagctcacctccttgagatgagaagctagagcttagctacacaccccctataatagctaagctcacccccatgacaaacaacatgaaaataatataaaagaagt

SEQ ID NO: 1146 - DNA, 347 bp, Glycine max
tttaatagtcattgcaccagatctaacctctgcatcagaggctggaagccttctcaaaaacatgaaaaccttgaagtagcattcctaacaatatttgtgagtgttctatattgagaaaaatgactttctaagtgtagtagcgacccaatgagaatcgttgtaacataaacggtactcgtcattactacaaagtgttgagagaggcattcatttatgtaatgaagttctaggcaagagccaacgcctattgacattacgttctcattatcaagtccaacactgtatcatgagtgtgatgactaaccacttatagagcttagggggcttagtacttgaacctctatgtc

SEQ ID NO: 1147 - DNA, 696 bp, Glycine max
  unsure at all n locations
acgcgctccacntctcgtcccgtgntgtttantgcanttcattacctcccgtcgacagtaatatttgatgtgtgcntctctctacgctcatgcctgtactactcgtcgtctactcccgtcntagtgcactgactcatantcgtacactctcgctcattntatcgctatcactacatgacttactagcgtactcttatgagtgtctctcacattctctctactctcttatctctatcgtatctttctcatgcacatcttctcttcatctctccgatacgtactnnnnccgctctcctctcacgcagatagcacatgtgtgtgctctcgatcatacatatggggtagaatatctcgtagaccttgtgcttgtcggtacagaggtcagagttgtgcctttatacaatatatgacttgtttagaacagctgccgtctatgcttaaatattattatagcacatgctcctgctttctcgttgtgtggacgactacaccaatgttgtgacatgctgtatcttgcatcacatattcatgtgtactcatgctacgcacggtcctttcacgcgcttcatgctcatgcatacctaaaatcatcatacacggtctctcacaatgtggagtcaacccatacacactattatcatacctgcttctttagaatctattgatacctttcttgttgaccctacagatactcct

SEQ ID NO: 1148 - DNA, 422 bp, Glycine max
  unsure at all n locations
cattatttgattgaaatatctccattatattttaaaagtcttactctctttcactgcaattactcctgctcaagtaagattatctcttatgtaaaactcattcatccatttggtcaaacacaccatgacaataagttttattatcttgaattcttttacacaatttcatttgtacaagtatgcatgagtgtatcagattttagtgcttgagtatttaaaaaaatataatttttgtccccttatgtttctaaatctgtaattttagtccccaattntttaattgacatatgttatctctcactttttaaaaaaaatcataatttcagatcacccgactaatttcaaatgttaattgtgtactttgtattttttttctttaaattaaacttattagtaattaaatacataaaaaaaaatactct

SEQ ID NO: 1149 - DNA, 429 bp, Glycine max
tggctgctgtcatcatgtgcaagcgtcgcgatatattacgggatttagtcagacttccgagtgaaatgttattgtcgattgagatagctgcgagcttcggttggatatggcgagcgtctctatatattgcgggactcaatgagacttactagtgaaatgtgattgtcgtacgcattcgctgctacctatggaacaacaattcgagcggctgacatattgcgggactcagacggacttccgaacgatatgatattgtcgatataatatgctgagagcctccgttataaacatctagcgtatcgatatattacggcactcagtcagacgtcctagtgagatgttaaagtcgttcgaagtcggtacgcgctatggctattaattacgagcgtcacgatatattacgggactcattcagtcttccgagtgatg

SEQ ID NO: 1150 - DNA, 438 bp, Glycine max
  unsure at all n locations
agctcgtagcctattcgaacaacaataactnttcactcggaagtctgattgagtcctgtaatatatcttgacgctcgaatagtaagaccgaagctcgtagcagattcgaacgacaataacatgtcactcggaagtcctattgagtcccgtaatatatcgagacgctcgaattttaaaaccgaagctcgtagcaaattcgaacgacaataacatttcactcggaagtcctattgagtcccgtaatatatcgagacgctcgaattttaaaaccgaagctctgagcatattcgaacgacaataacatttcactcggaagtccgattgagtcccgtaatatatcgagacgctcgaaatttaaaaccgaagctcgtagctaattcgaacgacaataacatttcactcggaagtgtgagtgagtcccgtaatatatcgagacgc

SEQ ID NO: 1151 - DNA, 508 bp, Glycine max
agaacgcgcatgaaccatgagaacatcgagatccgagatactctccaggcgagctgacgcgtgcgagctgaagatgtcacagtgaactttataagcttatgtgctggccagcataggggacaatcgactatgtatagccaacgtattatcttatgagataaggtgtgatgacggtccttccacattatattattccatggtagattgatcgtctccgctcaaaggaaccgcttgttagagtcaagaatattgagcgtcggtcaacgttatattataagtagacacctatagaggaactaccacgttatattgggttaattgtggtataggcccctatagttgatcgaatcggtcattacactcatttcctctagttatgtctactgaactcatgctttatacttttactatgaatggaatttaacacacctcttatataaccgtccaatgtataacaacattacgagacatggatgtcattatagatgatatgaacctacactgctct

SEQ ID NO: 1152 - DNA, 380 bp, Glycine max
aatggatatggttaggtgtatgttaatcaattagactttatccgtatccttgtggatgtataccttgaaaactgccatgtagttgttgaacagggttcctagtaaggtagttccaaagacaccttttgaactgtggacaaataggatacctagtataaggcacctgcatgtttggggttgccaggcagaaataaggatttataatccgcaagaaagataattggatgcaagaacaatcagtggatatttcattggttatccagaaaagttaaaagggtatatgttttattgttctaatcatagtatgagaattgtcataactggaaatgcaaggttcattggaaatgatgaaatcagtgggagtacagttccacgagaag

SEQ ID NO: 1153 - DNA, 412 bp, Glycine max
acactcacacatatacttagttcaaaattctatgattaagagcatatatctactgaaattaaattcatacacgcacagatgaacacaacacaaaggtttctctgtcagtcggagttgtaattttttagggtgttataactatgtatagtcatttacaaaaataccctccacttgtaaactcttatgacttaattatcccttttatatctcaagatatctaggatgaccaataatcaaccttaattatccccacctaattgctaaccttacattaatgactaagttcttcttttaagcttgtaatttgtatatctagaccaagatctaattatttacatctaggtcattaatgagttgaccattatttgaccaagaaaattctctaaactatctttattctatgtagaagctt

SEQ ID NO: 1154 - DNA, 408 bp, Glycine max
tatacaagtactcttgaggtttcttccatcagagcctcggtattgagctcttaatcttctttttcttcttgtattccttactggattcgtgcaaacttctcattcatggatccaaaatctcattttcattcttacaagcttgaaacatcaaggatctaagatctttgttcatctaataaaatacatgtatcttcatcaacgtaaagagagtctctccaatacttaaaccctaatcttggcgtctttggaagctaaccttcattgaatgttgtttagatgttcaaaatttcatagctactgcatatgctggaactgtatcatgtgttgtttctcttgtaatcttaacgcaaaaaatgagatatttgagtgccaatacttacgcgtaaccttatatctcacctacctcat

SEQ ID NO: 1155 - DNA, 392 bp, Glycine max
  unsure at all n locations
gcattacattattactcatgcttctaaccatgtctaatattgttngatttctgcgttctgccacaccattttgatctggagaaccaagcatcttgtattgtgcaacactcccatgttcttgaagaaacttcgcaaatgaacctggtgcttgtccatcctctgtgtatctaccataggactccccacctttatgtgatctcacgatcttaatatgttttccacattgtgtcacatctgcatccttaaaaactttaaaggcatctaaagcttcattcttagaatgaagtaagtaaagacacatatatcgtgaataatcgtttataaaggatatgaatactctctgactagtggcattcatgtctgggcaaagtatgtctgtatgtatgatttct

SEQ ID NO: 1156 - DNA, 412 bp, Glycine max
  unsure at all n locations
tgaatgaaacaccactgtcattgagaacaatggatccatttttaaaaataatacctaatgtgtattcacaactgttgactgcttgctcatccagaatgccatagttttatgaatacttgngttgatactgaaacttgtgctttcttacagggttaggttgtgccatatatatagatgacttttcatatcagtgctgcattttttaaagattaaaaatacacctgctcatgctttctgtatgtgttgtcaactacaccaatgatgtgacatgctttaccttgcatcaaatatgcatgtgtaatcatgctatgcatgagcctttcacgcgctttatgttaatgcagacaaaaatatatcatacacggttttccacaatgtgtatgttactcagaccacaatatatcatacatgc

SEQ ID NO: 1157 - DNA, 425 bp, Glycine max
  unsure at all n locations
ataaaaaaaatctaatgatgagtcaaaatactcaaagaaataactttgttatgagacatgattagtttttttttatctataaaaattaaagatatatattaaagaatgtataaaattcacatggattatttaatcaattgaattaaactcctttaatataaaatataatcaattaacatttgacactaacacttaaataaataaagtaataactttttttataaaatacaaaagtagtcaatctaatcatcgaataatttaatattatctttgtaattatatataggaagaagtcaaattacaatcatatgtttttacaccaacagttatattgtaaataactctatataaaatataaattttattgatttaattgttaaattctaattatatattatcttgagtgtgggtctcacattctctan

SEQ ID NO: 1158 - DNA, 436 bp, Glycine max
  unsure at all n locations
tcctggtnaagttntatgcaaacaactatgcttgacattgttgttttctaatttgtatattgggatttatattagtttttcatattggtgttttcaggattcctagtgaggatgcagagtctcaactcttaaaaggcagaaaaaagtgcagtggaagcttttgagacagcccacgctatgggtgttattatgtttgacttgccaaattgccctaagaaacgttgtcaactagagacatcctctgttaatggagaaggatcatctacccatactgttactgcatcttttgaaactgccctgaggtgggcagataagtagttgatgcagtcaaaactgcatttataaggcttgcaaattgtccttcttttagtatcggtgaattcgaggaactactaagacaaattagtaatctggacttgtctgagttctcttcaga

SEQ ID NO: 1159 - DNA, 426 bp, Glycine max
gcacttatgcagtaaagagactgtctaatgcatgtttacaacatggctaagttcgactaaaaccctcttgtacactttatgtgcaagtgctagcagacctactggtgagaaaaacaaatttcacacttgacaatggatgcacgcgctgctatcgctatggccacataacttcattcgactgttgtaagcatctacagcatgtctttgcaatataatgttagatactaacacttggacagctgtatctatgcgttgacggctgagagtgaccacattgatggatatatctatcacgaataagcgtatattagaagactcgaggccgtgcgtgactacaaagtctagttgtggacagaaacatgctcggtctgaatggaatgataagaactaaaatcaatcactgacatgagcagggatgatcatcat

SEQ ID NO: 1160 - DNA, 502 bp, Glycine max
  unsure at all n locations
cgcgcttgcacattgtgacgcgtttcgcccgcgcatcttgaggcagctgcggtctacagtcatatgcttctggcactctacctcatatttgtaatagccagtgtagttatataaagcctcaagctcatgaccgtctatctatgcgcgcgcgtatgatcacctcgcggacgtttgtctggccaccgatgatgtcatggaatgagaagtcatgcttgccttatctgattaccaacacgcacccctcctgttgaggtgcttgtgagcgctatcaggtactgatctcaaacagagaaagaggaattgcaatgttgcggatcaaatgcttgagcttcactgcctacctaacagcttgcactgtgtcattcatatgttcgtccaaccgtgcctcgtaaccgaacgtaatatgagctccatcatctgtgagtagcgagtgaacattatctaaccncgacttatgtgcaaacgctatgggatgactactccaagatatcacgagagaggg

SEQ ID NO: 1161 - DNA, 380 bp, Glycine max
  unsure at all n locations
atctaatattcatgtgagttacagaaacccgcacttattgtgatcacactctttgtgatacattattatcattattaattaaaacttataaaatcgagaattaaattccactgatgaataagatgtgaagccgacnattttttagcctttcataaattgtaacagttcgtacaaatcaaagcatattaaaatgtgttttagcatttcttacaatacataatgaaagtggtctcctagtccgtacaacaatttgtcaactagggcaagctcacattaaatatatgggcatggctaacatgattatcgcaaagtttctaacattatatttacccgtaaactattatgaatgcataacagaaatatcaggaatattgttgttg

SEQ ID NO: 1162 - DNA, 424 bp, Glycine max
agctttaaaagtacccatttaccaacctcatagtctacttcacgccatttagtatcatcagtgcgtttcatcgtagcttgcgcttctaatagcttctgacgaatgcaaagaaaaacttcctcacagtgcttcagagtatcatccaccgcatctagtttggaggagctagtgatatagtctggaaaagagaaaggtttccgcccaaacgttatctcatacggcgtagagcccgtgcctgcgttccatgaagtattatgcgataattcgacccagggaaggaatctgccccaagtccccgaccggcggtgcaccatagcccgcaaatattgctctattactctgttcatgacttcactctgaccatcactctgtggatggtaggctgaactcattctaagccttgtaccactcaattaaaaaagct

SEQ ID NO: 1163 - DNA, 427 bp, Glycine max
taggctgtttacaaaatctatttagttaaatatgctacgatttagtttataataaaacctattaagcttgataaattggtctatttattcatttatatataataaaaaattaatatacatgtattatactttaatatttaatatcttaataagttaataattcatatcataaataaaataaatatttgagataaaaagcctttaagtaaataataggtcatatcaggtttttaaaaaggtcaaaccaagcttaaaaaaagtctctgataggataataggttaggtcaaaccttaattttttataataggtcaaacctatttacacagagtctaacatgccttgtatattctcacccctattcttacgtttcaatgtttgaacttcaaaaagaaaaacaatattcataatatttgcttccaatcatgg

SEQ ID NO: 1164 - DNA, 463 bp, Glycine max
  unsure at all n locations
tcctcaacatcaaagtaatacaacatccaatcatcatggactatcaaaatcaagcaaaacagggcaaaggcagaaaactctgcccaaaacacaactcanaatcacagcttttctcacttaaagaccccagtaaaaattccttcgttccagtttgttaaccgttggatcgactcgaaaattttactggaagtctctagtacataaacctacattntgaccgttgggatctactagaaaatatccagaactccttctgcaatattctttccacagccaatcacacacaagcatttttctgcacttgtgcaaaattctgctgcacaatttcacagcaaaaatctgcacaaagagcagatttcgaaaaccacacttcccctcatccaatctttcccaaatcagatcctacaagtcccaaatcatgtatcaatcatgtctaaaccaaagtcaagcttcaaaacacagc

SEQ ID NO: 1165 - DNA, 401 bp, Glycine max
agcttggttcgaggtactcacccgttgaagatcgatgatcgactatgaacgaatgaagagcgtcgaataacggttgaaacctttgcgagattcctcacggaatacgttacggaaacgtttcggaagcgcctcggcttagattgtcttcacggaaacaatttttcctagcatattcgaaagagagagaagtgcctattgtgctgaacccctttcttattgccttcctcccctatttatagctaaataggggaggtggttgccgcccagctcgcccaggcgagctcaactcgccctggcgagcagggttgcttcctccagaagctaccgccttctggaggaatattccagagggcccaagtgggcctgggtgctatctgcacccacattgtactaagtacacc

SEQ ID NO: 1166 - DNA, 460 bp, Glycine max
  unsure at all n locations
cgctaagcgagatctgcatgatttaaatacattcttcagggtcaaaaacacaattttctcatccccctctctcaaaactccaccaaaccaccctagaaactcctcctccaccacccaggaccatcggtagccaccacaagccactgttgcttgccgccaaaccaccatacggagaggaaattaaaatgcacagcggacattaaaagagtagggaagaatgagacaaacacacaagagtntgtatactggttcggtaacaacccgtgcctacatccagtccccaagcaacctgtggtccttgagatttctttcaaccttgtaaaaatccttttacaagcaaagatccacaagggatgtaccctcccttgttctctttgaacctagtggatgtaccctccactagaactgatccacaagagatgtaccctctcttgttctcagtcaataacccaagtagatg

SEQ ID NO: 1167 - DNA, 586 bp, Glycine max
  unsure at all n locations
gcaaaactcccaccatacgcttctactaatcatacatcactctcaatatnacatanaccctcatacacacgccgtgcgtgaaaccattgtaganccgtcgtatctccaaagacgacctcgangcatgcaagctgctacttatgcggcagggcggacttactttactatcttgtctccaacgcgagctatgaccactgttcttccttcccgcgacgcttcttttcatgtccgcctgagtgggtatatagcctaaaccatactttccacgatctccttgagtattcactcaggctagttatgctgacgctgtctttgcctaaacccatcccgggtgcataaccgctacaccaacataactagggccattattaccgctgcatcggacagactaggctgctcaaagagggagtccacggaggatatgtcgaccacctacaaagactgtagagcgtgctctaacgaatctattgcggatcacacaaatgcaaggtagacggtcagcttaacaatatatgatacatgcccgatacgaagcaaacaatgccctcccactaccaaatattagcatatgcccagacgcaatccc

SEQ ID NO: 1168 - DNA, 380 bp, Glycine max
taaacagacaattttaaagacatgaatgtaatgagatttgagtcttgatttgcctaattgcattcaaaactctcattggaaaagaaatccatgtctatgaacttaggatcaataatggaatgagaggagaaaagggttgcgtaccatatccgttgttcttctgatgagaacatcaaggaagaagatatggacgacggaatctgcatttcctgagcctcggagtgccgtttggcttcactcgaagatcccttgcacttttttgatggatctgccatttgaacgagttatttgaaatatcaatcggctcacgtgaaagagaatgacaacagatgaagtttgggctttcggtggagtgatttggacaacactctactgatata

SEQ ID NO: 1169 - DNA, 427 bp, Glycine max
  unsure at all n locations
tgtttgtcatcatcttaaagggggagaatgtgaatgtatgtatacatgattctgatgatgtcaaagaagaatctaacaaggctgcttcaaatgataagcatttgcttcaagaataattcaagattgcttcaacaaacaaagccttgtttcaagattcactaaagaccaagccttgccttaaaacaaagtgctttcaagacatgcaaggctctggtaatcgattaccatgaagtgtaatcgattaccagaagacagggttgagaaatagctgttgaaaaaggttttgaatttgaattttcaacatgtaatcgattaccatatgtctgtaatcgattaccagcaacgaaactttggaaattcaaattcaaaagtcataacccttcaaattataactgtgtaatctgatacacaaacattgtaatcgatn

SEQ ID NO: 1170 - DNA, 462 bp, Glycine max
agctcgttattaaatacaaaacacacatattattatgaaaaaattgacgttaatgacgtaaattattattaacacttaccactgcatgtctcagctagtcgacatcagaccttgcagatgtcgacggtgctgctgcctccgtgaccggacggatatctgtgtctggatcctgaggggcaactctgggctgcgtagcatgaccatctgcccgaggatctgatggctggcccggcgtcatgaatggatgcgacatgcggaagaatcagtccatgtaatcgctggcacactgccctggcacaacgcagatgtcacctgctacaaccatatggtccgaatagtgcatccacctgttgtgtatatcatcagacgtgacccatgaatcggcaggtggagcatgaatggtctgagtgtatcaaactgccgcatgaccctctttggtcggtaatataaaacaatgggccc

SEQ ID NO: 1171 - DNA, 512 bp, Glycine max
  unsure at all n locations
cgcgcgttaatccgttgttgannaccgtgctcgtaccctgggatactctagagagatacctgcaagcacgcaagcatatgatactgagagatggaaaacactattttaatgacactaatagggacatagtgttgtattgtattacaccacgtaatccccatgagcctagcacactttcttaacttatgctctcgcgaatgaactataccgttattaggtgagccttgaacagataaccactccctctaggaacaactttttgctcatgatgcactatggcctgtgtatagaagctatgtctcattcataaaatatgcttgaatcttgtatgctacgctacacctcacttacacacaatacttttgtaatactttcattaaacgccaatcgtttcatttgtcggtagatttattctgcttagcaccctacatcccttacaaaaataggcaccatttacttttttgatcctacttcatcacctcgctctatgacggctatcatgaacaataacg

SEQ ID NO: 1172 - DNA, 390 bp, Glycine max
  unsure at all n locations
tgtcttctgtttatatatgatttatactcgatctaagacttgtctgatgcaatttgctcaatcntggatgacggcaatggtgatttcgaaaatctgcacttatatgcagaattttgctgcttaagtgtgcatcgtaatcttgtgtttgtgcagaaaatgcttatgcatggctgtgtgtggaaagggttgtacatattggggtctggacgttncctaacatatcccaacggtccaaatgtagacttatgctctatggacctccactcaaattttcgagtctatcacacgatgaacgagttggaacgatcagaatgttactggggtctccgagtatgaaccgctgcgggatctgtttgtgttttgggcaggggtctttgcctctgccctatc

SEQ ID NO: 1173 - DNA, 428 bp, Glycine max
gggaaataataatctgccgcagcggatccaagagaaaattaagagaagaaggagaccctctgaaggctatctatgctacggtatgattaacctttacccatcgactttaccttttatgccaattgtgaatctttaatcatgaaggttaagagaaggagcctgtgtagtgtgtagaggagggaaaataagggatgcctataaaaattatgaatggaagcttataaaatatgaagtacaaatacatacaatgttgcacagatctaaagataatggcgaagagtgtcattagttgatacttttttgttatactatttctgtattctgtttgacttttatacgtttctgtcaggcgtcataaaaaagaccgcacatagctaggaagactggtggatgcgatagcctatatagcagtgataggcataaacaca

SEQ ID NO: 1174 - DNA, 118 bp, Glycine max
ctatacccaccgcagcctgagatacgcagtcatttgcaaacatcatatactacttgctgcacaactatacttgcttatgattgccaactagttattacattaatgtaagctttctgtc

SEQ ID NO: 1175 - DNA, 483 bp, Glycine max
cgcgatgaaccatggataccgtgaataccggaacctcggagactcctgcggcgtcgagttaaaaaagacgagtttgcatttttgacgggcgaacgcgtcgcatgatcatgaaacctagacctccttgcactaatgtataaggatgctaaaaagcatactattcgttccaacaatgactctacactgctgtatctcacctcgccttgttgcatgatttactgactaccacgccctgcctttgaaaggatggatttcaacacttgtcacgctctggtaatccgttaccaggaagagttatcgatcaccagaacaccagggccttaattatcagctcaatcagggtttgtatttgtatctgcaacatgtcatctgataacacctgactgtaatttagtaccactcctgagcttaggaagctacgttctaacaacaaaactcctcaaattattcgggggttccgacacaccatctctgataccggcg

SEQ ID NO: 1176 - DNA, 424 bp, Glycine max
ccaggcgacctatgttgcttcccctagaacgcactgtcttctggaggaacttcctggaaggcccaagtgggcctggttgctatttgcaccccctgtttactaaatacaccccctgcctttttttgctgattctttttccgtaacgttatggaactttacgaatttcataacgatacttgttttctttccgtaatgtcacgaaaccttacagattacgtaatcatcccttttttggcttccgggatgatacgaaacttcacggattgtgcaacaatgctttcttttgacttacggcatgtcacggaacttcacggattgcctaacgatgggtgccaagtacctcgaagtggtctaacgagggtcgtcatccaacaaatatatggtccccggacgatatatgggtatgacagttgcccctctttat

SEQ ID NO: 1177 - DNA, 401 bp, Glycine max
tctacttatgtggcacggcgggcttacttcactttattgtcttcaacgcgagctctgaccactgttcttccttgccgcgatgctacttttcatgtgcggctgagtgggcttatatcctaaaccatacttaccacggtttgcttgagcatgtatcaagctaattatgtccgcgctgtgtatgtctacacccatatcgggtcataaccgcgccccaacatagctcgggccatcattaccgttgaatccgacagacaaggctgcccatagagggagtccacggaagatatgctgaccacctcataagactggaatgctgttctaacaattatatttgagcttccacataacgcatggatgatgggaagcttaccaagatgtcttcctctcctgacacgatgacc

SEQ ID NO: 1178 - DNA, 432 bp, Glycine max
agcttctgaagaaggactttactactctggcgcagactaggagcgtcttgtcctacttcaaccttgcccttacatcacatacatcttatctgaacttagatagggcggggttggtgtatggactagatatgaagatggatatgaatcttggagccctcatttctggacagatatctctgatagctcagtccaactcctcccggctaggatttctagcgattatcactgctttatgcatggccacaggagtcaccttagactcgttgactttcaaaactctcagcccagctattaacttggcttacatcaagaagaacttctagaacttggatgacccttcggtcagcttcccagggacccgtaaggccagggccagaggatctgagggtccatcttcaactgctccccaggactctacatgtccagctcccc

SEQ ID NO: 1179 - DNA, 427 bp, Glycine max
  unsure at all n locations
tagtagcagttacagaagtcaatatttccgccaataactatgatcatttctaccttacctattttccatcatggccttggtttgtgtgtttagattgccaccagagtcctaaatagacaatatctttcattgcaagcttagcaacagtcccaaaacccaatttttgccgaaaccaagtgtcatgatttctatattaccaattttgctagctgttgatgttgcatcatagttttgctatgtcatctacctttggtctcatctctttaccttacaattcaggcaattatatcattaccctttttcaatatatagaattggcaacatgcaaacatatctaatccaggaaattccaccactaatagtcagcctataatccataaccaatgaagtcccccatctccaatttatttcatcatctaattntatt

SEQ ID NO: 1180 - DNA, 407 bp, Glycine max
  unsure at all n locations
ntcacttcataagttgtcttatgcctaanaatacgttgagttatccttagtaaagggtaaaatattgactcaagtaaagttcaattcccactcaagattggagcaaactacttagcttggcaataattccgaccaaggtccaacctagtaggtaaccattcttgactgtgacgtatcaaggaatgtattcttaacgaataaagttacacggttaagaatgctgccgacagcaacaacaaaatggaaaattttgtttgtgacaggaaaatcttttgtggaccacccatatgttatttcaattaatcttctttttcatcgtgaaatctttttctgtgctgctttcccatttgactctggaaaatgaagaagctatatagatttagatgcagttgtttatttatttattt

SEQ ID NO: 1181 - DNA, 345 bp, Glycine max
gcttcaacggcgatttaccaccatggagatggcgtggaagacaagggagataaggtgaaacgaggcgccctctactacggaataggccatggaagacagagcttcaccaccaagaatgtgccttggataagacagcttggagaggatgcttccctggaggaaaagaggcacagattgacagagagagagagagagaagatcgaccttgaaggaggaacacggggagagaagttaaactctgagttgtgtctcacatgactctcattcatcacatttacgacaagcgatacatgtgctgctatttatagactacgcagcatacttgagaagcattcttgagaaaac

SEQ ID NO: 1182 - DNA, 421 bp, Glycine max
  unsure at all n locations
tccatcgagtggtaatcagagcacaagagcttctagcaagtgctccttacacctccattaattttttttgctttaccttctcttccattgttgtttcttcatttttctccatgtatctcctcacatgtcttgtgataaatgtttttaacatgattctagagtttccatggattaaacttgctatataagctagagtttccaggatctttaagctcggatggaaagatcttctggatcacagcactgcaatttccttccattatgatgctttcctgattaatatatttgtacttccttgttaacatatctttcaaaaatttatagtacagtggcatctgctacaacgcttctctgaagggcatggttatttccagtttcctgaaaatatctaacaatctcgccagatgacaatcnttttctt

SEQ ID NO: 1183 - DNA, 488 bp, Glycine max
  unsure at all n locations
gtgaacagtttagttacacaattaattgtaatctaannnatagccaggtgtgcatctctcccgcggatcttaagtgaccgggatgcactttagcaagtgccacttgtttttttcttgaagccctttaggccggtgcccttccttgtattaagccactacagccctaaaagaaaacctgatatcccgtatttttaaggaattggagcttaggaatagtcagggaaatagagcggggaggtccttgttcataggaaaacttgtaaagccgcaatctcttcagacgattttgggccctcacatgagtccctcgtttacggggaaatgttggacatggcgactggaagcgattctctcaccgcgctgggtcgcaaccacgaactagagaagacattattacgcctcacgtggctgaaggaatctgcacggcccaaatagagagaccttgatccatcttcggacaaacctactgacctcatgacggtggatcg

SEQ ID NO: 1184 - DNA, 447 bp, Glycine max
  unsure at all n locations
ggtgtatngctacattctactaatatatggaattgcccactgctatgcctgagaataacaatngcttgaccacaacaacgctggaggcggcaagggacaatggtctttcaaataaacctgttgtacatgaacaaacattatatcatgcactgaccgtgccaaacgaaccagcgaagtcattgcataattgttatactaactatattcaatgtacctgaacaaaatgatttccaaacacgtgaccgacacatatgatgcggtggccataagaatcaggtggtgtgtgacttctataagggaaaaatgtcatgtcttgttggcgggacaacgatacaaggattacgttataccgggaagcaatcacatatcccatgtccgttatattcatccactcgtccacgcttacctgaatgaaccaaacatacacatgtaagctaatataacatt

SEQ ID NO: 1185 - DNA, 388 bp, Glycine max
  unsure at all n locations
agcttcttatcaaggctcatcttggtggtgaagctccttcttccatggcttattccttagtggatggcgcctcctctcacctattctcctttgtcttccgctgcatctccatggtggaaaatcaccattgaaggacctcattgaagctcaaagatccagcctccgtagaagccccacaagcaagcttccatcaagtggtaatcagagcacaagagcttcaagtaggtgctccttaaacctccatntaatttttgctttaccttctcttccattgttgnttcttcattgtttctccatgtatctcctcacatgtcttgtgctaaatgttttaacatgattctatagagctcccactgattaaacttgctatacacgctagatttgattt

SEQ ID NO: 1186 - DNA, 347 bp, Glycine max
  unsure at all n locations
catagatggatgaatgtatgggacgaggtngtacgctagctctagttccataatggagaccttctgctgaaactaactttccacacttttgcacttcacacgaaagagccccgcacgaaactaggatagacatgtccatgtaaagacagacgctttccaaggaactaccttccgctccccatcatatatggcaacgttctagattgctgtgcaccctctgatcttctaggccattactggactgataattttgcgcgagcgacgacttcagctcatggactaccattatactgattttcatgaggaaatacggcgcctgctgtgggcatgactgtttactcccatgg

SEQ ID NO: 1187 - DNA, 376 bp, Glycine max
  unsure at all n locations
taagtcacctgcggcatgcaagcttctaaactttatacaagaatgaagctctgataccacttcttggacaagttgcctcagatatcttaagaagggggggttgaattaagatatcacagactattccccaattaaaaattctacttttaatttaatccaacaacccaagattccttttaaacaagaactcctagataataatgcaaattaatcttactaaatagaaataataagcaataaacaataaaggagtctaagggaagagaaaatgcaaactcagatntatactggttcggccacacccttgtgcctacgtccagtccccaagcaacccgctagagaggttcactatcttgcaaaatccctttacaagttc

SEQ ID NO: 1188 - DNA, 415 bp, Glycine max
  unsure at all n locations
gacactctatagtactacagctnttgttctgttacatctgtttcatgtatatgatgtgatctccaaatatccaccgactagtcatctttaaccagtgcaattttacatgatatcttgttcctgtagaatctcatgtcctgccgaagatgcctgttcaaaatttgccgttacagtgagaaatcctaggaaaaatataagaaaacttgaggaaaaagtgatattatactcttcatttaaaagtagtacaaactacaaacttaagttttagcttttagagcatattcattctccaataagtgaaaataatttggtgcagcatttaggaagaatttaattttctttgatcgttttgcaggatattgctggatttcataacagtatttaaattatgcaacagatcaaacatgggcatatc

SEQ ID NO: 1189 - DNA, 412 bp, Glycine max
  unsure at all n locations
agctnntgcggattggtctntgccagtgaaaggatcgatgtgggtccgaaaagaggcaaatntagtcatcctgcttcgacgaatgagaaaactggngcaaatgaagagggtgaggatgaaagagaaatccatgctgcgattaccattcctacatggaaacttcccaccaacccaacaatgtcattactcagccaataacaacccatctccttacccaccacccagttatccacaaaggccatccctaaatcaaaccacaaaacccacctaccacacaaccaatgctaaacaccacttttggcatgaaccgaagcaccaaccaaaagggatttttgcagcataaagcctgtaggatccaccccaaattccggtgtcatatgctgaacttgctctcatatctactcgataattc

SEQ ID NO: 1190 - DNA, 470 bp, Glycine max
tcagccagatcgctaagtgagagcttatccgtggctaagcatgacctattgtcgccaagcgcaattccttacgaccataattgaggtccatgacgctaagcaccagtcatggcagctatgcgagattcattgtggcaatatgagcgctaagcgagtccctctcagctaagcgcatactcctctgtacttaagatgcatcattttagctaagctggccagagcctgttttagcgagagttgtagcttttctaatctacagacctcgctaagcggacataccctcgtgctaagtcgagtttctgctaaaaaaaaaactgattttgaatgtgaaacgtcagctaagcgcacgggtccgctaagcgagccttgttgagaaaccaaacgtctctcttgctcgcttagcacaacggtccgctaggcgaaagtatcgaaaaactgtctaagtgagtgtaacagcagctacactcaca

SEQ ID NO: 1191 - DNA, 474 bp, Glycine max
cggttgtgcatctactcgaccggatcttaagtcactgggctgcagctctagccaatggactaccttgattaattcctttggagcccttttgagccgtgggtgcctttccttggtttgaagctcactacaagccctaaatgaaaaaccatgatatcaccctatctttgacgaattttggagctctggaattgttctgcgaataaacgcggggggctttttggcttcattggagacccgtatcgctagcattgcttcgtgatgtattttgggccccacttgattgacattgtatattggtaaacgttggacatgctgaatgaaactgtgtgtctcacaggctatggagtggggcacctgctttaagaagaggattttgagcgccctaagttgagtgaataaaatcttcaccgtccagaatgtgaaaccctggtctcccttatgtaaaatgaacgtactcttttagttcttaatttt

SEQ ID NO: 1192 - DNA, 456 bp, Glycine max
  unsure at all n locations
tgcatgatttacattctccctctttctcaagagaattcttaattcttcttgacatcatcaaaatcttcatgatttacattctccccctttctcaagaaaattcttaattctgcttgacatcatcaaaatcttcatgatttacagcctcagctggccttgcccttggtcttctggccccacaaataataattgttggatcatcagggttccaacaattcttccttatgtangccagattaatgaccgggctcagacgttcaaagacaagactgtcggaggcaactcctctggtcctgcataaagctgtgataagagcaggaaacacgagttttgaggagttatactgggccatagaagtaatctgccctaaaatgagggctccgacattcatgtccagctgagtaactaggccaaagattaacctagctcgatccacagtcagatcagatgtgtggg

SEQ ID NO: 1193 - DNA, 504 bp, Glycine max
gcaccggattgatgcgatcctgtctccgagcatgctatcactctaactgcacgcgtgcgcatcccatatcgacggtcactttcggggtattgattcttctagcatggcttatgacatagttggaaggcccctactctcacctatactcactagacttacgctgcatctccgtggaggaccataaccattggaggaccttattggttctcatatatcccccctccgtagaatctccacaaaccatcttccatcaagaggatctcaaatcacacgagcttgaagatactgctacgtaacgcagctcaatttgtcgcttaccttatcttcattagcgctgcttattggatctacgtgtatctgctcacatgtcttgagactaatgtcctaaacatgatatttagagcgaccactgattataattgctatgtaagcataatgtgatcgttatagcgcacatctcttttcttgtatctaacatgaattggtagagtaaaggcctttagc

SEQ ID NO: 1194 - DNA, 417 bp, Glycine max
  unsure at all n locations
agctntatggccatgtaaacactatggcttatggtttgttttcccccattcaatcaacccaatgtttccaaaaaacatctcttttatcaagtcacgcacacatccgagtccatttaggcatccgggaaaaatctttcattgcattcacccttcaggcgcacacatttttttcaaaaatctttttatatcctaatctgtgaattttccaaagaaaactggcggtcattttctttcaaaagcatgttggctttttagttttctttctcttagctntttttttcaattaatttctttcagaccaatttttttcagaaaaggtttgtaacctgggcaaagttggtattcgagattacactntatcaaaaggaacaanaggcgtgtgaatgacaataaaccaacacacaagacccctcttat

SEQ ID NO: 1195 - DNA, 426 bp, Glycine max
tcttcgaagggcaaggttatttccagtttcttgaaaatatctaaaaatcttgccagatgacgatctttttccttcttggaaggtaccacaggatatagtacttccacaccttcatccacagctttttcacttctactcttctttgcattcttattttatttattctttttcattttctatttcttattctacttctttttctttttcttggtccttcaattctttattctggaccattatttgtttccctttttcccgattgccttcacctctcacatcatttttcttaacttcagtacctttctttttagtcgctttctccttgtgcactacactttcttcatcctcagcttccacaaacctcttactccttgccatcacagctttgcattcctccttgggattctgttctgtatttgccacaaa

SEQ ID NO: 1196 - DNA, 464 bp, Glycine max
  unsure at all n locations
tctcccgcattttcctataattagggggagaagtgacaggaangaacgttcaaccctcctggtatatgagattcacttactattagtgagataaatcgcttccatgaagaatatacacgccgaggcgcttccgtaacgttgatgttacgttttcgtgagtgatttcgcgaagattttcaaccattcttcgacgttcttcttttgatattcgtcgttcttcggtcttcaaccggtaagttcccgatatcgaactttntaattcattctatgtaccgttggtggtccccattcgtttagcgtacttttattttcgtttcatatactctacgtagctccttttgacgtgctttagtcatctacttgcctaatcaataataaaataaatttccaccgatcatttgaatggttacatcacttaatttcagttcaatgagatgtgaccgtttggtcatgccataaccatg

SEQ ID NO: 1197 - DNA, 100 bp, Glycine max
  unsure at all n locations
acatgttgctccccctatctctaacaagcttctatagttcctgtgatctatatggatactgngatagctacttatatcgccttgcgttgaggacgggcta

SEQ ID NO: 1198 - DNA, 281 bp, Glycine max
ttaacatcctcattgattagtgcagatcaaactactatatccttgaggggacttacatcatacacttgagctgcattttccataaaccagaattcgcaaaggatggaatcaaggaatagcatacataaagatcatgagcatacccacgttttcaaatttgaccataaagggccataaaaataattcttatatttctttaaaagatatattattattaaataacacatagttggtatagaatgttgatgcttacaagagttaaaaaattattctatccaatt

SEQ ID NO: 1199 - DNA, 197 bp, Glycine max
taagtaaacgatcataaacccataatctggcgacaagtgcagataatgagagtcatggctagttggcataacatgttaaccaatgcatctagtttaccttcacgcttcctatttctgttgatgaatatgaattcacggctacttgattcactcctctaatgaccatagcatcacttctggcactaaattgttgggag

SEQ ID NO: 1200 - DNA, 413 bp, Glycine max
cacggagactaatcagacatgggatgcagctatcacgtacatgcttctattctaaaacttctcatcatgtgcttattagctggtcgggtttctctttggctattgaagccataccaattatggacaatattatggtaacaggcagaagatttcgccgatgattcattcttgggatactatggtaagaacttggaatctcatcttcaatgagtcatattgtcataccatgaaatatcatatcttgttgctattgaatgaatcttgtaattactacaaaacacctactgaaattctaaattttttagatcaaatgctaagtacaagtaaaaagatggatgatgatactattctgcaggtcttagctgtgctgtgtacgcgtttcctataattgctattgctatcattggacttct

SEQ ID NO: 1201 - DNA, 596 bp, Glycine max
  unsure at all n locations
cttcacactcttntcaacatttaantgtgttgtntntanttaatttanntttttnaggccggaatgatgcctcatcactgacannctaaagtaaaccgcagcatgcgacttaacaaccagtagatatgagtgaattaaactacgattacaagaccttgaacaaatgtggaagaatatgattgaagcatactgttatattctagcatatctacacagtacaataacgtacacttaagaattaagccttagcctttcatctttggctgctgcattattcgtgtaaacatagcgcatatgccatatactaacgccgtattactgtaagtgaactcggaggcattacaagaaatgagaattgagacagttcttagtttcgagttgataagataagtgcaccattacaaggtgccaacatttggtcacacccaaccgaaaacaattacagcaataaaaacaaaggtcatgtacacatggtatgtgattatagctttgtacatggatggttctaagatcaaaaagtacgcttgccatttttacgtaatgtggtatcaactttggtcttaggccgaccattaccaaacactacaattgtcatt

SEQ ID NO: 1202 - DNA, 484 bp, Glycine max
  unsure at all n locations
ntngatgctccgccagcaactccgtaaggtactgatcgaaacctctcaggatagattaggcatcttttatttattttaaacgaacaatagtaataattactgtgaatttaaaggatactgggctgctttatagcagcgccttccgcttgtcccgggctaggcaaaggacgacgacctactggtcgtgaccctagcctctctttgcatccgtccataagtacctaaaagtaggaaacaatgaggtgtggcaaatcgcgaccgcgtcgtcgtcttaccttaatcggtttctgcttttaactttgtctcaacctttgatgattctgccccctgtttatcacaaaatatgcatgtgtatgcgtatgcatgaatgttttcaaacgcaacaaatttttagtgaaagctggtttaggttcgattntaattaagcgcttggggcatcccatgaactgagcgaaagggctcaggtgatcacaaactaacacat

SEQ ID NO: 1203 - DNA, 441 bp, Glycine max
  unsure at all n locations
ccaacgctctgatcaagctctcccataatctanangtaaatctacgatctctatcagatactatgctagattgcacaccatgtaacctgacaacctcacttatatacgaggaggtcaacttttccatggaaaatctgatattaatgggaatgaattgagcaaacttattcaatctatcaacaataacccatatagaatctaaacctctaagggttctatgtagtcctaccacaaaattcatggaaatgctgtcccacttccactatggtatctctaaaggttgcaacttacctgaaggtctctgatgttatatcttatccttctgacagactangcatgcatacacaaactcactaacctctctctttatgtatagccaccaaaacatcgtctttaaatcatgatacatctgtggagcaccatcatcaatgctcaaattac

SEQ ID NO: 1204 - DNA, 313 bp, Glycine max
taatggttggatttgacatgggatcactaaccgcacatgtgtggctcatagtgccgtccacatgcgtcttacaatgtattgagaatgttaccgcctgcccttactagcttctgatgcgcacaagagagctcgaggatcatctgcttgtatacaaggggtatgctgtaatgcatatcagatagtctgttgagcgcgtatgcacgacgatgccatgactgctgcgacactagatgctggtgtttgataacagacatgagcacgaatgataggataaacgtgatgtgattaacagatgcttatgcactgcatgata

SEQ ID NO: 1205 - DNA, 239 bp, Glycine max
agttaactgaggcgtgcgcgcgcgtgctctgaactagagttcactctactgctgagcttgcgcagatcatggaatatgcagatctaagcagaagctcgaagtgattcatgatacagaccatagctctactaagacgaaataaataaatgagtatcaatcactccaatgagcatgctctatggtgacatcatggattatcacttggcgtgatgaagtgatctgctcgcttatatattaat

SEQ ID NO: 1206 - DNA, 357 bp, Glycine max
attctatagagagaaaggtccacgttccacagagtattgagagattctgcagcgtgaagatctgtacagactagagtcggaagcggaagccgttctgagagctggagatgaatccgtgactggttgtgagatcctacaggtgaaggagacatcctcagcacttgtatttctgcgatctatcgtcttgttcatagctttcgtgtaaaggacgctccttggatatggaaagctcgaatactatgatggatcttcgttgtttgtgcacgatgtctatataaatctatgtatttaatgaagttacgtgagatgcctgtgctataaacattttaattcagtatgcctataccatgttcatat

SEQ ID NO: 1207 - DNA, 458 bp, Glycine max
tgctgcgaaagagagttttgctgcttattgcatgcctatatagctctacaacataattaagagttgtgctgaaagatatgtactccttctgcctatgtaaattatgttttatgtgattatttataacttatattgggaattgcgatatattgcatgagttataaggctgatattattggtatcattatttttttttttttgaaaattatctctttttctatctcgtgtttaggagaatttcttatactatttacttctctttagtagtacctattgcttcctttgtttttttttttttacctcttgaactcctccgatttcgggtctctgaagataatatcatcgcatgctgttctaacaatatacatgtctgtcttatagtcattattcctacggagatgtatggactacaatataatggctaagcgtaagaagaggtaaacactattatatataat

SEQ ID NO: 1208 - DNA, 517 bp, Glycine max
  unsure at all n locations
cgggttgattggatcctactcgtacccgcgatcctctgagtcacctgcggcatgcaagcgttgatagtaaaaggctgagatgaatgtgcaaccttgatatgcagaccatgatgaagagagcctntgaggtaccttacaatgcgtataacagctgtccaatgagagtccatatgattagccatgatctgacagaccttgttcacagcatagcttaactcatgccttgtaatggctgtgtattggagagcaccaacaacatacctatagagagatggatcactgaataaatccaagccagctttggttaacttgcaattagtagtcataggggaaggaatgactgtgcttctgccattttggttttctgaagtaaatctctgatatagttgctgagtcagtagaatagtcccatcagccacagattggatttctataccaagaaaatattcaaagtttccaattgtgtaagacaacaattggaatgtatcttggtggtgagttgctgaattattacatg

SEQ ID NO: 1209 - DNA, 366 bp, Glycine max
  unsure at all n locations
atgacgaaatggctcacaagaggatgtaatgatctttcaaagtggagaggaccttacaatatgtcaataccaaccacagagagtccaattaagacatccatagtttccttagtttcacaatatcatatcttaagttggttatatataaatatcactatcatagcttacccacacagtgacaaagcatagacatacactgactctgtcaatttattcccactatgatgggataaaaaacttggcattatgttcagttctactatgtctctattgttctcttctttctatgtgcttgttaatcaatttttgcatgtactttcaactgtaataatangaaaataattttcctttatgggtctcttctag

SEQ ID NO: 1210 - DNA, 254 bp, Glycine max
agcttaagagaccacacctgatccttacacttcactagctggtcatagtgcttctgcatctcatgagtacttcacacaaaactagaggggctaccacaggttgcttcaacaccatgtattttgctgttatctccaccacttatgatcctagtgatgaactctggcatgaccttaatagcaacccttccatcacaacccttcatgtactgaatagggcgtgcaccagacttgatacgggacttgttagggcaaga

SEQ ID NO: 1211 - DNA, 471 bp, Glycine max
  unsure at all n locations
tgtaacaatattntattgaaagtgagagtattaatagaagataaaaagttatcgattataaatttatagataaaattgaaaaacaactatgtagcttctaatttataagttatatgacatattttaagttagtagcattagcatgtggttgtaggtttttaaaatatgttaaaattccattttagtctcacaaatttaaaatatcttgttctggtctattgtttctagaaataatatagctaacaaaaaaaatacttttaaataatcatattttagtttttaattaattatgaactcttataattttttaaaaaataaattttattaaaatataaataaattatgtaaataatggaataattaaaatgaacagtataatattaaaattatttctaaataaaaatagtattatattataggagacaatatattagagttcttaataagtactttagtcatataatctatcca

SEQ ID NO: 1212 - DNA, 460 bp, Glycine max
tattagaatcgtcattaataagcttatttctaatagtgtcagcgagacattaattgtcctataaagtgaagttgtaagctaatttccccattattcccaaaacacgacttgtttcaatgttaatatatctaattctgaattttggcaacttgaagtatcattcaactaagctttgacaaagtaaggatgccaaattatagattccattaggctctttgcttcgtgggtttggctcttgtacaccatgtgtgttgtttttatgctcctctttcagttgatatatttccaatgcgtagtaagtgatcgctagctgcttacgtgccaacatagttgggattaaagtaactaatgtgatgcatctgcatgttgcaatgttaaaaaagataggataaattgtgactctagttcccctaattcttcaaaaccatgattttaatcccctacattttaattgctacat

SEQ ID NO: 1213 - DNA, 451 bp, Glycine max
  unsure at all n locations
agcttcacacaatnntattttttttatcaaacttgagttntggaaaaccaattactaagactttcctaactagatgatttaaatgatgcatgttaatatgtgcagccctatgatgccacaatcatgaatcatctatcttactcaccaagcaacttagctcatgaaaagatacatgttcaacattcaacatatagatattacctattctcttactgatctggacaactttaccggatatggcttcacttataagacatcaatttctattgaactctattttgaaccctttatcacaaagttgactaatgcttagaagttatgctttagtccatccacatataacacattcttaatctgagttntatgttgattccctatatcatgagaaatcatatttttccttttgtggtnngtctcaacatgaccatagtttggacttgtcacacgtcat

SEQ ID NO: 1214 - DNA, 397 bp, Glycine max
  unsure at all n locations
tgtgaagttcttccaggactgtccagagcaacattntgtacacatattggagccattcttgaaaatcatcatgtataggattctaattcctttctcttaatttgtccaattttttaagtatttggttttgtttccttgaatgctttaactatttgataaattagtcttgcatcgacaggacataaacaaagtgttactgcaccaaagtccattttcctcttgtgaagtggaatagttgtacgatgaacaagtatttcacctatattagatggatggcaaagagaattagggattctgccaaagtatgctctaggttatatgcaaggcctaataaattagaagctagattaattctatactctgtagcatgtaattaaatatgggaaaaataatatat

SEQ ID NO: 1215 - DNA, 334 bp, Glycine max
ggatcttaagcaccgaggctgcagcttaacacaattatgcaacaaataatataagtttccataagatataataaatctaaaatgtgctttctaagttgatacctaacatcataataacataagctgattgcaatttcaaagttctttatactcttagaaaaaaggtccatacactcttaatttctccttttctttcaaatctcatgattaagagaacacattctcaaatcaagaaaacaatatcatatgattgaattgaatacttatcttctaatgatgtttctctggtcacaaataacaccaaatggttgaacttacttacgtaataatcata

SEQ ID NO: 1216 - DNA, 460 bp, Glycine max
tatgcttatgaagacttcctgacactgctatgtgtgaagcacctagtaacctctgtcgaacatccctagaccaacagtgcggcagaggcagccaatatactcaccctttgggccctatgcactacactcaacaagtctaacggtccatggaaggaggaactccccagtatactctgggcctatcattgctaaccctagacaatgaccataaaaattcttttgcgactcacatatggcataaacaccatgatccccgtcgaagtcagggaaccgtcaacaaggagattgttgttctagcaacaaaaaaatgaagacaacatgagggtagaacataagacaaccgatgacgtacaagaggtagccaaaatcaaagaagagggtaccaagctccaagcatcaaggagatacaaccttaagtttcaacctcaagccttttaacccggcgacctcgtctggcgag

SEQ ID NO: 1217 - DNA, 309 bp, Glycine max
agcttgtaggatatgtggatcacggtactgtccattatgcacactacacatgctgatgctgttcttgccaacaatacttactcttcaaggacgaatctgaagtacaaagttcttcaattttatttcacagacttactcacttgacgataccaacactttgtgtcaacagactggatgatctctcgtcataaacatagcatgtgttattcaatttatgtgggtcagacaaaggactggaaataacactatcatcgtgttaatagataactcactttataagaaaagtaaaagttctctgctgaaatcttg

SEQ ID NO: 1218 - DNA, 264 bp, Glycine max
  unsure at all n locations
gacttaaccttgcgactctcaaagacgcactctgtttncactcgtaacatcacattgtcactttcctaccctaggttaactctacatttcatctctgacagtgntgcatgagcaatttttcagcatactacatcgcaaacatcatcacaaaaccctaaaacagaatgggtatgtttgacttcatcaagcatggcgatttgaacaagtgttcagcaaatgtcttcacaaattatcatcacacgccatatacctagcaagactacc

SEQ ID NO: 1219 - DNA, 406 bp, Glycine max
ataagatataataaatctaaaatgtgctttctaagttgatacctaacatcataataacataagctgattgcaatttcaaagttctttatactcttagaaaaaaggtccatacactcttaatttctccttttctttcaaatctcatgattaagagaacacattctcaaatcaggaaaacaaaatcatatgattgaattgaatacttatcttctaatgatgtttctctgttcacaaataacaccaaatggttgaacttagttacgtaataatcatatcatgaaatagcagagaaaggtcagccatcataaaatgaattaatcattcttacaccctaagtagtaatcataacaatcatgtctaatagagctgctaaatatttagctcacctctctgccatctatggaat

SEQ ID NO: 1220 - DNA, 416 bp, Glycine max
  unsure at all n locations
ntggtccttaggcctaagtgtatcactctagtcgttatgggaactacctacatgctccaacatggccctcattcacgtaccaagtggtttcataggccatttctcaccaaatcatgcgcaaatgccattgaggcatttcaccgagcacttggtgggcgcatgtttaggcacaaatagcaggggggtaagggcaatgtggcatgcccgatcatttcagaatacatcttaggcctaaggccattgcctataacccttcaactcaacataaacaaacaaatattcaaagataacttgctcatattgtttaccatatacatgtaacttggagcaccaaagaagcatcaatggacagctagagagcccatgaatggagtacttacttgttggggatgaataatcatgcctaattgcaataa

SEQ ID NO: 1221 - DNA, 379 bp, Glycine max
agtcaactgacgctgccgcttcattgttcaatttgagcgtctagatatatcatgcgcctgaatctgacattccagcgagaaggatgaccatttctattactcgagagctcttgtggttcaatttccaccgtctccttgagggaggtgcttgacctccacgtccgagtgaaaaaggatgaccattcttatttttcgagagcttccgttgttttatttccagcggctctatatccgatgcgcctgaattggacatccgagtgaaaatttataatcattaagatttctcgagagcttccgcactttcaattcgagcgtctcgatatattatgcacctgaatcggacactcgagtgataaattatgaccattttaatttctct

SEQ ID NO: 1222 - DNA, 227 bp, Glycine max
cttgcctcacagatgtccacgaaggataaggcggccgaaggaactagttccgctcccgagtatgacagtcaccgctttaggagcgctgtacatcagcagcgcttcgaagccatcaagggatggtcatttcttcgggagcgacgcgttcagctcatggacgacgagactgctgatttcgcatatgacacaggtttccgtcacgtgtcatcaatcactacccccatggc

SEQ ID NO: 1223 - DNA, 430 bp, Glycine max
agcttgtaggatagttggttcacggcaatgactcattatgcacacaacacatgctgatgcagtccttgccaacaacacatactcttcaaggacgaatctgaagtacaaagtttatcaattttatttcacagacttactcacttgacgataccaacactttgtgtcaacagtctgtaggatctctcatcataaacatagcatgtgttatccaatttatgtgtgtcagacaaagtactggaaataacactatcatcatgttaatagataactcactttataagaaaagtaaaatttctctgctgaaattcttgcaagctaatttgttcttctttagaatacctacaccagagaatagtagataagtcacttgtagttggaaaacagtggaaagcaacatattctgatcattgcaaattgcaagcagtcaatg

SEQ ID NO: 1224 - DNA, 403 bp, Glycine max
  unsure at all n locations
tatagtaaaagaagcanagtcaaaattntgtttcattntatcttgttgttaacacctaaaaagttagttgttggagcaacatcttgattggatacaactggcataagaaaactaattggatacaattgatgtggctaaattagggtataaaggtaaaacaactgggatggaacactttgagtgatgtgtaggccgatttaaagaacgtgtaagacaaattgactgataatggagcggctgaagggatgatagccatgatctcctagattttaaggagtgttaatagtgtttcaactaatataaccattagtcaatctctataaataaggcctatcacattataactaacacacagacatcaatacataagaatccattcattatcctgcgtatatattgtatt

SEQ ID NO: 1225 - DNA, 176 bp, Glycine max
  unsure at all n locations
ttaagtcacctgcngcatgcaagcttcccgtatccgtacttggaaggatctgattaccgccttcctaaggcagtatcagtacaattgtgatatggctcctgaccgtactctactgcagaatatgttcaagaaagagggtgaaacctttaaagaatatgcgcagcgatggagggatt

SEQ ID NO: 1226 - DNA, 313 bp, Glycine max
tattcaacaatgacaaatcacataacataattttaagattctgagcctcactagtagcagtatctaaagcaataatttctgcttccatggtagaatgtgaaataatagtttgttcagcagatttccatgatattacaccaccagctaaagtaaagacataatcacttgtcgattatgtttcatcagaatcaaaaatccaatttgcatcactaaacccctcaattacttcctaatctaccaactacatatgctatgacatgcctatagagagttgtcaattgcatcaaagaaccactaatttgataatattgtg

SEQ ID NO: 1227 - DNA, 564 bp, Glycine max
  unsure at all n locations
catggcaaccgaaaatcgtaaacggtataaagtatcttaactatacaaaacacncccggttgatgctgccgcgctgacaccgcacancnaactgacgcggcgcacgcgagcaagntgatgaatgaggacccatctcatctgtttctatgtggcaggcagacgaaggagcgcaactagttatccacatccgcaatgcgcgcgtaaaaccaccatcccctgttgacggctccaactgaactcacgtacgtccacgcaacccgtaggcaaagttataatgcagccgaggccccatcaaacctcccaagctgccacaacgaacaatcaaaaaaacatttaaacaggacatgctatcacagccaagcgaaacatagcaaaggcggaaaactctgctcaacacaataacacaaagcgcagcacttgtctcctaagaccacagaaacaatccttcgagcaaagagcttaccgctggaacgagctcaagagtataccagcaagctataaagcataatcgctacacggggcccgccggagggactagcaacaatcagaaacaaggatgacacg

SEQ ID NO: 1228 - DNA, 540 bp, Glycine max
  unsure at all n locations
tgaacgtggaatgatacatgcgataacgtgacaaccactgtactcgngcgacactananaacacccangcttgcctgtccgatgtagcagtatcgatgggcctagctactgttggcgaacggttaccaacccggaatgggtttaggcaaagaccacgacggtttgactaacctgattaatgccaaaggaactcgtgtgaagctacggttagtctatacgcccactcacgcagatctaaagagaagcatcgtgggaaggaagagcggtagtcaaagctcgtggtcgagactagaaggtgaaggaagcccgcactggcacataagtagaagctttataagcgcggttctgatggacgaatgctaagcggacgtgatataccatcacgatgtgtcgagtacatttggattggcacgacccttgctctaccgatttttagctgtgtaattggcgtgcgctgtgtcatacactaatttcgatggcggactctcccttgacgatcgactaccttcgcttgccctcgtgaggtgtcggttccgaacg

SEQ ID NO: 1229 - DNA, 336 bp, Glycine max
gctctctaagatgatacctatcatcataataacataagctgatagctattaccaagttctttatactcgtacaagaaagggccatacactctgaatttctccatttctttcaaatctcaagaataagagaacaccttctcaaatcaagaggacaaaatcatatgattgaattgaatacttatcttctaatgatgtctctctgttcacaaataaaaccaaatggttgaacttaggtacgcgataaccatatcatgaaatagcagaaaaaggtcggccatcataaattgaattactcattttacaccctacatagtaattcatacaatcatgtctaat

SEQ ID NO: 1230 - DNA, 276 bp, Glycine max
agcatcatcttcttcctccacgccgggaaattgtgttctgcgatcgtggaggccgatggtgtcgagtagcccaggcattttgagggtggtgttctccctccgcgtcagcaatgtcaagaagcactcttcgtttcattgccggctttttattaatccgaagtgtttataggtgatccgtaaaaattggttagcagaagtgaagattaacatcaagttgatccgtaatttaatcctaattatcaaaaaactcactattagtttacggatcaacttgat

SEQ ID NO: 1231 - DNA, 435 bp, Glycine max
catcccactcctatattggcaagtctctcatgacgatcacaagctaacactacccattattgggagctatgcaaaccaaactctctctgatgtaatgattctaaactatatattaatatgatgttgatattgctatttatctttgtgttcattcacatgtcttcgatctgatcatccattttcataaactgtcttaagatttaggcattggaaaatatttatatgctcgaactggggaagaacattcaggtaatccatctctagggatagagtgacattgtctagcctatgcatgcatctttgctcgtaatgcaaattatctaatataacttttaagggattaggagcgatattaggtaatatatgctctctcacttgagggatcatggttagagtatgttagaacgtccaagtaattatcatattatcataaaa

SEQ ID NO: 1232 - DNA, 372 bp, Glycine max
  unsure at all n locations
agctatacagcagattntagtaatgacccacttacctacaattaaaacaacttaatgccattaacctagggaattaaaaaaacttaatggctgagtgtaactgaaattgtggcaaccaaaagtcacccccaacagccaacaagtcagccaccatttggtctcccaaaaggctgatgcctatgttgccaattgggcccttattacaacttgaactaaacctaactaaagcccttttagttgattaacccaaaacatatttttggtcagccaactttacaaggattgggccattatttagacaaactaaacactctaaaattgaaacaaagtggtgtcatttactcctcctccatttgggccatgatacaactc

SEQ ID NO: 1233 - DNA, 471 bp, Glycine max
ggaaattaaacaatggaagcactcgagatattcaaatggtcataacttatcacacggaggtctgattcatgcgcataatatatcgagacgctcgaaattgaacaacgaatgctctcgagaaattcaattggtcataacttgtcacacggaagtccaattctggcgcatcacatatcgagacgctgtaaattgaacaccggaagctctcgagaaattcatatggtcataacttatcacacagaggtttgatttaggcgcataatatatcgagacgctcgaaattgaacaacgaatgctctcgagaaattcaaatggtcataacttatcacacggaggtctgattcaggcgcataatatatcgagacgctcgaaattgaacaacgaatgctctcgagaaattcaaatggtcataacttgtcacacggatgtccaattctagcgcatcacatatcgagacgctgtaattgaaca

SEQ ID NO: 1234 - DNA, 410 bp, Glycine max
  unsure at all n locations
agctntagcttccaactcaacaggtaggtgacaagaattgccatagaccaattggaaaggagtaagtcttgtaggagctatgtatgttgttctgcatgcccacaaagcttcatctagcttttgggaccaatccttccttgattgagcaactgttttttctaatattttcttaactttcctattagaaacttcagcttgcccatgtggtaaggcgaagctaccttgggtttgacactgtagtgttggaggactttggtgagttatacattacaaaaatgagatcctccgtcacttattagtaccctgggtgtgccaaaccttgagaagatattatttcttaggaagcaaataacaatttttgcatttgcatgntgtaccactactgattcaacccattttcttacatagtc

SEQ ID NO: 1235 - DNA, 438 bp, Glycine max
  unsure at all n locations
nttcaacacanaagttagtcgtaaataacgactaacaactcccctaaatttacagttttgcttgtcctcaagcaaagaaagaacagttcacttgtcctcaagtgacaagctcacagtggtaagcaatgctttcaaccaatttatggttcttttcaaccaacaaagaattcaatcacatgaacacaagtggcaagcaatgctttcaaccaacaacttttcacaagatatacagattttcaaagatatgaacatgataattaggcacactaatgaaataagctagcaagcaagacaaatatcaaggaaggttcatcaagccaattcctcatggtcactgtttcactcaagcacaagtgtttaggctatttatcaatcaacaaccagcacaagtcccaaattttgaatgtcatctcatgccatacagtcacaaacacacta

SEQ ID NO: 1236 - DNA, 398 bp, Glycine max
  unsure at all n locations
agcttgtaggattatggngtacccatcacatgtggtactaggtggcggtcgggcgatggtgcacaacaagttttccacatccacaatgcgcgcataaacccaccatcccctgttgcccacctccaactgaactcacgtactcccacgtagcccatatcctcgtttctctccacccgggtccccatcaatcctcccaagcttccacaacatccaatcaaaacaacattcaaacagcacaagctatcacagccaagcaaaacagagcaaaggcagaaaactctgctcaacacatcaaccaaaatcacagcttttctctcttaaggaccacagtaacaattccttcgatccaattcgttaacccgtggatcgactnncaaaatttactggaagtctatagt

SEQ ID NO: 1237 - DNA, 429 bp, Glycine max
  unsure at all n locations
ntccggatttagtcttcgccagtgaaaggatcgatgtgggtccaaaaagaggcaaatttgatcatcctactaggacgactgagaaaactggggcaaatgaagagggtgagaaagagggagaaacccatgttgtgactggcattcctatacggccaagtttcccaccaacccaacaatgtcattactcagccaataacaaacctcctccttacccaccgcccagttatccacaaaggccatccctaaatcaaccacaaagcctgtctaccgcacttccaatgacgaagaccacctttagcacaaaccaaaaaacaccaacaaaaaggaattttgtagcaaaaagcctgtagggttcaccccaaattcctttgtcatatgctaaacttgatcccatatccactcaataattcaatggtagccataacccta

SEQ ID NO: 1238 - DNA, 359 bp, Glycine max
tcggacatccgtgtgaaaagttacgaccgtaaggatatgtccagagctatcatagttgaatttcgagcgtctagacatagtatgcgcccgaatcggacatccgtgtgaaaagttatgacgatatgaatatctcaagagctttcgatggtgagtttcgagtgtatcgatatattataatacctgaatcggacctccgtgtgaaaagttatgactatatgcatttatcgagagtttccgatgtatagtttcgagcgtatcgatatattataagcctgaatcggacatccgtgtgaaaagttatgaccattagaatttctcaggagctttcgttgtgcagtttcgagcgtctcgatatatga

SEQ ID NO: 1239 - DNA, 424 bp, Glycine max
  unsure at all n locations
tagatagatcaacgtanggttctttttccttcaaccttcattctacatnttttccttaaacaaagacatgcatgattttactattgtatttcttctccatctcttccattgaaaagtgcattttttgtactattttatttttctttcttccattgtatatatatatatatatatacctattgatttcttattgcagtcatgatttgagtttttagagcaaactctttgagtcgatggtgctactatcttcgaaaatccttctatgaatcttcgatagtatccaaccaatccaacaaaatgtgtaatctctatagctatcttatgggcgtttcactgcaaaattgtgtctaccttggaaggatccactacattgctacccaccaagatcacatgacctaagatccgtacctcatcaagtcaaaac

SEQ ID NO: 1240 - DNA, 376 bp, Glycine max
gcaactaggatgttcggaagtatcaaagtaatctgggaatggaacattggaaagctataaagaaagttatgagatacttacaaggaacaaaagatcacatgcttacatataggaggtctaatcatcttaaggtgattgggtattcagactcatactttgttggatgtgtggttatgagaaaattcactcttggctatgtatttcttttagtcggaggagtaatatcatggaagagtgcaaagcaaccagttgttgttgttgcatctaccatggaagtagaatttgcagcatgttttgaggctacaagttaagctaattgactgcgaaactttatctcagggctctgaattgacttacgactgctaggcattgaaat

SEQ ID NO: 1241 - DNA, 442 bp, Glycine max
cagtgtgtcgtcccgagctaatcactgagctcactttaaatgggaaaaccgccctactcttatataaagtcggacaccgttcgttttttttccttgaaccaaaccggtaccggttctcccttttttgcccgatggaactaacaacggcccaatttttattcctttcactatttctaactttccgaaaactaaaaataccccccttgttgcttacaaggcaccctgcattttctttatgtttttttgtttacacaacctattaattgaggctgggcttttattttcacatcaatttaatataagccttgctttaaatttctttatatatcccaacctggttattgtggcctgctatattttcacccacaattattttgcacggcaatgtatttttagttaagaccatatattttgctcggttttatttacctgggatactaac

SEQ ID NO: 1242 - DNA, 224 bp, Glycine max
ctaagcttattaagaggcttcctccagaagcttcattaagagacttctagcacactccagacatcttctcaaagatcccaacggtcagatcatggaaaggtgcttggtgaagttgaagaccaaatttcgagaagatccaacggttaatgaaggctggacagtgtttttaccgagccagcttcatgtagctatttctagaagctttattaagaggctttttctag

SEQ ID NO: 1243 - DNA, 443 bp, Glycine max
  unsure at all n locations
agcttcctcggngccatttcctgcgaaggcttacatttggaaagctagttctaccagtgngatactattcttaaaacaaaaatgacatacaacctcctcccataaatacaaacatcaatgtaaatttagaggaagcttatgcgcatatttccttacaaacgttctcttgcacaagacattctattaaccaaaaaaaaatgcacccatatacaatcaaggcagcttcgttacctagattatttacacgtacttccaaggtgtatttgttacttacatcacacacctccttggctaaattcacatacatgcatactcaaagcattttgtggtaccaaaaattgcacatgtgcacatcttggtatttctaatacctatacatacacaaacttcatgatgaatcttgactatctacacaataaggngctacattntatgctcttttc

SEQ ID NO: 1244 - DNA, 300 bp, Glycine max
tagtggtgagatgaagtaacattgtgtgctagtctagtgtcttttaagtgtacttgaaaagataaaaagagaaaattactaagtttgttagcgacgttagggagtcatctaacaagaaattaatacttttcaaaattttcaagaactccaacatattttacccaatttataatttaaaaattaaacaaagtttttatttttctaaattcatattttaaatatattctaacatgagaaaaaatgttatagtaaaaaaaatgaatcgtaaccaaaaaataaaaatataggtaaattaatagt

SEQ ID NO: 1245 - DNA, 432 bp, Glycine max
  unsure at all n locations
agcttatgcgatccatggggctntccaaaccactaacttcttatgcaagaaatagttaatccattgggagttacatcccgaaggatatgatcaaatagctaactgcgtcattctatctcagtaccaactctattttgttaaatgggtttttttttatggataatcgattctggtgaattgtgaagagttacttcatgtataatgccttctattccacanaactcattaaataaaacatattcaccactcatatcggatctacaccattgtattttcttatttattttattttccactttcgctctatataaaagaaacatataaaacactatacaatatatggatagcatatgaatgaccctttaatgtntttgctacgttatggttgtgacaccacacattactttaacaacccatctcttgacctttttg

SEQ ID NO: 1246 - DNA, 298 bp, Glycine max
atcctctttcgaaacttctagatgatatttaccctttactgatgctaaaaatagcggcgaggaacgtcgagaagcagatcccgtcggagccgtactgggcattcttgattctgtacacatcagtgacactagaataatatcgtctctgccgatctgtctgttcgctgctgtatatgtttgctagtcaagggatattttcattagaatcaaaatgtgctctcagcgttataacaggagagacgacaaatggatttggacaggacaacagaggcttgtgtgagagaaacgttagaacctt

SEQ ID NO: 1247 - DNA, 268 bp, Glycine max
cgatccacgtttaagagaatttggggttagcccaataagcaccttgacatataaaagtttcattgacaattgaagaaaggaattgcatgacagcgactgaccaatgtttcaatttcattcaactaatggaatcgggttgagcctcctattatcccaggcatttccttcctgtgggttatgctgaaaacttttatttaaggtgggtttggtgggagaaatctttatcatatgtttctaacaaaatcgatcttttttaaagtttgaagta

SEQ ID NO: 1248 - DNA, 235 bp, Glycine max
  unsure at all n locations
tttggtgacgatgccactaccgaggagaaccacttggggatgtatcaccacaattcgtatcatttgttactcaaaccaccacccacataaaatttttgggttattggtggaggtaccaacgccttaatgtatggttagngctattcttgttttatggcttctgccagccctttgttttataaaaatagattcaatcaaaccacgcatatactgagctaatttgataaatcataaa

SEQ ID NO: 1249 - DNA, 91 bp, Glycine max
agcttgtagggttaggaatggcggttaagattagagagagagtcaagtaactgtgaagcgactttattctaacagccgcgtgacatgagcc

SEQ ID NO: 1250 - DNA, 132 bp, Glycine max
  unsure at all n locations
tcacanaagtttgtatggcttgaaacaagcaccgaggcagtggtacaagaagtttaatgagtttatgagcaactcaggattcaaaagatgtgacatgcaccattgctgctatgttaaaaaatatactaccac

SEQ ID NO: 1251 - DNA, 374 bp, Glycine max
  unsure at all n locations
agctntataagtgcgggtctgngagacgaatgtcaagtgtttgcgatatgtgaagatgatgctccaagtacttcggatttggttcgaccatgccctcctgatttccagctgngaaattggcgagtggaggaacgccccggcatttacgcaacaagcataatgtaaacctttacggatttaaaagctctatagttgggcctaggctttagagatttcattttgctaaggctctgtgtcttttgtttttgaatttataatacaaggatctttcttcatctgttactggtctctacccattctcattcatttgcatgcttacttctttttctgacacggcagattcgatgaccgagcccccgaagggactaatacct

SEQ ID NO: 1252 - DNA, 365 bp, Glycine max
tgtaggattatgtggtacccactcacatgtggtactaggtggcgctcgggcgatggtgcacaacaagttttccacattcacaatgcgcgcataaacccaccatcccctgtgtggcacctccaactgagctcacgtactcccacgtagcccatatactcgtttctgtcaacaccgtgtccccatcaatcctcccaagcttacacaacattcaagcacaacaacattcacacacgccaagctatcacagtcaagcagaacagagcacaggcagaacactctgccaaaacaccaaccagatcacagctattctcactcagcgaccccagtaacaataccttcgctccaattcgataaccgctggatcg

SEQ ID NO: 1253 - DNA, 201 bp, Glycine max
  unsure at all n locations
tcaccggatgatgccgatcgtacatttnctaatcgactttatccaattgttattcagggattgaatagaatatacaatgtccgttgtcgttcgttatatggccccgactgatatctttcagacgacattgcgcaatttctcttacaaacgctggccgataatgtttttttatttacggtataggaagttttttgttttgtt

SEQ ID NO: 1254 - DNA, 391 bp, Glycine max
tgcttgtggagcttctatggaggctggatcttgagcttcttgaggtcctttaatggtgattttccaccatggagatgcagtggaagacaaaggagaagaggtaagaggcggcgccatccactagggaataagccttggaagaaggagcttcaccatcaagatgagccttggataagaagcttggagaggatgcttcaatggaggaaaagaaagagggagagaaagagagaggggggagcacgaaattgaaagaagataaagggagagaagttgaactttgagttgtgtctcacaagactctcattcatcaaagttacaacaagtgttatacatgcttctatttatagactaggtagcttccttgagaagctttcttaagaaaacttccttg

SEQ ID NO: 1255 - DNA, 326 bp, Glycine max
gcttctttagaggcttactccagatgcttcattatgagacttctagcactctccatacatcttctcatagatcccatcggacagatcatggataggtgtcttggtgatagttgaagcaccatgtctcaagacgatccaacggttactgaatgctggactgctgttttaccgagccagcttcatgtaactctctgtcgaagcttcattacaaggcttctactataggcttcctcgtggcttcgttgagaagctgtgtccagaggcttctttgtgaagctacattcttatctatccacccctctattaactaaattagcttacttaat

SEQ ID NO: 1256 - DNA, 411 bp, Glycine max
gcaagcttgagcattcaatatcctgatgacggtgttccatatctcctcaacactggactaatacatttgaggactaaggttcatggtcttgcacgtgaagattcttataagcatcttaaggagctccatattgtttgctccaccatgaagccccctgatgtccaagaagatcatatcttcttaaaagcttttcctcattctctagagggagtggctaaagattggctatactaccttgctcctaggtccattttcagcctgggatgaccttaagatggtgctcttggagaaatttatctctacatctatggacactgccttcatataagacatctcatgcatcatgcatcttattggggagagcttgcttgattactacgaaagattctacaaattatgtgcaagtatgcc

SEQ ID NO: 1257 - DNA, 355 bp, Glycine max
tctgattctagtaatgatccatgtggcgtccctaaataatgtactggttaataataataaattaaatagcaaaaactatgggattctttcttttctttttctcttctctctctttttcatagcaattaaattcataaggaatattatcactatagagtcctgaatggcctgttcacaactctatgcagagtcatttctttctgatcacttgtaaccctcaaactattttgctctttcaaaagaaaataaaccaaccatcgtttatgtcgcacgtgagaaatataaaatgcggtcgataactctttcaataaaatttgtaacactttctttcaataatacatagtggcatcagagc

SEQ ID NO: 1258 - DNA, 306 bp, Glycine max
atggacttaccttgaattaatttctttgatagccctgttgagcctggtttccctatccttgtttagaagctcactacaagccttaagtgaaaaaccatgatattaccatatccttaaggaattttggagctttggaaatgttttgggaataagagtggggggtttttgtttcattggacaacttgttctgttggctatgctttatgatgtatgttgggccatacttgatgtacattgtatagttggtaaatgttggacatgctgaatgaaatgttgttctcaaaggtaaaaaaaaaaataaaaatt

SEQ ID NO: 1259 - DNA, 470 bp, Glycine max
tgacactataaaactaagcttccataggttattccaagatcatgatgaagaccaagtcaacttgtgtctcatgacaaaatctcatgagaacaacaaagaagaatctgtaaggaagaagtggtacatcgacagtggatgttccaagcatatgacaggagatgtatccaaatttacaaccatttctcctaagaaaagtggacacgttacatatggcgacaacaacaaaggcaaaattattggagtcggtaaaataggtacgagttcttctactcctattgaaaatgttatacttgtacaaggtttgaagcatagcctattaagtgttagtcaattatgtgataaaggatataaagtatcttttgattctgaaaaatgtgttattaagaatgagcatgataaagatatcgaacatatatggttcagagaatataatgtctacatgattgatttataacaacaacctgatatga

SEQ ID NO: 1260 - DNA, 351 bp, Glycine max
gttgaaagacactattatatatatacttaaacatatgcgaatacaattaaccaccgagcataagccaccattatgaaacctgccttgctatgaaaacaaaagggtgcaaatatttttaacaattttgaaatggataattaggtttgcaaggaggcccgagaattataaaatcctgtaattcgtttaaatcatctgttgatatagacaagcatgcggaatcatgttaaacgattctactgtgatttggatatgatagatttatttctaaatacttatcaaacatgtaccacaaatgtggtatggagcattactagagttgcattctgatcgcatatatcacattacagtgta

SEQ ID NO: 1261 - DNA, 433 bp, Glycine max
ctcatctatctccactatgttgcctaatgcctgaaatgttatttctgatggcagtgttcctaaatgtagggaagaatttctctaagaacacccgcttaaggtcatcccagctgaaaatatacctgcgagcaagggaatatagccaatcttttgcactccctccagagaatgaggaaaagcctttataaagatatgatcttcttggacgttatggggcttcatggtggaacatacaatatggaactccttaagatgtttatgaggatcttcacctgcaagaccgtgaaacttacgcagcaattgtattattccagtcttgagaacatatggaacaccctcattaggatattgaatgcacaagctttcataagtgaaatcaggtgcatccatctccctaagagttctttacgaggtggaggttgaccatgttctt

SEQ ID NO: 1262 - DNA, 193 bp, Glycine max
ctttgactctctcaagatgcttctttacataggacgcctgtgctagaccttctttatgcttataaacataagcattaggcataggcaaaagatctacaggagttagagggttaataccataaacaactttccaatgaaaactactagaggtgctatgaacagctatattgttgcaaatcaccatggagtaaac

SEQ ID NO: 1263 - DNA, 366 bp, Glycine max
agcgtctcgatttcttatgcggctgggtcggccatctttacttaatggtctgacacgcgagctttgtccagagctctcgctgttcaatatgcatcgtttcatgatcgtctgcgcgggcttatagcctacaccagacatgccacgaccatcttgagcatttatgaggctccgtatgccaacttcgtgcgtgcctatacacattgcgggttaataaccgttccccaacataagtcaggaccttattactgttgcaagagcctgacaaggttgaccacaaacggattcctctgttgagctgctgactacctcatatgactggaaagtggtgactatcgaattttctgcagatcccacataaggcattta

SEQ ID NO: 1264 - DNA, 152 bp, Glycine max
ttctgggaggcaatttactggagtcgcactccaacacaataagttcttatttctaattcatggtagaagaacatctactttcgtttgcccataagaatgagcttgtatacaagagctatggtgatgaaaatgtacactgtgatttcacttct

SEQ ID NO: 1265 - DNA, 385 bp, Glycine max
tgcaacagcatgctatatacacatctttatattcatgagtgtatgattagatttcgaaatacggtaccgttgaagtagataaatgtatcttccttggaaatatacattgtctttgtctgaaattgaacatgtatttcttggtccagagtttcgcaagtcaaatgactctgttgctatatcttatagaagtgcatcttctgagagaactttattttataaattgaatgaattacgaattaaaagaaatttacgaattagaagactaaaagactcacttattgaattctataaattaacaaacttacgaattgtaagaaataaagtttggaattatcagaactgaataagtgattaataaaaatatgttatttagcaaaaggagata

SEQ ID NO: 1266 - DNA, 197 bp, Glycine max
  unsure at all n locations
ntagcaactctntctttntgtttagtcaatacttctaatgctcttaatctctcctcatctaaatcaaccaactcatctgacatcattttccaataatggtcgattggaatgtccatttgttnttgtaccctggctgattgcaaatgtatttcgaccggaagtacagcatcatgcccattaatctatcgaataggggt

SEQ ID NO: 1267 - DNA, 385 bp, Glycine max
agcttatccctagaggggatggacctttttatgttttggagaggatcaataactatgcctcattgttggacctcccacaatagtatggagtctccaccacttttcacaattctgatttaactccttacgtaggcggagctgacattgaggaggaggaactaacatgattgatgtctaattctcttaaagggaaggggatgatgcaatcctccctatgaagggaccaatcactataaccatgatcaagaagctccaaaaaagattgagctaaagctgatgaataacgccctagggttctcatgaaccttacggacatttttgagcccatgagccaaggttgcgtccaattatctttgtacatattacactaggatgccataatatt

SEQ ID NO: 1268 - DNA, 415 bp, Glycine max
agcgtctcaatatattattggcctgaatcagacatccgaatcaaaagttatggctgtttaactatgccatgtgcttccatgttcaattttgagcatctcgatatattatgcacctgaatcgggcatctgagtgaaaagttatgccatatgagttagccgagagcttcgttgttcgatttcgagcgtcatcgacatattattggcctgaatcggacatccgagtcaaaagtgatggcagtttaaactttacatgtgcttccatgtttaattttgagcatctcgatatattatgcacctgaatcggacatctgagagaaaagttatgccatatgagatagctgagagcattcgttgttcattttcgagcgactcgatatattatcggcctgaattggacatccgagtcaaaagttat

SEQ ID NO: 1269 - DNA, 334 bp, Glycine max
agcttcatgatgaatcaagattgattcagtgagttttgatgataacaaagatgatgacaaagagctcaaaagtcaagatcacttcctgataacaaagatgatgacattcaagaatgagttcaagattgagtcaagaacacttcaaggatcatgagcaaatttgatttcaagaatcaagaatcaagattcaagattcaaagattcaagaataatcaagatcaagattcaagaatcaagagaagacttaatcttgataagctttataaagtttgtcagaacattgagtagcacaagaagttttcacacaatcattaccacagagtttttactctct

SEQ ID NO: 1270 - DNA, 400 bp, Glycine max
tctacttatgtggcagggcgggcttccttcaccttcttgtctccaacgcgaactttgaccactgttcttccttcccgcgatgcttcttttcatgtccgcctgagtgggcttatagcctaaaccatacttcccacgatttccttgggtatttatcaggctagttatgccgccgttgtttttgcctaaacccatcccgggttcataaccgttccccaacataactcgggccatcattaccgctgcatcggacagacaaggctgcccaaagagggagtccacggaggaaatgctgaccacctcaaaagactggaaagcagtttctaacgattcttctgcggcttccacataaggcatggaggatgggcagcttaccaagatatcttcctcgcctgacacgatg

SEQ ID NO: 1271 - DNA, 450 bp, Glycine max
  unsure at all n locations
gcttataatgtcttacgggaaataacccactaacacacacaagggccataagatcaagttaacatgcttaaaaaaacttcctttaatctttattatatatattaacataaattctttttttaatttcaagaaaacattttcacaatatataatacattttttaaaaaataaatatagaggtgttacactggtggttgggagcataggttgaggtggtagtttatgactanggtaataattctcctacaaatgagctatactattggaatatatatttctacaagacggttggaatatgttagagagattaaatgttacgttattgctataaggattggtttgatatcataaaaaattggtgtagtgaactttcatcgcatagtttaaagacatcacaactaaaactaacacgagtgttgtattaatgtcttaacatacgtcttaatcaat

SEQ ID NO: 1272 - DNA, 428 bp, Glycine max
ttgagccaaaatcctaactcaccatataccttgacccatggtgagaatgtcaatccttaccctcggaagcaaataataatagaatgaaaatatccaatcaaagaaaaaaaaaagagaaggaaaatttccaatcaaagagaaagcaaaataaaaaaagagagaaggaaaatttccaatcaaaggaaaaaagataggaaaggaaattcccaatcaaagagtgggagaaagcgaaaagaaaagaaagataattcccaaccaaagagtgggagatagtaaaaggaaggaaagatagctcctgatcaatgattgaaagacatcagaatatatgtgcataaaggtctttggaccggacaatatctgtacaatacagaattgtcaccaaatgaacaaaataaaaagggaaaggaaaccatgacctgaaatggtct

SEQ ID NO: 1273 - DNA, 400 bp, Glycine max
gaagaaattcatatggtcataactattcactcggatgtccgattcaggtgtatcacatatcaagacgctcgaaatttaacaacggaagctctcgataaattcaaattgtcataccttttcacacggaggtcctatttatgcgcttaatatatcgagaagctcgaaattgaacaacggaagctctcgggaaatcaacatggtcataacttatgactcagatgtccgattatgcgaatcatatatcgagaagctcgaaattgatcaatggaagctctcgagaattccaatggtcataacgtttaacatggaggtctgaccatgcgcataatataatgacacgcttgaaattgaacaacggaagctcttgagataaccaaatgagcattacttttcacacgga

SEQ ID NO: 1274 - DNA, 354 bp, Glycine max
gcttataatgtcttacgggaaataacccactaacacacacaaggccaaaagatcaattaaacatgcttaaaaaaacttcctttaatgtttattatatatattaacataaattctttttttaatttcaagaaaacattttcacaatatataatacatttcttaaaaaataaatatagaggtgttacactggtggttgggagcatacgttgaggtggtagtttacgactaagtaataatttctcctacaaatgagctatactattggaatatatatttttacaagacggttggaatatgttagagagattaaatgttaggttattgctataagtattggtttgatatcataaaaaa

SEQ ID NO: 1275 - DNA, 407 bp, Glycine max
tcgatcatccaccaccgccgccaccatcatcttagaattatattttaatattattactactttgattttcagccttgtattttggctatattattatggtatgtgaacaatttactatttccttatttgcatggtatgtttggaccaatgttaagtatgttatttgactatgtggagtgtataattaatctattcatggttgtatgctccatggttttcatggttcttgcttcttgcttgatgatttggttgatatttttttatgaacattgaatggatgtttaaattaaatttgtttgatacgcactgtggctgtttgttgatcccaaaattataatatatgcacagattctgaaacaaagggggagaatctatgtgagtgatcgactaggagatagtgtgtgtgt

SEQ ID NO: 1276 - DNA, 292 bp, Glycine max
  unsure at all n locations
gcttaacctatcgtctgnacagtctttatatttgggagccaatccaatccttgtgttcggactctcagccacttatgatagccgccgatgatcccattacggcttcccctaagctctctgtcttttcttcacgccgcatcccatgccttgcgaactccttggagtaccctcgcgttgtggtcactgaaaccccgtgcgatgaaaggcgtgatgctatcgtctgatggcactcctctcatgaggtagccaagctgtcttatggcgaggacgggattataattaatacaacccc

SEQ ID NO: 1277 - DNA, 397 bp, Glycine max
gtgacactatatatactaagctttataattatgcacacaacttcaaatcaagccccgactatggtggctttcgaacaaacaaataaaaacccttcgctcaatggcgcattattcttaataaattctaaaaaagaaaaaaaaaagtaagaggttactgtatgagttcttgaaagaatgctgctgcgtataaaggtgcgtctgcaatgagagaagggatgagctatattattatattggtggagaagatggaagaacctcggtattgggagaggagggggaacaggtaaaggggtctcttccttcacctccatgctataccatattcattttacttttatcatatgatgtctcatgatctaatcaaatcctctttaagaagttaaatagaatataaaat

SEQ ID NO: 1278 - DNA, 488 bp, Glycine max
  unsure at all n locations
gagatgaacctcgagacccgcaccttaagacacccgcggcatgcaagcttgtacgataattgggtacccatcagtttgtgttactatgttggagaatggacacacggctctcataaatataggctcattcacattgcgcgcagaaacgcaccatcccctgatgcccaccaacaactgagcttacgtactgccacgtagcacatatacacgatgatcttcacccgggacctcagaatacctccccagcctacaaacctcctaatcctacagcgttcaaacagtactagcaatcacatccgcgctatcttgatgccgggcgtggaacaatgttcgcacataaacgaagatacctgttatctctttaaggacgcacagaagcattctgaaataatgaacnccggtgggcgacttgagttcaaactgaagccgtatagtctactcatctacggctcacgagatgacggggaaaccccatagtaaaaagtttg

SEQ ID NO: 1279 - DNA, 455 bp, Glycine max
agcttataagaaccaaaatgccttaatcatttccatatatgcatgtgaattaggacgcatcaacaagaatcaagccaaggctattgtgcaagcaatcaatggggcaaaacacaccaaatgattataatgatggatggctcaaattctcacaaaggtaaaatcatcactttcaaattgagctttcaaaactatcatgacatgtagagaagaatcaaggatttcaagtcacaaaatgtcaagaacttttattttcaaaacaattacccatttcttgaacatatcctataattcaaagaaaaacatgcaaagtcgtacgtgcacacaaaattgacccaaaatattaaactgaaaatccgacgatactaacagcattaacatattaacacaactaacaaatttaacaaaccaacataactagcaaaaccaaagaacactctcccccccccccccatact

SEQ ID NO: 1280 - DNA, 486 bp, Glycine max
  unsure at all n locations
tctagccaatggacttacctcgaattaattcctttgatagcccttttgagccttgattccctttccttgttttgaagctcactacaagccttaagtgaaaaaccatgatatcaccatatccttaaggaatgttggagctttggaattgttttgggaataagtgtggggggtttttgtttcattggataatatgttttgttggctatgcttcatgatgtaattttggcccatacttgatgtacattgtatattggttaaatgttggaaatgcggaatgagatgctgnttctcaaatgctacagagtattaaaaatataattaaaaaataataataattaaaaaatcgaataagaacaagataaccaagaaagttgagtgaataagatcttaaatggaatatgaatgatgagactgcttgatctactctctatggttaaattctatctttatgtcttcttatatttctctatatatgcacttattccc

SEQ ID NO: 1281 - DNA, 428 bp, Glycine max
  unsure at all n locations
gagcttcttatccaaggctcatcttggtggtgaagctccttcttccatggcatattacctagaggatggcgcctcctctcacctcttctcctttgtcttccgctgcatctttatggtgaaaatcaccattaatggacgtcattgaagctcagagatccagcctccatagaagccccacaagcaagtctccatcaagtggtaatcaaagcacaagagcttcaagtaggagctccttatacctacattaatcttttttctttaccttctcttccattgttgcttcttcatttttctccatgtatctcctcacattgcttgttatanatgtcgttaacatgattncttatagtttccaccaattaaacttgctatagaaactaatttgaatttctatggttcaaattgttcttgttcttgaaccatgaatt

SEQ ID NO: 1282 - DNA, 413 bp, Glycine max
tcagaccacaacaacacaaaatctaggtatccaaaacccctcaatttaatggattttcaaggtttgagaagtgaaattgagaatgaggtaaatttggagcaaactctcacctcacacaagtctataacatcaatttaaacttgctcaaactggatttacacctaaaattccaccgaatcaaaatttgactcctcaacacccaattttaccctagaaatggctctttgttcactttggtcatttgtttttctctcttgtacagcccaagctttctcataagtgctaaatgacatttcaagctaggattaactcactttaacctccaaatgccactaaatccagatatggccttccaactctcaaaaccctactctttttccactcataacaccatattctcactttctaaccct

SEQ ID NO: 1283 - DNA, 196 bp, Glycine max
aggactggtgttttactgcactgcggttagggcaccatggtatgggaatcgcatgactgcccatttgtggattatggacagaaaagatccatggaaacgatacctagcaggcacaccatacactggaatctgatgcaccaatgaagcgtactaaggtgcctcacattcacattcacgttctcatcctcttacacat

SEQ ID NO: 1284 - DNA, 574 bp, Glycine max
  unsure at all n locations
agattattttatttttcgggantnacgttanntnnttaccgcacgcgctttgataccctgctatccgtgacacttcagagtactcaagctctcgtatcactttacacacacttcctgatagcgccgtcttaggtggcttgcaaacgaacataattaaccccattgctcctaggcgcactactctcaaagaattgcaagatagaagaaaacaagtaacagggtactgtctgagctcttgaaacaatgctgctgcgacataaggcgcttcagacacgagataacgcatgagctatatatatatatgggtggcgaagacggatgaaccttggaattgcgagatgagggggaacacgtataggggtctctccctttacctgctagcaatacctgtatgtgcatactttcatcttacgatgtcccatgatctaatctaaccccctttagagcctaactcattataagatcgatgacttttctctcaattagttatattaatcttcaaattgtagactgcaactacgatttttacgcctacataatcttcatccgctacgctttcacgattccctcatcc

SEQ ID NO: 1285 - DNA, 190 bp, Glycine max
tctaaaaagaggcaaatctgatcatcatgctttgataaatgcaaagaaaaaaaaaaaaaaactacggcaaatgaagagggtgagaatgagggagaagcccatgctgtgactgccattcctatacagccaagttgtccaccaacccaacaatgtcattactcagccaataaacaaaccttgtacttaccca

SEQ ID NO: 1286 - DNA, 378 bp, Glycine max
ttcaggaccttgaatactcagcttgataaggttccgcgtggatcgtcgcaaaacgaaggtgcgaaccttgcttcgattgcttggagaatggctgaccacgacgtgatgaaattgttcctgaacatccattgaaaccagctgagagcttgtccatcgaagtaaaaagaggccactggtcctcaaagaatcgcgatactttgaagatccatcctagaggatcgtggccgtcaaagcggggcacgtcaagcttgacagctggctgtgggtgtggagaatgttgggaagacgctggtgaggcaaaagtaaggtgggagagacgctcgcaccatgcttcgaacttattggccaagtcggagtgtctctcggagagggctgcta

SEQ ID NO: 1287 - DNA, 408 bp, Glycine max
  unsure at all n locations
agctntaccttcacgaacacataatttcattattccattaatgcatcacacggtactctattagaaaatggatctgttactctgtgcctgcaaggactgctgacccttccacctgatagtttatcgcatcagatagacaaaatatatcatgagatataagtctctaagttcataactagagagagccacacagtctaaataagcaaactaaccatgaatgcaaaaacaaatattgaaataaataataccactattatgtgtagtgcagctttccaacttttgtacctaactgaaggagacttgtcaatcacttgagagcctgtagcagatgcaatactgtaatgaatgaagcttcatcgtgagaactgtggtaaaacctatagtgacagacaattagtcatcattata

SEQ ID NO: 1288 - DNA, 406 bp, Glycine max
tgagtaagcctctctaagagagaatataataatcttatataagtctctatcctcaagcatgagtgagccaccgtagagcgagtctatctcaatacaagagtgaattcactccttggagtgaggaagctataaagtaagagagcctctatgagagagaagataaattttttgggatagactctatcctcaagcttgagtgagtcaccatagaatgagtcaattttgttaacacatccttgctaccctactatcacattgtatagtggaagaatctgcatattggagaattataatcgtgtgctcccatgactactcttaattactaagtgcctattttaactttacgaagcgggatagtccgaatattcactacaaagcctgtatataaaaatacttcatgcatgta

SEQ ID NO: 1289 - DNA, 273 bp, Glycine max
tcttgttaatttagttaaatatcgacctttaacgagttatatacatatcgagatattaacctgattacatccatacctcgtaataacaatgttaatacctcagagagaaaaaatgtcactaaaaattacgttacttgaattaatgggcatcactatatttgttggtattaacacaaagcacagtcactgaaacagaccaagttaaataatagtgacaccaaattacactcactacttgttggagggtgaattcataggtaacactatattctg

SEQ ID NO: 1290 - DNA, 255 bp, Glycine max
  unsure at all n locations
agctntgcggtggtcggtggcggcaaacatggtacgccgatggcgtctattcgtcgcggacgtacggatggcttccggatcaacttgatccgtaagctacgaatcaagttgatccgtaacatccttccggatcaagttgatccgtaagtnccggatcaacttgatccgtaagcgtattatttttggtatttgcatcggcttttgcatttttgcctctgccttttcatttatttccctttttatttaaaactacta

SEQ ID NO: 1291 - DNA, 463 bp, Glycine max
ctgtcttgacttatttatacccatacccctcaatattatactataatatctatatgtacactatgatattgttgagtctaattaataatcaaaatgttattgtgtattgcttgatttgtcacatgttattgatgtgaaatatttatcaactttagtgataagttaatgactaattgctattgacagagttggctaaccacatctatcagggtctattccgaactattatttttcatacacaagtagtggcaaagtcaaatatttttttaatggggtgaaaaaatagttataatattttcatagatgaaaaataatatgagttttattaaaatggtactaaaggaattagaaatggtaaaaattaaaaagggtaagtggataaaaatagtaccaatttatctattttcacttttaacttttataactttttatattcatcttttttttaagaaaattatcttat

SEQ ID NO: 1292 - DNA, 460 bp, Glycine max
  unsure at all n locations
ctattacgtgagactatagaatgactaagctttcaacaagtttcttcacatatgactatcatgaagcagaaaactagcgagagtacccatcatatctcccaaagccccatacccacgaaatgtaagagagaaggatgtgcacccaaacctgaaatttcgaagtcccactcgtagccacgcacttcacgactccgaaaatgccctccttttgcgatatggggcagagatgatggccaaagggtgaagctttgcttggagcttcaatggagaatgaagaagaagataatggcaacgtgagggagagagagagctgtctgagaagtgcgggggctgagtgaagagagagacaagctctttggttttaaataaaagggtgtgctctgtttctattattgtatctaagctatgccgcatgtctncgtttgagtggagcaataagggcccactttaccttttgact

SEQ ID NO: 1293 - DNA, 393 bp, Glycine max
  unsure at all n locations
tcttgtataatttagttaattattgaccttaaacgagtaatatacatattgatantttcacctggtaacatccatacctcataaaaacaatgttaatacctcagagagaaaaaatgtcactaaaaattatgttacttgaattaatgggcatcactatatttgttggtattaacacgaagcataatcactgaaacaaaccaagttaaattatagtgacaccaaattacactcactacatgtnggtggtcgaattcataggcaacactatattctggtggttaaatttaattatcacaggtgccaccttaccacaatattacaaatattaagtgcaataaaccacatatatagtgcactacattccaacacttgatatattacagaatttctact

SEQ ID NO: 1294 - DNA, 351 bp, Glycine max
  unsure at all n locations
gcttnctagacgcctactntagatacaactagatcagaatgcatcctccacacgaggagaaaatggcattcatcattgaagatgccaacttttgctatagggtcatgccattcagcctaaaaaatgcaggcacaacataacaacaactaatggaccgagtcttcaaacaacagataggacaaaatgccgaggtatatatggacgacatgattgtcaagtctcaaactataccccaacatgtggtggacctggaagaagttttcggggaactacgaaaatacgacatgcgcctcaaccttgaaaaatgcactcttggggtaggcaaccacaagtccctcactacagcactgg

SEQ ID NO: 1295 - DNA, 501 bp, Glycine max
  unsure at all n locations
tgaccttcaaactaagcttgtaaattaggactttctctcagctgtcacactccctctgttcataattctcaatgaagttgcagagtgataaaatataatgcaaaaggctaataaaggttggaccggttaataaggattaggtttatatgacttacaagaaccttgctaacggacgatcaataaatatctccataatgacattctttgagtcctaagacatatcgtgtaatgccctacaaaaagacctaagcttgcacctaatgagaaccgttgaacttaagtctatcctaggtcggcctattaatttcagcccaaaatgaaggatgacgaatggataagtgagctntcctaagttgtagagtgataaaatataatgcaaaaggctaataaaagttggaccagataataaggattagatttatatgacttacaagaaccttgctaatgtacgatcaataaatatctccataatgacattctgagtcctaagacatatcatgt

SEQ ID NO: 1296 - DNA, 343 bp, Glycine max
  unsure at all n locations
aagtttgaatatgatgtataagaaaatgaatgtgaacctttctcccctttgaaagacttgtaaaaaaaatgttttaaaaatacttttaattaatatctgaattttttttccttattagtatatatgtgaggggtagagggtgtcacatcctgcagcaaataatgtgcaatatcataacccctaaactgtatatatcaactttggcaattattggtgcactttntagccattcaggtgccatgtaacctattgttccttttaaattagtggttgttctagtttggtctttgagtaatagcttggaaagccaaaaatctgcaatctttgttgtgtgattggcatc

SEQ ID NO: 1297 - DNA, 468 bp, Glycine max
  unsure at all n locations
atgagcaacttataggagtcttcacggcttgccagcttcacctgtcattgaagagcaacgacactcgtcgtagaggtgaaagaggacttatatttcaaaatgtcatcgatcatccaatcatagccaacaatggcaggtggggacgatgtcgacccaacgctatggatatgtcacacgaagggagacgccctgacatctncactaccactacctctcctcacaccccaagaagtagaagaggaaaggatcacaataaccaaggtaggcttcctggaagtagtggaagaccgcgccctcccgtgagggcgagaagtaccccgaccagtacaacacaaatccctcaccctctccgaagaggaggacttattgtaggaggcaccataatgagtatcttttgatgaagaacgcaccaaagagatgacctcccacgccatcatgggttgctcaattgagcccctagaatcactg

SEQ ID NO: 1298 - DNA, 60 bp, Glycine max
gagcttgagtctgatttatatattacatatcatgtagtagtatctgtgcgtgagacctat

SEQ ID NO: 1299 - DNA, 131 bp, Glycine max
atccaattcaatatcctacgaaataatgcatcaatagagtatatgcaatctatcataatgacaagttaatgggaacgaactaccaatcagtaatttgcatagaaaagacatcatctgagtcctaactagga

SEQ ID NO: 1300 - DNA, 438 bp, Glycine max
  unsure at all n locations
catatgtacgactacggggccgttcgccacggacgaccagaaggcttccagatccacaaggcgccgcaaataccaacaaagtctgatggccacctccaactggactaacggactcccacgtagcccatatcctcgtnatatctccacccgggtccccatcaaatctaccaaacgttcacaacatccaatcagaacaacatgcatacagcacatgctatcacaggcaaccaaaacagagcacatgcagaaaactctgctcaacacaacaaccaaaaacacagctcttctctcttaaggaccacagcaacaatctcctccgatccaacacgtaaaccggtggaacgactcccaaattatactgggaggtctatatggcacaaggcctacttggtgaccgttgggagcagacagcaaacatcacgaacacattacgtgccg

SEQ ID NO: 1301 - DNA, 167 bp, Glycine max
aaccactgtgaggttatccaccacaatgatgttaccaaatccagactcaaactcgagattcttctcctggtaaaccacctcgtcatcactgtaaaaaaagaaaagagtcagaaaagcgcacccctagggttccgtttcaggggccagaacctgaaaagggcgaagta

SEQ ID NO: 1302 - DNA, 341 bp, Glycine max
ctgtcaaggagcttactagttgggtatgtttcgtttaactgacaaaagtcacatattctgtatacttgaagttttttttatataaaattgcatattcggaaaaaaattattcattctcattccttaaatttgatggtttacgtgtatcttctgtttactgattattaacaaaatatttcccgatgagaaacagttaatgattgtcactctttcctttggttttttatacaagagacaaagaactaattcccaaatccaatgaaagtagttaataaatttacaattctaatggcaattgtaattattaattccaatatatccatataattaagtgttctatt

SEQ ID NO: 1303 - DNA, 315 bp, Glycine max
ctgcagctaacaagctgtgttatagagtgtgtttggcctttctgactgaaaaagcgttttaagaatcttgagcttgacctttatactaaacaagccaagcgaagttgagccttaaatatgccgagccaaatgcccttgacaagctgctcaggtcatttccatccttaccgacaatcacatcgatagggattataacttcgataagggccttcttctcactcttcctcacgctcgatatgttataatctccaaacttgagttgacaacaatggacacaaatagcgggatgttaagttagttttacggggatatcaa

SEQ ID NO: 1304 - DNA, 473 bp, Glycine max
  unsure at all n locations
tattaactctatacaagagtgaagctctgataccacttgttagacaattggcctcaggtatcttaaaaaggggggtagaattaagatacacaagctgtcccccaattaaaatttaactgtctcttttattaacaatgcaatcctctattatgaattactctaagaacaattcaaaaacaaacttctttaaagcaaaatataaacaataataaataatagaaatttaagggaagagagactacgaactcagtttttatactggttcgaccacagcctgtgcctacgtccagtctgcatgcaacccgcttaagagttccactatcttgtaaaataccttttacaaagtctgaagcacacatgaacaacccttcccttgcgttcaaaaaccttacaacttaagagaacatcggtactttaatcaatctctttgagtgagaataagaagaagacttctctatntaggagaaagatat

SEQ ID NO: 1305 - DNA, 433 bp, Glycine max
  unsure at all n locations
agcttatcacacgtttcaacatatataaatttatgtgctatatttatggatgtttccttgaaataaggcattgaaaaacaggttttcttcacaattatatctgattgtccatcagattttggctatacagattggtaacttcatcatgagaatcagtgggatatgccttcttttaatgctcgccagggaccaagctgttcctcacgggaatgaataacaccaatatgttttattgcatgttgtttcagttgacatttcttcaaagaaaatgctaccaagtgttgttataaacaatactttcacggtcaggaataataaatatagaaaatatggtagaaaacaagaaanagattaanaagtaagtttaataatcatcacaatctannaataatttatattatcaactaaatatcaaaattagaattgatataat

SEQ ID NO: 1306 - DNA, 455 bp, Glycine max
  unsure at all n locations
gtgagtatagcaattgtttatatagttagttctaaaattgacatagcatttgcgagggattcaaccattttagctatagaacctctagctgattatccttccccatatgaaattcctcatgctgattcaactgaaccaccttcacaagataatagcccttctaatggctcaactgaatacattgagttatattcaatgctattagaatatttcgatctgactcgttatggagtagtggttgatgggaggacagattctagctctgtaagctcttgacttgcctctaagaactggagttatattaatttgtaaaaataataaagtgatgcattaaatgtccacatagattatttgagttaaaatttcaattttgattagacaacaacaacacaaaagcatcaatagaactgtatctgagttntgtcaaatggcaattaattagcaactcggggatg

SEQ ID NO: 1307 - DNA, 347 bp, Glycine max
  unsure at all n locations
agctttcttgagaaaacttccttgagaagcttctttgaganaacttccttgagaagctagagcttagctacacacacccctctcataactaagctcacctccttgagaagcatccttaagaagattcgtaaagaagctagagcttagctacacatacctctctaatagctaagctcacctccttgagatgagaagctagagcttagctacacaccccctataatagctaagctcacccccatgacaaaaaacatgagaataaaaaaaagtccttattacaaagacaactcanaatgccccgaaatacaaggctaaaaccctatactactagaatggccaaaataaaa

SEQ ID NO: 1308 - DNA, 449 bp, Glycine max
  unsure at all n locations
ttacagcagaatttagtaatgacccactaacctagaattaaaataacttaatgccattaacctagggaattaaaacaaactaaatggctgagtgtaactgaaattgttggcaaccaaaagtcacccccaacagccaacaagtcagccaccatttggtctcccaaaaggctgatgcctatgttgccaattgggcccttattacaacttgaactaaagcccttttagttgattaacccaaaacatatttttggtcagccaactttacaaggattgggccattatttatacaaactaaacactctaaaattgaaataaagtggtgtcatttagtcctccatttgggccatgatacaactcacaaccttggacttttctccttgaaacttgngcttgtattcaaatagtatggacagcacttggtgaagagncgtcttggctctccttgctct

SEQ ID NO: 1309 - DNA, 418 bp, Glycine max
  unsure at all n locations
agcttcatggtgaatcaagattgattcatagagttttgatgataacaaagataatgacaaaaagctcaaaagtcaagatcacttcatgataacaaagatgatgacattcaagaatgacttcaagattgagtcaagaacacttcaaggattaagaggaaatttgatttcaagaatcaagattcaagaatcaagaataatcaagatcaagattcaagaatcaagagaagacttaatcaagataagtattaaaaagtttttcagaacattgagtagcacaagaagttttcacaaaatcattactaaagagttntactctctggtaattgattaccagattatagtaatcgattaccagtggttntaaaacgttaagattttcaaaattcanatgaagagtcacatttgttgatgtgtaatc

SEQ ID NO: 1310 - DNA, 413 bp, Glycine max
tatgctgcaaacatttacaatagacctcctcaacctcagcagcaaaatcaatcacagcagaacaattatgacctctccagcaacagatacaatcccggatggaggaatcaccctaatctcagatggtctagccctcaacaacaacaacaacagcctgctccttccttccaaaatgctgctggcccaagcagaccatacattcgttcaccaatccaacaacagcaacagccccagaaacaacaaacagttaaggctcctccgtaaccttccctcgaagaacttttgaggcaaatgactatgcaaaacatgcagtttcaaaaagagaccagagcctccattcagagcttaactaattagatgggacaattggctacacagttaaatcaacaacagtcccagaattctgacaagct

SEQ ID NO: 1311 - DNA, 506 bp, Glycine max
  unsure at all n locations
acgattgattgttagcgatctagcacgcacccagggatcatctgagnccacccgcatgcatgcanaccttaggcttgtaattgctctctattgttgcacagaagggcaacagtctgtgtggtggtatgtcgaagaacataaaccacataatctggccaccagtgcagattatgtgattcatggctagttgggttaccaggttaaccaaggcaattagtttaccttccaactttttaagttactggtgatgaacactgaattcgaggcaacttcactcactcctctaatgacaataacatcactactggcactaaattggtgggagaatgaagcctcttctcaggaaaattactgcttcaataggggacatgacttcaagggctccaccactggcagcatctattatacttgttttcgtgcttctgagtccttcatggnatattggatgagaatctgctcccatattggtgagaggccaactgaccataatcctcaatctctctacn

SEQ ID NO: 1312 - DNA, 465 bp, Glycine max
  unsure at all n locations
ttcacctgtctntacataatcagagccatcaacagacttcataaacatggtaccagcttgagagttaatagaaaaattaatgatgcatctttgtttccgatcagtccatgcatcggacataatagtacaaccatacttgacccattgctccctatggcctttcatcaaatttttagtatattcaacttccttcttcaagagtggaactctgatgtcatgatagctaggaatgggcaaatgtggcccatattgaccaatggctgcaaccattttctcaaagcttttcaatataatgaggttgaatgacaaacttgcttggtaccaaaagcgagcaatatgttaatgcacctttcaatacttcattcttatccattgactctcttatgttcatttgcctcagcatctccatttttctccgattgattgcattttctggattcttacaaaattatgccattggtcctt

SEQ ID NO: 1313 - DNA, 512 bp, Glycine max
  unsure at all n locations
catctattgtatcctcatgctaccaccatngatacantagagcctgcctgcatgcatgcaatcttgagacaacgttcatgtttatcttgtgtcgaagaactaacattcggagcgagtagtgcagtccacacaacaatatccttgatgggacttagatcttacactggagctgcattttgcattttccagaattcgcagcggatgtaatcatagaatatcatacgaaaagatcatgagcttacccaagataactaatacgaacctacacggccctctaaataactcacatattccttcaagacgatatacttgatattaaaacaattcctgattaataatgctgatgcttatgcgacgtaataaaatgcttttatcctatactattattatcgacgatgaatctgccctcacgtgtgaaaaactgtgataatggcgaattgtttcatcatgatgttcgaaatcaagacttggacagtataaaaaaagccgattaacgaccggagtcctttgat

SEQ ID NO: 1314 - DNA, 441 bp, Glycine max
  unsure at all n locations
tcataccattggcattgattttttttttttttatcattctgtagttcttttgttgagtaactatattatatttgaataaaaattctaaatttgtttttccattgccaacttataccatttcaataaatacccttacaatttacactaattaaataacaatgtaaaaaattccaataattattacataagatcattcgtataaaaanttgacaagtatcaacactaaatttcaaatgacaattttatttttgttttgattgactatgtatatgaagatatcaaatgaggatttatatatataaaactaaagcaccttataatcttgaataacatcattaactaatatgagtacatccttatttttcatttcatacnagttgttttttaacacatcagggtcggtctaataaggaaaggtctgggtatcctacacaagattct

SEQ ID NO: 1315 - DNA, 268 bp, Glycine max
ctaagctgaattgaaaacggaagcttcgaagtctaaacgttcatagccttttcagacttgaagcatgggcgaactggagagtgagaatgtcataagtgatgcatctttgtttccgaacagtccatgcatgggacataattgcacagccatacttgacccattgctatctatggccttgcatcaaagtttgtgtatatagaaatttcttcagcaacagaggaagtcatatgtcatgatacctaagaacaatcaaatgcgatccatattg

SEQ ID NO: 1316 - DNA, 163 bp, Glycine max
tgatcttgaaagatgaattggaggtttgctcatggtccaaacaaaacttgtatcagcggttatgcgaaacagagaccaacatgctagccattgtcagcaggtaccaagaagaactaaatctatccacggcccacgagcatagagtggtggacgagtttgccca

SEQ ID NO: 1317 - DNA, 392 bp, Glycine max
  unsure at all n locations
agcttcaagaacattnttcactggtggtgtttacttcaacttcactagntagctctgctacacataatggcttgtctagtgcaattactgctgctagtaaaagtcctaatgtagtttctaattctgtaatttcatcccctagcaatgttagcttgcggcatgctaggctgggtcaccctaatagcccatgtcatgaagctagtcaatcattgtaacatttcctcatctaataaaaatttccagacttttgctcctcatgctatatgggaaattctcacagatttccttctcactcttttatttttgatactctcctttggagctttttttatagacttgtggggccttctcattaatttcctatgctgtttcanatactatgtcattaattg

SEQ ID NO: 1318 - DNA, 303 bp, Glycine max
ttctaccactcctcaaggtaatagcactcacattcccttttgtattgataattggttgtgctggaatatttccagaaccatgttgctgcaactaattgacaattatagttaactctccaatctgagtctgcatgtcttggatggtggcacaaacattctattgaaactgaatgttgttagtggccattttcttcattggctcctccaaggaaggtccaaaactgctattctgcataggttgtgcatatgtaggtgtagactgccagaattgttggtgtctaaatggaggagctcggtatttga

SEQ ID NO: 1319 - DNA, 227 bp, Glycine max
agcttgtaacgccactggcaatggcgggatttagatgccgtcattggcagcagcgggatggggtatgactcaacttaaaccgccagtacgaatgctgggacaggctgattagtagagacagagtgaccactttacgccatcgtaccttccgtcatcttgtgactctcacctctctcctctcccctcctctgttcttcatctttcttttctaaacctctttctcttct

SEQ ID NO: 1320 - DNA, 196 bp, Glycine max
tggtcaggtcccattggtaatactgctagcattagtgttacaaagcagaagaaacacactacaggtgatgcattggatttatcaaaatcatataaaggtgccctcaaggataaagttaaaggaaagaaaatcatagcttagatatttagtacattcttgcagagttaaattaagaaagaacctgtccctacttcct

SEQ ID NO: 1321 - DNA, 337 bp, Glycine max
tgtttatatgaagaggagtctagttatggacctttaattgaccctgaaacttttgagactaaagttgttggaagcttcataagaatcagatgtgaccctaatgattaccttcagaaaaactcacaccagcttttgcaagtcacaggtaatttggctgctgttcgttgattatgacattgcattcaagtaaattcttttttccctctaaatgtacacttcactttcaataggtatgttcatcaactgcttaagttgaatacttatgtttgctagaagcagaggttacaaacaataaagcaaactgaaatgtacttaattaccttttttacatcattag

SEQ ID NO: 1322 - DNA, 440 bp, Glycine max
  unsure at all n locations
agctatntcttaaagctttgctacaacctttttctccccctctggcaacatcaaaaagccgaagaactcgggaatcaacacagctataacaatggagtagcaagatataagcatcagagtattaaatataataagccaaactcacaaacaagaaataattaaaccagaatccaaataactgaaaatgtcaacaaccacaaaacatccaagactgacgtgtaaaatccacacgataaataagcaaagtacttagcataataatgtaaattctaagaaactaaaagccaaaatacacggcttataaaagataaataatcataacctaaaagctaagaagacggaggaggtggtggaagatcgaaactctgacgaatgtagccgacatcctcttcaagctgtgtaagacgaatgttcataccggcaaagcgtgaatctaacga

SEQ ID NO: 1323 - DNA, 457 bp, Glycine max
tgtagaattcaccccaattacagtgacctatgctgacttgtctcccatatctacttgataattcaatggtagccataaccctagccaaggttcatcaacctccatttctccgagaatacgactcgaacgcaacgtgtgcttgtcacggagaagccccggagcgttccattgagcatggtagggctctgaagcgtaaggcgcaaggtctaattgatgcgggctggctgaaatttgaggagaattgcgtgtaaatcctgacattgacaagagatgccacacatggggcaattttgaaagctgttgttaggtgtccctaatgactcatcagggtttccaagtttatgccattattgtaaaccacagctacaatgttaaatgaaacggataaagttgatatctttggtcctcatcctctcacagacgcttgcttgcttattcaactctcatcggaatgcgg

SEQ ID NO: 1324 - DNA, 99 bp, Glycine max
  unsure at all n locations
agcttggagaggatgcttcaatggaggaaatgaatgagggagagaaagagagaggnggcagcacgaaattgaaggaagaaacacgtagagcagctgttc

SEQ ID NO: 1325 - DNA, 246 bp, Glycine max
tcttatatgaggtacattcatggtggtgaagctccttcttccatggcttattccctagtggatggtgcctcccctctcctcttctcctttgccttccgttgcatctccatggtgaaaaatcagcattgaaggacctcattgaatctcaaagatccagcctccatagaaactccacaagcatgcttccatcaaggtgcctgggatgctaataccttccccgtgcgctacaactcacaatccctcatt

SEQ ID NO: 1326 - DNA, 356 bp, Glycine max
taacaaatattcacacctttcaaccaaatgttccctagtgtggcaagattactcaagtgtagaaacaaaaccatcgatacggctatattgatatcattcgtgagtgctttttaatactatgagtacattaatggagaaaatcaaactcattgtaaaaacatgtgaaatagaatgatgctatgtgagatacactcttctgaatgcagtgtccggctgaaaattactaaatactatacaattgagtgagtctcacataacggtctaacaatattctccaaatttataattttcaagcactactaatatgcgtgtataagagcatatgtggagcactcttcatacatatatatgtgatt

SEQ ID NO: 1327 - DNA, 450 bp, Glycine max
  unsure at all n locations
agcttcttacatagtccgctnttgcttgttctttatgcttaanaatagaaacattaggcatagacaaaagatcaagatgagttagtaggttaaaaccataaacaacttcaaaaggagaacaattagtagtgctatgaacaactctattgtaagcaaactcaacatgtggtaaacaagcttcccaagtctttaagttcttcctcaaaactgtcctaagcaaagttcccaatgtcctattaacaacttctgtttgcctatcagtttgtgggtgacaagtgggtgaaaataacaatttagtgcccaacttgccccacaaagtcctgcaaaaatggcttaggaacttagagtccctatcactaacaatgctccttggcanaccatggagtctcacacntctcttgaaaacaaatcagccacatgggaagcatcatcaactcttttacatggaat

SEQ ID NO: 1328 - DNA, 396 bp, Glycine max
  unsure at all n locations
tgcctgtccgatgtagcagtaatgatggcccgagttatgttggngaacggctacgaacccggaatgggtttaggcaaagacaacgacggcatgactaacctgataaatgccaaaggaaatcgtgggaagtatgggttaggctataagcccactcaggcagatataaagagaagcatcgcgggaaggaagagcggtagtcaaagctcgtggtcgagacaagaaggtgaaggaagcccgccctgccacataagtagaagctttataagcgcgggtctgggggacgaaggtcaagtggtcgcgatatacgaagatgatgttccgagtacattggatttggtacgaccatgccctcctgatttctagctgggaaattggcgagcggagtgtcatacccta

SEQ ID NO: 1329 - DNA, 504 bp, Glycine max
  unsure at all n locations
cgacacgattgggccgttcgtcgcagagaanctntanagtctactcgcaggcatgcacgcctacattatgggcatctggtccctcaacattctctgtcattagaatctaaggaaaagatgaaaggatggcagctggtggtgcaaaaaaaaaagggaccacccctgctggggacctggtttntcctgcccctaaaaaattaactatttgggcattcacattccaacattttcttttaatatacgccaagttgatgaccgggctcaggcttctataaaaagtaagagcatcagatcccactcttcttggcctgcacaaggctatgattaaagctgggacgcctacgcgagaagagtggaatgagccataatgttatctatcanagatcaagccgccaatgtcatgtcattcttggactaaccataaccaactactctgtcatatcaagtctgagtgtggaggatgattatgttgaagaaacagacactcatgtctggcatgtatag

SEQ ID NO: 1330 - DNA, 518 bp, Glycine max
  unsure at all n locations
ngaagtgcttgattactgacctctgatactcagcttgaagactccgctccgattgaagggctcctctcggtgtggtgtttcaacggagaacaacggaggtccatggaagctactggtttttgtgggtggtgaagaagaagctngngacattgnggaagggttttggaagaaagaaagagaaaggaatggctgtcaaggctacacganaaacaagacttgaaacactcaagtgtttctgctgttgggaaaagagaagtttctcacacaaccgaagacatatcacagatcgcaacggtcagatcgtggacatctgtcctctgaactttcagactanatttcgagacgatccaacggttaacgaatgtaggagggcacttttaccaagacagctttcttgacaagctttctcgtgagggcttcttgagaagcttcttgaaggcttcttgagaactagagtttaactatcacaccccttaatactaactaccttctaaaataaacatgataaatacacacan

SEQ ID NO: 1331 - DNA, 389 bp, Glycine max
gcttgagaatggagaattgcactaagcaatcactacgcatagctccaaactcgaaggtggaggacacatgaacgaaaacacaattcatggggctccgaaaaaggggttgagaatggagaattacactaagcaatcactacgcatagctccaaactcgaaggtggaggacacatgaacgataacgcaattcatggggctccgaaaagattgagaatggagaattgcactacgcaatcactacgcatagctccaaacgcgaaggtggaggacacatgaatgaacacgcaattcatggcgctccgaaaagattgagaatggagaattgcactaagcaatcactacgcatagctccaaactcgaaggtggaggacacatgaatgaaaacgcaa

SEQ ID NO: 1332 - DNA, 462 bp, Glycine max
cttcacaaataatcatcacacagcagagaactaacaaaactacccctcatatctcccaaaaccccatacccacgaaatttaagagagaaagaagtccacccaaacctggattttcgaagtcccactcgtagccacgcacttcacgaccccgaaaatgccctcctttcgcgatttggagcagaaatgagcaccaaaggttggagctttgttggggtttcaatggagaatggaggagaaggaaaaagcaacgtgaggaagagggagagcttctgaattttctgttctggctgagtgaggagagagacaagctttttggtcttaaataaaaggttttcctctttttctattattctattcaagctctaccacatgtccctatttgattggagcaaacagggcccactatctctttttgactgtgacccatactcagtcacaagagtgagaacaatctgacctttg

SEQ ID NO: 1333 - DNA, 451 bp, Glycine max
  unsure at all n locations
agctntgcaataaagttaaggcagcaaacgatagagaaatgttagattntaacttgcgttgactgtaccatctcaacaatatgttttcactaaattctatgggcagcggaatactcttgtgcataagttattgtcaaacaaacctgaaatatattccttatggaccttatcgcaatatattaataatttatttccagaactgttaaaaattgatttaacataatattactgtagaagcctcagatatgaaagaatgcttctcatttcaacaaataaacttataggttttcccttaaccaaaagcgtaataaattctaatagcttatgttgatataaagatttggagtttcagccatgaatctattgcatttttaagggaccatcgtgaaattttttttcacaacgtgttgcccttaaagacagttcanaatcgtcgtagaagacttctaat

SEQ ID NO: 1334 - DNA, 431 bp, Glycine max
  unsure at all n locations
agcactcanaccgagtgaccctcaaggcctacactctgaagagtctgtcagggcctctccctcccgattcaggtccaacctagaaaatattttagcacacatactctatatatgaactgtacaaaacacatgactcctcaattgttctcaaaatagttttaactcgtcgcccttaaagagtcttatagtcgtgtgattgtacaattcatagttcataactcaatgcacacaacatctcaatcacgtgcatactcagtttatcacatacactgaatctcaatcacaatggtataatctcaatttaacacgttatcacacttcatgaatcatatacactttacctatgaaccatgcaatacacagaattactcaattattttcanaacccatttaactcgccgggntcccacagtggatctcatcacatactc

SEQ ID NO: 1335 - DNA, 438 bp, Glycine max
  unsure at all n locations
agctnttctaanagatataactcgtctgaatgactttcttgaccagacatgaagagtctataaaagcaaggctttgttttgcatattaaatcaattattccaagtctttctaacaatctcttacaatcctttacaagccttgagtctctttgaacttcttcttctttgtaccaaaagttttctgaagttttctggttttctaaaccttgaaaacttgtgctattcatccttttcattctcttctccctttgccaaaaagaattcaccaaggactaatcgcctgaattctttttgtgtctctcttctctcttttccaaaagaaggaaggaccaaccgcctgaattcttttgtgtctcccttctcccttgtcaaagaattcaaaacgacacagtctgagaattcttttgattcttcccattccctaatacaaaagcgttc

SEQ ID NO: 1336 - DNA, 340 bp, Glycine max
  unsure at all n locations
ctgcatatctaacaatcgtggntttaaattgctgttgtcgntgcgatccttgacattgcgtgaaaatgtgtctgtcatgatttggttgcagagaatcgtaaaatctttatgttgcggtcgcaaatgtggttatatatggatcatgatttaaaaccatactaacaattttgcgctgtgtgtttatcaatcgattaattgatgattgaatgtgaaaattaatagaagtttttggcaatgtacggcaatgagaggctccaacaactcaagaaggggcttatcaaaccaatacgatggtccatgcaaggcgacaaaccccattgacaaatgttggagatgtgac

SEQ ID NO: 1337 - DNA, 431 bp, Glycine max
tacccatcacatatggtactaggtggcggtcgggctatggtgtcttacaattctgcacattcacaaatcacgtataaacccaccatcccctgttgcccacctccaactgagctcacgtactcccacgtagcccttatcctcgttcctctcaacgccgggtccccatcaatcctctcaagctcccacaacatccaagagattcaacatcccatcatcacaaactaacaaaaccaagcacaacatggcagaggcagaaactttgcccaaaacacaactcaaaatcacagcttttcacatacaaataccccagtaaaaattccttcattccaattcgttaaccgttggatcgactcgaacattttactacgagtctctagtacataagtctacattatgacccgtgtgatctgctagcaaacatatagaactca

SEQ ID NO: 1338 - DNA, 421 bp, Glycine max
  unsure at all n locations
agctatacatanattttctggatttctaaaccttgaaaacttgtgctattcataggtatcattcccttctccctttgccaagaagaattcgataaggactaactgcttgaattctttttgtgtctctcttctcccttttccaaaagaacaaacgactaaaagcatgaattcttttgtgtctcccttctcccttgtcaaagaattcaaaatgacatagtccgagaacttttttgattcttccctttcccatatacacaaagacttcaaaggactaaccgcctgagaattcttccctttcacaaagttgcaaaggtttaaccgcctgagatctttgtcttaatacattggaaggtatatcctttgtcggacaagcagaaggtacatctacttgggttcgactgagaacaagagaaggtacatc

SEQ ID NO: 1339 - DNA, 529 bp, Glycine max
  unsure at all n locations
acgtttgattgaatcctttctagtacccggngatnctntaaaagtcaactggaagcatgccagcttggaagaacccgggtagtccaagagataattttatgtcatacccttcaagtcttgaaagagtatgatgaacttagggacgtctatatggccacagcttgaaccttggaacgagaaacccagaaggcccgaaaggaagaacaccacccaagcaaaagtttgaggggctttatagggcagcaatactgagctcaagctccgaagaggtgaaaggaatcatcacgggtcaaaggcatgatcttgaaggacgagctaaaggtttgccttaggtcgaaaagaaatttgtcccaacagttaggcgagactgaagggaatatgtgggccatcatcgataagtgcaaagagaagcttaatctagcggcgactcacgagcanaggctagaggatgagtaccgccagatatcancagaaaggggaagcagggaaagggtaattgattcattgcaccagaggaacaatgaggatg

SEQ ID NO: 1340 - DNA, 533 bp, Glycine max
  unsure at all n locations
nnccttttgatgccatgtantnctgaccttagatactaagcttgacattgntgttngatagaagaagaagaagatggttagccttggtatttcaatatcaaacgatacatcaaggacaaggaatacccgcttgaggcctctaacaatgacaagaggatattacggnggttggcggccagtttctatctgagtggggatgtcctatataaaagaaagcatgatatggtattgctctggtgtgtgaatgtaaatgaagccgagcagatactaacagaggtgcatgaaggatcctttggcacccatgccaatgggcatgccatggctcgaatgattctaagagcctggtgttactgtatcaccatggagaattatttgtgtgttcacgtcangaaatgccataagtgccanacttttgcagataatgttaatggctccacctgtaccattgatgtgtttgcaatgcatggctgntctcgatgtggaagaataacgtgattggggctatcanacccaaagctctcgatgggcatctg

SEQ ID NO: 1341 - DNA, 433 bp, Glycine max
  unsure at all n locations
agcttgtaggattatggngtacctatcacatgtggtactaggtggcgcgcgggcgatggtgcacaacaagttttccacatccacaatgcgcgcataaacccaccatcccctggtgcccacctccaactgagctcacgtactcccacgtagcccataccctcgtttctctcaacactgggtccccatcaatcctcccaagcttccacaacatccaagcaacacaacattcaaacagcacaagctatcacagccaagcaaaacagagcaaaggcagataactctgctcaacacaccaaccaaaatcacagcttttctcacttacagaccccaataataattccttcgatccaattcactaatccgtggatcgactccaaaactgtactggaagtctacagtgcataaccctacattgggaccgttgcgatctact

SEQ ID NO: 1342 - DNA, 534 bp, Glycine max
  unsure at all n locations
ggattgcttacctcgattacggacctatgatactcagcttgaggggtaaagtctcacgaatgtcacgtgctcatgcaacaattgttagccgtggctatacgagacatctttcccaaccaagtcaggttaacgataactcgcctgtgctttttcttctattctatatgtagcaaagtcattgatccagtcatgtttgatgagttggaaaatgaggccgcaattatactgtgccagttggagatgtattttccccctgctttctttgacatcatgattcacttgattgtgcatctggtcagagaaatcaaatgttgtggtcctgtttatctacgatggatgtnacccggtgagcggtacatgaagatcttaaaagggtatacaaagaatctatatcgtccagaagcatatattgntgacaggtacattgcagaagaagccattgaatnntgttcataatacttagagaanggctaaacctgttgggcttcctgagtctncgcatgatgacagagtgggtggtaagggttcaagaat

SEQ ID NO: 1343 - DNA, 396 bp, Glycine max
  unsure at all n locations
agcttgngaggattgatggngacccggtgttgagagaaacgaggatatgggctacgtgggagtacgtgagctcagttggaggtgggcaacaggggatggtgggtttatgcgcgcattgtggatgtgggaaaacttgttgtgcaccatcgcccgaccgccacctagtaccacatgtgatgggtaccccataatcctacaagcttgagatgaggaagtgttgaagggtgaaactttctgcttttattgttgaccacagagtggtacctggagatatgtcgcgggggtcaggagaccttggggacgtcaggtggggtgctattgcccaaaaccaagcttgaccaatcccgacccaacccgggcatagtcggtcagtgagaacctgtgatgtacctaagc

SEQ ID NO: 1344 - DNA, 337 bp, Glycine max
  unsure at all n locations
agaagaattaaatctagccacggcccacgagcacaaagtggtggacaaatatgcccaagtgtacgcggaaaaggaggctaaaagaagggtgattgactcgttacatcaagaggcaacgatgtggatgtgaccgattgctcttactttgaacgagagtcaagaactttcccgattgctggccaaggccaaagcaatggcagacgactacttcgcccccgaggagatccatggactcctcagctattgtcagcatatgatagacttaatggcccatataattaggaaccgctaaggagtntgtattgtcactcagatcttgattagttataactttctg

SEQ ID NO: 1345 - DNA, 437 bp, Glycine max
  unsure at all n locations
agctntcataagtgaagtcaggtgcagccatctccctaagattcctctcacgaggtggagattgagccatgttctcagtatgaaaattagcagccgaatgctcaaaattagaatgttcagaatcaccagcaatagaatgctcaaaatgcatagaatgatcaggatgaacactatgcctaactaatctatgaaaggttttatcttctatttcaagatcaaagggttgtaaatcacctggattgcccctagtcatgcactatatgcagcanatcatgtatttctcaaacaagcaccaaagggggtaaaactacaactatactcaaacaatatccaaatgagctgaanatntatgagaaacaccctataatcatgaaaagatagacaaaaattttcagacaaanattcaaagtctaactatgaaaactgcctaagaaaag

SEQ ID NO: 1346 - DNA, 388 bp, Glycine max
ggagcttctatggaggatggatctttgagcttcaatgtggtccttcaatggtgagtattcaccatggagatgcagcggaaggcaaaggagaatatgagaggggaggcaccatccactacggaataatccaaggaagaaggagcttcaccaccaagaattgccatggataagaagcttgaagaggatgctttaatggaggaaaagaaagagagaaggggggagcacgaaattgaaggaataaaagagggagagaagtggaactttgaagtgtgtctcataagactctcattcatcaaagttacaacaagtgttacacatgcttctatctagagactacgtagcttccttgagaagccttcttaagaagactttcttgagaagacttctt

SEQ ID NO: 1347 - DNA, 485 bp, Glycine max
  unsure at all n locations
ggttgaaatagccatgttggatgagttatacatacttattatgttctacggcttatgtgatgatgtttgcgatgtttatatgctgaaattgctgatggaaaactattagagatgacaggtagaactaacctagggttataaagtgagaatgtgatgctatgagtggaaaaagagtgaggctttgagagttggaacgataagtctgaattctgtggtnaatggaggttaaagtgagttaatactagctcgaaatgtcatttatgacttatgacaaagcttggactgtgctagagagaagaactaatgaccaaagtgaaccaagagccatctctatggcgaacatgggtgtcgagggcgcaaattttgattcggtggagatttcggtgacattcagtttgagcaagtttagaattgatgtatggactagcgtgatgtgagagtttgcttcaagttaccttattctacatgtcacttttgagacctat

SEQ ID NO: 1348 - DNA, 440 bp, Glycine max
  unsure at all n locations
agcttctctgaagcatgggatgagacaagaacttagaanattctcagtcatccaactcgcttagcgctcttcatgcactaagcgagcgataccttatgcgctgagcgagtagcatctttcgctaagtgcgctaacccccgtccattggttgttggggtctcactaagcgagacagtcgcgctaagcctaaaaacctctcgggttgtgcatttaattgaatagggctaagcgagtcagctcgctgagcgcgacatagtctctcgctaagtctgtctgtgcgctaagctcaaaaggctctctacctggaccttcatggaaattgggctaagcgggccatcccgctaagcccaaaaccctctctggaatggcaacagcaataagcgagaccatctcgctaagcgtaaccccactactgcatcaagagaactttaatccgctga

SEQ ID NO: 1349 - DNA, 435 bp, Glycine max
gctggcttgctggctcctgcttcaattggtgtggctcttgcttcaattgggtgcttactgactggttgcttccttcgctcaagtgtgtgcctttacccccttactcctagtaagtgtttttaaagtaaataaaatttatatatttttgttaataaatattataagtttaagttagctagtattaacacatattgtaagttagtttatatagtattgtgtagttattctaagctagtattaacaaaaatactaagtttaagttagttagtagtagtattgtgtagttattttttacgtattaatattaatagatataccaatggtaggttagttactatgaaaatattatttggttagttagaatgaaaattttatttagttattgcatgatctaactatatgtgtgatatatctatatatatctatatatatata

SEQ ID NO: 1350 - DNA, 532 bp, Glycine max
  unsure at all n locations
cggctctgattgattccttgccgtcntcgagactctctaaagtcaccctgcagcatggcagcctggtcggntcaattttaattaagcgcttgttacattcctatggactgagccaaaaggctcgggtcattaaagactacgcatcttttaaggcaccaagcaagggattaaacagcgaaacccctatcccacattctttaaaagaatgcgaacagaaaattatagaggacaggaattccttgcgggggggaaccacaaaaaacaaaagcatgtggtgacttttttaattgccccaagtcttaagcgtagtatcgcttgacaacgtcggagttcacgggtgaaggtagttcctcgtcatccatgttggcgagcacaagggtccctccggagaaagccctttttacgacgaaaggcccttcgtagttcggggcccactttcccctatngtctttcagggctggggagactttcttcagtaccaggtccccttcgctgaacctgcgcgagtgtaccttcttgcaaacgcgttctn

SEQ ID NO: 1351 - DNA, 531 bp, Glycine max
  unsure at all n locations
aatgctattacggccttgaaactcagcttgaggattatggngtacccatcacatgtggtactaggtggttgtcgggcgatggtgcacaacaagttttcctcatccacaatgcgcgcataaacccaccatcccctgttgcccaccgccaactgagctcacgtactcccacgcagcccatatcctcgtttctctcaatactgggtccccatcaatcctcccaagcttccacaacatccaagaaaaacaacattcaaacagcacaagctatcacagccaagcaaaacagagcaaaggcagaaaactctgctcaacacaccaaccaaaatcacagcttttctcacttaaagaccccagtaacaattccttcgatccaattcgttaaccggtggatcgaactccaaaatttactggaagtctatagtacataagcctacattgtgaccgntgggatctactagtanacatncagaactcattctgcactactcttntcacagncaaccacacacaagcacttntcttgcacaagcc

SEQ ID NO: 1352 - DNA, 146 bp, Glycine max
  unsure at all n locations
agctntagcagataanatatattacaagcactatagaatccatgtacaacatagagaagcagaatctcttttcaatagaaaaacggaggcgaacttatcctccnccactaataatanagtatttgatcagatttcagaaagctcat

SEQ ID NO: 1353 - DNA, 484 bp, Glycine max
  unsure at all n locations
cggaagaagaaaagggaagcacattgcaatnnttttgggcgtgcgtgaagtgcgaacaaatgtcaattatatttcccttttttttttttgctgaatatcaattatatttccctatcccccttcttctctttcaatggattttaaacgtcaagattgcttctcaaaatcagctagggtttgacttttttttttttgaatctacaggtgtttgacttctttgcaaattctaaacagttagtacaattaaatttgttacaacttttcatcagataatttaaatttgaatccgatgattaatattcgatggagtacaatgtcaactatttgaaattaagaagcaacctanaaacaaaaagaagcaatctccttgctaatttcgtgggagtagtttcgaacgttgtagttggtgtttggttttgtttgtttttctttggaatgcataaaaaacaaatatcaatttccacattaaatatcaacacctcat

SEQ ID NO: 1354 - DNA, 453 bp, Glycine max
  unsure at all n locations
agcttccacgaaggagatcgaagagagaagacttggtagtttaaataaggtttgaacttaataggatgggtgtacccgccacaactgcatatttaagagaaagaaccgtgctatatataccttgtcttggttcctaatgctatatctttggggtaatggctaaataattaataaatataatttttttaatgggtagtaaacaagtaattttattgtcagcctgtgagaacagaataataaaaacaaaaaaagtacagtcaactttagttgagtcgctagtcttgaatcttaattacccacgactcttctcatcttccaagttccaactacctgtgcaatgcatgccgtcgatgttcagaataaatcataatctgctatttttggattaccctctctccttagtatacaatntaaagtgatgatattatataacttttaaattattattgaata

SEQ ID NO: 1355 - DNA, 445 bp, Glycine max
tgcatacaagtagtattagtattttcttccttcaccagtcaaactatcctcggtttatttgctcgtgattgcccatgcatgaaaagggggctgttggaagggtggcgatgggttgatcattcatgtcggatgagttttggtaatggttgtagaaaccgtatggtcaggagagaatcttgcccctcatttcaagctatacttctctctctgcttatagtgggcttggttttcttggtcaaatgtattttctagttggtaatgcaaatatatataattttctcatttgtatttattttgatttgattcccagtaggataatgttttgttgttgttgttgttgtggtacctattttgattggatgtaatgcattgctagagctaaaccccgtagcagatattaaggaatcaaagaatgatcatgacatgagagaagtaacaggaaatt

SEQ ID NO: 1356 - DNA, 403 bp, Glycine max
  unsure at all n locations
agcttagtaagtcatgtacctgtgttccttatggatgtgcttagtttatcacctaagtgtgagattgagaatctagtaggtctagtatccatagaaaattgtaaccgtagttcttgggggatgtcttgtatatagttattaagcgtagttgggaaagttatgaggagtagttaggaagcttggtgtgaaaccttaaggggagtgtaaggtcattcgtaaggagttgttggttgcgtatagagaggcttcagagtgagtgttcttgcgtaaggtagatgacctacaggattagtgatgatagtcgtatgtttagtgagatagatcttagttctccttacctgttgatctgncgaaagtctgaggatgctccgaggactaccttangacttgttgtagtctttat

SEQ ID NO: 1357 - DNA, 428 bp, Glycine max
  unsure at all n locations
agcttgttcttgattntntctaagttctttatcaagctatgaacaatatacttgaccttcatttaactgtctttgggcttggcggccacactcaacaaagtattttcgacacctactgtacgctgatttgaccaacgctgttatgggaatgttgcgacaatccttcataaccttattgatacattctaacaggttggttgtcatgcggccataccgaagtccttctctatcataagacatcgttcattcttcttttgaaatgtgatcaatccatgttgctatggctggactcagttcacgaaattcttctagattctgataaaaaatgtgcttgcaaggagtgtangcttgatcatattagctatgaataagaattttatgtatatattaaacttaaataaacttgaccatgaaatatgaaatcttac

SEQ ID NO: 1358 - DNA, 377 bp, Glycine max
caggggggaatttgcatttctcgaaccttgatcttgctatctttagaagctacgcttctttgcattatggatgtgcaaaaacatccggtcggatcgaaccatattgcaactgactcgactcgaaccagttgcgaaaaaaaacttgccccattttatactcagtttggttcgacccgacccgctttggcaaaaaaaattagtgacctgaacttgaactgcattgctcactctcatcatcctacgatctttttttctgtgcaacttcacttgtttacgaagggaattgtggtttcgaagtttgtacgactaagcgattatggcggatctgaatgaaacgctgagatacaatgtctttctcggaaccttactcggaatgt

SEQ ID NO: 1359 - DNA, 171 bp, Glycine max
atgaatacatcggggcatgatcatttatgagagaaggagcgaacttatcctaccccactcatatttttatatatgatatgaagttatacactcttttttcagagataactcatacacttacactataaaaaaaactgtatcgcctaacttctccgctaacttatactctta

SEQ ID NO: 1360 - DNA, 454 bp, Glycine max
ttcgtaggcgaatatcacataagttggataatatgcggaccattgtctatgataagcataaggaacctcaatgacattctgcacattaacatttcaagcatattatttatttgacattaacataaataaacaaatgtttaagggtgaaaatcgtgacctgctcatgatggaatgacgcctcaaatcggtgcacaattctcggtacatgtaaatttgatgggccctagatgagaaacgtttatgtaatgagtaagtgaacaaacatgtacccattgaaaggagaagataaatatgtgcaatatcgaacatgtactatgaacgaacagagcaaacatacaacgatgaaggatgcatgatgaagcatactctaacatatacttataagaaggtaaacataaaggatggaaaagttcacttacaacatcagacgcattcgatgatgatgattcatagt

SEQ ID NO: 1361 - DNA, 331 bp, Glycine max
agcttgtgcttgttttatttacattcctaggatcatgagcaactaggtgtgtcctactatgacttgagaaacaaagatgatcaaataacacgcaaagatttaaaaggtactaggttgcctcctagcagcgcttctttaacgtcttgagctggacgcgtgatgacttgtcggccacggacctactactttgcttacctttggctttggacttggtcggctgctggtcgaccacgggtcgtaggcaacgctgcagcctttgtagatgagctgatggactctggaggtggcggcgatgcgtctattgcccgctgccggccatacccaagctact

SEQ ID NO: 1362 - DNA, 429 bp, Glycine max
tctagccaaatggacttaccttgaattaattcctttgatagcccttttgagccttgtttccctttccttgttttgaagctcactacaagccttatgtgaaaaaccatgatattaccatatccttaaggagatttggagctttggaattgttttgggaataagtgtggggggtttttgtttcattggacaacttgttttgttgactatgcttcatgatgtattttgggtcatacttgatgtacattgtatattggttaaatgttggacatgctgaatgaaattatgtttctcacaggcgaaataaaataatatgaattaataaggaaaatcaaatgactaacaagaataataaataagaccagcaataagttgagtgaataagatcttatatggcacaagaatgatgaaactcttgtttctactcttcat

SEQ ID NO: 1363 - DNA, 430 bp, Glycine max
  unsure at all n locations
agcttgacaataattntctgaggtagtgtgcaatgccccagctattagcctttcgtaaagcgccaataaattcttgatcactacctagaaatccttttgcaaagcatgcttccctaaatgtattatacatcacatcattgactattctaatatctatgtaagactgtggaccttatgcagaggaaaacatcattctgaggtaaaacaattcgccagttgaaggtgggacccatataagtctgcctattgtatttccttgttctcttggttgccagcatcttttgtgtgcaacataaacaaatcttgacacatattgaggataagtaagatcctgtccataagggtatactttgttagaatgcatctaggctgtgaacattgattctttgactgtgggctntgatagaactggcaccaattgttgactatc

SEQ ID NO: 1364 - DNA, 466 bp, Glycine max
  unsure at all n locations
tgtatgtgaatctcggctgtttctagctccggactataaaaggctatggagaaaagtgttgcaaaatattgaaaggaatttgcagccatgttttttgtgaagcttcaaatgataaactgaatatggatatattcttcggagttattggtcagtgatcacacttcatctactttaaagggtaagaatagtatgtaaaatgaactgatgaagataatgatgccagggaacccaaattttggtcccagagaaaaaatagaatcattaattaattaattctataaaaagtaccacaagccccacctttntgggggattntctggaacataacatggcaggtatggtcatcaatagcatgagctaattangttgtttcattttgtaattgcgaccactggtgtgctcanactttttgatcttaagccaatgccactaatngtcacaacttttcatctgctttgattatgtc

SEQ ID NO: 1365 - DNA, 378 bp, Glycine max
  unsure at all n locations
agctataagacataaacaaattgttattctataaaaaagaattctaacaaaacaaaaataatttttaaatgtttgaaccaattgaaccaatttgacccaacccttntatgattgattatggtcacaaatccaccccaacctaatttattgaattttgattaagttgaatcacagatttaggtcaaatcggtccaactcgacccaagaacacccttaacctgtattctgtctccctccttctctgtgtgtgtgaagtacctgaaaaacactagaaaaggaagggggggggggttgaatagcataatggataaaacttagtctttcgaacaccttgaatgctttttctaaacaaatatcaatggacaatggagtttgtcc

SEQ ID NO: 1366 - DNA, 489 bp, Glycine max
  unsure at all n locations
tacggacctatgaaactcagcttctattaagctgaaccattctatcaatatacacaagttgagttntattcagaacattagagtttatctcttttatcttagtgagagcgattctcctaaattcttgagtgattcaagaacaccttggctgtatcacaggacttccacaacctttgtgtgttgacctctctggagagagtgattctttccttcctttcatcatcacccttgttctttcaaaccacaattccagaaaatccacctctgcccagaattatctcgtggccataactcccattttacgcactcaaattaagtgattcttgagcctaaattgaatttctaaacgagacctttcacctcgatatggaatcatctcatttggagccctgtagattcagatattgccatttctatatttctgtccagccaccacttaacctacgttctaccatcccattcatccatgttatgccaagaaccacctta

SEQ ID NO: 1367 - DNA, 347 bp, Glycine max
agcttgccgaccaactcgccagttgagcatgtttgcttactccagaacgacaagcttgtggacggcgccaagtgggccagattgctatttgcaccgccatttttactaaaggcacccctttctatttttttgcaattcgttctccgtaacgatacgaaactttaagaaattcgtaacgatacctattttgcttccggacggccacgaatcctgatggagtatatattttactgttttttaccttccgaagaagccacgggaactcacggattgcgcagaatcacctcttttcgacttccgccacattacggaatttcacggatcgcacaagcctgctttcttttgat

SEQ ID NO: 1368 - DNA, 330 bp, Glycine max
ggctaacccatggaagctcctaatatctcccacactctttgtggtgggccattcttggatggccttgagtttctcacggtccacttggaccccatttctaccaactacaaaacctaagaaaactatattatctacacaaaaggtacacttctctatatttgcatagagggtgtttttcctaaggactgatagaacttgtctgagatgtcctaagtgaaaatctaggtctctactatacactaaaatatcatcttaatatacaactacaaatctacctatgagaatccttatgacatgatgcataagcctcatacaggtgcttggggcatt

SEQ ID NO: 1369 - DNA, 452 bp, Glycine max
  unsure at all n locations
agctagnttgngtgaattaaatggctatgaagtggaacggaatagacactaacaaaaggaaccactatatccatcttttggatgcattatatagaaagccaaatggaatgaagtgttccctataacatttgtggaaagagttacataaaaatttatgaatttccaaatgacaaccaaccataatatagaaataaagttgtatactaataaccaattcatttagtttattgcctcatgcacacacaaacctgtctaaggtggtttgaagtaacaccttatagagacttcttggcaatgaatacaagaagatcagtgacacgttagctgtagaaccgaggacaaagaaggtattagaaccaactgaattaataataataaagcatctaaaaatcgtgtgattagatttttggccaaattaacaacttattgacacactaacccactatcacata

SEQ ID NO: 1370 - DNA, 444 bp, Glycine max
  unsure at all n locations
atgcaatgattatttaattcaatgtcatatttcttcataatataaaagctatataaacattgcttccttcatcaatttttcataaggtcacaaaatcacccaccactttgtctctaaatcttattagaaacttatattgtttcattcatcagcttttcataaaatcaaaaaattcctaccactctttctctcaatcttattgcaaaaagtaaattcactactataaaaattggtttttctagacatttaacatcggttatgaaccaatgttagaatgagtgccaataaaagatgaccattgttaacattggttataaaaatcaatgttgaaatctactatataagtatggttctcaccanaaccaatgtgatatactagcaaatagacaaaattatttaagaattaattctttntacttataatttatatcattctacatactt

SEQ ID NO: 1371 - DNA, 406 bp, Glycine max
  unsure at all n locations
agctatgccaatttagttttcgccagcgaatggatcgaagtgggtttgagaagaggcaaatttgattatcctgctttggtgaataggaagcctgngcaaatggagaaaatgagaagaagggacgaacccatgctgtcactgtcgctcctacatggtcaaatttcccaccaactcaacaatatcaatactcagccaatattagcccttctcattacccaccaccctatcaaccaagaacactcaatcatccacaaaggccacccctaaatcatccaataccaaacaccacccttaacaccaaccagagaagggattttccaacaaagaagcttgaagaattcaccccaattctggtgtcatatgctaacttactcctatatctaactcataatgcaatggtagccat

SEQ ID NO: 1372 - DNA, 445 bp, Glycine max
  unsure at all n locations
tgacctcttcgataaagagccttaaggctcttcgcatcatatgccaaaacctaccatagttaaagcacattaatgcactgctatataaaacagccaactttcaagcaatgaacttaaaataatagcaaattacaatctaagaccataatccaaatttgcattgttacaaaagcaagacaaaagggagcaactattttcttgcataatacaattacaatgtaattttctttccaatcttctaagctgataaatttcctcataataccactacttanatattacagttggctattacaattagcatcatatttcaatggtaagaagaaaaggaattacaaatacctcagaaccttcttttatgcattcattatactggcttggcttcaagtaacaggacatcaagttcagagagcatgccaaaagaagctttctactctggaaagat

SEQ ID NO: 1373 - DNA, 362 bp, Glycine max
  unsure at all n locations
agcttagcanagcctagtctaacctaaattaattaagtttttcatacctggaaaatatgtcatcacaccctatcactgacatctcaacgcccccatcatcaccttcttccgcttctccttcctctcttactcccttcttccccttctccaaggaaaccaccatctccgcgccaccaccgccgaccgcgctgtccaaccccttcttattctccttcttcctcttctccctctcttcccctttgccttcttccctttctcccctttttccccttggtcttagctgttgtaagtaattgttgcggtgttgttttgaaaaaaaaaaaagacccaaaagagactatgctcagggactcagctgtgct

SEQ ID NO: 1374 - DNA, 303 bp, Glycine max
cctcattcggcactctcttaccctcacgtttctctctctactcttggctttctgtctctcttcttcatcttcttcttcttcttcttcttcctctattgtcttttttcaaacgacgcgcaacaccctcttgctaattaccttctaattatgcaatcgctctattcgatttctagggctattgctattgctatgccttcgctcaccccttctcacaaaaacaaaatgctttctcttccccttcatatctatacgctgctgcattctaatcgatatatctgaccaggagtgagtagttcattgcat

SEQ ID NO: 1375 - DNA, 529 bp, Glycine max
  unsure at all n locations
cggattgtttgcatccagttcgcgnagccgcgtanagtcnacctgcaggcatcgcagcttcagttcctgagaaactggttcccagaagacaacttggagtgaagattgctgaanactctagccctgcaacaagtcctaaggaagtagacacggagatggacaagaaaatccgcagtattgtgagtagcattctgaaagatgcttctgtgccagatgctgagaaagatgttccaacatcttccaccccgaatggttctgtgcctgatgttgagaaagatgttccaacatcttccgctccaaatgctgaagccgtcccttcacccagtgaagaggaatcaacggaagaagaggatcaagccgcagaggagacccctgcaccacgggcaccagaatctgctccaggtgacctcatcgacctggaagaagtcgaatctgatgaagaacccattgtcaacaggttggcacctggcattgcggaaagacttctaaacagagagggantnaacccccttaagaggtctggacgaat

SEQ ID NO: 1376 - DNA, 483 bp, Glycine max
  unsure at all n locations
tccttaacatcttgaattctatttgtctggaagtaatatataacaagcagaatgcatacctcctcccgcagtaggccagaaactaaagcatatacctcaacaatatttctgcacagaagagttttcattgaaataagtaattatatatatgactcatattatttgaactcaagatagagaacttacagctttttgtacctttagttttacccaattagcaggaggcccaatatcaatcacaattgtgtccaatctagcaagtcagcggataaactaaactcccaaagtaaacactttctagtttcaaccaaagcaacaggttggcaacacatttcactaattaactagacaaagctgcaagcattaagtaagcacaacacacaagagaaagcaacattgaanatgaagcaatgggatcttaactgtggtttagaatggttactgcatgcagctttgactgcattatccatgtaagaagaagat

SEQ ID NO: 1377 - DNA, 422 bp, Glycine max
  unsure at all n locations
atctacttcaatacactgattggaaatgatgtggcctaaaactataccttgctcaaccataaaatgacattattcaaaattatgaacaacgttagtttcaatgcatctattcacaactttttccatactattcaaacaaccatcagaagaggatccatatacagtgaaatcatgcatatacacctctatgcaattttctaaaaaatcacttgaaatactaatcatgcaccactggaaggtaccaggggcattgcacaggccgaaaggcattctcctataggcaaaagtgtcgaacgggtangtgaatgtggacttttcctgatcctcacgagcaatagtaatttgcatataaccagaataaccatcaatgaaacagtagtgggatatagctgccaggcgttcaagcatctggacaatgaatg

SEQ ID NO: 1378 - DNA, 530 bp, Glycine max
  unsure at all n locations
gattctgacatggaactatgatactaagactggtntgggcatagcaccccacctgacgtccccaaggttttctgaccctcgcgacatatctccaggtaccactctgtggtcaacaaataaaagtatgaagactgactcttccacgctttctcacatcaagcttattggattatggggcacccgtcatatttggtactaggtggcgatcaggcgatggcgcanatcaactatcccatttccaccagccaggcataagcacaccatccccagttgcccacctttaaattttagctcacgtgcacatacgtagtcttctcctcgttcctctcagcaccgggtccctatcaacccctccaagctntcacaaaatccaaaaaattcaattccatttgtcatgaaactacctcacacaatgaaaaacagagtggaggcagaaatcttgcacaagaatcattcaaaattcacagaagttttctaccctcatacctcagcaaaaatctctttcgtccaaatcgttacccattgattgg

SEQ ID NO: 1379 - DNA, 400 bp, Glycine max
atgcattggttaacatggtaacccatctgtccttgaaccacaaatctgtacccgtcgcaagggtctgtgatctgtgctcctctgctgaccaccatacagacctttgcccttccatgcagcaacctggagcaattgagcatcccgaagcttatgctgcagacatttacagtagacctcctcagccttagcagctaaatcaaccacaatagaacaattatgacctctctatcaacagatacaaccctgaatggaggaatcaccctaatctcagatagtctagccctcaacaacaacaacagcagcttgctccttactttcaaaatgctgctggcccaagcagaccatacatttctccaccaatccaacaacagcaatagccccagatacagtcaacagttga

SEQ ID NO: 1380 - DNA, 437 bp, Glycine max
agcttgcggatttggtctttgctggcgaaatgatcgaagtgggtctaaaaagaggcaaatctgatcatcatgctttgctaaatgcaaaaactggggcaaatgaagagggtgagaatgagggagaaacccatgcgctgtgactgccattcctatatggccaagtttcccaccaacccaacaatgtcattactcagccaataacaaccctttcaaaagccacctaccacacaaccaatgctaaacatcacctatagcgccaaccaataaatgaattttgcaacgaaaaagcctgtagaattcaccctaattccggtgtcctatgctgacttgctcccatatccacttgataattcaatggtagccataaccccaaccaaggttcatcaaccttcatttctatgaggatacgagtcgaacgcaacgtgtgcttatcatgg

SEQ ID NO: 1381 - DNA, 526 bp, Glycine max
  unsure at all n locations
aatgtctgacatccattacggacctatgatactcagcttgagaacacctatcaatgtgttttgttggatatggatcatactanaaaggttatcgtgtttaccatccaccatcaaagaaattttatatctctatggatgtgacatttaatgagcacaatttcttttaatgttgattctacactttacggaggaaatgacagtgaagtgcataatcatgatattagtatgtttgatatctcagatataaaattatattgtgaacataaattatcgtgtgaggatcattctgcaagaagtgagctaaccccaaagatggaaaattcttttttggataatacagtgtcttttgatcataaccaattggctcaatcttttccacaagttcggcttgactcttcagaggtaccttctgatcctatctcttataatactaatgtagatgaaactcatcatgaaaattgttctcttgatcctacccctcgatatactanattagattaaactaatcatgaaagtgatccttgtt

SEQ ID NO: 1382 - DNA, 394 bp, Glycine max
aataaaatcttaatcggcctgtattactgccttgatgaatctcataactttgttgaaacaaaccctcccctattttctgatagtcctaactccttaacctgagttcatcttgagaattcagacacatcttattttgcccttgtgaaaattggatctgcatccctcgaaacaaaatgagtatatccttttgaattttgtctcatggttttcattgaatttcttcattgctatcatttaatgctgaatttcttcattgctatcattttctgcttttcattaattgatgcgatccaactaaacatgcaaatgttaatccataaaaagtttgaatatgttggtctatgaatacatgccaaatagtagctcgcaccacttcattattggtaataccacc

SEQ ID NO: 1383 - DNA, 404 bp, Glycine max
  unsure at all n locations
agagatgcattggagagatgagctcaatcactaccattctcaccacaacacatagattaagtaccgagtgaacaacttttaatttcgttttctctcactcagtgatgcttcttacatccttcgataggaatttttcttttttcaactcaaggcttcatcatctctacaagagctttccggaaactggtgtattcatcagaggctggtcctttccctataatagtcgagtcttgacaccttttcacccttttttcatttgttctatatgtggacagggtccaaccatttttttccccttgtgatatctgcaccatctctcatctggtgccttaaccttacccttattcaaaggggaatgtngtctgacacaatattcacggcaatgtaatttaattcagaatacc

SEQ ID NO: 1384 - DNA, 338 bp, Glycine max
agcttgacaccatatggatcctatctaccgatatagctaattaaagtctcgctttccaacttgacaataaactaaaactttgataggcatttattgtgcacaagttttagcttctacgcgcataaaaatattttccggattgaatattcaaatttcttatcattataattgttaattaaaaacacgacaagtttatgcgcgtccattctgtctcccagcacaagatgatgaaattgacacctttctcttcctaaatttcaaaacaatttgactgtctcaaccacgcaaccttccttcaccagctactatactaacttatcatcctttgtactaactat

SEQ ID NO: 1385 - DNA, 354 bp, Glycine max
  unsure at all n locations
aatgtactttcgngtcaccaatccacacacaaacacacagacaccggcattttccaacattcccaaagacacagtcctaggataagttaagaacaactcccatctcttgcactgtcttggttccacattattattattaatactactactacttgcgtagcgtgtgtgttccacattgttgcttgttgccctacccatgatcttggaactgagatgagaagccacatcgattaacaagagcaacattagatctcccaagttgaagtctttggagacacccattatgatggngggtgtgagtctgagggaatcatggtgtttctgcaaaggggtcagcaagtctgagagaatgaa

SEQ ID NO: 1386 - DNA, 410 bp, Glycine max
  unsure at all n locations
agcttgtaggattatggngtacccatcacatgtggtactaggtggcggtcgggcgatggtgcacaacaagttttccacatccacaaatcgcgcataaacccaccatcccctgttgcccacctccaactgagctcacgtactcccacgtaacccatatcctcgtttctctcaacaccgggtccccatcaatcctcccaagcttccccaacatccaagtaattcaacattcaaacagcacaaactatcacagccaagaaaacagggcaaaggcagaaaactctgcccaaaacaccaaccaaaatcacagcttttcccacttaaagaccccagtaacatttccttcgttccaattcgttaaccgttggatcgaactcgaaaatttactggaagtctctagtacataagcctac

SEQ ID NO: 1387 - DNA, 306 bp, Glycine max
tggcttagagagcgtccgttgagcgctacactcgtgggctatgcgcgaggaagactctggaatataatgagctgcacaagttgcctaagcacacctattcatctcactaagtgcaccgcttcatatcatccgctgaccgagaaaggcacgctctaaaccgaaattcactaatgcgcgctaagcgatccataagtgcgctaagcgcacgagcacgaacaagatcacctatttaagcctgaaattacattttagagggagagtttggactgcgattcagagctctgcatgtctacggtttctagagag

SEQ ID NO: 1388 - DNA, 456 bp, Glycine max
  unsure at all n locations
agcttctgccacaacaaatccaggaatccacatccaacctacttggatcaattgcaaatcaatacttgcaacctattgtcatccaacaaccctttgttcaagctgcacctacctctataccagcaaccttcgaacaagttgaacatgatcaaccttaacatccacatccaaaatcaccacgaaatgaagatccacctcagcagccataaatgataatgatagtttatcattttccatctttcaaacctgtatttgttgattacataagagggagaaattggaattttgatgtatcatgagcttagacttatctttcatctttatatgctttgttggaatatatatgttgtaacatatgttatgttgcttttataaatgaagtgggtggattattcaatttcgcctcttaactatgctntttacatatgtatgcatggccactttgatcttatatat

SEQ ID NO: 1389 - DNA, 321 bp, Glycine max
aacggttgaacctttgcgaaattcttcacggaaaacgttacggaaacgtttcggaagcgcctcggcttagatttacttcacggaaacaatttttccaagcaaattctaaagagagaaaagtgcctaaggggctgaacccttttcttcttcacttcctcccctatttatagcaaaataggggagatgcttgccgcccagctcgcccaggcgagccaggttgcttcctccagaagcaacagccttctggaggaatcttctggagggcccaatggggcctggttgctatatgcacacccattattactaagtacacccccttct

SEQ ID NO: 1390 - DNA, 259 bp, Glycine max
ttacttgttaaaaaaatattgatgttgcatgcacattattaatgaattctttgatacgtgcaaatagagaaagggcatgctacatattgtttaaaaattctgaaagcccagtaatactgcatgagaacgatgtacgtcttgaaattctaagcaaagggatatggctaaattcttcatgagtaacatctcgcacgcaatgtgatatttttctatttttcatgtattatgcctgcacttttacaatttttatgctggtctc

SEQ ID NO: 1391 - DNA, 399 bp, Glycine max
  unsure at all n locations
agcttgggttcctaggcctagaatcgcatttgtgcactcattttaacctctacgttctgtccttatacatataaatcagccccacagtccaaagctcacaaaaccatgctcatatgtcgttgaggcatttcaccgagcacttggtgggcacatgtttaggcatgaatatcaagataatgggggcaatgtggcatgccccattacttcagactgcaccctaggcctaaggccatcccttacaacccctcaattcaacaaaaacaagcaacaattcaatgataaatccctcacgttttttagcaaatacatgcaacttagagcaccanaatacatcaatggaaagctagagagcccaagaatgaggtacttacttgttggagatngaataatagcgcaaat

SEQ ID NO: 1392 - DNA, 367 bp, Glycine max
agaagttcaagtccatatccatcaaagtctgaaaagagtatgatgaactataggatgtcaatatggccaccgatgaagccttggaatgagaaaccaagaaggcccgaaaggaagaacacgaccaaagcaaagttttgaggggctttatagggcagcaatagtgagctcaagttccgaagaggtgaaaggaatcatcacgggtcaaaggcatgatcttgaaggacgagctaaaggcttgccttatgtcgaaaagaaatttgtcccaacagctaagcgagacttgagggaatatgtgggccatcatcgataagagcaaagagaagctaaatctagcggtgactcacgagcaaaggctagaggatgagta

SEQ ID NO: 1393 - DNA, 524 bp, Glycine max
  unsure at all n locations
cggatgagttcattgacgaccattgganccccacagnngacctgcaggcacgccagcgtctagaataacctaagcgccatccttgcttctgcatattttgtagagcttattcacacatgaagctgggcagccctgaagtaactatgcatgttgctccctctcctgagccttcctgaagccattcacgggctaccttcgtcattgtgtcttgaaactggcggtttagggatgctgttcctttcatttccgaggtcttaacacaacaccttgtcctcaaggcgatgcaactccttatgagctgcgcagaatacccactactgttacgtccacgtgcaggcgctgcttctgtaccacaaccattatcgtggatacctgagccgcctgaactgtcttgtgacccataataactaagggtgtggcgataggctgcatatccatatccccggaaagaaggttcataactgctatagtattgtgctagcacacgattgggtctaagacggaacgatgaggctcggcatgcg

SEQ ID NO: 1394 - DNA, 530 bp, Glycine max
  unsure at all n locations
cttctgatcatgtacactatgatactcagctttagccaatggacttaccttgaattaattcctttgatagcccttttgagccttgtttccctttccttggtttgaagctcactacaagccttaagtgaaaaaccatgatattaccatatccttaaggaattttggagctttggaattgttttgggaataagtgtggggggggttttgtttcattgcacaacttgttttgttggctatgcttcatgatgtattttgggccatacttgatgtacattgtatattggttaaatgttggacatgctgaatgaaatgttgtttctcaaaggccaaagagnttaanttanaanataattcatgtnttatataatcattcgaacaaagaaaaagaaaagcaataaagttgagtgaataagatcttaaatggcacaagaatgatgaaaatcttggttctattcttcatggggaattcttatctttacttcttaatatttcttaatttgttagtgtgcacttattcccctcttgctctg

SEQ ID NO: 1395 - DNA, 365 bp, Glycine max
  unsure at all n locations
tacttttgtcttgaaggcagttctataagcccataatgcatcatccaactngcttgaccaatcctttttagtggaggctacagttttctccaaaatcttctttggctccctgttagaaactctagcttgaccattcgtttgcgggtgatacgatgagactactctgtgcgtgacattgtaatggctcaccatcttctgaagttggttgttgcaaaaatgagagccccgatcactgattaggaccctcgacaccccaaagcaagcaaaaatattcttcttcaagaacctcactatacgttcagcatcgctctttgggcagccactgcttcaacccactggagacataatcacagcccaaggatatt

SEQ ID NO: 1396 - DNA, 438 bp, Glycine max
  unsure at all n locations
gctgcatgattacatctcccctttctcaagcanattcttcttgatatcatcaaaatcttcatgatttacaaaacctagtcaaattctaaaaaaccctaactgacataagctaaaaaaccctagtcggcatcaacttaaaaatagcactgaccgatgttgatcgaaaaaaccctagctaacatcgactaaaaatagcctggctgatgtcggcaaaaaaaccttagtcgacgtcaaccgaaaatctgtagccgacattggctaaaatatcctagccaaggttgaccgaaaaatcactagctaatattgactaaaaagtagctctaactaatgtcggttgaaaaagcctagttggcatcagccaaaaaaaccatggatgtcggtcgaaaaaacctacctgaagtcaagaaaaaacaacctacccggcattggccaaaaaac

SEQ ID NO: 1397 - DNA, 58 bp, Glycine max
  unsure at all n locations
agcttgcctgtcgcacatccaaattccaaacattactaatgcgcttttattntcacct

SEQ ID NO: 1398 - DNA, 261 bp, Glycine max
tcattagatgttgcatttcagtatcacttcctctattggaagaacgatatgcacttcttgcattgtaaatttgtttgattgtggtgcaactattggcattgtgctccttcaatgttagcaggatgtttcttggtttcaccatcaactgtgtcatatcaacaataatattcttcctatccttagtcaatcgcccaatgtatggatgtccaactaaggacttgaccaattcatgacttgtgaatcccataaactaacttcacc

SEQ ID NO: 1399 - DNA, 207 bp, Glycine max
  unsure at all n locations
agcttcctgatgngcctagatggacccagtgctgaaggacacccctctaagacaatggaggatatacatggagaataagatgaagaacaaggaattaaagagaattcaccaaacaaaaagatagaggaagcataagaacatcacctagatgaagatgctcttgataccacatgatgtaagctccattggagcttgtaggcctaggat

SEQ ID NO: 1400 - DNA, 430 bp, Glycine max
  unsure at all n locations
ccctgcgagagctntttcagacttgaagctcgtaatccctcaagtaactagggatgttgctccctctcctgggccttcctgaagccattctcgggcttccttcttcattgggccttgaagcttgcggttcagggttgttgttcgtaacattcccgcggtcttcaaacaacaccttgtcctcaaggtgatgcagctccttaagacatgcccagtcttcccacgacgtttcatccaggtgcaggccctgccactgcaccagaaccatttttttggacccctagtccgtcggaactgtcttctgacccagaatagctaatggtgtggtgataggctgattatccatagccccggaaggaaaggtctcaactgctattggattgggcgagcccacgaaaggttttaggatggaacaatgaaacacgggatgaat

SEQ ID NO: 1401 - DNA, 520 bp, Glycine max
  unsure at all n locations
gatttgcacatcgaanacggaaaannaactngaccgccgggacccaccgtggncaagctaanncgcacttattttcgttacttgtgcacgacccacagaaccgaatgccactctaagcctcccgtgctgaaacaagatattaccctctcctcggcgacaactggaaccttgcaatggccgagggagaacagagggacgcgggctaacatcgacgaacaataggctgggtgatgacggcaacaaaaccatagccgcgcctacgaaaatctgtaggcgacttcggctaaagcatcctatccaaggttgacctgaaaacttctagctactatagactataaacgagctctaactaatgtcgcgtgaacacgcctacgctggcatagcccaaaaaaccatggatgaccgtcgaaaataacctacctgaagtcaagaaanacatcctacctgctatcgccatgatacaccctggttgacatatgcaaaagaatctcgctgaagaaacttgcaccagccgcaccct

SEQ ID NO: 1402 - DNA, 60 bp, Glycine max
  unsure at all n locations
agctttataagcgcaggttagggagacgaagtgtaagtggncgcgatatacgaagatgat

SEQ ID NO: 1403 - DNA, 568 bp, Glycine max
  unsure at all n locations
aactcgccgtgaaatgcaacaataattttcgaatttaattatntnnntannnnnaagagagcggacgaggcctggaaaccgaacannagcncagcngnagaaaggngacccacacatgggactatagggtttcgggccacggagcacaacaagaantccacatccacaacgcgcgcatacacccaacataccctggggcccacctccaactgagctcacgtactcccacggagcccaaattctcgatgacctcaacaccgggactccacaaatacccccaagcatccccaacatcaaagtaatacaacattccaacaacacaagctaacacagcccagcaaaacagggcagaagcagaagacactgccacaacaccaagcaaatcacagctgttctcacctaaagaccgcagaacaaacccttcggccacacgaagagacgcgctcaccactccggaaatgccctcctttgcgatttggagcggaataggcaacacaaggtcgaagcccgtcgggcaccaaagttgaggataacaaaacaacacgccgcgcgcacgcaaggacacccg

SEQ ID NO: 1404 - DNA, 520 bp, Glycine max
  unsure at all n locations
ggccttatgaatcttcaatctacgaccgcgatcctntgagtccacctgcacgcatgcaagctngataacaaggctctttagtttagtatctttaanggcatgctcctcttccattntgcatcctgctacaggaaggtgccatttggtacagctaagaattctttagagggctgatggggtttatcaacaaggtagtcccaactaggattggacacttccaccgttggatgataggcatcttctacaatatcctttatttccatgggatcttcattctccttatattgcgcatcctctntggtgttctgcttaaagagtcagaagcattacccattttctcttataatgtgtgaatctggngcattttatttttctagaaaagaaaatacaattatccccatgagactcattagacatccactccananaaaaaatcgttagtcgttaatgttcactatctttgttgacaaattctcgaataattcaactaattatcacacataaggctgacctgttatan

SEQ ID NO: 1405 - DNA, 497 bp, Glycine max
  unsure at all n locations
aggttcttaaggaatgaaagaaaggagagcacttgatctattttaagatctttnncttcaacaacaacaccttaccaaaactcatgaaaaataataatgcaaaactaacactaataagatgttgcacaaatacccattatgggtaaactcaaagaaagaagaanaaggcttaccatccaatagtggggtcacaagctcaaggaaatagatgagtgcaaattgtcctanagggaaataagccctattcttgagagtgaatgaaaaacctccttatggttggaggagaaaatgggaaagctctgagaaatgagtaaaggtgcatagttccaaagtatggagaatggtaggaaaagaanatggttntatcttaacaaacctcgaggcccatactnctctagaactnttactcatcactaagcttaacctttttctttaaggacanagactacggtacacaactaaactttgtgtcatcgaggaaacaaaaatatgttggt

SEQ ID NO: 1406 - DNA, 372 bp, Glycine max
agcttccatgacaatgagaggttatactcctctttgatgcgaacacgataacgattgatctgcctccctttccatcatacggggtaccacctgtgccgccagatctcctacaacttttgggcgtgctctttgaatgatccgaccccctctttacacatgttctcgcgacgcatcctatccgcaaccatatcaaacttgctctgactctcgcctccaaaaggcatccattatgtcctttcaaaatggactccgcaaggtcaacgttacgtaccaggtaacacgtccccatatgactctctggaggaagcatcgcatctctatctttggcgatcaccctctctgcaatcatctttaatggtcttggacagaact

SEQ ID NO: 1407 - DNA, 482 bp, Glycine max
  unsure at all n locations
ngcttgtctgttgtcgcatgcataacggaccttaaatactagctggtaccggnntgtaaanaagcggctcttatataatgtngttgcttacgacgaaacacgcgaagtggacctattatatgaaattcttatctttaggagacatatcgagttcatatttgtttcgtatattgaagttacagtcttgtgtacagtggacctggaggagacggaccaataccatgcagagcctattttttttatttttatcaaagatctctacctccatccattcaaattgatgataaagagccttaacattgatgtaataacaccaagttgaaatgtcgttgagctgcagttaacaggacgatgaaacaagcaatatttcttttggccatgcgtttactcaatggtctagaaagatgcaagttatattacatcggttatcactgaagtgaagatgcccctttacatcgctaatacacgtcggtgaaacaatg

SEQ ID NO: 1408 - DNA, 386 bp, Glycine max
  unsure at all n locations
atctcttgaccctaanagntgctngntgtatgggggagtcttctgcttcctaaaacataacaaaccaccccttacctacaatttatttaatcaatgtgtgtggtcatggtaaccaacaacactctnggattctaagcacaagactattccacttaatttaatataaggcccaaatactcgccacaaaccttccttgtgaagaagatcctaccaaactaagctcatgtggaaacacatgggaagagtggccatatcaatacttcgcaccactctaaaagtattccaaagccgtgccaaaaaaaagagcgggggcttcctccccagaaagccccagaggggtaccccctcatttccatggcggaactctcccaccaccccagtttttc

SEQ ID NO: 1409 - DNA, 534 bp, Glycine max
  unsure at all n locations
nggagatgtcatgttcgacagccattgcgagnancgnngacacannnnactactccaggctggaggaatatgggggacccatcacatgtgtgcctngtggcttgttggcgaaggngcacaacaagnttttcacattcaccatgcgcgcattaaaccatcatcccctggtggccaacttcaactgagctcacgtactcccatggagcccatatcctcggttctcttaacaacgggtcttcattaattcctccaaactttcccaacattcaagtaataccaccattcaacaacacaagctatcacagcccagcaaaacagggcaaaagcagaatactctggccaaaacaccaaccaaatcacatcttttctcacttaaagaccccaagtacaaatccttcgtccacacgtagagacgccttcacgagtccggaaattgccctcttttgcgattgagccgaaatgggcacacaagttgaactttttgggcacattgttgaggagaaaaaataaaaggctcctgaaaaaagagacttt

SEQ ID NO: 1410 - DNA, 409 bp, Glycine max
  unsure at all n locations
tccttagagtcacccgcggcatgcaagctntgagggtgcgtagtccaccatcttttcatagtagagtatcgataatgtgtctaccatcacgattatcgtctccctttccatcatagggggtaccacctgggccgccagatccctccaccttttgggcgtgttctttgaaagatccgtccccctttttacacatgttctgtagttgcatcctatccggaaccatatcaaaattgtactgatactgcctaacaaaaggcaaccattaggtccttccaagaatggactcgggaaggttccaagttagtgtaccaggtaacagctaccccagtaagactttcttggaaggaatgtatcagcaattcctcatctttggcgtattcacccatcttctgacaatacatctttagat

SEQ ID NO: 1411 - DNA, 435 bp, Glycine max
  unsure at all n locations
gctggtgagggtganaatctcagctgggagctgcccagagaagaaattgtggctcatgttgagactagtgaggtttgtgaagatgatgaattgcttccctgaaaccacacctcccaatttcttcatggaaaggtctatggaagttacaattgttgagtcattgttacacttgatgccggaccaagaacatgcataggatttcccagttaattttcctccagagggcaccacccaattgtgcaagctgttgtcatcatctacaagctccgattttaggctgagaagtgcctctgagtaagggtcaattgctagaactgctgatgataccatgaagaaggtaacaagaataagatttttgatgtagaaagcattgaaaatctccattggaacttggagagcatcacaaggtagagagggacaatngtaagtacccta

SEQ ID NO: 1412 - DNA, 447 bp, Glycine max
agctatggagaaccaagccaatcagaatgctatacgaaatatagatgggaatagaggtaacaatggtggtaatgacggaccgaggcagaaccgggttgagggagtaaagctcaatgttcctcccttcaaaggtagaagtgatccagatgcctacctggactgggaaatgaagactgagcacgtatttgcctgcaatgactacactgatgcgcagaaagtcaagctagcaacagctgaattctccgactatgcccttgtttggtggcataaataccaaagagaaatgttgagagaggaaaggcgagaggtagatacatggactgagatgaaaagggtgatgagacaaaggtatgtgcccactagctataacagaaccatgcgacagaaactccaagggctgtcccaaggggaattaaccgtggaagatattataaagagatggaaatg

SEQ ID NO: 1413 - DNA, 431 bp, Glycine max
gagacaacttactcgagaagctagagcttagctacacacacccctctaataactaagctcacctccttgagaagcttccttgagaagattcctaaagaagctagagcttagctacacatacctctctaatagctaagcttacctccttgagatgagaagctagagcttagctacacaccccctataatagctaagctcaccccatgacagaaaacatgagaatacataaaaaaaagtccttactacaaagactacttaatagaatggccaaaatacaaggcccagacgaaagaataacctattctaatatttacaaagataatcgggctcatacttagcccatgggcttgaaatctaccctaaggctcatgagaaccctcgggccttcccttggatctctagcccaatctacttggagtcttctacccaat

SEQ ID NO: 1414 - DNA, 488 bp, Glycine max
  unsure at all n locations
ccgcttctgatgatgaatcaagttgattcaagtagttntgatgatgataaaaagcccaagagtttgatttcaagattgagtcaacaagttcaagatcaagattaaatcaagattaatttcaagtttcatgagaagaaatcaagaagattcaagattcaagagaagtttgatctcaagattcaagagaagatgaattcaagattcaagagaagaaatcaagaagacttcacaagggaagtattgaaaagatttttcaaaaaacaaacatagcacagttttgtttttcaaaaaagtttttctcaaaattttctaagttccagagtttttactctctagtaatcgattaccaattacctgtaattgattaccagtggcaaagtttgatttcaaaagcttttaattgaatttgcaacgttccaattgttntttaaatggtgtaatcgattacaatatattggtaatcgattaccagtgtatctgaacgttga

SEQ ID NO: 1415 - DNA, 476 bp, Glycine max
  unsure at all n locations
nggaacatataaaattcaatacaaggccctctcaaggatttattcaaaacatatgcaagttgattgtttgaactaacaaactcggtagaaatctaattggacagtagctttccctcataaaatgacaatcaatttttatgtgcttagttttatcatgaaacacttgattagaagcaatatgaaagtttgtctggttatcacaatacaatttcattggctaaatttcatagaattgtagttcttgaaggagatgtttgatccacaccgactcacatgtggttgtggccatggtcctatattcggcttttgcactacattgagcaacattaaactgtttcttactcttcctagagataagatttccaccaatggagacactatcttgtgttaaagagtctatctataggagaacctgtgcaatcaaaatcacaatacccaaagaattgcgcatctcatttatcttcatgatataacta

SEQ ID NO: 1416 - DNA, 313 bp, Glycine max
agccccatcactacattctcttgtagcaagatatttgtttttatcagctccatgggcaaggacatggcctacatagaccttcttgacactcttgagagatgcaacgattatactccctccatatcgcgatataagacttaattgtctaatccattaagataaaggaaagtgatcaacccagccgataacaataaatttgcgtcacattcatcacttctttcacaactatccccgtagctaatacttctatttcttttaatggcttatcaacatattacctctctttttttaatgaggaacatttctagtctaa

SEQ ID NO: 1417 - DNA, 406 bp, Glycine max
  unsure at all n locations
ttgatactattattataacaatgaacacttatgaatatttgtgattagatgtaatgtataaactctgatactatttatacaaatattatttttcttaatccacttttttataaaaaaaacagttatgtataaaatactttgcgtagaaaacaatcttgaatatctaatggtcattcgtataaaataatatatgagtaagatgatattttctaataaacatttgaatntaattaaaatacattaataatataaaaaaattatattatcattcaattacaaaaatattatgtataataaatctggtgactctaataataattatctctaaattattttaaaaatgattctttattggatgataatgtaaagatcttttaacactaattgtatatgacaaatagatatg

SEQ ID NO: 1418 - DNA, 398 bp, Glycine max
agctctcttaagacgaatcctatttatgctagagcttagctacacatacctctttaatagctaagctcacctcctttagatgagaagctagagcttagctacacaccccctataatatctaagctgacccccatgacagataacatgataataaaacacaagtccttattacaaagacaactcaggatgccccgaaatacagggctgataccctatactactagaatggccaaaataccatgccttgacgaacgaaaaacctattctaatatttacaaagataagcgggctcatacttagcccatgggctcgaaagctaccctaaggctcatgagaaccctagggcctttccatggatctctaccccaatctacttggagtcttttaaccaatgccct

SEQ ID NO: 1419 - DNA, 416 bp, Glycine max
tgaagaacttttcaagaaagtcataccacgaacttgaattccactcacttaaagttctattacagctaggctatgttacaagagctactctttttcctaccttgactttttatccatataaaaatatgaaggttcttgccgagaaagttttaatgagacctcatcctacaaatattatcaatgaagaaatatttcaacaatcacacttatgtcattatattactccttttttaatattgttccccctagaataccctctttggctaaggttaaacttcattaatcatacattagtagtccctcctgaataccctgttgaactaaggtttaacttccttaatcataaataatagctccttgctataaactctcttcggctaaggctaagctcatataatcataataacagttgaatt

SEQ ID NO: 1420 - DNA, 448 bp, Glycine max
  unsure at all n locations
agctngacgatgttganaagaaaatatgttgtcataattgaagaatgaacatgtagcttctaatgactctgaaatgtcctacattaatatataattgttatgctacaaattcacataattcttagtatgttacgttaaatttaattggcaaacgtgtataacttatggatatactattatgtcattaatacgaatacctagtacatttaacggttacctaatttaaaataatttgttaacattaaccctaatatttagaggaataaacagagaataaaaattataatccaaaataacttatcatttacaaaatgtgtgggaaaaccaatatgtttgcaaatacatgaaaattatatacatactcgacatatgaaaatataacatggatgatgtctatggctgatccgtgcgctgccttcttcgcgacttgacataaacattgccatct

SEQ ID NO: 1421 - DNA, 417 bp, Glycine max
  unsure at all n locations
tctcccgcaattttctataaatagggggagatgtgaagtatatgagggttcagccccttatgcacttctctctctttcgaaatagttgaggaaaattagttccgtgaagaacatccaagccgaggcgcttccgtaacatttacgtaacgtttccgtgagtaattacgcgaagattctcgaccgttcttcaagattcaccgtttgttcttcgttttcttcagtcttcaacgggtaagtacctcgaaccaagcttttcgattcattctatgtacccgtggtgggccacatttcgtttcatgtatatttattctcgtctccatttactttttattcccccttttgacgtgcttangccatttatttaagtcgtttctcgcttaatctgnaaataaaataaatttccaccgatcgttcgaa

SEQ ID NO: 1422 - DNA, 405 bp, Glycine max
  unsure at all n locations
agctnttntaagcatttttaatacttactagcagaattttcaaaccgcanaaactgaatcgaaccaacctacaaaatattggtttggatttcataaataatttaaagtgcaccaaaccgtactgcaaacacccctagatcgtagtattggtagatagctaatgctttctgcatgctgggctctctgaaattcttcgagctaactgaatttgctaaaaacattgttggatagttgccttaattgcagttgtccctagcctgcctttagtgcagtctctttgggttgcctaatttcagtctcacatcaattgaagatatagtcaatataatccttataaaaggcttcaacaatcttgaccttacaagccaattgggttgggtcaagttaaccctaagcccaaattct

SEQ ID NO: 1423 - DNA, 450 bp, Glycine max
  unsure at all n locations
cgtttttcttaattntatgagtttctatttctattcaattatgtaaatatcatttaaatgttatcttctgttgatcgtggatattggctttgttctgctcaagttcattcatttgcagcatgtgctgatttattatgttcatgagatttcggtgtgtatcaatttgccatccgtgcagcaaattagaatggttaataagtctagatgaatatgatttttcttcaatgcgatcttcagtattattagtttctgaatttgatcatgaggcatatggattgagttttaaacctttcttcttgcaatgtagagtagttatgtgttgcgttctgcatagcatccaatctccgcatgatttggtgatgtctagcccagatcanactctcanattngtcttcaacttcacaattttcttaggtctactatgggtgtttcttgacttacttcctctat

SEQ ID NO: 1424 - DNA, 374 bp, Glycine max
agctttggagcatgacgaaagtttgtcaaggttctaacaattccatcatgcattatgatttgtatagagccaatcccactagtcttacaagagggattgcttcccatcataacattacctacggatttcttatcataggtcaccaaccagctcctatgtggacacatatgataagaacaatctaattcaagaaccccaattcaaaatgacgtcgttattgatcaacaacagagaacaccaaatcagtttttgatgaggaatcattctgaacagaggttgcaatagatttttttttccttcttttctttggacaatattttttctagagacctggttccttgctataattacaaatatccgtttgtttaactttt

SEQ ID NO: 1425 - DNA, 441 bp, Glycine max
  unsure at all n locations
ttacggacctatgaaactcagctatgctgcnacattacaatagacctcctcaacctcagcagcaaaatcaaccacagcagaacaattatgacctctccagcaacagatacaaccctggatggaggaatcaccctaatcttagatggtctagccctcaacaacaacaacagcagcctgctccttccttccaaaatgctgctggcccaagcagaccatacattcctccaccaatccaacaacaacaacagccccagaaacagccaacagttgaggctcctccacaaccttccctctaagaactcgtgaggcaaatgacgatgcagaacatgcagtttcaacaagagaccagagcctccattcatagcttaaccaatcagatgggacaattagctacacaattgaatcaacaacagtcccagaattctgacatgctaccttctc

SEQ ID NO: 1426 - DNA, 374 bp, Glycine max
agcttgtgctcgaggccttgacctcataattgtctcatcactgtgtttgatccattctgagagtttccagggcttctgccacttccatttaaactgtagcagccattgatgatgacttctcttccacttccaaagttttccggcttgtcctatagctgctagcctcttcgttgacaactctccaatgggtatcatctggatataaacccattaaaacttattgagaaataaacactatcatcatcatcatcagggaaatagaatctagcaaacatacctttcgtgcttcatctaaaaatgtagctgactccctgcctgaccaattaacaactccaggagtgaatttgagttgctctggtgcaggaagcgacatt

SEQ ID NO: 1427 - DNA, 473 bp, Glycine max
  unsure at all n locations
ntgaagaaacanaaatgaaagctctaaggaaccgaatgcatgcacaaattaaaattataaaaacaaaaaaaagaagtaagaaacaatgaacactcacctagaatggatgaacgcaagaagctttgatgaaggaggaagaggagatcgacattaagagactaggaggttaagaggagacgtaatagagaggaatgaaaagtgatgaatgagaagagattggaaactgataggcttagggtttaatttgtgagagagagactcacaagaggtataatgagagattgagtgaatatgaaataaaaaagttagggttgcacttccttttatatatagataaggttaaatatgtaatatacttacattgcattagtaattaaataaaattagtataagaataatacactatggtaactaaataataataataatatatgatatatgatataatataacacaataatagtaataataat

SEQ ID NO: 1428 - DNA, 448 bp, Glycine max
  unsure at all n locations
agctagtangattatggtgtacccgtcatatgtggtactaggtggcgatcgggagatggtgcaaatcaactctcccacatccacaaatcacacatgaacccaccatccccagttgcccaccttcaactgagctcgcgtacccccacgtagcccttatcctcgttcctctcagcaccaggtccccatcaacccctccaagcttccacaatatccaaacatcatgaactaccctaaaccaagaaaacagggcagaggcaaaaaaactctatccaaaacacattccaataccacagctttccctgctcaaataccccagtaacattctctttgttcttattcgctaaccgttggatcgactcgcaaattttactggaggtccctagtacataagtctacattgtgacgcgtgggatctgctataaaatgtccagaacccaatatgtactac

SEQ ID NO: 1429 - DNA, 419 bp, Glycine max
  unsure at all n locations
tcttgcgtagccgctcttggagctcagaanatcccaaaaacaaatccctcttattactagctatnttgaattctttagttcctgaatgtacaaccttcaaattgttgctcattcccctctttgttttctgcaaaaaagaaaatcaatatcaaagaaaacatggatgaagccctaaggatgccatgtacatgtgtatttctgaagatatagtatttatattccatcaagcatacattgactgctgattacatgtaatagactttntataacatggttgccccanatcacaattaanaagcacaactaccaatctttcagagtcctttggttaatttgtcttgtctccttctgtggtggggtttaattaataatattatacattttgccttcaaaaaacacttatgactaatccttttttc

SEQ ID NO: 1430 - DNA, 467 bp, Glycine max
  unsure at all n locations
ttctttttgtgnacaacacaccttcatgtgtggtgcgtgagcagagagagaaataatttatgcttttcnctccctcactcctttcaatactatccaactgtaatcgcctctactatgctacatgtacccacttgtatatccagatagtatgcctcctatcaactttgcaacttgagctagagtatctaccataatacccactaactaaacggcacccatgtaagagcacctccatataatagaaccgtgtatgaaacgaccagtgcctgaactgagagatatatcttatctatctcatgatcctctatcacgatactcgaactccccaaggatataacatccgataaacttatttctgactcccaatanatatccatatgttcgtagcctctcttaaataaagcctctctttgacgttcaccgcttattgcaacaagaatttcaattctgacctcaatccactaacg

SEQ ID NO: 1431 - DNA, 438 bp, Glycine max
  unsure at all n locations
agcttgtcaaatatacttatgaatacttttcttaacagatattcaaattcatcgtgtaatgaggaattggccttttgtattaaatttaacctatattggcaatgtttttcactaatgaaaacaaaacatataaataaaataacaattttttaatcagtaaaaagtagatgtaaattggtacaagggtaacaaaacccatatacaaaacttgtgaaaccacacaccctactgtccacttcactggttatttaatattttgctcaacacagagagaaaaaatattttccttcataataaaaagntaacgtcttattattatttatttgtaattattctttaaaaaataaattaagagaaaacgactaatatgataaaaatctttngaatttatcccagattctatcccgataatngtgaaaatcatctcaccataactaa

SEQ ID NO: 1432 - DNA, 408 bp, Glycine max
agcccatgtgtcgttcctgtcatattggtgccaaagaatgatggaagctggaggatgtgctcacattgcagagctttcaacaacatcaccattaagtacaggcatctcattcccaagctagatgatcttcttgatgaattgtatggatcatgttacttctctaagatagatttgaaaagtggatataatcagattacgattagagaaggtgatgaatggaaaacaacttttataaccaagtatggcttatatgagtggaaggtaatgccatttggtttaacaaatgaccttagtactttcatgaggttaatgaatcatgttttgagagagttcttacgacaatatgtggttgtctactttgatgacattcttgtgtataccacaaatgtggatgagcatttgcaacat

SEQ ID NO: 1433 - DNA, 444 bp, Glycine max
  unsure at all n locations
agcttgtaggattatggngtacccatcacctgtggtactatgtggcggtcgggcgatggtgcacaacaagttttccacatccacaaacaacattcaaacagcacaagctatcacagccaagcaaaacagggcaaaggcagaaaactctgctcaaacaccaaccaaaatcatatctttttctcacttaaagaccccagtaacaattccttcgatccaattcgttaaccgttggatcgactccaaaattttactggaagtctatagtacataagcctacattttgaccgttgggatctactagaaaacatccagaactcattctgcactagactttccacaggcaaccacacacaagcaattntctgcacaaagccaaaatcctgctgcacctattntgacagcaaaattctgcataagtgcagatttcgaaaatcacacttcccc

SEQ ID NO: 1434 - DNA, 466 bp, Glycine max
  unsure at all n locations
ggcttgccgcacatccaataccaaacaccacacttaatacgaaccataacaccaaccagggaaggaattntccagaaaataagcctgtaaaattcacctcgatttcggtgttgtatgctaacttactcccatatctattcaataatacaatggtagccataatcccagcaaagattcctcaacctccattttcctgaggatacaactcgaatgcaacatgtgcttatcataaaggagttatggggcattctattgagcattgtatgaccctgaaatataaggtgcaaagtctaattgatatggtctaactaaaattcaaggagggcaatcacttgtgaattctgacgttgtcaagcgacactattcatggngcaatttgaaggttgttgttagatgtctccaatgactcattangatttccaggtttatgccattactgtaaataacagtcacaatgctaataata

SEQ ID NO: 1435 - DNA, 448 bp, Glycine max
  unsure at all n locations
agctntagaaacctacacggcgatccaacgggactagcacaaagaaatataaatcgtttgatttgatgttatcaacaactcagaataattttttttggcaatcctcgtcttttcgaactagccaatggaatgtcattataggtacatgacccactttttattcgatgtatgttctttcaatttgaaattgggttgagatctagagaaaaccaacaactaaactcacccatgtaatgtactccatttatttaatgtgtttaaattatcagttcttaatttgagatatagtattctatttaatgattttctaaaagtatattgtatttttcaattaaataaaaagctataaatttatttttgattcctaataaatatctaattnttgtgtttgctctttaataaacttttctttttcgntgagtccttaattaaacaaaaattttaattt

SEQ ID NO: 1436 - DNA, 484 bp, Glycine max
  unsure at all n locations
tatgagcatgaaacctttctccaccaaccgagaaagtaacatcaaatgattcctcatcctctaacaacatcccaaaatgttcaccaatatcagattcaggaacctgtattgtgtttaactgagaagaatatatctatggacgacactaaaaccgcaatagtgcaatttatcttcaagcagtcatccttgagaaaatttgacgtctcaaggtgtctccgtttgaaaaaccgcgtatagcccctattacacaacaagtgcatcattgatcactacgtaatgtacaccacaaaaaatggatacaagagctaataaatcatgatgatatccaaatcatatcaccaaaatcacaaggttctctagttcctttgaaaatttaattnttatgtcttatattctaataaaagagctatctctttaacccctgacaatagtgaaaaaagaataaaagaaaaatcaataacactttgctntattntaaagacta

SEQ ID NO: 1437 - DNA, 417 bp, Glycine max
  unsure at all n locations
ctcttgagtgagcatttaaagtctgcatatcanagcacagtacataagcaaggtcttcattttgaataaataacattgttagtttaccagggagaaaaatcaacaaaacaaagatgtaggaacagagaagcttcctaaacaccctaaggccaatcccagcctagaaataaatgtttctgagtgcaaaatgagagtgaaagatgcagaaaagaaaaaaaatcttaatcttatttgagaagagggaaacctgaaagcacctgcttctaacctatgttcagaattaacttatgagttattatgtgcaaatcctctcagcactaaacttcaatgcaggtgacaaccaatccgtaaacacaaaaaacttttttgaagagtttgcattgataattataattntggaaacatatttttttaact

SEQ ID NO: 1438 - DNA, 479 bp, Glycine max
  unsure at all n locations
tagttggatganattccatgatcacaccttatagtaagtagataaacatcctanatcaggaagaacaagttgatctagctacctagaaatcaaatgtgtaatcctaacctatgaagtatgccagggatgtcctaccttctctcttacatattgcggcagagcaattgatgccaagttgcacacagccgtttctgttggacttgtatactcaattatctcagtgcacaagtttcatgacttgattgtgcccaaattctgttggttgcttttcctattgcaagtgtcctaggatatagaaaaatgaagaggtttcaatgaaaataaatacaaaatgcactgacagaaacttagcaaaagtcaaacaagcatttgtaaaccaccttataaaatatgtaaggagttccagtttctatctgtgacttcaaaatttcaaaccagagagattctgtgcctgaacaaccttctttgcttttccccat

SEQ ID NO: 1439 - DNA, 436 bp, Glycine max
  unsure at all n locations
agctntgatgatgtcgagaagaaatcacatgtttgtcatcatcaaaaaggggagaatgtgattgtatgtatacatgattttgatggtgaagaatcaaaacaaggcttatttgcttcaagattaatacaagattgtttcaacaaacaaagccttgattcaagatttcttcaagatcaagccttacctcaaaacgaaaggtttcaagtcaaccaaggcacatgtaattgattaccaatacatgtaattgattaccaatggtttgaaagtgtgtaatcgattaccagagactttgaacgttgggaattcaaattttaaatgaagagttacaactattcaagaaaaataactatgtaatcgattacactaatgctgtaatcgattaccagagaggattntcaacgaatatcgccaacaatcacatcttatcatttggatt

SEQ ID NO: 1440 - DNA, 487 bp, Glycine max
  unsure at all n locations
tctgcttatgtggcagggcgggctaccttcactttcttgtctccaacgcgagctgtgaccactgttcttccttcccgcgatgcttcttttcatgtccgcctgagtgggcttatagcctaaaccatacttcccacgatttccttgggcatttatcaggctagttatgccgccgttgtctttgcctaaacccattctgggttcataaccgttccccaacataactcgggccatcattactgctgcatcggacagacaaggctgcccagagagggaatccacggaggaaatgctgaccacctcanaagactggaaagcggtttctaacgattcttctgcggcttccacataaggcatagaggatgggcagctcaccaagatgtcttcctcgcttgacacgatgaccaagtgcccctccactacgaatntcaacttttggtggagcgtagagggcacaactcccactgagtggatccacaggcaccccaac

SEQ ID NO: 1441 - DNA, 417 bp, Glycine max
  unsure at all n locations
agcttcttattcaatgctcatcttggtggtgaagctccttcttccatggcttattccttaatggatggcgcctcctctcacctcttctcctttgtcttccgctgcatctccatggtggaaaatcaccattaaaggacctcattgaagctcanagatccagcctccatagaagccccacaagcaagcttccatcacattntaacgtccctcttgattctgaaccatatattccaatcaagagatctttcttgatcggtgttgctgtggttgtgtcatttggttaccgcaaagagcatgatgactcttgggtaaaaaagggtgctcaaccaaatgatgatgaaggagaattaccggttgaaggggactcttctcttctttagagtattttgacaggnttgatggactcanacctatgtg

SEQ ID NO: 1442 - DNA, 428 bp, Glycine max
cctctatgtctagactctcttaacatcaaaggattcttgagtaaaagtttagaaatgttaaagtttcaagagaagttgacaaagtcataattcaatccccatttcttatgacattctgatcacttcataatcaccagcattgacattttcataagaaggagtggaccgcccaacaccaccagatttttgtgcattatcctcttccataacactcttacctcccacgcatttattttgtttgtgctcatagtgaccacatctaaaatagatggggtgcaaccattcatactcaagaaacatgggatatcccctaaccataatgtgcaaagtcaattgtctatccaaatcaatttcgacacatatacgtgtgaatttaccctagattgtatggacgtcaaattattaatcttaagcatgggttctagcat

SEQ ID NO: 1443 - DNA, 425 bp, Glycine max
  unsure at all n locations
agcttacctacaagtcctaattgtcattctatactagaatcaattcactttagactccaatttccactaatccccanagttggcttctctaaccctcaaaatctcacacttttctacctacaacattgtcattctcacatttaaccctaaattaaccttccccatcatctctaccagttttctatcaacaaatttcagcacacaaacctcacaaagcatcaccataaaaccctaaaatagaatgggtaaatttgactcacatccaacatgtcaagtttagcatgctttcaacaaatttcttcacaaataactaccataaggcattaacctagtaaaactacccatcatatctcccaaaaacccaatacccacgaaattcatgtgagaagaagtccacccaaacctgaaattcgaagtcccacaat

SEQ ID NO: 1444 - DNA, 381 bp, Glycine max
  unsure at all n locations
tgcccaggcgagcaagggtgcttcctccagaagcaacaaccttctggaggaagaatatggaaggcccaagtgggcctgattgctatttgtgcccccctttttactaaatgcacctcccttctatttttttggtgattctttttccgtaacgttacgaaactttacgaatttcgtaacgatacttattttctttccgtaaggttacgaatccttacggatcatgtatttactctnttttagctntcgaagaagttacggaaactcacggattgcacaacaacacctccttttggtttccgccacactacggaatttcacggatcgcataaccttgcttacttttgacttccggcgcgtctcgagacttacatattgtgcaac

SEQ ID NO: 1445 - DNA, 329 bp, Glycine max
  unsure at all n locations
agcttctcccctatnttgctatatatagggggagaagtgaagaagaaaagggttcagcctcttaggcacttctctctctctcaaaagtgctgaggaaaattatttccgtgaagaanatccaagccgaggcgcttccgtaacgtttccgtgagtaattacgcgaagattctcgaccgttcttcaagattcatctttcgttcttcattttcttcaaacttcaacgggtaaggacctcaaaccgagcttttccatttattctataggcccgcggggggtacaacattggttacaggaattttaattctcgtttccattggctttttataccc

SEQ ID NO: 1446 - DNA, 345 bp, Glycine max
  unsure at all n locations
ttacggacctatgaaactcagcttggagaaaacaagttctggtcatatgagctattntgctagtttagtgttaggagtgtaaaggctntgtgggatcctctcacccgcagaccctttcttttgttcaaagggatgtgaacaaagtagctaatagtttggcttctttagcttccctttttgaggatagagtttggattgaggaagtttcccctcatattctttcccttgtcaatgatgacttacgacctctagccattgtcactaaatcaacatccgttcactcccctattacgacgacctctgccatatacaaccttgaaccagcgtctgcgataacaaatcaaa

SEQ ID NO: 1447 - DNA, 409 bp, Glycine max
agcttgcctaattaacctgaaattgagacaaaatgattattaaacacacaaaatgaaaatactaagtatttattacctatacttaacagaaaatacttataacactacaaaataaccataaattgggagagtttgatacaatttatacaagttttatacacaaaagttagtcgttttcatcgactaacacatgtacactaccaccacatcctccacaatgagaagagtgaaagacaagggtaaggaatccctaatagaattggaagagggtccaaaggtatgtggaatggagacacgcaacaactgcttctgaactaagtcataggtaggaactgtaggactcgataaaatctagtggactgcctcaaggttcgatgtgagtccaacaagaacaaccaccatgaaaaat

SEQ ID NO: 1448 - DNA, 439 bp, Glycine max
tcgtccgtagatccctcatgtaagaatgggcctatactaaacagcattattgtaacagcataattaaaaccaaaacttaacccgcaaatccctcatgtaaggctaagtttcaatcctgcttcaatcaagttctaaggcaatagtacattttccaatgctaaagtcacctaactatgcacacaaatgggtgatcagaccaaaagcatacaaacattaagcattgagggaagcattgaacacagaaaacataatcaattagatattaggtatttacatcagttgttcattagaaatccccaactagggtgtttaaccaaccattacaaagaaaccctaacaataaatgagattaaaagtagagaatgatagttccttacacaagaagagggatttctcctcctcttctcagcatctcacactcactctctactcaataatc

SEQ ID NO: 1449 - DNA, 458 bp, Glycine max
  unsure at all n locations
agcttganattgaacaacggaagctctccagatactcttatggtcataacttatcacacggaggtccaattgaggcgcataatatatcgagacgctcgaaattaaacaacgaatactctcgagaaattcaaatggtcgtaacttatcacacggaagtccgattcaggtgcataatacaccgagacgctcaaaattgaaccacgaatgttctcgagaaattcaaatggtcataaattttcaaacggcagtccgatttaggcgcataatacatcgagaatcttgaaattgaacaacggaagctatccagaaattcaaatggtcgttacttgtcacacggaagtccgattcaggcgcataatatatcgagacgctcgaaattgaanatcggaagctctcgaganattcaaatggtcgtaacttttcaaacggaaagtccgattaagcgcataatatatcga

SEQ ID NO: 1450 - DNA, 455 bp, Glycine max
  unsure at all n locations
taacanaaggcatgcgaagtgggtggaattcctagagcaattcccttatgttatcaaacataaaaagggaaaaggtaatattgtagccgatgctctttctcggcgtcatgcattactttctatgcttgaaacaaaattgattggtcttgaatgtttgaaaagcatgtatgaaaatgatgaaacttttggagaaattcttaaaaattgtgaaaaattttcagaaaatggtttctttagacatgaaggctttcttttcaaagaaaacaaattgtgtgtgcctaaatgttctactagaaatttgcttgtttgtgaagcacatgaaggaggtttaatggggcattttggggtccaaaagactctagaaacattacaagaacatttttattggcctcatatgaaaaaggatgtgcagaaattttgtgaacattgcattgtatgtaaaaaggcanagtcta

SEQ ID NO: 1451 - DNA, 440 bp, Glycine max
  unsure at all n locations
agcttagtatttatatttattactacacttcatgtaatactatactgaaacagagtaaatttggaacttgaatgaaaacctacaaattactaccttccccaatagatagaagtagttcaacacaagacttagctcccccagctaaggctatgtgaagggaaatgccattgtgcatattgcgaatgttcacatcaacaccagcaataagaataacatactcaaaacacaaaaaaacagaacttagttaacattagatacaaaaggcacatacttcagataccaacatgatattgaatattgatggatatttaattattctaatgaagaatttggtttactcaccttaaccaattcatcatcgtcaatcataacagctcactactagaaaataagggtttcacatcggttatttaagactttcaacatcggntattaatcga

SEQ ID NO: 1452 - DNA, 396 bp, Glycine max
  unsure at all n locations
tgacacagtgcttgtacagagctcatctccacccgcagcacataagaaattatgtggaanaatgaagataaactgtgttaagcaagaccaaaaaacatacaagaagatactgtcagtttgtttcactaattaaatcaaataacaggtttttgtagcttatatatatcattaagaaaccagtacggcagtacctgaaggaagtgaattgtcttttaatcgagtcagaaaccagtatatatcatttaagatatgtaagtgagtgttgtcttttcagacaaatgaagcattagcgaagcgaagacacatcatcatgttgtgcatgtggaggtggcaggagctgaactgcatattcaattctatgtgggcacgttaaggtggaaaatgacactggctggc

SEQ ID NO: 1453 - DNA, 419 bp, Glycine max
  unsure at all n locations
agcttgattgtagcagtgaatataaaacaaacttaacgatagcaacagaataatttttacaaatttaataccattcatcaattnttcatcactttttcatcttcaatacaaatgaaaatattatgttagtgaactattcatcacttttttcattcattntttttttatcaatggtagacatttatacattgatattccatataatcaactatagactaatagataatagtgtcactaatatcttctcgtatacaatcattttgtatcctatcttttcttgtatggccacacattcatttaatatacctatttctaacacttaaactatgtaaggaatacaccaataggagaggcacaaccaatatacatttgtctgatatcccanaaaagcatgataaaatatacatatcattctaaac

SEQ ID NO: 1454 - DNA, 414 bp, Glycine max
  unsure at all n locations
ttatattcatgaattgctaagcgaaattcaggattgttcctcagtacactaacattatgcaaaatatagaactttgcttcttccatattttaactcagtagattccaaatatcttttcttatagatgtttcaatttgatcacctttattccatattaaaatgaaacttggtgtaaggcataatttttttttgtcttatattaattaagaaataaataacctatacacacaaaaaattcatacctggctatcaaacaaaatcattttgaacctcacaattggatttccattaatgtggtcaactatttttcatagcttattgacttgagccttcacaatctagcaggtaatagaaggagtaatagccttcattgngattaacatgtatcctanaatttccatcaccttagcacaa

SEQ ID NO: 1455 - DNA, 455 bp, Glycine max
  unsure at all n locations
agcttctcccncaattntctataaatagggggttaagtgaagtagaaaagggttcagccccttaggcacttctctctctttcgaatttgcttaggaaaattgtttccatgaagaaaatccaagccgaggcgcttccgtaacgtttccgtgagtgatttcgcgaaggttttcgactgttcttcggcgttcttcattcgttcttcatcgttcttcagtcttcaacgggtaagtacctcaaaccaagctttccaattcattctatgtacccgtggtggtccacatttggtttcatgtatttttattctcgtttcattcactttttatacccccttttgacgtgcttaagccattntatttaagtcatttctcgcttaacctagaaataaaataaatttccactgatcgtttgaattgtattatccgttaactttgggtgagatgaattccgaccgatc

SEQ ID NO: 1456 - DNA, 431 bp, Glycine max
  unsure at all n locations
atatagagtttttgggtcatgctggattctattgatgattcattaaagacttttccaaaattgctaaaccactgagtaatctgatgaacaaggatgctgtgtttatgtttaatgatgaatgcttagaagcctttaatacccttaaagccaagttggtctctgctcctgtgattacagcactagactggggactagagtttgaattaatgtgtgatgcaagtgattatgcagtangtgctgtgctgggacagggaaagggcagaatttttcataccatctactatgccaggaaagtgttgaatgatgctcagatcaattatgccaccactgagaaagaattgttggcaatcgtttatgcacttgagaaattccgatcttatttggtggngtcaaagatagtaatttacactaatcatgcaacaattaaacat

SEQ ID NO: 1457 - DNA, 441 bp, Glycine max
  unsure at all n locations
agctaggcattntaagtgagtctaatctcacttgagccaatatggtagcctacattcatttcatgtacatattcattatcatttttatgtttgttttgtgcatttgtgtttgtttgtttgttatatgtacatttagaaaacatgaaaacctttttagcatgttatttctataaaaaaaatttgcactatcattcatgataattgattacgagactttgtaatcaattaattcgacctgaggttactatcttagtgtctttaggttagccagtaattaattacattgtatggtaatcgattaccacctgcaccctttctaggtagagctataacaattataataattggtaatcgattacgcagggtttgaaacatttttttttaaatgaaaagacactcgctttgctttatatacagcatacctagacctaaattcttact

SEQ ID NO: 1458 - DNA, 468 bp, Glycine max
  unsure at all n locations
tcatcttcaatccanaaagaaagtgataaagaagacttaattgatttgaatgaagatgatgatcttagcctttntgtanaaaggttcaacaagttcctgaaaatcagaggaaatcaaaggagaccaaattttaaacctaaaagaaggacaaaagattcatcctctactccaaaatgctttgaatgcaatcaacctgaacatctgagggttgattgcccaatcttcaagaaaagaatggagaaatctgaaaagaaaaattttagtgaaaagaagatgaagaaggcctacatcacatgggatgacaatgatatggaatcatatgaggatttagaanattaagagataaacttgtgtctaatggctaaaagttatgaaagcaatgaagaggtaacatcttcaaataacaacttatccatttcttttgatgaattacaagaatgcattgctgatttgcatagagaatcaatc

SEQ ID NO: 1459 - DNA, 501 bp, Glycine max
  unsure at all n locations
ctgctgatattcgacantctgagcaataagcctnnaaacctatacaagataatgctacggcggacgcttncatacagccagngaagttgaactggtgctacagcccgcaataaacttgggccgagacagaaacacgacgggtttcaatcggaggtatagtcctcaagcctacccttatggtttgcctccagacttctcttcccgtaccgctccaggcgatatgagccaagcccctaccttcgaagggtagacttctcctcacgctcactattctntgtagaagatgattatggagatgcccatttacgaccttacttctccttatggaaccagtcccgcatgaattgtcctatcatcctactcgtgccttactatttatacgtacatttaagaattgtccccttggcattaaatgttccatagtttacttatcaatcccatgggtttctcggcatttgctttccttttaaacacacattatattatacaaaccccttgccc

SEQ ID NO: 1460 - DNA, 465 bp, Glycine max
  unsure at all n locations
tagaaaggtctactcanatggatgtatgttaagttgataagtaaaaaaaaatgcaaaaagtagaanatgcaggatcatcacgtgcccattgattcttggtttctaatatcaaataattaataacaagaagaaattcaattaaataattttttgaaatcaccaaatttaatttcctaatttgataaatcaaaggcattaattatataactaaaccttaccatgaaaaattggcatcattatgtatccttctactcctattttaaattttattatattgaacttatatttttttagtcaacattgccaagatgtggatcaggtttggccttccaaagacaatatcaatgatttataataatttatcaaatcatttgatattttgatttataataatttaagacaatatcaatgatttatattaatttatacactctgatgaactanatcccttgacaaatagttaat

SEQ ID NO: 1461 - DNA, 312 bp, Glycine max
gcgagctaggcgaacttgatatttgcagatcgctgatccatcttcttctgtaagagcgcataatgcactgggcgcatcatgattggctgagcgcatagaacaatctggaaaaagatgacctgtacatgtgcgtagagcgagagtcaaacttgcttaacgcaccgcttgcacctccaggctgagcggcaaaaaggggcgctacacctcatgtcacttaatttggctaggcgaaccataatgtggctgatcgaacgaccaattatcagcatcactatttagagactgaagtcagatatggaagagaggaccaat

SEQ ID NO: 1462 - DNA, 410 bp, Glycine max
agcttgtaggattatggcgtacttatcacatgtggtactacgtggcggtcgggcgatggcgcacaacatgctatccacatccacaatgcgcgcataaacccaccatcccctgttgcccacctccaactgagctcacgtactcccacgtagcccatatactcgtttctctcaacaccgggttcccatcaatgctctcaagcttccacaccatccaagcaaaacaacattcacacaggacaagctattacagccaatcaaaacagagcataggcagaaaactctgccaaaacaccaaccaaatcacagctctttctcacttaagaccccacgaacaatttcttccttcctgctcattaaccggtggattgactcgaaaattatactggaagactatagtgcatatgcctaca

SEQ ID NO: 1463 - DNA, 444 bp, Glycine max
  unsure at all n locations
agctnttgaaatcaaactntatcactggtaatcgattacaggaaactgataatcaattaccagagagtaaatactctggtaacttagaaaattttgagaaaactctttttgtaaaacaaaactatgctatgtttggtttttgaaaaatccttttcaatacttcccttgtgaattcatcttctcttgaatcttgattcttcttgatgtcttttcttgaatcttgaaatcaacttctcttgaatcttgaatcttcttgatttcttgaacttgttgactcaatcttgacatcattctttngggctttttgtcatcatcaaaactacttgaatcatacttgattcattatcatgaagctggcttctacaatctccccttntttgatgaggacaaccctgaaatcaagaaacacatacacattcntttttctagtcgatcactcactta

SEQ ID NO: 1464 - DNA, 459 bp, Glycine max
  unsure at all n locations
gggttcgaggtacttacccgttgaagatcgaagaacgaatgaagaacgtcgaagaacggtcgaaaaccttcgcgaaattcctcacggaaaacgttacggaaacgtttcggaagcgcctcggcttagattttcttcacggaaacaatttttccaagcaaattcgaaagagagagaagtgcctaaggagctgaacccctttcttcttcacttcctcccctatttatagcaaaataggggaggtgcttgctgcccagctcgcccaggcgagccaggttgcttcctccagaagcaacaaccttctggaggaagcttctggaaggcccaagtgggcctgattgctatttacaccccccttattactanatgcacccgcctttctattatttgtaattctntntccgtaacgttacgaaactntacgaaattcgtaacgatacttattttccttttcgcagggta

SEQ ID NO: 1465 - DNA, 397 bp, Glycine max
  unsure at all n locations
agcttgtgccttttcacgtctggaatatgaatgtagcatatagatccaaagacccttaggtgctttgctgatggcttcttcccgttccaagcttcaattggagtcttgtcttttacagacttagttggacatctgttgagtatgtaaacagcagtgtagactgcttcaacctagaatgtgttaggtagtcccttctccttgagcatcgatctagccatttccataactgtgcgattctttctctcggacactccattttgttgaggagaatatgcgattgtaagttttcgctcaatgctttcatcctcacaaaatctttcaaactcgcgagatgtgtactttntgttgcgatcacttcttagtacttttatccgttttccacttttgatttcagcaa

SEQ ID NO: 1466 - DNA, 464 bp, Glycine max
atgttctgcaggaaacttgtgtcccttttaagtttatgactttcggtctagatttattttaaaaaattgcaatagttgtagtatggtaatatatgcttctcaccgaaccctctctggaatttgagactactctctctgtagtctttaagctatagttcttttgcctcttcaatttttgttataccctttttagctgttttttgatgcattatttgtagctgattattagatttgactgcttgtggacaataatttctagtccatattctttataaaaattgagaatgactctgatatgctttagctttttaaacaaacctttggccggcaccaaatactgttactttatatacttataactcaattgcaggtatagattggcatattcatcaaactatagccatatcttggatccgttaattgagaacaattaccaattattcatgatcgagaggcttataatg

SEQ ID NO: 1467 - DNA, 382 bp, Glycine max
  unsure at all n locations
agctttntaggatagcaatgttatcaatggcagatagcggaacatggcagaaggccgaaattccaccatataaacataccattgcaccttatgtcaccaccatggcagacctcccttcacaaattgtctatggcagttgggaaaaaatccgccatgccattccaccatgccagtcccatggcctctatttaatagcactgtagggtagtctaacaacattttccaagtttaatgacattctagcttaagaagcatagaagattgaaaaacttgtctttntgttaaactaacaaaaactagtcatgtgagacacattcaaagcctgttaaacgccccagcannatatattgagcagaaccattatattgcatggtcccatact

SEQ ID NO: 1468 - DNA, 410 bp, Glycine max
  unsure at all n locations
ntcttgagaaaacttccttgagaaacttctttgagataacttccttgagaagctagagcttagctacacacacccctctcataactaagctcacctccttgataagcttccttaagaagattcctaaagaagctagagcttagctacacatacctctctaatagctaagctcacctccttgagatgagaagctagagcttagctacacaccccctataatagctaagctcaccctcatgacgaaatacatgaaaatacaaaataagtccctactacaaagactactcaaaatggctcgaaatacaaggctaaaaccctatactactagaatgaccaaaatacaaggcctaagcgaaggagaaacttattntaatatttacaaagataagcgggctcatacttagcccatg

SEQ ID NO: 1469 - DNA, 312 bp, Glycine max
agcatacaaaactaatttttgggcctctatatgtctgagggcccaattacaaaaatacagcatacaaaaatgacatactataaaactggacgacaaataaaattgtcttctctcttcaagtccaagccggttcagcccaattccagatccaagctcaatcgcttataattctcctgaaattaaattaaaacacagaattagtcaagtaggctcaaatgataaaactgcataattaatttgacaattaacgctaatcactaattaaaatggtgacagaaaggggtaagaaatatgagaaaataatgacacatc

SEQ ID NO: 1470 - DNA, 315 bp, Glycine max
tcattccttgtttcactcatgtgtccaagtctttgatggcatatggttgaattgttgacagccttagtaactgctaccatatactcatctgcaatcatgtaaagagatcctcgcttctttccacgagccacaatgagattgccttttgttaccttccaagctctatatccaaaagtggtgtaatgcccctcattatccaactaccctatagatgttagatttccctttaaggcaagaatatgtcaaacattgtacagtgtccatagggatccactagaggtcgtgatgtcaatatcacctcttccgacaatgtca

SEQ ID NO: 1471 - DNA, 400 bp, Glycine max
  unsure at all n locations
agcttgtaggattatggtgtacccatcacatgtggtactaggtggcggtcgggcgatggtgcacaacaagctttcctcatccacaatgcgcgcataaacccaccatcccctgttgcccacctccaactgagctcacgtactcccacgtagcccatatcctcgtttctctcaacaccgggtccccatcaatcctctcaagcttccacaacatccaagaaaaacaacattcaaacagcacaagctatcacagccaagcaaaacagagcanaggcagaaaactctgctcaacacatcaaccaaaatcacagcttttctcacttatagaccacagtaacaattcctttgatcaattcgtaaccgtggatcgactcaaatttactgaagctatagtgataaccta

SEQ ID NO: 1472 - DNA, 391 bp, Glycine max
  unsure at all n locations
tgagatgaggaagtgttgaagggtgaaacttcctgtctttattgttgaccacagagtggtacctggagatatgtcgcggnggtcaggagaccttggggacgtcaagtggggtgctattgcccaaaaccaagcttgaccaatcccgacccaacccgggcatagtcggtcagtgagaacctgtgatgtacctaagcaggcgagctcctggcagtcaacagataaaaggaaaacaagaccacaaagcaaggaggcttgtggtggctggccagctgtgaatattgtgtaatatgtggatggtggcctctggtaatcgattaccaagggtgggtaatcgattacaaggcttaaaattgaggacaggaggctaagatggtctctggtaatcgattac

SEQ ID NO: 1473 - DNA, 85 bp, Glycine max
  unsure at all n locations
gtaaatctaaacatatatgattntttatatcgattatacaaataattgatataaatatgatattttttatattaatgatacatat

SEQ ID NO: 1474 - DNA, 462 bp, Glycine max
  unsure at all n locations
ntaatgctagtccttgaagcatatgaggttgccatatcaaatattcacctatcaagcatgattctaaatgcttaattgtatttttaccctaactttttatgccaaaaattaaaaaaaaatgaaaatgaaaaaatacaattaagccctaaaatttagaaaatatctcttgaaacatttaattgctggaatctcttcatcttgatgattattagttattatacttggagcatctttttttaggctacttgaagcattcttaaccaatttaaatatagtcatcccattaaattaagatgatcatcatcagatttttttgatcgaaattaatcatttagtaaagttaaagacactatgcactgttatgagtaaaaaaacaaattatagtactaatatctaaaggaaaagctaataacactacataataaaaaataaccaatacaagtcaatttaaataaaaaaatt

SEQ ID NO: 1475 - DNA, 162 bp, Glycine max
agcttactcagaggggtacggtggcccagcactctcgccgattatgaggaattggcgaaccgcattgtcggactccccccacccttcctgctgagctgcttcgtgtcggggttgtcgacggacattggccgcgaggtccaggcccaccaaccactgacactc

SEQ ID NO: 1476 - DNA, 377 bp, Glycine max
  unsure at all n locations
ggactcatgttatctacaatcacttgttacgttgattcttaagaaagtcctctaagacaacaccccatatgccatgtctctcattnggtcccatgactcctatctgatgtccctgcatcaccaataatttaagtgcccaactaatggttccatgcatatccttatgtctatataaatattcaaggccgcaagcattgaggaccaacacaaatcattcacatcataaagtgtttgaaattaaaattctcaacacttctcttcaaccattctcttctcagatcaatacaacaatgggatttcgttacctggcatatataggcattcaaagcggtgacgcacctaaggctatcttgcagtctatgtcggagagaaattga

SEQ ID NO: 1477 - DNA, 288 bp, Glycine max
  unsure at all n locations
ntggctaattctgtcatttcaaggggtcaaatgagcttggaagtcagaacctctgcacttgaataattgggctacgagtttggactttgttttgtgtaattagtttagttaggtatattagatggacctaatcaaggcatatcacttccttttgtgtagtcactttatatattagtggaagttagttagttagttagttacttcattttgtaaaaaacaaaattagttacttgctgtgcaaactttctcttttctctcaactattcattattcttcttccctttttca

SEQ ID NO: 1478 - DNA, 508 bp, Glycine max
  unsure at all n locations
tccgaccaccttacttatatattctttattcgtatatanctgttgtttnntaatannnnnncccagcgagttgattgtagcgtgcaagcccttagancaccgccgctgcaactcgcggcaacatgtggctgctcttgctttttcaaaggtcggatactcaccacacacgcgggggcaaaaaacatgcattacttgaccttgcttgttgcattaagacgactcgcacgaactatagtgagctctcgagaccatgtttgaagatggagctgcgctgacaccacgcttgaagccggagttgctgtgatctagatacagctagacacagcttatgcttatcttatgtggtaacgtatccggcgtgtactcagatctgctctaaaaccacatacctttcgctacaccatatcgacccccaagacgatgaccttctcaatgaccgttagacacaagacttgaatcatagcattccatgtccttggacgacaacacacgacagggatcccggccg

SEQ ID NO: 1479 - DNA, 503 bp, Glycine max
  unsure at all n locations
cttgaggaagcctcttatgaagcttctcaaggaagctacatgaagctgtctcggtaaaaacgctgcccatacttcgttaaccgttggatcttctcgaaggttggtttgcagcttcacaagacacttttccatgatctgaccattgggatctttgagaagatgtctggagtatgcgtgacgtttccgttcctgagagcattgctcacctgtgcgttttgagccttgtagtccaagtagctaaggaaaaacgccattntcttctccttctttcttccaaaaccatttaattaatcaattgaaatattgatcctagggttcgtccctttcattnntgttaaaaccttctattattctgcacaacaaggaaacataaagctttgggatcgatcgtgcgccccatttgaggatggcaatggatttgcaccctttggtatgtgaccaagtgaaactttncttgattaaagtcatagagtgatgccaagggtctgtcaatcccactgaat

SEQ ID NO: 1480 - DNA, 168 bp, Glycine max
  unsure at all n locations
agcttcttagtctcagatgatgcagctgagtttgtagctacctcatgcactcctctaatgactatagcatcatttctggcgctaaactgctgggagttagaagccatcttctcaatgaaattcctggcctcaacacgagccnnaccaccaagggctccacctaccggc

SEQ ID NO: 1481 - DNA, 522 bp, Glycine max
  unsure at all n locations
agatgctgctgtancatgcattagtgacctatagatactcagcttaagaagaatggcctcagcaaacttcttatttccttaaggaaattcaatcaatagacctccaatctttaatggagagggttaccactactggaaaacccgaatgcaatattttattgaggcaatagacttaaatattttggaagccatataaatagggccttatatacccaccatagtagaaagaattagaatagatgggagcacaacaagtgaaagcataacaatagaaaaacctagagatagatggtctgaagaggatagaagacgagtacaatacaatntanaagccaaaaaaataattacatctgccctgngaatggatgaatatttcannggttcaaaatgtaagagtgctaaggaaaatgtggacactctacaattaacatatgaaagacaacagatngtaaagatctaggataaacacattactcatgatataacttttangatgatgcaatgaagcatcatacatcaaat

SEQ ID NO: 1482 - DNA, 509 bp, Glycine max
  unsure at all n locations
cgttgaatcgatcagtgcgtgaccgtatatanaagccacgcctgcnccttactcatagggaagctgtggcccagtatttcttttgacttgaagcaacggctaaccgcattgtccggctcccgcgcaggattcctactaaactgtttcgtgtccgggtcgacgtctgacattcgtcgcgaggtccatgcccaccacccactgacactcgtccaggcggcgggcctggctcgtctttacgaggaaaagttcctcgatggccgcaccctctctcgtactcgttaccctcaacctcatacacattcactctcaaccgacacacactcattctcgaccctaccccatccaccgtgaacctgttttctccatctagatcgctattcgagcatgcggagtgtgttcagtccctatcccatctatgctaccaccacctcgtgttcgtctcctttcctggaagcagtcctctccgaacaatcgtcttgcagcggtacagggctaccatcaaggtgatg

SEQ ID NO: 1483 - DNA, 420 bp, Glycine max
  unsure at all n locations
gctctgacatcatnacgaacaagacctagctggtgccagagtaggcgcagatcctttttcctttcagctgacctaaagcgaatgtatacaccccactcttccgccatatataggaacatgacatgatcaaatctcctcgcctcaaattagaaatatctttgaacaccaatcgtggatctctcatttgagattatagcactacctcggagcctatcattcgctacttgaacattcgctaccaattaaatttgacccccatatatcacagacctcacagactctcgacggataacattcggaagtaagacctatgcctgtggagaaaaaacaatatgcactatttaaaggaagtaagacttgatttcaatcaccatacagccttttttaacaatcttcactcagaagtctttatgaaccccg

SEQ ID NO: 1484 - DNA, 520 bp, Glycine max
  unsure at all n locations
cgcccgttgnatcgatccatctcagacccgcgatcntagagtcaccccgccgcatgcaaggcttgctctacagtcttgctntatgattagggaattctatttagcacataacaaacaggtaataaaattttgccccaccaaaaagaggttgcacttgaactcaacatagtagctacaactaattctgtaaaagttgtattctttctttcagctttactgttcatttcaggtgaatatggagcagacgtctcatgtatgattccatgcaaattataaaactcattaaacaaactagaatcatactttgtgcctctatcacttcgaagtttcttaattctcttattgaattgattgtcaatttctgttacatataacttaaacatgtcaagcgcttcactntttattttcataagatatacatatgtataatcagagcagtcatcaataaaagtgataaaatatcgttttccatttctggcaacgttccatcaattcacgatatcagaatgtataaatgcan

SEQ ID NO: 1485 - DNA, 76 bp, Glycine max
  unsure at all n locations
ntcttggaagagatgggaccaacagcttttcgtccgcagaattcgcccccatctttcggcaatacatcccgaagat

SEQ ID NO: 1486 - DNA, 435 bp, Glycine max
aacatcttatatgttctatgagttaatgacggctgtatcactgcatgggtgtatggtgttaattcattgattttataatgaattggtttggttcaagaacgaattggtgtcttgcactctatgggacgattattgtgtccaatttctggaatatttggattaacatgagaatgaagggcctattattgtattgttgaccaatgccagaattaaagaacgccagggtatactatgatatatagttagttggttttcatcttcattggatccaacttatgctctcatttctgagtggttcaggatcatattcatgctctgttagcaattctttgaatgcttctaaatttgcttttactgagccatgttgctaactgatcacttcaatatatgttttgcctcctattgtacaattaaatctgctctttccctctggct

SEQ ID NO: 1487 - DNA, 482 bp, Glycine max
  unsure at all n locations
ctagataatgtgntaattttaaggatgtgcgaaataaggcactggccatttagaaagaaaacactgcccctcgcgtgttgtctcgtgagggttatgaatatctagaaaacaagttgatggaggagaagaaaaagaaacaattgtaggaagcagctcaatccgaaagcactgacaccatcattgatcctccaccttccatcagacgacacgtgaaatggaagatgacccgcaccaagaaaactggtcanatgacgcctgaggtagcaaaggaaattgctgacaagaatgtaagtcgctttcgtttgtcaattgttggntattataattattggttgatcgagtaaccaataaatttgcttgtacatgattgctagagggagaggcctcacacggaagcttggtgctatggacatcatgatgactgactgttgcattggcaaccaaacacttggttggccgtgctgtggactggagtccactac

SEQ ID NO: 1488 - DNA, 517 bp, Glycine max
  unsure at all n locations
agccctgttgtttgatgcgatctcgtgcaccgtgatactatatagcgcatctgcgagcgtgctagcttctgcctcaatattctatagctaaggggtataatagagtgaatactggctgctccccttaagcacttgtctctctctgcgatttgctcgcacacatcgcttccgtgaagatgatactcactcgggcgcttccgaaacgatgacgttacgttttgtgacgaatttctcgaaggtgtcgaccgctcttcgacgatcttcattcgatcatcagtcgttcatcgagcttcggcaggagaatacctcgcaccaagctttgaatgcactctatgaacgcgtggtgcggcacatcgtgtgtctagtattatattctcaacgcatttctatcaatgcctctttaggcgtgcatatgccattgatacttacattcctcgtgtaacctactagtgaatgaattacaccgatccgttgagggtatactccgcatcttcgggaatatgtatactgaccgtcn

SEQ ID NO: 1489 - DNA, 521 bp, Glycine max
  unsure at all n locations
atgtgtatcatgcattacggacctataaaactcagcttggaccatagcagctcacaatctaggagtctcgtctcctatctctatggatattcaacgttctagaagtgaaaatgataatggagcaattttggagcatactctcatctcacacaaaactatgacattaatctatactcgctcaaactggatatacgacgaatactctagccaatcanaatttgactactctacacccaatttaccctaaaaatggatcttgccatcactctggtgactcatttgcctccttcgcacagaccaagctctcccacaatcctaaatgacattgcaaactacgattaactcactctaacctcctgtctcaacatgcccttcgcgggctagcgagggcgaggatcactcgtgctcttgccataagaagaaagatgcatggagtcgtcacaacgttgatttgcgaaaacgtcggcaaaccgactgaactggtcaaatgaaattctagctcggagttgtttacgctgaga

SEQ ID NO: 1490 - DNA, 257 bp, Glycine max
ctgagagtttgcagggcttctggcacttccatttaaaccgtagcagccattgatgacgacttctcttgcacttacaaaggtttccggcttgtcctacagctgctagcctcttcgttgacaactctgcaatgggtatcatctggatatagacccattagcacttagtgagaaataaacactatcattatcatcatcagggaaatagaatctatcacacatacccttcgagcttcatctaaaaatggagctgactccct

SEQ ID NO: 1491 - DNA, 191 bp, Glycine max
tccaagtataatttggtattcattttcaacattagcacatattttaacaaaatgaaaagagtaagagtgtgtgacactacatgttcggagcaaaaacaataagtgtcggaaacaagaaatgaagagcgagtgggtttcaattaccgatgcttgtaaatgaataagaagactcgggttcgaggatgcctacc

SEQ ID NO: 1492 - DNA, 517 bp, Glycine max
  unsure at all n locations
gagagttgttcatgagtcgtctagacccgagatcctctgagtcacgctgacgcatgcatgcttgagtcgagatcggcaactcacaaacgatggttatggctcttgcatttggatgatatttaccggaccgacatatgactcaagtatccctgccatgaatttgagaatcaatctgctgttggtgagaggggcatcaacatcggcgagttgatcacgccacaactttgtgtgaatacaatagctatcaatagacgaaaaatttcgcaagtttctcttcaagatgagtagcccaaaaagccttgatgtcctgaaacatagattcgagaccagcccactccccttgagccgtgtcgtctatgagcaacatagcatgaacgagatcggtggatatagtcccgtatatccattcgagcaccgcggcatcgagacgctccatagagcatggtctgagactntggatgcngcatacgtggctaccttctgtgccttcgtacgcctgtgctacgtangagagatg

SEQ ID NO: 1493 - DNA, 523 bp, Glycine max
  unsure at all n locations
ctgctgtgacccatgcattacggaccttagatactcagctagaatatacataacactntttgcccatccatgaagtccttcttaattatcatgctatcatggaacttcttggtcttttctttgtagaacttgccattctcgtaggcttctatgcggatctcatctaactcactcagttgcaactttctttcctcaccagcttgatccatagagaagttgcaggtcttcattgcccagtatgctatgtgctcaatcttcactggaagatgacatgccttttcaaagacaacccaataaggagacattcctatgggtgctttgtaggcagtcctatgtgcccaaagagcatcatctagcctggtactccaatctttcctgcttggcttgacaatcttctctgaaattctcttgatcgtcctgttagaaacttctgcctcgacatttggttcgatggtggtatggtgtggataccctgtggacaccccatacttntaancaaggcatcatttgatttgtgcaaaat

SEQ ID NO: 1494 - DNA, 442 bp, Glycine max
  unsure at all n locations
ttaatctgcagttgtaatactntctgagtcttcaagctaagcgccagtccgctgcgcttaacgcctgagtaaaatttcacaacgcgtgctaagctcagcctgctgcgctaagcgcccaatcaaattttcaattttatatttatgattttggagaaaataacctgtgctaatctcttgtggtttgtcttatattctgcaaatggcatctaagaaaaggaaggctccttctacacctacccaggccagatatgacagatccaggttcatatctcaagaagcttgggagagatatacagatattgtggtgcctaagaaactactatcggagaggaatgtagtagtttacttcactgagttngacgagttcaaggaggaactcgagagaagacactacgatgagaagntaactgattntgtacacaaaaatatagacatttgtatn

SEQ ID NO: 1495 - DNA, 460 bp, Glycine max
  unsure at all n locations
ttaaaacggaagaaataacaccgtattgaacgatatgtatacgaaagctaagaaacacgaaaggaattaaaagtctcggattcgaaaacttacctgttgaagaacgaagaacgaacgaagaacgaatgaagaacgacgaacaaccttcacggattcgctcacagaaacatctcggaaacgttacggaagcacctcggcttggattttcttcacggaaacaattcttttcacccaaaatagctgatatgcatagctaggcggatctgggatccttaccctttcgcctatttataggataaaggtggaggaggttgtcgtccagctcgcccatgcgagctgcattgnttctctataccaaccctgctccaaatactctaaaggccaagtcagatttgaaattttattgcttcccatttgtaagtcaccactctttcgaataacgaaagacggagctttcgag

SEQ ID NO: 1496 - DNA, 510 bp, Glycine max
  unsure at all n locations
cggcctttcctgtgtcctgagctcggaccttgagtctgaacggcgcgatcttctgtccattgaaagcgatgaactttttttcatggggtgacacatttgctatccctggcctgtaaatcataaatattatattccgcaggcatatgtggtcttaagacgtatatcgtgtcgatgcatgtcctctattcacattttacctgtcttaaatctcgcttgccttcgtgagaatctcagttagtttgagagcgcaagatactgtcgcataataacggaataattacaatctgactgcattcaaatgcgatacataacgaaaggtaatgtcattgtggaacgctatctcgctcagcacaatgaacgacctatagcatccgtaacagggcattctcctattaaagtatctatgactgatgctggtccccgctctaatgcggaaggacttattctaacgggactaaatttctattgtcccatcgtggggaancaaattccgggtgctaaagtccaacg

SEQ ID NO: 1497 - DNA, 260 bp, Glycine max
aagatctttggatgccgtcagaaattttatgactatgagtgtgagtatttggtacttgtgaattcattactcttctatgtagaaatttattgatttacaccccttgcaaactcagcatttgttacacaaagcttaaaattcagagagaacgcaccttgtcctatgtattattaaattcgcttcacaaccccttgctaactcagcacgctgcaagccataatgcattcatgtgatatattgccgtgcgacaacaacaacat

SEQ ID NO: 1498 - DNA, 468 bp, Glycine max
  unsure at all n locations
tgttcaaatttcggtttaccaattatacattatgaaaactcatttattgaccattataaatatagtacaagtttatctagcaataacttcaaaagctccatttaaacaattatatggacaacaaaacacaaaacgaacaagctgtaacacaatcataattgctatttgttaatcacacttaaacaaaagaatagctaggcaaactaaaatcaccaacaatcacggacaactaacacctaccatttggtaaacaataaataatcttgcatttttattcaataaataaacacttaaaattgtttcctgaatttgaataaataaattcactaaggtaatgttgtcatatctatatcggtcatcgactcgattaagatactaagttactaaatcatgcatcaacccaatgaatcactaattgactcccatgattcaacctatattanaaaattctaaataatttcataacct

SEQ ID NO: 1499 - DNA, 374 bp, Glycine max
tggccccacatagagaatggccaaggtgtatccatgacgttcaaaggtatggtggagcattaacattatcagtgaaggcctgacacttatggcatttcctcacatggatgcaacaattgctctccatagtgagctagtaatacccagttctcagaattttctaggccatggcatgtccattggtatgcgttccaaaggatcctttatgcacctctactagaatttgctcagcccctttagcatccatacaccgaagtagtaccatgtcatggttattcttgtataggatattcccactcaggaagaagtcggtcgccaaccttcacaacattcttttatcgttgtcagaggcctcccgtgggcattccttgtct

SEQ ID NO: 1500 - DNA, 380 bp, Glycine max
ttaactcggaggtccgattcaagcgcataatatatcgagacgctcgaaattaaccaacggaagctctcgagaaattcaaatggtcataacttttaactcggaggtccgattcatgcgcataatatatcgagacgctcgaaattgaacaacggaagctctcgagaaattcaaatggtcataacttttcacacggaggtctgattcaggcgcataatatatcgagaccctctaaatttaacaacggaagctctcgagaaataccaatggtcataacttttcactgggatgtccgattcaggcgcatcatacattgagacgctccagattgaacaacggaagctcttcagaaattcagatggtcataacttttcactcggatg

SEQ ID NO: 1501 - DNA, 366 bp, Glycine max
catggagtcaagtttaagtatggaagtaaccatcttgcaaatattggggcaaaagatggatcgtgttacatcgttgcttcgtctactgccaaacacatttagggccgtcgatgtccctgttacttccagtttcaccttgacgaagatgtcatggaccatgttgaaaatctaaattgattcaaccccatatcctgcgtaaaaattcgcaatacttcagctgtgcatcattcgcatacatccatgttgttcattggttgcattgctcattgcattctttccttataaaaaaaaagaacttaatcattgttataaaaaaaaaacatgatttacggtgccctcatcgaacctgtgctagagctagagtaa

SEQ ID NO: 1502 - DNA, 164 bp, Glycine max
  unsure at all n locations
gcgtctgtatatgtgatgcgcctgaatcggacatccgagtgaaaagttatgaccatttgaatttctcgagagctttcgatgtttaattntgagcgtctctatataatataagcctgaatctgacatcagtgtgaaaacttatgaccatantaacttctggagag

SEQ ID NO: 1503 - DNA, 401 bp, Glycine max
  unsure at all n locations
gtggtaatcagagcacaagagcttcaagtaggtgctccttanacctccattaattgtttttctttaccttctcttccattgttgtttcttcatttttctccatgtatctcctcacatgtcttgttctaaatgttgttaacatgattctttagagtttccaccgattaaacttgctatagaagttagatttgattttctatggttcaaatttcttgttcttgttcttgaaccatgaattgtgttgagtttaggttcctttgagttttgtcttgttattttttgtggctgaaacctaaaccataaaattcttacaaaaatattaaagtagaagaaaacctcataaatctagagtgactttgtcacctattgtagttttgtcatagaagtcatgtctagtcatg

SEQ ID NO: 1504 - DNA, 436 bp, Glycine max
  unsure at all n locations
actaagctngtttattctgatatgaagcaacgtatttaaaatcatggattagatagtaactgctaacaaaaagataacaccactaacagatcatgactagagaataggatcaaaactgctttatcctatcagtcaacatgacttttatttttcctaaaaaatagcaaaagaatcttatctactatagtttgttagacagtttcaacagtcacatcttaacaattcaaaacaaaattgtgataaactcatcccttacatctaagtgactcccatgtgtagtccaacagtagtagtggcatctctagttgtttcttaagtttcctcaaacttttgctttggttgttctgctanggttttcaagcattaaagagtagcagaagggatttgagcctccatttctctatctctatngcgagggacgttctctctccacata

SEQ ID NO: 1505 - DNA, 216 bp, Glycine max
  unsure at all n locations
taaagggatgccccacattatttccacgacacanatgcanaaatgatgatttgtgaaatttatgcaaaactggtcatgcatgcacctatgtggacgctcaagtgtcaaaattttatggtcatgtgatgctagggctcangattcatttcctctattttaaatcaacccaatgtttccaaaatatgttcttttattcaattgtgcattcatccgagt

SEQ ID NO: 1506 - DNA, 452 bp, Glycine max
tcaagaaaaagatggcctcagcaaattccttatttccagaatggaattctatcaatagacctccaatctttaatggagagggttaccactactggaaaacccgaatgcaaatttttatcgaggcaatagatctaaatatctgggaagccattgaaatagggccttatatacccaccacagtagaaagagtttcaatagatggtagttcatcaagtgaaagcataaccatagaaaaacctagagatagatggtctgaagaggatagaaaacgagtacaatacaacctataagccaaaaacataataacatctgccctaggaatggatgaatatttcagagtttcaaattgcaagagtgctaaggaaatgtgggacactcttcgattaacacatgaaggaactacagatgttaaaagatctaggataaatgcactaactcatgagtatgaatta

SEQ ID NO: 1507 - DNA, 323 bp, Glycine max
  unsure at all n locations
tgattctgttattttaagagagaaatttctttttgttgatgcagaccagcagaatcccaagatgtcgaagaacttgaaaagagattggcttctcttctaagaatttaaatctctgctacagcctgtacccatatatatgtttcttaatgtacaaatcattatatatatcaatggagagattgtactattggcacctcttttaattaccaattttatgctgtgatgtgtgtttggatataaagaactagtaaaaatagttntagactggaatatatattactatcccacacatttattatatatactatatagcaatggagaga

SEQ ID NO: 1508 - DNA, 262 bp, Glycine max
catcaccctattatcaacagtgtatgtagggttttcttcgacccaggacaatgtgggttctgtggggttccagcgacgacaatatgggttttccggcactgtagggggttctgtgggttccaaagaggacaacgtggatactccggcagtgtagggggttctgtggcttcaactgacgacaatgtgggtgtcgagggagcggcttccgacagatttcatgcgggaggatatagaggagcgatttcatgcaggaggatgacaa

SEQ ID NO: 1509 - DNA, 441 bp, Glycine max
  unsure at all n locations
cagcattcaatgtcgagcatctctatatgtcacgggacttgatcagacatccgagttataagttattgtcgttcgaatttgctcaaagcatcaacactcaattatgagcgtctagatatgtgacaggactcaatcagacatcctagtaacaagttcattgcgattcgaattggnacacagcttcatcatctcatttttaacatcgtaatataatacaggactaaatcaaacatcctagtagaaagttatatgctgtangactatgctcagagcatcgtacattcgattacgagcgtatcaatatatgacagggactcactaatacatccgactaaatagatattgtcgtttgatgtggtgtgagcttctcatttaatatcagcatctctatgtactgtancattcgacatcgattaaagctttgtcgtgatttgtacagcg

SEQ ID NO: 1510 - DNA, 333 bp, Glycine max
  unsure at all n locations
ctaagcttatccaggggagacggaccatctcaagtgctngaaagaatcaatgacaatgcttacaaagttgagctgcccggtgagtataatgttagttccaccttcaatgtctctgatttatctctttttgatgcagatggagaatccgatttgaggacaaatccttctcaagagggagagaatgatgaggacatgaccaagagcaagggcaaggatccacttgaaggacttggaggacctatgacaagggctagagcaaggaaagccaatgaagctcttcaacaagtgctgtccatactatttgaatacaagcccaagtttcaaggagaaaag

SEQ ID NO: 1511 - DNA, 289 bp, Glycine max
tcagcccccttaggcacttctctctctctctctcgaaatagatgaggaaaattagttccgtgaagaaaattcaagccgaggcgcttccgtaacatttccgtaacgtttccgtgagtaattactcgaagatcctcgaccgttcttcaagattcatcgtttgttcttcgttttcttcagtcttcaacgggtaagtacctcaaaccaagcttttcatttcattctatgtaccccgggtggtccacattgtgtttcatgtatttatattctcgttatcatttactttttatac

SEQ ID NO: 1512 - DNA, 175 bp, Glycine max
  unsure at all n locations
tattcanatcattctcatacattcatttcatgcanaacaatccactgcatatcattttcaatcaattcactattcaaacacgctttatgtacaagcaaacaactcanagtgcttgaaattaaataactgaaattaaaataactgaaatatgacaacgaaatcagctggaaatata

SEQ ID NO: 1513 - DNA, 418 bp, Glycine max
  unsure at all n locations
gctaactcatccaacatggcaagttcaacatgctttcaacttatttcttcacaaataaccatcatgaagcagaaacctagcaaaactacccatcatatctcccaaaaccccatacccacgaaaatcaagagagaaagaagtccacccaaacctgaaatttctaggtcccacacgtagagatgcgcttcacgactccgaaaatgccctcctttcgcgatttggagcagaaatgatggccaaaggttggagctttgttggagcttcaatggtggaggaagaagaaggagaatagcaacgtgagggagagggagagagcttctgaaaatgtggggctgagtgaggagagagagagttgctttttagttctaaaaaggctntttcctcttttattattattttatttaagctatgccacatg

SEQ ID NO: 1514 - DNA, 441 bp, Glycine max
gtggtaagcaacgcttatgtcgagtctccccagtgcaaccccgctcatctagtgttgcattgacggtagcccatgtaatgttggggcatgggtatgagcccagaaggggtttaggtcggagcgacaatgatgtggcgagcttggtggagttcaaagagaaccgtggaaggttcgggctaggatataagcctacacgcgtcaacgtaaggagaagtgccctagaaagaaggggccgaagcatgggccaacagcaaggaccgcaagtggaagagactcccttatatcacatcaatgaaagcttcatcagcacaggctggatgcgtgaagggcggatcgccatgatcaacgatgaagtccctcaagagcaatcaaactgggtgcggccatgcccttctgacgtcgggttgggaaactagaaaattatcgaacaacccgaaattt

SEQ ID NO: 1515 - DNA, 374 bp, Glycine max
  unsure at all n locations
ctcagcttgacataaagttaagacaaagagganatcttgttacctaattgtacactattagagatctcttgtagatgttgatatttctacaacacaatgagttggagaaacttcactcacttgataattgtcacacatatatgaaaaaattgaactatcctcaacaataaaagtgaaaaagagaaagataactatggagagtatgtaacagtaaaatgaataaattacttgggctaataggaatgatctaaaaaactggtcattatctgttccaattaagttaactgtgaaaatgttgctaattntgaaagaaaaatgagcaagcaaacaaaaagaaagaagaaaaaatgcttaactgacctctgaaaagcttt

SEQ ID NO: 1516 - DNA, 181 bp, Glycine max
gctgaatatcgcacaaaccaacaaataacgtatggagctggaacgtgatcttcctccctctcctgcaaacagatgcctttttcagcactttaaagagaacagtagggacaacatgaacaaggcataatacgacatcttaggaatcatcggggatagtaatcaaagagggccgggtatcctc

SEQ ID NO: 1517 - DNA, 322 bp, Glycine max
  unsure at all n locations
caatacctcagtttttctcaccaagtaaaaatggaccattntaaggtccaacgccttataaggaccaccttccaaataaaaagaatcgtttgattcacccttttgaaagaactacgtaggtctgatttcctcttcgatggagggtacgtaggagcaagggccccgcttttgtcgacctcaaaaataaaaaagaaataaaagtttagatacgcaatttcacacaattctaatttaaggctgttgtcctttgggacaaatgtgagaggtgctaataccttcctcatacgtaaatacaactcccgaatctagaatattcttcatg

SEQ ID NO: 1518 - DNA, 199 bp, Glycine max
  unsure at all n locations
atgtctcatgtataggtatcaattcaatcgatataaaanatctttgttaaccacagtaaacaattaggtactggtcatatattaaaaattgaggttgtaatcttaaccatcaatttttattataatctaatgattaanatcaattcttctcattttagatntattctcatttgaaacatctcctatatatgttatgtgt

SEQ ID NO: 1519 - DNA, 438 bp, Glycine max
  unsure at all n locations
tatttggctattttagaagttagaagagatcctacgaagttgcaatagacttttaatctatcgggctctgatggatttgactctatggagggtcaaagattttcgggaggtatcattattgcttggaaaaagaataatgttaaccttggaagttgctcagacgcattttcaattcttgcatgttaagattatcttgcaaggaggtggtattttgaggtttactcctctctacactagtcctaatgagggaaacattctctaatatggagtgcgcttcttgatatagctacttccatgaatgatagttggatgattggaggtgacttcaatgatatagtgtgtaatgctaagaagaaaggaggagcattagtggttcttacgaaatgtcagatatttagagacagaatcaacagagccaagcttattgacctanactct

SEQ ID NO: 1520 - DNA, 300 bp, Glycine max
  unsure at all n locations
gcttcttgaanaacttccttgagaagctngagcttatctacatcacacccctctcataactaagctcacctccttgagaagcttccttaagaagattcctaaagaagctagagcttagctacacatacctttctaatagctaagctcacctccttgagatgagaagctagaacttagctacacaccccctataatagctaagctcacccncatgacaaaaaccatgataatacaaaaaaaggtccttactacaaagactactcataatgccccgaaatacaaggctaanaccctatacta

SEQ ID NO: 1521 - DNA, 225 bp, Glycine max
aggaaaaaggagaagggaaatttccaatccaagaggaagccaaaaaagggagagaaggaaaatttccaatcaaaggaaaaaagagaggaaaggaaattcccaatcacagagtgtgagaaagtaaaaaaggaagagagaaaaggaaagagagctcctgatcaacgatcgaaagaaaacagaagatatatgcagaaaggtctttggaccacaccatatctgaacata

SEQ ID NO: 1522 - DNA, 441 bp, Glycine max
  unsure at all n locations
tgcttctatagatggtagggaccaagcaaggaaatattcacatccttcaagggtccactatgacaggatcaactatttcacaatatgagagccatgcgtccaatggctcatccaatgataattctctatggcatctgtgtctgggcccataagtgaaaacataataaaagttttgagcaagcgaggcttacttggaaaacataaggttgaacctcttcagttttgtgagcattatgtctaagggaagtaacataggacaaaatttctaaaggttgttcacactacaaagggcattttggactatgntccatttgactactggggggactttgagagttccatcactgagaggggaaaggtatttcctctncatcatcaatgnatactccacaatgacatgggtattcatgatgaagtagaaatctgaagcttaccaatttt

SEQ ID NO: 1523 - DNA, 389 bp, Glycine max
tgacattgcgggttgattgtagccttagtttcactgtagttattagtcaattcaattatgagagagaaatcccatagagaaacgtccgattgattttttttcgctttattttactaaaagggtattttttgattattatattattattttacctcttttttgatttccaacgtggttactgcacgaccgagcggtcagatgtcattgtaactgacattaacggatattgcaaatcaaatgatcggtgaagatttagtttatttttttattacgcgagaaattacttaaataaatgactgtggcacgttgaattgtggtccggcaagtttatgattctagaatatatgtacacaagacaaatggtgaccagcacgggtacatagaatgaa

SEQ ID NO: 1524 - DNA, 413 bp, Glycine max
  unsure at all n locations
aaatttacaatatatcatgcatcaaatctatgcttttataaattttcctgcttcatctcataagaaaatattcatgttatattagataaaataacatattcaataaattagttaagtctcatgttcattctcctaagttaagcgtaaattcttctttgctttttttggttatattaaaaaaaattgctgacaaaaaaagtataaattctcctacttgattcaataaaaaatgttcatgccaagaatttgatttaaaaatttattttttaggttaaaaatataaaattgtaataaaaaagttctttaaatgccaaaactattcaaataattaatgtaaagctttttgcccaagtttgtaagataatggaacattntacaatanatcatgtattatatggttttttttagttaca

SEQ ID NO: 1525 - DNA, 219 bp, Glycine max
  unsure at all n locations
acccaccatccactgttgcccacctccatctgagctcacgtactcccacgtagcccatatccttgtttctctcaacaccgggtccacatcaatcctcccaagcttccacaacatccaagcanaacaacattcataccgcacaagctatcacagccaagcaaaacagagcatatgcngaaaaactctgcanaacaccaaccaaatcacaactnttctcac

SEQ ID NO: 1526 - DNA, 402 bp, Glycine max
  unsure at all n locations
caataatcatatttccttatgttttccagagaattaattntgaatacaaggctcatttaatttgatgttctcctataattnttatttcccgcttcatagccttgtagtcattgttaaaatggaattatgagaaaattaagtgcaacatccaactagaacataatgcatgcctcccatcatcatgtttgtatgaaagcaacaaatgaagtggcaaaaacaataatgttccaatcctttctgttaacagtaaatatatgaatacattcacatccnctacaaatgattttatcaagaattcccggttggactactgagacagcatgctcattaaacttctcatcaagcctgtactntgtcacttgcaatatgagaaacacgttcagagtcattcttcttctttat

SEQ ID NO: 1527 - DNA, 445 bp, Glycine max
  unsure at all n locations
gggtgttacatgataaaaaaatgtattgtgactcattttgcattatatactatntatgataacttttattggttatgggtcaaagatcatgtgtgtctctcgatcaactcgatcaaatattaatcttgtttatgacatgtgactgtaattgaaccaaaaaaattaaataaaaattatttcactaaataaattgttctccaaatataaacaagtgatgccttacaccttgcgtcaatcatatgaattaagatataatgtttatgatacttctagcaatgtaccaaatgttcccttattctcttgtcctttgagctattcttaaattctttntaattatgtattcatattaattntaaactttttcatcttttgatatataatttgaaatctatactgattaatggactatatatatatatatatatatatatataantttaacttc

SEQ ID NO: 1528 - DNA, 394 bp, Glycine max
  unsure at all n locations
taagacaacttgttgtaatcaattacaatgaggctgtaatctataaaaacaaagagtttttgcctttgaattaatttttctaacttagaaaattttctcaaaataaaccatgatgatgcatgatgaaatacagatatcaaatgtactaagatgcaccaaccaagataacaaccaatacaaatgccactcaagaaagttgggcatgtaaaagccaaccaaaacttcttcagaacttcttcgagcttttccttgagcttcaagctttagcctttgggtagttcaccatgttgctcattgttcatggtcggcaagtgtaccggatcgcacaagtagtataaaacagtaagaaccgagtatcgaactctcggngaacttgtgttatctggcaagctat

SEQ ID NO: 1529 - DNA, 454 bp, Glycine max
  unsure at all n locations
tgtgtaacccaccatcttttcatagtatattactgttnatgtgtctaccatcacgattatcatctccctttccatcattgggagtgccacttgggctgccagatccctccacctttgggtgtattctttgaaagattcgtgcccctttttgcacatattttgtagttgcatcgtagaatggactcgagaaccattaggtccttccaagaatgcactcgggaaggttccaagttagtgtaccaagtatgagctaccccagtaagactttcttagaagaaatgtatcaacaattcctcatcttttgggtatgcccccatcttccgacaatacatctttagatggttcttggggcaagtagtccctttgtacttgtcaaagtccagcgccttgaactcgggaatgaccacgttcgggtactatgaacaactcttctatgtcagtaaaggcataatct

SEQ ID NO: 1530 - DNA, 194 bp, Glycine max
  unsure at all n locations
actaactgacganaagagaataacatacttttcctggtataattcaagagtcgatatgaaagcatcttanaattcanattataaccagaaatgaatgtgatttaacaatatacacaaccaattcttgntgaaacagaatgcttaatagaaaatgaatattgtctacacggagtccatcttaatcatactatgag

SEQ ID NO: 1531 - DNA, 398 bp, Glycine max
  unsure at all n locations
agcagcaagaggtcttgcaaagattcatgcttagtacagtgcagccaaagtgcctcacgggaatgtgaaatcctccaacgtgcttctagacaagaacggtgttgcatgcatctccgattntgggttatcactcctattaaacccggttcacgccattgcccgattgggagggtacagggccccggagcaagaacagaacaagaggctatctcagcaggctgatgtgtatagtttcggagtattgttgttagaagttctcacaggaagagctccttcatcgcagtacccttcaccggctcgtccccgaatggaggtagagccggaacaggctgcggtggaccttcccaaatgggttcgctcggtggtgagagaagagtggactgcagaggtttttgatc

SEQ ID NO: 1532 - DNA, 154 bp, Glycine max
  unsure at all n locations
atgggaagaagacaatntatacacggcaccgtaggtgtttaanacattatcacccctatcgatgattgaagaaagcatttaatggtagccaagagactaaagaacccccagaaccgttagctccccatgaagtgtatgatcgggtgaaagacat

SEQ ID NO: 1533 - DNA, 394 bp, Glycine max
  unsure at all n locations
ngaagagagacaacaatggtggtgaagaaaatgaataagatacgtggaggaagaaagagagagctgtgctagaagtttctagagaaagagagagaagatttggcttttaaaatggtttttcttttctttttcattttctttttaaaagcaattccacatgtcattttttaaattggagcaaaaagggcccacctttacctttgacttgaccacatactcagctataaaagaagaaaaaaatcggacctttttggatgctgaaatcctgcttcggtttgcgtgccgtctctcccgttccaattcttcgcgtatgtttgcacccgtcggngcccgttttcaaagataggaaatatatatatatatatcataacgcttagaatgagaccctgagcgt

SEQ ID NO: 1534 - DNA, 331 bp, Glycine max
tggccaaatgcaacacaatttgttttcctttaatccatatctacttatgatcaatcataagagcattggttagggacctcatccaatgaaagtattcaaactttcggattgatgaaacgagctttcttgactttgtatggaaggcatacaaatcctacaatgttcaaggatgaggtgcttatgtggtcaaagagagactcatgctcctaaaaaaaatcatcaatacgtggagtgtggacaaagttgggagtcatcaaacacaagtcgacaagatgagggccaatataacttctttggatgttggaagaatctcatatgagaaggcgtgtga

SEQ ID NO: 1535 - DNA, 338 bp, Glycine max
  unsure at all n locations
tgttcgcacatcgtccgcgtctatgatatccacttgacatggtttgaactagaggagaccttcaatcctaaaacgcaacgtggcggacaaaagtgggtagttaacttgaatgaccattattgtcaatgcggaaagtattctgctattcactatccatgtccacacattattgctgcttgtggttacgtgagcatgaattacttccaatatgtagatgttgtttacacaaatgagcacatcttataagcttatttcgcgcaatggtggcctcttgngaatgaagcggctattcctccttttgatgatccatggacacttatccctgatccaagtataat

SEQ ID NO: 1536 - DNA, 334 bp, Glycine max
  unsure at all n locations
aaaatttacaatatatcatgcatcaaatctatgcttttataaattttcctgcttcatctcataagaaaatattcatgttatattagataaaataacatattcaataaattagttaagtctcatgttcattctcctaagttaagcgtaaattcttctttgctttttttggttatattaaaaaaaattgctgacaaaaaaagtataaattctcctacttgattcaataaaaaatgttcatgccaagaatttgatttaaaaatttattttttaggttaaaaatataaaactgtaataaaaaagttntttaaatgccaaaactattcaaataattaat

SEQ ID NO: 1537 - DNA, 439 bp, Glycine max
  unsure at all n locations
tttcaacatttgagatctcanatggaatatganaatggagttgttagtgggagaggaagcangtggaggcggtggcgggcgtgggtgtggatgcgttcagaaatgggaaattgggtgtgagtgtgtgaaggatgagagagctgtgccgcgagagagattgggagagcatgcaaaaattgagggaattgaaagcgtaaatgaaaaaggttttcaaagacaatttttcaccgtccttgaaaacttacttttaaagacgatttttgaaaatcatcttttanaactttctttcanagacaatttttgcaaaaacggcttacaaaaattgaacttaatttcaaaaatgtcactgcttatnttttacattcgattttttgaanactgacttggattaatgatgttaaacatgatttttactagtgagggagcactttcatgacaa

SEQ ID NO: 1538 - DNA, 183 bp, Glycine max
  unsure at all n locations
aatgaagagggtgagaatgaaggagaaacccatgctgcgactatcgttcctacatggccaagtttcccaccaatccaacaatgtcattactcagccaataacaaccattctccttatccaccacccagntatccacaaagtccatccctaaatcaacaacaaaacccacctaccacacaacca

SEQ ID NO: 1539 - DNA, 306 bp, Glycine max
  unsure at all n locations
gagaggngggagcacgannatgaaggaataaaagagggagagaagtggaactttgaagtatgtctcagaagactctcattcatcaaagttacaacaagtgttacacatgcttctatttatagactaggtagcttccttgagaagctttcttgagaaaatgatgcatcttgagtacagaggagaaaactcttagcggatgatggatcgcttagcactgctatggccgaaaggaattgggcttagctggcatgagtttcgctttgctcaatgaaacccaattctaaccgcatggaaatgagcttagcc

SEQ ID NO: 1540 - DNA, 104 bp, Glycine max
accattgaaggaccccattgaagctcaacgatacagcctccatagaagccccacaagcaagcttacatcaagtggtatcagagcacaagagcttcttgtgtcga

SEQ ID NO: 1541 - DNA, 345 bp, Glycine max
gagtagtgtcccactggtaaaactaactttccaaatttttgccttcgcaggaaatggccccgaggaagcttgcctcaaagaggtccaggaaggacaaggcagccgaaggaactagttccgctccggagtatgacagtcaccgctttaggagcgctgtacaccagcagcgcttcgaggccatcaagggatggtcgtttctccgggagcgacgcgtccagctcagggacgacgagtatactgatttccaggaggaaatagctctacggagttttaaaagactggctaagaatttggtaaaacataagcacttagacaatgaaggaaagctggagttgctgacatgat

SEQ ID NO: 1542 - DNA, 233 bp, Glycine max
  unsure at all n locations
attcaatttgggcaaaattggatgagggaaagtgtgatttcgaaaatttgcactttatgcagaattttgctgtcaaataggtgcagcagaattatggctttgtgcagaaagtgttgtgtatttgctggctgtggaaagagtagtacagattgggttctggatgttntctagcagatcccaacggtcataatgtagatntatgtgctagagacttcccagtaaaattttgagtc

SEQ ID NO: 1543 - DNA, 304 bp, Glycine max
atctaggtccttatatggatggagctcaaccttgtctctcacttacatattaagttcactaaggaacctagcaatacttgttctttcctccttcctaagtccagctctcaaaatgagtagttccatttgttgcctatactcttcaacactcacactcccttgtctaagcctttggagcttgtccataagctccctttcagagtaggaggggatgtgcctcttcctaagggcactattcaagacaatcctatacctactagaggatccccatgaatccttctttccctagtgatgcaatcctacc

SEQ ID NO: 1544 - DNA, 344 bp, Glycine max
  unsure at all n locations
ctcagcttaggtttgtgctgatgcatatatcatggatcatctaatatgtatcactgtacttggagngagactgtataatatgccagaataaaacgttgtcttgaatcttaacccaatgatatttacttttctcactgcacatcaaaactggtatctatatttggcatggagtatcttcacttacccataataagcattttttcattaatagcttgaagctggccaatccaaattgaagtcgagattgcaagatgaagaacaagctaaagcagcattgatgggaagaattcagcgactaaccaaattaatcttagtttctacaaagaatgtaatgtcatcaagca

SEQ ID NO: 1545 - DNA, 260 bp, Glycine max
gatgatgacaacagggacatgcagatatcctcatagctagggtccctaaccctagctatggtggtaaaatggtaaattatataataaactcccctcacctatcgtgagctaccctgcgggttcctcgtcacatcacttgaagattccgttttcttctctgctcttcggatccacgcaagcctctaccatgccaaaacgaaggagacttaatatggattttcataaacaaagctaaccacaatgctctgggcagacaccca

SEQ ID NO: 1546 - DNA, 123 bp, Glycine max
  unsure at all n locations
caatcatctnntaatcatctatctttcaatctttnttcatcatcatccttcaacaatctttcaatatcttctttcatctctntcaacactttcaacagaacttcttactcatttatcttcgtc

SEQ ID NO: 1547 - DNA, 166 bp, Glycine max
  unsure at all n locations
atgaagcaacaatgatgtaagctccattggagcttgtangcctaggatcttcttcatcaatggattcctttgcttcttggaagatgaatggcagcggaatggagaaaggaagagagagaggagacgccacttcaaggagaagatgagtctagaagaagctcaccac

SEQ ID NO: 1548 - DNA, 428 bp, Glycine max
  unsure at all n locations
tcctcggngccatttcctgcgaaggcaaacatttggagagttagttttaccaagaaatgctattcttaaaacgaaaatggcatacgacctcccccaataacacaaacatcaatgtaaatttagagcgaactcatgcgcatacttcctttcgaacattcactcgcaccagatattcttctaactaagaaaaatgcacccaggcacaatcaaggcaccttcgttacctagatcacttatatgtacttccaaggtgtatttgctacctacatcacatgcacttcctttgctaaatttacatacatgcatactcaaagcattttggctaccaaaaattgcatacgtgcacattctggtatttctaatacctatacatatacaaactttgtgatgaatcttggctacctacacaataaggtgctacatttcat

SEQ ID NO: 1549 - DNA, 400 bp, Glycine max
  unsure at all n locations
tcttagtctcacctgatgaattcatggctacttcatgcactcctctaatgacaatagcatcacttctgacactaaattgctgggagtttgaagccatcttctcaattaaatttctggcttcagcaggggtcatgtctccaagggctccaccactggcagcatctatcatacctctcttcatgttgctaagtccttcataaaaatattggagaagaagctgctctgaaatctggtggtaagggaaactagcacataatttctttaatctctcccagtattcatacaggctctctccacagagttgtctaatacctganatatcctttctgatggtcgtggtcctggaagcagggaaaaaaatatctaagaatactctcttgaggccattccagctcgtgat

SEQ ID NO: 1550 - DNA, 349 bp, Glycine max
  unsure at all n locations
tgtgtcacgattcactgtgacagtcaaagtgccattcacttagcaaatcaccaaatgtaccatgagaggacaaagcacatagatgtaaaactacacttcatcagagatgtgattgaatctaagaaggtgaaggtggaaaaggtttcaacagaagaaaacccagctgatatgttcacaaagtccctctctagtgtcaagttcaagcactgtctgaacttgatcaatttcgaagatgcctaaagctgattggtagaagtgcagccctgaatcacaagatagacactngctaatttggagtcaaggtggagatttgtggtgtgtgactcanaatcacaattggcacaagtga

SEQ ID NO: 1551 - DNA, 325 bp, Glycine max
  unsure at all n locations
ntactgaagaaagctaggggtgactcaccttgcattagtactatgcccatggccgtgccggaggcgtccgtttcgagtgtgaatggacgggaaaaatctggcagagctagcactggtgcctgtgtcatggcacgcttaagagagtcaaacgcaagttgagaatcctcgccccaatggaaattatccttctggaggagtgaagttaacagcgccgcaaaggcagcataatcacggatgaacttgcggtagaagtccgttaaacccaaaaaaccacgcacagattgggttgtcatgggtgtaggccaattcaccatagcttctatct

SEQ ID NO: 1552 - DNA, 362 bp, Glycine max
cttatcatctgaaaacgtgaaacatgctattgtatgttcttcacgttatatgcatagattatgctcgactagttggttttctggcgacattcaatgatatcgaagtaatattacaaagttctctcctgttgcttgcatataatgtgtgctgctgccctttgtgaatacaacaattaatgtcctttgtccaatatttctcttagggtaattagggattatgcatgtgcgttatccaaaagtatactaaactattcagactttcatattttgctaagataattaatgaatcttaacttctgctgagaatcatgagataatccatggttgatattacatacacatgcataacaaatcatagatat

SEQ ID NO: 1553 - DNA, 466 bp, Glycine max
  unsure at all n locations
tatcccacaagactntcagtgttgtctcctttaacacattgtacttgatctcgagagcaagagttaatcaaattgtgttcacagctttcctttgtatttgagcatattctctttcaactatagtagctgacttttcatcttctaaagccaaatcaataccttgctgcactaaaaggtcttgaatggtagactgccaaatcataaaatttgttttcccatcaaacaatgggatttcaaacttttgtgtgtttcctatcatagctttgatgccacttgttgggaaaactcctctacacacaacaaaattacccacacgtccaaggaatcttagatggaagggatcctaanaagtcctctatagaattttctttttggctctggatatagagctaaatagcaagggttcctaanaattaaaaatggttnttttcccctgaattntggtagataataattttaatctcta

SEQ ID NO: 1554 - DNA, 215 bp, Glycine max
  unsure at all n locations
tcctctaatgactatggcatcatttntggcgctaaactgctgggagttggaggccatcttctcaattaaatttctggcttcagcaggagtcatgtctccaagggctccaccactggcagcatctatcatacttctctgcatattactgagtccttcataaaaatattggagaagaaactgttctgaaatctgatggtggcggcaactggcacata

SEQ ID NO: 1555 - DNA, 382 bp, Glycine max
  unsure at all n locations
ctcagctttacatatgggagggcgggcttcttactttcttgtcccaacgcgagctntgaccactgttcttccttcccgtaatgcttcttttcatgtccgcctgagtgggcttatagcctaaaccatacttcccacgatttccttgggtatttatcaggctagttatgccgccgttgtttttgcctaaacccatcccgggttcataaccgttccccaacataactcgggccatcattaccgctgcatcggacagacaaggctgcccaaagagggagtccacggaggaaatgctgaccacctcanaagactggaaagcagtttctaacgattcttctgcggcttccacataaggcatggaggatgggcagcttaccaagatatc

SEQ ID NO: 1556 - DNA, 474 bp, Glycine max
  unsure at all n locations
actaagcctttaagttatgtggtggagtgtacaatgtcacacatgaatcttgatatatctttatccagagaaatctgtaactattggattgtctcatatctgacccaatcctcacaaatattntacccaaactatgttactgccgactaaaatcactaaacttagtcttagactatgtagcaaaatagtaccaaagacttcacacatcatattaacatatttcattcttttttaatattttatttctagaaaattaaaaataatgggtgtgtgttgaaatatatgtttctattttatattaaaaaaatgtaaaataagatttcaatttttatgcttgatataattctttttacaatgtaagcaaatcagaaatattaatatgactacttacataatttccaatggtattcatataaataattctggttatgtgactntaatgttaagtaattaatttattttctttgcatagat

SEQ ID NO: 1557 - DNA, 209 bp, Glycine max
  unsure at all n locations
tctttctntacccactcctcacgttgggttattagggaanaacaccataactaaacgcgccacaaggcatccctatcgcaccagatccaaatctagaatgatgggtgatcaagaggagacacaggaacagatgacagccgacatgtcggctctgatagaacaaatggcctccatgatggaggccatgttangaatgatgcagctcatgg

SEQ ID NO: 1558 - DNA, 368 bp, Glycine max
  unsure at all n locations
ctttctctctcctcactcagccccacanaaattntagacagctctccctctctctcacgcagccttcttcttcttttctcccatccaccattgaaaccccaacaaagctccaacctttggtactcatttctgctccaaatcgtgaaaggagagcattttcggagtcgtgaagtgcgtggctacgagtgggacttcgaaaatccaggtttgggtggacttctttctctcttaaatttcgtgggtatggggttttgggagatatgatgggtggttntgttagttntctgctgtgtgatgattatttgtgaaggaacttgttgaaagcttgttgaaattgccatgtttgggtgagttagacatacccattc

SEQ ID NO: 1559 - DNA, 372 bp, Glycine max
  unsure at all n locations
ctcattccctgngattaaaactacatactgtttaaccactgggacacccttctgtttatggctccaaccgataatgtctgcccagtcttcaaccaactgatcctgaacgtagatgaagaagctctggtcaccaggacggctaatattcgggtcaagctggcaaaagtgtaaccttagcaagtaggtgaagcctgaatcaatgggaagttgccatgtgaggttgaaccccatgttgaaggtaccattacttcccatattccttacggatcggtacactgtgtctggtgcagtgtagttaggagtcttctttgtgaatctcagcttaattccagtggcaatatctagagatagtacactttgagtcgttacata

SEQ ID NO: 1560 - DNA, 289 bp, Glycine max
  unsure at all n locations
gctacgctcttaactgacacgctcttaatattcgaagagtatccttgtggaaccttcacccgacgaagacactgacaaanacttatattattcttctttgacaaagtatggcaggatagggacaaagtaaatttcttcccatcagaccttggatgcaactgtgatcgtatacccatatcagctagatcttgacgggtattcaagccatccttcgtcttgccttgaatgttaaggagcgtcccaatcacactgtcacaaacatgtttcttcacatgcataacatcaatac

SEQ ID NO: 1561 - DNA, 407 bp, Glycine max
  unsure at all n locations
ctcagctgagctcgcactattgtcccagagccactcggtccttgttcctgctccattcttcctttcgggccctttttgtttcccactctaacgcttcaaccgtggtcatgttgatatctttcagctcatcacactctttcttgaccttagtgactgccaccttcagcttctctttcaccactcttgtctttttgagctctactttcaaagctttcacttcttcactttcctcaaaaatttcaacctccttcccacttagactttatagctttgggagccaagttatcccttgcgttctagacttcaaccacttgtgatagccgctgatgatgtcattgctacttcccctaagctccttatcttttcttcccactatattccacgctgtatnggatttctaaaagatc

SEQ ID NO: 1562 - DNA, 430 bp, Glycine max
  unsure at all n locations
acccttgtctgttacttatttcatatattagaaaaaattatttgcaatttttgtgtgagaatcttgcaagaaacattaagatttatatatataataattcatatctaaagtattatccttaattcttattttaaagaaattattatgaatcatttgaaaattatttcgctattttggtgtcactggtgtgatctcatttgtaacatgtaatgaagttcaactcttaagcatgttgtcacggtttcattatgtgtatgaaaaaatatatattattagaaaagggcaatttcctttcacttttagtgtgtatgaaaaaatatatattattagaaaaggtcaatttcctttatattctagtgaggtttgtcttaattctgatatactagtataaactagctgtacccatannatgtaatgaagtttattatta

SEQ ID NO: 1563 - DNA, 171 bp, Glycine max
  unsure at all n locations
tgaaatatatttttcggcaagaactaatattatattacgcactagttaaaattagttgttttttatagaagatagcttctccacaagatgattttaacttatatataaattcatcttattttatgggataaatatatctatggagaagnttatctataataaattttaatt

SEQ ID NO: 1564 - DNA, 465 bp, Glycine max
  unsure at all n locations
tagttaccacaaaaggaccctntaggcatgtnttatcgcctcatctatgataagatggctctatcattttataagagtcagggtacgactctcttgcatgtcttgcttaatatactatttttaagataagatcaagtttactttaaactaaggtatccctaatccctaataagtaacatatataaccccttcttagtgctcactttcaacagtggagcagatcatttgtcaatatatgtataccaataacaggtcctctctaggtataggtcgcttattcaatcaaatgtactttattattattaatcaaaacaatatataatgcaatatccactaaacaattcattccgttccctcttctcctcttttcttttctctcaaataaaatatcatttctaatggtagntagtcttttaattctctcttatcttggattaatatttgatagaagaataaaaagacact

SEQ ID NO: 1565 - DNA, 431 bp, Glycine max
  unsure at all n locations
cactgcagtggatcactagggttgaaatctctaactggattgtggtggatcgtgatgatgataacagcgttttcggtgcttagtttgtggattggattctatgtctagaccatgatcaaagttgattccactataagagcccgattcattaagtttaatcaatttgatgacgttgtgtaaatggaacccgttattatctctttttttatgaggatgttacttacgaaggctctatgtacgtgtttatttttagtgtaatttctttgtaaccacggtaatatactgtatatgggaagctgttcatatctttctttaatgataacagtgatgtgcacttgaggttattcttgtcgatacacgcatctacatgctagcaaanatattatacatttgttttgtgtaagtataacaatgaaaaaatgatagagtta

SEQ ID NO: 1566 - DNA, 366 bp, Glycine max
  unsure at all n locations
gtgtatatacattngatagggaagcaccatctatccaagttgataccttatgtgttcatggaggccctaatggatttataactggaattagaggaagggttcaatgtctttcataagaagatttggggaagactgagacacagctagagaagcacgatatgatcaaagaaaaatgctatctccgctttcctacactgccattcattcccaaggaaccttatgatcgtgatgctacagattatgacaatctttctcttgtttcaggagctaaagatcaaagttttattcatgtatctaagatactataaaatgtaccttatatactcctgaatctagatcatgtgctaagcatgcattctaactctg

SEQ ID NO: 1567 - DNA, 451 bp, Glycine max
  unsure at all n locations
tctactcattagcttactggagaagcttttcttnttaattttcttctcctattagtgcttatagaaaagcttatccaaacaaggtccactatatattctgcaatctggtactgtgccatatatatggatggtggttttggacatttggatttgtgtagttgttgttaataacaatgatgcttatgcatttgggcatgggtttggactagttgtatcaaactatgtttgtgtattggtattttgggggaggatttccacttgcttactacatttttacatgtatattatgtaactggtttcattttattgctacgtgtgaggtataactacttctgtttttaaagccattgcattctttttttattttcttatgtttatgtcattgtggccttattntaaaagcatggttttgttgactaattataagcacatctaacttctgtttgagttt

SEQ ID NO: 1568 - DNA, 169 bp, Glycine max
acttctgtattagtgtcaatgatgcacgagacagcctcctcgtcacactcaatgctaccatgctacacttacttcaacacgtccgacatatatgctccatgcagaccttcgtacggacatggaggcctataacttacaccacaccccatcctaacccatgccgtatacc

SEQ ID NO: 1569 - DNA, 202 bp, Glycine max
  unsure at all n locations
ttaactgagacttaatgagtgaatgtaaatgtttaatagatttgaaaaagaagaaatgaaattttcctaaaatttaaatactntctatttatatattntagtggtggatcaagtggcctcaaaataattaagaagggggttgaattaattattcctaaacctttactaattaaaaaattactcttctaaggcttttacttat

SEQ ID NO: 1570 - DNA, 112 bp, Glycine max
  unsure at all n locations
gcttctgtctcttggtcttactcttaaaagccacaaaatgctgngatggctccagcactgtcaacacaagcacgaatatcttcactgtgacagcacaaagctcacagaacat

SEQ ID NO: 1571 - DNA, 435 bp, Glycine max
  unsure at all n locations
agaaactgattattaaacacacataatgaaaatactaagtatttattacctatacttaacagaaaatacttataacattacaaaataaccataaatttggagagtttgatataatttatacaagttttatacacaaaagttagtcattttcaccgactaacaacttccccaaatttatagttttgcttgtcctcaagcaaaaagagaacaactcacttgtcctaaagtgacaatgacatggagtgactatgtacaaaggtgtatgctacaaagttactgattgcatgataagagaatggagtaaaatgccctcatcacttgtctttcacaagttatgcagttatccaaagagaagaataaaatgtatactgaacaaatagatgaagttaggcattagacagatatcaaggagagtagcttanaccacagtctcat

SEQ ID NO: 1572 - DNA, 235 bp, Glycine max
  unsure at all n locations
ctgcagcttccantatggaagctaactctctggtggatcttcttgtcgtacttgatgtacatatannttttatctattaatgatgttntgtatgctcactatgctatcagaacttcattcttccatgctttngccttgatcacgtagatgcatgtgtttataggatcattcaattgtggaaactggtctgattcttagaacttgatgggacagggctagtttgtcgtactttcac

SEQ ID NO: 1573 - DNA, 407 bp, Glycine max
  unsure at all n locations
ctaagctntatagtgcgggtctgngagacgaaggtcaagtgttcgctatatgtgaagatgatgttccaagtacttcggatttggtccgaccatgccctcctgatttccagctgggaaattggcgagtggaggaacgccccggcatttacgcaacaagcataatgtaaacctttacggttttaaaagctctatagttgggcctaggctntagagtttcctttntgttaaggctctgtgtcttttgtttttgaatntataatacaaggatctttcttcatctgttcctggtctctacccattctcattcatttgcatgtttacttctttntctgaaacggcagattcgatgacgagtcccccgaaggtactaatacttgngacccgtctatcaacttcgagcaagaaat

SEQ ID NO: 1574 - DNA, 340 bp, Glycine max
  unsure at all n locations
tgcctaaggaggtccggaaggacaaggcggctctttgttctagttccgctcctgagtatgacagtcaccgctttaagagcgctgtacaccagcagcgcttcgaggccatcatgggatggtcatttctccgggagcgacgcgtccagctcagggatgacgagtatactgatttccaggaggagataggtcgccggcggtaggcatcactggttacccccatggccaagttcgatccagaagtagtccttgagttntatgccaatgcttggccaacagaggagggcgtgcgtgacatgaggtcctgtgtgaggggtcagtggatcccgtttgatgcagatgc

SEQ ID NO: 1575 - DNA, 307 bp, Glycine max
  unsure at all n locations
tatcgagacgctcgtaattgaaaacagaagctctgagccaattcaaacgacaataacttttaactcgggtgtccgattgtgtcctgtagtatattgagacgctcgaaattgaaaacagaagctttgagcaaattcaaacgacaataacttttgactcggatgtccgattgtgtcccgtagtatatcgagacgctcgaaattgaaaactgaagctctgagaaaaatcaaacgacgataactttttactcggatgtccgatggagacccgtaatatatcgagacgctcgtanttgagaacagaagctct

SEQ ID NO: 1576 - DNA, 273 bp, Glycine max
  unsure at all n locations
cacttgttgaatatgcttctttgctntccttgcgctagcccttgtcataggtcttccaagatcttcaagtggatccttgcccttgctcttggtcatgtcctcatcattctctccctcttgagaaggatttgtcctcatatcggattctccatctgcatcanaaatagataagtcagatacattgaaggtggtactaacattatacttatcgggtagctcaactntgtaagcatcattgcttctttcaagcacttgacatggtccatcttccct

SEQ ID NO: 1577 - DNA, 235 bp, Glycine max
  unsure at all n locations
gagcaatgttctcaatataaanattagtagtggaattctcacaatcagaatattcagaatcaccctcaacagaatgctcacaatgcatagaatgaccaagatgcacactatgcctaactaatctatgagaggttctatctatttcangatcaaaggattgtgaatcacctgggatgcccctagtcatgcactatatgcagcaaataatgtgtttctcaacaagcacctaacaaag

SEQ ID NO: 1578 - DNA, 435 bp, Glycine max
  unsure at all n locations
gcttanacattgagaagacagtatgagcttcttgctatggatgagactgaatcaatagctgagtatttcaccaagattctcacactcaccaataagatgaagtgttgtggagaacagattaaggaacaactggtggttgagaaggtgctcagaacactgacatcaaagtttgatcacattgtggtggccattgaagaatcaaaggatcttacatctttcaagcttgaagaactacaaagttcacttgaagcgcatgagcagagattaatagacaggaatcctgagaagcacaatgatcaagccttacaagctcaaacaggcataaagtttgacaagcaatgagacaaatccaaaaagaacaaaggatagtggtgtgatgagaagtggagaaagactgaagattccatatgtggtgattctggatcatcttcacag

SEQ ID NO: 1579 - DNA, 230 bp, Glycine max
  unsure at all n locations
aattaaacacacaaacttgaacanatgattaatgagccaaactcaataattcactaatagttnggctcacttanatcctatgtataacatcccaaatgctaacgaggacgaagaatgatcattgttgtanaagagaagagacatcgacaagtagtggttcatttagtatctcttgacatcctagntcataattgtggtctgcctactntgacatctacaaatttagtccc

SEQ ID NO: 1580 - DNA, 253 bp, Glycine max
atgaataacctgttagaaagttattgtttaagtatttaattgtatcgtttccctaaaagataaaatttcgacacagtttcttgagtaattttagtcctgctatccaattagaatcaaagatttacaccaaaggtcagcataagatactgaaactccaatttcaatcgaagaatatacgtcaaaaaacatgcaaagaactaacaaatatgaatatgacagtaacgtggttgcgtttctcttatctattgtacat

SEQ ID NO: 1581 - DNA, 376 bp, Glycine max
  unsure at all n locations
cgcgaactgagatctttgcgtgatccataaattgtgtctattggtttattggaatgcggatgatgctgcctctgctctccatgtatacatgcgagtctacgtgaggatggagacatatgattggcattttaattttgctctcgatgttgaatttgagtttttcgtatgtgccgtgtttntgtcagagttttcataaaactagtgaatcttactatcaacaacgaactgagcaacatcggcctactatagtagtgttaatcaaattctttcacataagtgtataattggcattntgattgtaacttcaaagaatcatttgaattgtagataatgtattggattatattgcgctcttcattggttggaatacattgag

SEQ ID NO: 1582 - DNA, 314 bp, Glycine max
  unsure at all n locations
aactcactcttcanacaaaactaatgagaacagtgtcttataacacatgttttcataaaagaagaccaacacttttttttatttaggttaaatatcacttttaatttattatattttagtattttttattttattacattaaggtttaaaacgtttattttaattatttatatttttttttaaattatcattataatcattgtttctaattntatgttaaanaacattaatgtttcatcaatattctaactaaaataatacctgaaatctcgtcgaagagtcaaattaactaaggaggggtggtaagtttttat

SEQ ID NO: 1583 - DNA, 399 bp, Glycine max
  unsure at all n locations
ttaaactcgctgtaaaaatatctatattcaatcactcaaattatcaattgctcattcttatcattctcaaacactcatttcatgcaaaacaatccactacatatcattttcaatcaattcattgttcaaacacgcttttggtacaaacaaacaactcaaagtgctgaaatttatataattgaaatttaaaaaaattgaaatataaaatctgaaattaaaatgactgaacataaatcataaaataattgaaaataaactaaaatgttcgagatgcacaaatntaaatgtcctgctcctgtggttgctcctatgcatgctcattaaggtccaacacctgagcagctggtgcagatggtgtggcataatcaagtatgggtgctagggatggctttgggatct

SEQ ID NO: 1584 - DNA, 380 bp, Glycine max
  unsure at all n locations
gatctgagcgacaatacaaacttcctagcggtttctaatcatatggtccattaagtctatcatatgttgacaatagctgagaagtctgtggatcttcttgggggcggagtaggtgtccgccattgctttggccttggctagcaatcggggaaattcttgactcctgttcaaagtaagagcaaatcggtccgtccacattgttgcctcttggtgccatgaatcaattaccctctcccttgcttcgctntctgctgatatcttggcgtactcatcctctagcctttgctcgtgagtcgccgctagaattagcttctctttgcactcatcgatgacgggccacatattcccttcagtctcgcttaattggtgggacaaatttc

SEQ ID NO: 1585 - DNA, 352 bp, Glycine max
cggcgtttgtagaacctgttacatgaggtcttttaggctcttgtggtccgtgatgataatgaaggggtacccgaggaggtaatggcgccattttcgaactgccgaggtaatggcatgaagctcgtgaatgtaagtagatgcatgttgaaggcgtgggcagaacatcttactataaaaggcgattggatgtgatctctgttgaagaatggcacccatggcaatagcaaaggcatatgttttgaggacaaaaggcaatgagaaatccgacgaggccaacaccggagcctgagtcattacttccttatgacgaaggaaggagtgggtagcctcttcagaccattagaattgatct

SEQ ID NO: 1586 - DNA, 136 bp, Glycine max
aatgtgaagacccacaatttcttgtgttttctaattagagagggaaaaaatatccagaagctatgaaatgtttctgcactttcaaatagaacctaaaagacatacaagacatttgtcactgcattgagctgcatgc

SEQ ID NO: 1587 - DNA, 431 bp, Glycine max
  unsure at all n locations
gcggtagagagattgagatgatattgtagtcttcattttactgtcaacatgcaagggacatttctctcgttttagacattgtttcacaaattccaacggtggagatgtgtgaaaatggattccaaagtcggtgtccaaattgcacaatgatccaacggttaacgagtccaggatcatagttttaatgagataggttttgggtctctacgagaaaagagaaagctagaatgcgaaggatatttctctcacctctgacgttntttggcaaatttcaacggtgagaatatttgaaagtgagttctaaacctggttctcaaatttcatgatgatccaacggttaacgagtctgagatcgttgttttactaagatatgtttgagtgtatgcganaaanagagaggaatttggaaagaggagaagggaaaacgaaat

SEQ ID NO: 1588 - DNA, 475 bp, Glycine max
  unsure at all n locations
ttacgtgacactataaaactcagcttaaattgaatanaactttaataactgctgtttatcgattacacagtgcanattntgaattcaaattttaatagctgttgtaaatcattttttgccactggtaatcgattacatcctctggtaatcgattactagagagtaaatctcttgaaaaagactttttaacttaaatttcttggccaaaccttttgctacttcaattaggaattcccttcctatttaatatacccttcctaagactctagagactgtcttgatcatccatcttgaatatctttaatttctttgtcttgaataaagctttgagaaacatgtgatcctttggcatcatcaaaaaattcagcttgatcctttgtctacaatctcccnctttttgatgataacaatccctgaaatcaagacaagctatatacaagatgatagcacgttcacacaacccttttactcccta

SEQ ID NO: 1589 - DNA, 223 bp, Glycine max
  unsure at all n locations
aaatgcacccatatacaatcaaggcagcttccttacctagaatatttacatgtacttccaaggtgtattngntatttacatcaccacgtctccttggctaaatntacatacatgcatactcaaagcactttggggtaccaaaaattgcacatgtgcacatcttggtatttctaatacctatacatacacanacttcatgatgaatcttgactatctacacaat

SEQ ID NO: 1590 - DNA, 399 bp, Glycine max
  unsure at all n locations
tcttgcacttgatgaattatattctatgaattactcatgagttctctcaagcattacaaagaagtgatcaatatattataaatgctatgaaattagatattgtgtccaaacaaaggttacaaacaatgaaggatgattgacattctctgctcggtgatgtttcattattttgtgaaaaacacaatactattgttcaaaatatgaatgacacttttcaaacacaaggaaggtcaaggcgccatatggaaaagtttataatttgcatcatttttaaaaattggtttatcacatgattgatcgacaacttcaagagttgaataagtcgtttacaaaagtgaatattgagttgcttctttgtgtagcttgcttaaatctaagaannatcatttctacatttga

SEQ ID NO: 1591 - DNA, 478 bp, Glycine max
  unsure at all n locations
ttagtgtgaatcattcgttgatataaactaacctgntaggtttggaatactccacaggatatagatttcatctagtttgctcatgggcgagcgatgtcaactgctggtcacacgatgcgatacaaccacagagaattgactctcgaatgaatcaggtgctcacaattgttcataatgataagtgcaatgcacagaacccaaatctgtgctcttctgctagcaaggttaatgttcaaagcatggaatgaagtcaacagaaacccaatgttgccttggttgtatttagaggatgngtatgccttacctgtaattgacctgtcttccacacaatggaatatgtctntaactccacatctgatgtggccatgatatcctacagctcatcgtgctgttttgaggaagaaatggattaccttaccgcattcttctgtactggtgatgcatagaaaattgtctgatgctacatattgtgcaaccg

SEQ ID NO: 1592 - DNA, 338 bp, Glycine max
gggagcgctatccgcagactcaacagaagtcagttgtgagagaaatcagactatgtgcacgaatcgtatacccagtgggttattgataggaccaagagctttggcctaccctaccgcttacctagatacctatcgtccaccatcccaccatcatccttgcctatcccctttgacactaacgaagagtttcatgaacagttaaccaaagaaaggcaagataaagaaacttggaagaggagatgccaggagctcgagcaagagaatgagactatgaaggggaagatagcccaacagagccgtgagcttattatccagaaccagaggatgattgagaagga

SEQ ID NO: 1593 - DNA, 270 bp, Glycine max
  unsure at all n locations
atatatacaacaatggccttcatcatatgncacattatgcattgcattctaatatttagagattgatacgacaatcattgctctatgctaggcgttctctcaataattaaattcacactctcaccgggntatggctcaagctcttctttctcaatcaatctggctactgactaacatttgtaattgcaagcttacattcttagtctttctttgtgtagcagacacactngctcaaactcatgatanaacacatgctttattccaatcatg

SEQ ID NO: 1594 - DNA, 354 bp, Glycine max
  unsure at all n locations
agaaccaaagaagagcaagttatattgagacatgaactttggttatgcgaaaaactttttggatgagaaaacatatatctggatatggtttataattctatacttaagacatttaaaatagaactgagggaatcaaacttaggtcaatttaattctagtttacgatatgtactcatggttaaattntattttagtgattttaatttaatctttataaattatttagatatgttatgtgatatgtcacttacatagttattaaagtaacatatatgatttgttatatattacatcatttcatgaataaatcttttttattatgcagaaaaagcaatggattntttaattattttt

SEQ ID NO: 1595 - DNA, 447 bp, Glycine max
tagactaacttcagcctaccattctcatactgatggccatactgaacggaccattcagtcattgaaggaccttctaagagcgtgtgtcttatagtagaatgaaagctgggagagttttcttccatcgatagagttcacttataacaatagttttcactctaccattggcatggatccctatgaagctctgtatggtagaaggtgtatggcacccttatgttggctagagcccagagaaggccttaccttatgacctaaagtggtacaacaaaccaccgagaaagtcaagttaatccaggataggatgatgactgctcacagtaggcatacaagttatcatgataagaggaggaaagatctggaatatgaggatggtgatcatgtattcttgagagtcacttcgtggactgaggttggtcgagcattgaaatcccgaaaactcacacc

SEQ ID NO: 1596 - DNA, 278 bp, Glycine max
tgtcttcacaaattatcatctcacagcagattactaacaaaactacccctcatatctcccaaaaccccatacccacgaaatttaagagagaaagaagtccacccaaacctggattttcgaagtcccactcgtagccacgcacttcacgaccccgaaaatgccctcctttcgcgatttggagcagaaatgagcaccaaaggttggagctatgttggggtttcaatggagaatggaggagaaggaaaaagcaacgtgaggaagagggagagcttctgaat

SEQ ID NO: 1597 - DNA, 397 bp, Glycine max
  unsure at all n locations
ctttctaagctntnttacaaccttttctccncctttggcttcatcaaaaagccaaagaactcggaaatcaacacagatataacaatggagtagcaagatataaatatcagagtaaaaaaaacaaaataagccaaactcacaaacaagaaataatcaaaccagaattcaaataacataaaatgtcaacaaccacaaaatatccaagactgaaatttaaaaaccaaaagataaataagcaaagtacttagcataataatgtaaattctaagaaactaaaagccaaaatacacggcttataaaaagacatataatcataaactaaaatctaagaagacggaggtggtggaggaagatcaaaactctgacaaatgtatccgacatcctcttcaagctgtgt

SEQ ID NO: 1598 - DNA, 438 bp, Glycine max
  unsure at all n locations
tgccacccagctcgcccaggcgagcagggttgcttcctccataagcaacagcctactggaggaatcttctagagggcccaagtgggcctggttggctattgcacccccatttttactaagtacacccccctgcctttnttggtgattcttttttcgtaaagttacggaaacttacgaatttcgtaacgatacttgttttctttccgtaatgttacggaaccttgtggattacataatcatcccctttttgacttacggaatgttacggaacctcactaattgtgcaacgatgcttccatttgatttccggtgtgtcacggaaccttacggattgtgcatcaatattttcttttgtntccggcacgtcccggaatttcacaaattgcctaatgatgggtgccaagcaccttacaaggaccaaacaaaagtcgcatgtca

SEQ ID NO: 1599 - DNA, 476 bp, Glycine max
  unsure at all n locations
catcctggtcatggatagatcacccaggttcgggtctataagcaatgacaattgccctgtgaagattcgctttcgctacagcttcggtggtttcccttaaccaagccacaacctatgagtcgccagctcattcttcaacaggcacgtggtcagagtcccgagcctcctcccactgcttgggagcttacggtttcatgttctatttcactccccgatgggggttcttttcacccttccctcacggtactacttcactatcggtcacccaggagtatttagccttgcaaggtggtccttgctgatacacacgggattccacgtgccccatcttaatatgaattactcanaagacaattcanaataaacttctttaaagaanaagataaatagcaataaataaaacaagtttaaaggaagagagaatgcanactcatattntatactgggttggccatgccttgtgcctacgtacaatn

SEQ ID NO: 1600 - DNA, 226 bp, Glycine max
  unsure at all n locations
agaaacatatatctcccccatatataacanatcgataaatggtgtgtgattcaatgaaggtgccaattcatgacaaataactggtaaaaactaagttcccctcggacatgtaacgatgttcgacgaatcccgttacgctctccgtagggccattttcgtgccaactcgaagtcgcaacaaggtcttctactgcatactctnttctttcttcattgtcatcacatac

SEQ ID NO: 1601 - DNA, 218 bp, Glycine max
  unsure at all n locations
aactttgaagtatgtctcacaagactctcattcatcanagttacaacaagtattacacatgcttctatntatagactaggtagcttccttgagaagctntcttgaganaacttccttgagaagctntcttgaganaacttccttgagaagcttctttgaganaacttccttgagaagctagagcttagctacacacacccctntcataactaagctca

SEQ ID NO: 1602 - DNA, 518 bp, Glycine max
  unsure at all n locations
aggggctgantcctgtattacttgcaccnttgattctcgngacactatntagtactcaagctgatagatacgtgaccagacgatcgcgagttcagccaagctctcttggaggaagagcgtcaacagcgatttctacctagagtgcgcccccctcttgcaacgatacattatgagatggttcttatgacaagtcgtgcctttgtacctatcagaatcaggtaccttgaattatggagggatgatgacgtcggtactaagcaaagatttgccatgtccgcgaacggatagtctccagatccttcgacagctctcaatctttcttcgatgagaatcgagttccttttttcttccgctgccgaaggtggcccttctgcggacaagaatattggctgtgctgggagggttcgagggtctcccatgaggttgggctgaggtagtctgttgggtgctggcccctcnacggcgacccgngagtangaattggtgtctcttggcatgctctctacactctcgagatn

SEQ ID NO: 1603 - DNA, 427 bp, Glycine max
  unsure at all n locations
tatatccttttcaccgtanatattttatattgttttctcgtatccacatttactcgagattatttcttattttcatattttctaatattttcaaagaatgtgccactcataaagtaacattccaaattagagataggcattcatctactttctatggtaacattagtaaaacacatgaaattatttactatgtgtttaaattgtgccgtttggcatgacatgaacaaggttcttcatatcacgtaaaaagtagataaataaaagtaaacaaataagtatggcatatcccattagtctaaaagcaagtttaatatattcaaagttttatatcccattatttcatattttcacatgaaggattattcaactgagagtataccttaattaaagattacaaaatggagaatctcattggaagcagatactc

SEQ ID NO: 1604 - DNA, 395 bp, Glycine max
cgtagcccaccatcttttcatagtatagtatctataatgtgtctaccatcacgattatcgtctccctttccatcattgggggtaccacttgtgccgccagatccctctacctcttgggcgtgttctttgaaagatccgtccccctttttgcaaatgttctgtagttgcatcctatccagaaccatatcaaaattgtactaatactgcctaacaaaggcaaccattacgtccttccaagaatagactcgggaaggttccaagttagtgtaccaggtaacagctaccccagtaagactttcatggaaggaatgtatcaacaattcctcatcttttgcgtattcccccatcttctgacaatacatctttagatgtgtcttgtgacaagtagtcccctt

SEQ ID NO: 1605 - DNA, 388 bp, Glycine max
  unsure at all n locations
tgcctgtcgtatggtcagcaatgctcaagttgatattaccggcagactgcttgtcaggtcattgacatttgattatcacatcttgcactatatcattgtaagaattatgatgcctcgttcttctaatctagctcaagcctctgaggaggatttgattctgatgtgggatttcttgaccgttcgtcaaatcgactgtgcccatttgattcgttaccgcatgcatatggcattgcggtctagtgcacctttaccctatcctcagntaatcactctatttctgcgtcatttgaatgtacctcttgcttcttagcctctcattcaagataaatgatccttctctattggtgttggagcggtcacctcttttggctactgcatggagttggat

SEQ ID NO: 1606 - DNA, 414 bp, Glycine max
  unsure at all n locations
gtcatgacattgtcccatgcatatctttttaccaacaaaggttttacattgtgccttcacattcgtatgaatatgagaccgacacaacagattggtagactcggggaaaacagntttctaacatgttaaatatctgtcagtaacaatgactccaaggagtgcatcacgtctcagattaataccttgaagtcgttctagagcccgaacaacattatttaaacgttttccttccaaataggcaaaatgcagctgacaatgtcatacatgttggtgtcacaccaacaatgtcaagtaacggcagcctgtacctgtttgttatgcaggttctatctatgagaataccaaactatcgacattggataatttcgactgtttaggatgacttcaacatatagtaatgacaacatcttaata

SEQ ID NO: 1607 - DNA, 426 bp, Glycine max
  unsure at all n locations
tatactatagacaaaagntaatattaaataacatttaatttctcacattaatataaaataaaggataataagattatttgattgcaaatataaatatttatattatagcctttaaaataacaataatagattataaaaggaaaaataattaaaataaataatataacacttgaacattttgttctaaaagataaaaaacaatgacttattcctacaaggaagactataaaaaaataaaatagtacattgtctaaagagataaaaaagaatatcattttatttttaaaatgaatattataaaaaaggaaacgaaatgtttttttcaaaaataaaaaatagattattaatatttaaatactattattcatataattaaatcctcaaatacaatatttttctaatattaagatattatacatatatatt

SEQ ID NO: 1608 - DNA, 221 bp, Glycine max
tatgccaattctgctttaatacagtctcacattgaaggcaacactatgggcaatcaacctctcttgatctcagtatcatccttggtggtggatagttacaacaagctctctaaggaacacgtttactcgaggagggacattcaacatccatatcagcatccaaaaacccttttactttcaagtgactcacatcaagcacttctaccatacaaatcctatat

SEQ ID NO: 1609 - DNA, 190 bp, Glycine max
  unsure at all n locations
cctcccagaagagtatggagtcagcaccacttttaacatttctgatataactccttttgcaggtggagctgatattgaggaggaggaactaacagatntgaggtcagatcctcttcaaggggaaggagatgatgcaatcctccctangaagggaccaatcacaagaaccatgagcaagaggctccaagaa

SEQ ID NO: 1610 - DNA, 220 bp, Glycine max
  unsure at all n locations
ttgctgaggaaatatatccgtgaagaacatccaagctgaggcgcttctgtaacgtttccgtgagtaattacgcgaagattctcgaccgttcttcaagattcaccgttcgttcttacgttttctttagtcttcaatgggtaagtacctcanaccaagctnttcaattcattctatgtacccgtggtggtccacattntgtttcgtgtattcttattctcat

SEQ ID NO: 1611 - DNA, 615 bp, Glycine max
  unsure at all n locations
tttgacgccgctagangtgacactatagatgactacgcttcagcgtngcattgaatntganggagaggggacactgtggaactgtaacttactctcgacgaangcgattatgagagagtcgaggactgcgtcggcnaagagaataccatgggcgaatgtgtgtataggcgattacgagcagggtgattcttcctctagatctcttaggaggtgctgactgcgtcaccgattcataggacatcgttcctctgctgttcagctttctgcctccaggtttcattatgtcgtccactaacacgatcaattcaacatactgacttggatgtcttagctataacagcagactcctctctcactatcacattaattttggttatagctcgacccctgaccatctgaattgtgtttttcttttcacacccgctacactatctcttactccagagaaaagagagaaacactgcatcctctcctcgtancttaaatgaagagaatattgccacagattcttgaatctcatcttactatgtgtgttaacacgacggctcttatataatcttcagtgttcaataacacaaatttctacctccgtgattttctgaataaccagaggcg

SEQ ID NO: 1612 - DNA, 557 bp, Glycine max
  unsure at all n locations
cactganggtcttcaatggtgattntncatcatggagatgcaacgaaagatattggaanagaggtgagatgaggcgtcatccactacggaataagccatggaaggagaagcttcacccccaagagaatgtcttggataagaagcttagagagagaacttcactgaaggaagagaatgagagagagagagagagagagagacagtgacatggtaaatcgaatgaagaaagggagagaagtcgaactttgaagtgtgtctcacaagactctcattcattcagaataccacaagtggtacacatgcttctatttatagcctanngtagcttcttgagaagtagagctatctaccacaccctctatagtaagctcaacctctgagagctagagctagctgacacccctctatactaactcacctctagatgatagtagctcaccacccttatattagctcaccatgcaaatactgagatcagaagtctctcanactctcaatgctatatcaagtanactatctctagatgcaatcaggtcaagatgaactattatatacan

SEQ ID NO: 1613 - DNA, 580 bp, Glycine max
  unsure at all n locations
caggctgctcgatagctccaggttgctgcatgganaggcanaggtctgtatggtggtcagcagaggagcacataccacanacccttgcaacatgtatagatntctgattcacggccagctggngtaccaaggtaacccaatgcattcacgtttgccttcaagcttcttagtctcagatgatgcagctgagtntgtaactacctcatgcacttctctaatgactatggcattatttctggcgctaaactgctgagaagtggaagccatcttctcaattataatttctggcttcagcangagtcatgtcttcaagggctgcaccactcgcagcatctatcatacttctcttcatattactgagtccttcataaaaatattggagaagaagctgctctgaaatctgatggtgangggcacttgcacatacgtttttaaatcgctcccagactcatacaggctctctcacctgagtgctatacctgnatattatctgatgctatgtctagagcaggagattttctataaacttctaggcatccactctgatgacctgacaagatacagcagctttgcctctcan

SEQ ID NO: 1614 - DNA, 233 bp, Glycine max
  unsure at all n locations
ctgcgtatctaatgtcctactntatgcagagggaatatgctctatacanacaagcaaagggatggaaacacctttgtgtatacaagtcccgtatacatgctctangtctttacacttctcgattcatttcccggggtgaaatggtatgataccagtctacaagtctttatgtgccactccactatgatngcaaatatgaagtatttcctgtacttctacagnngtgtgagtat

SEQ ID NO: 1615 - DNA, 522 bp, Glycine max
  unsure at all n locations
tatgaccccttgagnacctanatactaccttgagctcgctagtngtnngcnnnnnnatgtcgcactttagcaccttaanactagctcaaccccaccaatcagtgcaaacctcacatggttctagtgaaggaattaaatgaagtaattgaggcnactctacctccaccagcctaacatcattagacttgtcaactagattacacctaaatctcaccgatcaaaatngactcttcacacccaacattgcctacaatggcttttgtcacttaggtcttagttttctcttaacctagncaacctttctacatgttctaatgacatttcagctagataactactctacctcattnacacagaatagactagcctncaatctcaagctcactctttcactcatactacatttacttctacctggtagttacctcatttacaattcacacattcgaataactacccattccaaacctaacaatggttgtacttcaactggattacagttcacatgctcaaatataaccn

SEQ ID NO: 1616 - DNA, 653 bp, Glycine max
  unsure at all n locations
ctatgacgacgtttgangtgacctatgtnatctaccttgangctacgctatganttctaagctatnactattggtactattgctcgatgttnttatganagtcacgtanactttgttgagttggcagagattacacgtaatctcactgcttgatacgaacacatataacagtgtatgtcttatatctgtataactattattctaactaccataggatataatcagattctcggtttgcataagagttattagcactattcgctgtcatcgtctaattgtatttgtttgttgaaaactctgtattatctgttgatacaaccttatcatatatatatatatatatgcgcgcgcgtgtgagagagataatggacacacttatttggtatgttagaatgtagtagcatactacaccgtggttactaatccacttatgaacgtatacgcactttgttnttagtntanatactttagaagtacacccactgtcggctggagtgcggtggcaagctgaccatgcatgatctccgcaaatttgtagagttatatatatatgtaatatgactgttgcccatctatctttatagctcttatctattctttataaacactgagtacagcatattatttcttgtatcagtgctcttatagttacn

SEQ ID NO: 1617 - DNA, 394 bp, Glycine max
  unsure at all n locations
atgtcaccatctacagcactnttctcgagcttctntaatccctcgnttacaatnntgtgtattctcattctcaaaccatcacttctcattgaatttgatcttaagctgcaatttatcccagggatcattgcctcattgctctccattggagtagcattagactctaatgcagagggcacattggcatccaacgacttcacagctaatacttcttctagtaaatctacattctgcatgtatcggtcanaagcttcattntccacttcaacattccgctccttgtatcctntatcttggcannatctcatttcgtgatagatgcagcatccctgaaacatcacaatgctattactttcacacaacatacaggtcaccggaaccaagtatacactta

SEQ ID NO: 1618 - DNA, 648 bp, Glycine max
  unsure at all n locations
tggattgacncccggttgangcgcactatgatgtctgacgctgcacgtcaccagagcatantgagatccagatgatccctgccaaaactgtncaagattcaccatttgagagcagagtacgtatatacggttcaagttctactatcactactaacctcctcgcacggaccagagggtgctactnttcaatcattctcatgataggacatgcctcttatagaggtacatgattactcgcgagctatataactttgatgacgctactcttcgtaatcagatagtacagtgcgacactttctcagcctccatatttgctgtaaacggacaagaacatacattacacatggcttccgtacgagcgtgatgtacatcctacacgtgtcacttacataacgcattngtctatcntgtgataaacaatgactatgacttcatcgctagagtcgagacactaatactcatcttcaccacactgtgattgactacacatatggatgatatgtcttgactgcaatgtatgtgtacgcccataatgcactgtctacactcngtctatgacactgcgtctgcactttatctgatcttggtgtcgaactatgcggatctcagtcagatctgatcacgcctcacgtgtgatgtatgaacatn

SEQ ID NO: 1619 - DNA, 216 bp, Glycine max
  unsure at all n locations
tgcctatgttgctgcggatgattgcttcatatntacctgngtcaactctatcagagagaaatcacacaccttcgaagtattcaaagagttgagtctaagacttcatagagatgaagactgtgtcatcacgagaatcacgagtgaccatggcagagagtttgaaaacagcactgttactgaattctcacatctgagggcatactcatgagctctcta

SEQ ID NO: 1620 - DNA, 614 bp, Glycine max
  unsure at all n locations
ngttattgacncccgcttagangtacactatagatgatctcaccattggangctgacactatagaattactcaagctntagctntggtctgtaactgaaccagatgtcatcgtgtaatccatgtagccaacctcacatagtaagataagactactgtagtcgtatcataccacaacaacctacttatcanaggggagaaggggnggactaaacaagaatactacattcatatggagaacaccanatacaactcttggcattctatattagaatagataagctcaatcaagcataacatgaatttgttttntcatattctttgtacccatgtacatggcttccaagaactcaaacaacgcataaaggtgcattgtgaacaactcatttaaggattgtcataagaagaatacatgaggcgtaagtacatacataagctaccacaactacttaatgctatatatangcagctatgccctagagccgagctttgttcataaaatattctctaagcgaaatatcaagtnaaataaaagctaatcgatttgcctcattttnataccaatatgccctcttaaaaaacagaactaattttaatgcactagctattaaaaacg

SEQ ID NO: 1621 - DNA, 606 bp, Glycine max
  unsure at all n locations
tgatgaccccttgaggccttgatgttacctgaacggcacttgnatctcagctctaccaatggactaccttgaatatattctttgtagncctttgagccttgattccctttcttgntntgaagctcactacaagccttaagtgagaaaccatgatattaccatatccttcaggaatnttggagctttggaatttgtttgagaataagtgtggcggggttttggttcattgtgacacgtcgcttcgctgactatgcttcatgaagcagtctgggccatacttgatgtacattgtatatcnggtaaatcgtggacatgctgaatgatatgttgcttctcanaggcangaacatacaatcgnagtacataagaagaggatagtcatcaagaaggccctacgctgagtgatataacttaatggacaaaatatgaactctggtctactttcatgtaacntatgttacttctttatctctaatgtttctaaaggcactatgccctttgctcttattcttnggaattagcactaatcatattctcatacctgtcttggcncatacgacgtanagacntatgatctatgtcgtgngtatggtgatgcatataaan

SEQ ID NO: 1622 - DNA, 619 bp, Glycine max
  unsure at all n locations
tgccagctttgancccttnganngctnnnatgatnccattgangnccactaagattctcagctagacaaggttaccatgttcanagcttgttngngacagctgaacagcgtantcttgagtgatagatgaatgaaggtatggtggttcttggctggcannaagtctacttggtatagacctaatggcgcatctagaagcagacttgacaggttcctagtttctcatgaatggcttgctagatggcccagcagcattcaagctacacttgcaagggaatntttggatcattgtccaatngtgcttcgctctaaggagattgattgcngcccacaacctcttaggatcatggattgctggtacttgataggtcatcaaagaaactgtcatcattgctgacatccatcagcaagccgggtgggaggatacatcttaaagatnaaataagaaattgaacacatcttgagagatggatagagacatttggaatccttacaaggcaaacgatgatctgattaacaactgatgaagacacatcaaacactatccacaaacgagcgaaagaacactgaggagacttgcngaccaactatatctgtaccacacattcattgactttgn

SEQ ID NO: 1623 - DNA, 169 bp, Glycine max
  unsure at all n locations
ccaaaggttccagaaacanacctagctattcaatagaacaacacaggtagacgaaatgaaacgtacctgtcacgatctttagcgcaatggagaacaacaagctntgatgttaacagagaagaagagagcgcgagagaatacacggagaagaagagagcgcgagcaaaat

SEQ ID NO: 1624 - DNA, 331 bp, Glycine max
  unsure at all n locations
ctgtcctcgtagactcgcttagcgccattntcgcgctaagcgcgagttagtggaatttggcttagcgcttcaagcgcgctgagcgccagaagagacanactactcgctgngcaagctgatggcgcgctgagcgcgtgcatgcgtggcagattctcttccagattctcctcactcgctaagcgggctgatgtctcgcttagcggatgttgctcgataagcacatttgtctcgcttagcgagacaatagctacagtaaccttctatttcttcatcttttcacctganactgaagttgaaaactcattaattcacactggaggggatatctact

SEQ ID NO: 1625 - DNA, 297 bp, Glycine max
  unsure at all n locations
cactatctatcttcaatgtagctgaacanaatgaatgtcatagacatgaccgatacanattatgtgatgcacagaagaatctgttggtggttgacttctaagaggaaataatgtcatgctntattgtcgggacatcgatacaaggattacattataccttgatgcaatgacatatcccatnctcggtatatccatccacttatccacagtaacatgaatganacanatatacacgtcaaagttaattcttannaagcanaacatanattacatacctttggtaacccatcaacaagt

SEQ ID NO: 1626 - DNA, 277 bp, Glycine max
  unsure at all n locations
gctatgcgcatacttcttacanatgttctcttgcacaagacattctattaaccgaatatatgcacncatatacaatcaaggcagctccgntacctagaatatntacacgtacttncaaggtgtattngttacttacatcccacacatctnctttggctaaatcacatacatgcatacccanagcattntggngtaccaaaaattgcacatgtacacctcttggtatttctaatacctatacatacacaaactntatgatgaatcttgactatctaca

SEQ ID NO: 1627 - DNA, 234 bp, Glycine max
  unsure at all n locations
tcttcatatgcattagcttgttattatatagacctaacgctntntacctattactgtcaactnttacttacttgcatttactcgttttatcanagaagtagtttatgtctatctttaaccatcatttatcaatgatgttccaacaatgccttacttctaaataaaactctgtctaataagcaagntcccttgagttgatactcggatcattccgcttcaatttaaatacttgac

SEQ ID NO: 1628 - DNA, 591 bp, Glycine max
  unsure at all n locations
ttgaaccgtttgaggccttaatatctcacgctatgccacacttgcttacaatgagctttagcactagacattctgtacaccgattatatgctcncatctacacataacgctattgcgcttgatagattatgtacacgttgattgacatagacttgaccacttacatgcaccacatctccttgcaaaaatgcacatacatgcatacccanagcattatgtggtactactaattgacatgcactcatctagggatgctatatcctttgatgcacgacataacgatatctttatattctcctctatagacggagcttgagtcaatatgatactcgcaaaataagccttaggagcctccataaataccttcttgataacccataacaagagggcctctgaatcatcaatgtgctgtccaccgacagctgttctagctatagaattggtaggctatatcaatgacgacaccatgacaagactttaccatactaataaacgcactcgcgaatcaagtaccgcactctgctccatgatgcatacgccgttaaggtgaatgatcngatctatgccgtctgattgtgtctagagacactt

SEQ ID NO: 1629 - DNA, 403 bp, Glycine max
  unsure at all n locations
tgcacncatatacaatcaacgtagttgcgatagctagatgatatacacgtacttccactgtgtatatgttacttacatcccacacatctacttgactaaattcacatacatgcatacccaaagcatgttgtggcaccaaaaattgcacatgtacacctgttggcatttctaatacctatacatacactaactttatgatgaatctcgactatctacacaataaggcgctacatctcatgctctgtcaaagttgtgtacctagagccgatgcagatgacagatatttcctttgtaactaaactgcttcaatagaaggatcactttttggtatgtattcttacatacatgagatattattgattcttggcacattgatacattatattgacatactcacatttgc

SEQ ID NO: 1630 - DNA, 377 bp, Glycine max
  unsure at all n locations
atgatgaanggatgtcttcagttctcgctctctntcttgatgccatctgcaagaaaagaatgtagactgtcgcaacctacccttcggcgggagggcgatgcggngatcatgggtgcgtcttcaaagaaagaaaaatgcgcggagtcaccaccaacgtttanttgangaanacgtcggnaaaaccgacaaatgtgtggtctacgaactntaagtgtgaaaaggtctgganngtgtttacacaccgngaaggtatagcacccacgcgtcatcacaaggatgacaccttaatcaaggtccatatactcaaatgttatttccttntatgctttatgctttggatttatctttgtgcacaggtgtcctcctctcgatctcac

SEQ ID NO: 1631 - DNA, 324 bp, Glycine max
  unsure at all n locations
taactgaagggcaaaattgatctttcattgaattgctgggtgcaccagcaatattgctgggtgcacctagcatatcccgctggtcaacggtcatggttgcctgcaattctccaggatgganaactgtagtagtttgtgcaagaacctctatttgtcatatgagtgttgctaggtgcactcaacattatctgttgaagtggtgcacctactagcacttgagggtgtgcacttgcactctctcattntgtaanattcattanatctgtaaataacaatctatacttttatattctaattatctatattcatataatcgaatccact

SEQ ID NO: 1632 - DNA, 404 bp, Glycine max
  unsure at all n locations
tgtgactgccgtgtcttaaacattttcagttatannatttggtttttataactctngngtccatatggtatgctntgaagaataagttagttaaaattggggatctgtatatatttntacaagttgggtagctgatcatgtattggaaactgaagctcagaaacttanaanagcaactatgttcatataaagnntttggttattttattagcctctcattggaagcatccnctgcatggttnggataatgtangtctgaaagtaaggatgctgcatatgatgatgtaatgaaagatttcctttggactatagatattnntaatttgtgcaccttttatcatttctttagaggctagatatcactacttactatgaaataggccccattgtatcacttataatta

SEQ ID NO: 1633 - DNA, 499 bp, Glycine max
  unsure at all n locations
atgacncccctttganggcacttnatgattacatttgaagtgcactatgattctaagctgcactgtgctgagcatggaacattatgagataaataaacttttttattgattgacatgaaatgacagcagacctgggatcatcggaaaggaagatggtggaaagccatgagaatgaaggtgagaattgcgcctttgaataccggtaggcggaggtgagatatttcttttattgtggcgcgctgttgcctcatccaaagaggctcttaatgaaagtgtggcacatgataactatagccactagacaatgtgcatgtgtatggcaataattgcagtgaattcttattattaggtaagtttaccctaacctcaacatatggagatttttaaatataaaaataattatctattaaatatataacatgtttattctttcttagttacttactgccttctgtttctcacaaanagatgaccgcggaaatatatgttnactaatggg

SEQ ID NO: 1634 - DNA, 606 bp, Glycine max
  unsure at all n locations
tgcgcgttaggccttgtgctcgtgttaggccttgatctagctgacaagtctcaattagtattactgaataggaaacttctggttgtagcactggtgagaattgattgaagtgaacaggttgtgcgagcacgaataaagaaaactatcgatgcctaagagaatcaagttgtatttgatgcacagtgattataaccaccacgtntctgattacgctgaatgcatgtatacttgatgcaatctttatactatgtgtctgaagcacatgtggtgtagctctgctgcatatatgatgagcaattgtggtgatatanatacatctccanagcaatcacaatcacatcatgtgcagntaactggtagtgtagtatacanatctaanagttgtatagcttcatgacatctactttctgcataantagatacataacanaatagacctcagcttcatcttgctacctttgaacatgagttcttatatatgggtgattatatcatttcagcttaaactatatgtcgttatacgtatgtgtcgaaatgactgcagggtactcttaaataatacctgatggtcatgatangancatgactgaatttcacgatcatgcn

SEQ ID NO: 1635 - DNA, 513 bp, Glycine max
  unsure at all n locations
tcactcagcgaacatgaactttgtacgaattgttctcctgcattggattcattntgaataggtgcttgaaaaatttattntcatattttattcactatgatcctttgagaaatgaaccaatctcattaaggtgaggacataataaaattgttggatactatacaagccacgtttattctacatctaatgctaaaattagtctaggatttccaaatttttgtagccaanaaggagacatgttntgaaagtntaatcagtagtgcanaaattgagagctaccanaacttataagttgagttttggtggccgtacttttctagagtctttgtatcgctggaatngtatagcctttcaacacntccaatgtaaatcttatctcagacaaatgtgctaagaaagtcgatagataatacatcagattagagttactacctgattatntagattatanaacctgtattaaatntatcatatcatataatgctaatgaaaaaattttatatattaatattt

SEQ ID NO: 1636 - DNA, 603 bp, Glycine max
  unsure at all n locations
ngtgatgacnnaccgatnangtgcactatgtgactcagctctgcgtgtcagagatatctgtagagagaatggtccaagtgccagatagcnttgttgtgcgaatactgactgacaactgatctcgattaggccacttcctgatagcatgatatgatatctgtgagagacctgcacgatctatatgttggagagacatccccactcctcgactctcatacattcatggttcttatactgcacttgttgatacgaagctgcacacatatggagacgtacaacgatagtggtattccttggtgtacttgatgttatacctctatctcattcatgaagtggatgcgacgatgcgccatcntgatgtgatatgcatgttatgcatgaacggtagaacatgcttcccatgatgtcaataagcgtctgcccgatctctatctagtatgcgagcgtagcaccgcatacacataggacatggccagatgcgcttcgatgcacgtgttgacgagtctgtgatatagctcacggatgaccgtgcgaactgacatatatgtgacatacgtggtgaggcacattaagacctctctatgtgcatgtgacataaactcg

SEQ ID NO: 1637 - DNA, 349 bp, Glycine max
  unsure at all n locations
tcttcagaaacaagtcacttgaagaaatgtgactntngganatgtatntttcgaaattattcactggtaatcaattaccattaaggtgtaatcgatgacacatcaacagatgtgactcttcattntgaattntgaanatttaaacgtttagaggctctggtaatcgattacaaatattgtgtaatcgattacacaagtttanaatgatntganaatgtntaaacccaagttgtgactctngaaatttganatctaacattntanagacactggtaatcgatacatgaatatggaattgatacagctctgtagtcagttttgaaataatgtggtactggaatcgatactg

SEQ ID NO: 1638 - DNA, 368 bp, Glycine max
  unsure at all n locations
gtgccttatgaatcctcccgtgcttatgccaccagtacctggaatgcctctcattntgtacatgacaatcttagacgagtcaatggggtgtatngctgggcaacatgacgaatccgggaagagagagcgcgcctgttactacctaagtaagaagttcacgacctgtgagatgagatactccttgctcgaaagaacgtgttgtgctctagtgtgggcatcccatcgcctaaggcagtacatgctgagctatactacctcgttgatatccaagatggacccggntaagtacatctttgagaagccagctctcacgggacgaatcgcccggtggcaagtcctgctatgcaagtntgatatantctacgtca

SEQ ID NO: 1639 - DNA, 312 bp, Glycine max
  unsure at all n locations
acagggcagagggcagaaactctgcccanaacacanaccaataccacaactttgtcttactcaattacctcagcaacattctcttcgttccaattcgttcaccgttggaatcgactcgaaactttactggagatccctagtacataagtctacattntgaccgttgggatcttctagganacgtccagaacccaatatatacaacccttttcacaaccagcaatgcataagcattntctgcaccaacacanaattctgctgcacactttaacagcanaattctgcatagaagtgcagaatttcgaaatcact

SEQ ID NO: 1640 - DNA, 208 bp, Glycine max
  unsure at all n locations
gcgctatccgcagactcaacagaagtcagtggggaaagagatcagactatgtgcacgaatcttatacccagtgtgttattgataggaccaatagctctggcctaccctaccgcttacctagatacctatcgtncaccatcccaccatcattcttgcctatcccctttgacactaaggaagagtttcatgaacagttaaccaaagaaag

SEQ ID NO: 1641 - DNA, 528 bp, Glycine max
  unsure at all n locations
aagttctaggagagcattcatctgtagatcaacactgtctctattattccatcttctattacttgactagtacatgtaaggcacttagcttcaacaatagccgcacactattatatctganagttactactctatctctacttttaagacctgagtatagcagctcttatttacctgttcatgacaagttctgtgtggctgtatctatcttaccactcttatcatcctgcaacaatctacctcanatatgtgacagaattgctctgaaccataatgctcttctacgacctaatgaaagtacatggagatataacttacacgcttncgtcagctcatcaataataatacaaagactcatatggggcanggatcatattcataacangcagcttttgctagtgctattcatcatctgacgcatcattgcaatctgcgtattcgattcaagatatgacatcatacaattaatgtcttcccgtgtgtatatactccagtactggnacactatattctctgtctatatgcttn

SEQ ID NO: 1642 - DNA, 262 bp, Glycine max
  unsure at all n locations
tctatcaatagacctccaatctntaatggagagggttaccactactgganaacccgaatgcannattttatcgaggcaatagatctaaatatctgggaagccatnganatanggccttatatacccaccacagtaganagagtttcaatagatggtagttcatcaagtgaaagcataaccatagaanaacctagagatagatggtctgaagaggatagannacgagtacaatacaacctannagcccaaaacataataacat

SEQ ID NO: 1643 - DNA, 561 bp, Glycine max
  unsure at all n locations
catanggagccatgccaatggtagagtggagactggtattataagtgaactctatcaatggaagaaaactactccagctatccttctgctctagacacatgctcttaananaganctncaacgaatgaatggtccgttcaggttggccatcactctgacgatggcaagctgaacttagtctaagcttggttccaacgctctgttcaagctcttccanaatctagaggtagatctangatctttgtcagatactatgctagatggcacaccatgtaacttgacaacctcacttatatacaaagtggtcaacttctccaaganaatctgatattaatgggaatgaagcgagttgacttagtcaatctgtcaacaataacccagatagaatctaaacctctangngttctagggtgtcttaccacannaatcatgganatactgtccgacttncactgnggtatctctaaggggtgtacntccgttanngctctgatgtctatctaagcttctgaagacangcatgatacacaactactaactcttcttatagtggccacaacn

SEQ ID NO: 1644 - DNA, 583 bp, Glycine max
  unsure at all n locations
attgatcgccatctattangtgcactatgaatactaagcttgcacactcgcncaggcgagccaagagctggtccagctccaatatttccgcttcagtgaaaaactcatatctcatactcaagatgctatatatatagcccaacggttataatgtggaaaagtgtcttacgaacctncagagaaaattgaagacgatccaacggttaacgaatccgagaccgcaattttactgaaatagggttaggtaaaaatctgaaatatcataatttcaacttaactcaacanaattccacataactcaacatccacatcaagaaattcacacatgacttattcanaccatacctcaactcattcaagtcaaccatatagtcaaataacacaatanataccantaaacatcgattattantagtaatatntcagggtgtacagaggccaccaccctacangacaggacacctctatatcncgctnaatactctttgctgaccacaaacaggatactnngtattngttgtagaagggatcactgataactacaccttaactctgggactcaaatctcatagaggttatgtcg

SEQ ID NO: 1645 - DNA, 611 bp, Glycine max
  unsure at all n locations
ttatgacgacgctataggaccttgagactcacgctgtgtagtattanattaaggacaagatntntgaatgatctccatgatatcatatctattgaatgaactattaagaagcacgtcacatagaaagtgtgatggtgacatcatgctctattataacgtgaaccanatttccctagctctagcattcacctaattcgcttatcttgatcttcgactctcttttgaactactcgtngtctttctgcctcgtgagctgagttgaatgacatatatgtacaataaccatgatcaaactaagcaaaaattgatgttgctcaagcttctatgcagaacaagtaactaaccaatactggttacatactatcatcgatatggaagaaacaatggctaattaatcagaaaccgcattgtacatatagactaccttgccatgtaccaattaactanggctcgttgttatctcagctccaagtacataagtgtctcgtaaatgagcacatagataaggagtgatcacctatgattatcccaatatgctcatgcctaactacaagtgtgtaaagacacatgacacatcatatgccttaatgatctgcaagtcgatccntgcg

SEQ ID NO: 1646 - DNA, 396 bp, Glycine max
  unsure at all n locations
aggctttactagcttatctgtcatgtcgctattcgtctcttatattacaatagcctttgcctgcttagtattgcaattggtgtgttgctatcttcgacattattttacgcggttgaaggaattagaatttacaactctgaagcagtaaaaacaataatataattggtaatactctacgacagttaaatactaaatataaatatattatttaaaaatataaaaattataattattgaataaatgaagaaatataaaaatagaagtaaagtataattttactatcaaaataaataactaatgctatatgacaacaataaccttgaaggatgtattatgagggcgaggctgcaacatatggtntctatatatgtctctatttattgtaaaacacacact

SEQ ID NO: 1647 - DNA, 304 bp, Glycine max
  unsure at all n locations
tatctatacanattgatacataccaatacccattaacatcacaatcttattataatgtgactataataataaagccatagccaaaagaattaatgagaaactctgatacctcaagtacaacaacacatgactatgaccatggcacaaaatcgaaactagaagtctacacanaactagtccctgcacgaccatggtgcaacaaatagtgcgctatctgatctctggcttgctctgcagcattagaagcgaacgtattctccgccaccatctcatcatcgaagatctcatacttccagtgaggatc

SEQ ID NO: 1648 - DNA, 622 bp, Glycine max
  unsure at all n locations
cttatgactccctttgangtgacctatgatgctaaccttatactncttatggtgagagaatgttagaacacgcaaggtanagagtgtgtatttgtgatntctaattgacttgtgactttcggtttcttggtttgananatcattnctaagtgtgtttcatcttgctaatcttacgtcttgcaacagagccgtgacaacccatttggggtaaaagctgtgagaagaacgcctgccacaagtacttggacccagaggatagttgccatgaaaggcaactaagcttgagagaagccagtggaatcagtaaaatggttcacgcacaacannacataaatcattgggacctggaatcgtgtgcttgtgctaaagaatgcttctgtaatgtgtgtcttccatacatatctagataccaacattctcttttccacactggatgctgagagtactctacactactcaagactatgcattgtgatgttgatgtagntaataactgatatactggtccaatcttgtatcttgatcttataacatcataagagaaataatggttagaatgtcngcctactangactacaatattttataagaaacgtaaatgccctaagatcgcgcgcttccn

SEQ ID NO: 1649 - DNA, 586 bp, Glycine max
  unsure at all n locations
cgcccactgtgttgancccctttnagngacctaaatgatgacagtgcacgtnctccnnnantatngagngnnncgaacgctctacgatctattttcgttgctggtcgnggaccacacttgtattattgattggtattcgaattgtaatcgcatcgtatagaaacttgatgtccttatctacacattgatggttctatagatcttgtggcgcttaagcgagggtactttgttcttanctgcaacacagttgcagtgaancatatggttgctgattctacggcttangcataactgaatccacgcttacacgtggattgcccatccttatgcatcagaaccngaaagtatctttggagtccacggattaacttatattgtatactatatggcatatgagagcttcacacgtttcagcttctatgaattcacttttaanattgtactgttacatgttgaagcattctcattcattgtgctggcctccggattagtacaagatccaatcttcgaaagacagctcaactttcgtacctctacttaaatgcaaagtgtcaatcacctccatgagaccgcgcgtctacgcccg

SEQ ID NO: 1650 - DNA, 662 bp, Glycine max
  unsure at all n locations
atgannnccgnntgnangngcncnnnattgactcccgctgtnangtgccactatagantactcaagctagggtgatggtgcgcgtactgatgngtaccatgaggtgttagctgaggtctgatccacgtgggtggtgaagagacagcatgggcatctccttcctttcgttttgcccgtagtgccccgattctttaggcgttcacgatcgtggaagaaacgtaatcaaactttcctctcttcaatccaaactcgattctattcccggcacacaccagatgcgcagagctggacggcatgtaacccactagcttctcatagtagaacactggcagagtgtctaccatcatggtgatcatctctctctcaaccatgggaggagctacttngtgccgcaaaatcctccatcgctgcgcatattctataaaggtttcaccctctttcttatacatattactgcagtgagtacggtcaggagccatatcagaaatgtactgatactggcttangaangcgggtatcagaatctctcacgtacggatatgggaagcttcanattagagtacacactaccgcactcctgccagtatctgaagaatgatcacagctttatcttagatgacgccatctacagagacatatgaatggtntgtgacagcgtcctn

SEQ ID NO: 1651 - DNA, 568 bp, Glycine max
  unsure at all n locations
nntatctacantntanaggtatagatctttattngtatatataataatatgggttttctttagnattcttaacataaatagaataaaatatgggagctactcataaatctatataggatgagctaaaattaatggctagtaatatctatgtttttcaagacactcaattctaaataanaattatacataagtgacaattatagaataaaagaaatagtactaatatagcccttttcttttgctttntctacttcatctcaggagaactctcgagtcagtctaaactccacaatgtcctttggttctactatgataacactcggaaatangagtaataactaaatgcacttaactcactctgggactattagtggctcacataatgtatttacaaacataantcacttncgtattacctgcactgagtcttgtgggatgaaaatcactaactgagtcttaacaccaaggaagttctataactcttgatatcctttgtggacccaagtattaagttccatggttattatggaagaaccgaaatcaaagtcttttgttatatttattttgg

SEQ ID NO: 1652 - DNA, 569 bp, Glycine max
  unsure at all n locations
ntctttccatcacgatcacagggagcatagacattgacantcatcatcctctgtatattactaatacatgtcctttcaagcattanaaaacttctactctttctctctcctatccacctcanaaatggagttattccacanacataataggccaccagcagcctgcacagaaagaacataatcctaatgggcagtcgagtccccccaaatggcctggcanatactcttattanatttctccctttttggttcttggagacagacaangtccactcttgtgctgttacaatgaacaacanattgaangnnnnncnnnnnnnncnnnnnnnnnnnnnnnnnnnnnnnnnnnnngnnnngnnntnnnantnnnnnagncnnnnanngnnnnncnnnnnnnnnnncntnnnnnnnnnnnnntnnnnnnnnnnnnnccnctnntnncnntcnncctcnnnncnccnnncncnnccccccccccnnncncncccncctcccncctcccctcttttctcttnntccctnnntctcccttnttcctcctctnctctctccttcttcctcctctcccc

SEQ ID NO: 1653 - DNA, 587 bp, Glycine max
  unsure at all n locations
gattgaaacccgcttgangtgcactatagtgactcacgcttgagatgncgaagtngtgaagggngannacttctgcttatatcgttgaccacactattgtacctggagatatgtcgtggtggtcaagagaccttggtgacgtcaagtggtgtgctatcgctcacaaccaagctagaccaatcccgacccaacccgggcatagtcggtcagtgagaacctgtgatgtacctaaacaggcgagctccttgcagtcaacagatattatgaacatagaccatcaagcacggaggctagtggtggctgccagctcgtgaatttgtgaatatgtggattatggcctcttgtaatcgattacacaggtgtgtaatcgatacgacgctaatatgaaacaggangctagatgctctggaatcgataccangggagtatcgataccagttaaaacaagtcngaactgnggagctctgtatcatacacctgttatcataccaagaaggtatgtatcatccagctggatcataccgtgtttctatcagtctagtgtatcagtagcttggatatacaggggatcttcccaatcacctagt

SEQ ID NO: 1654 - DNA, 403 bp, Glycine max
  unsure at all n locations
gctacagattgnngaaaagaagaatacaatgtagattaattccattacatattgctctttntaatgtttctattgttctcttttgtgaatntatgctntccaatgtccatggctagctaaacccctgagttagggttacctatctatgaatcctaattctcttatttcaataaaagtcccattatttctcaattatattattgtgttgtgtatatctctatttgggatngatcaccctanaacctgaattgattaattgttatgatcgacanacttaaattaatcgacctatgaaataattggattcctaggatntgcatgaactaacttatccccaagttactaatcttatagtaagtgtaataatctctggctanacttctttaattaatcctatgaacat

SEQ ID NO: 1655 - DNA, 397 bp, Glycine max
  unsure at all n locations
tctcctcatgtcgattcaatctcatcaattccatatcatgttcctataactntccagacagagtagcaagagacatgttagaaagatctcttgattcagtaatgggtgctaccttaggttgccattccatgcttaagcaactcanaactntattgataagaatcttcatttggaaatattttcctaaggatgcaagatgattaattatgtgtgtgaatctcttttgcatgtcctgtatggtttcattangattcattctaaataattcatattcatgagttaaagtatgtgtcctagacctttntcacatctgtggtccttcatgggttacctataaggtatcccacatatcttttgcattttgcacattgacaccccanagtatcatccattcctg

SEQ ID NO: 1656 - DNA, 320 bp, Glycine max
  unsure at all n locations
acacgctgcgtgcctttaaacactgtcatgcatataacctaaatgtcatgtatgcctcttgtgtatgattatntgaggatattgccatgctgtgtaaatncntctggtgcgcttttgcgcttctgcatcatggcgtcacacatgcgttgtatgtgggtctcgtcttttgtcatgggaagtcggaagatccatatcgtctntntaactgcacacatanggcactgcgccctcaatgcgcaagtaaggagagatgatcnttcgggctctcgtgttcataaatgcattcatatcatgcattgcataaacatctcttcagcatc

SEQ ID NO: 1657 - DNA, 145 bp, Glycine max
accactgtcagcatcaatcatacttctctccatgttactgagaacttcataacaatattggagaaaaactgctcatatatctggtggaaggacaactgacacataatttttatatctctccaatatcatatacgctctctcactg

SEQ ID NO: 1658 - DNA, 155 bp, Glycine max
  unsure at all n locations
accttcctatcatttgctcttttatactattaaaatcccctacaagacaccaactttntataccactacttgcccttntcaactntaactcctnccaccctcttaacctactacctctctcacaagaagaatacatattaacgattgtgacttca

SEQ ID NO: 1659 - DNA, 192 bp, Glycine max
  unsure at all n locations
tgctgaccaccatagagacctttgttcttccatgcatcaacctggagcgattgagcaacctgaagcttatgctgcanatatatacaatagacctactcaacctcagcagcacaatcaaccacagcagantaattatgacctctccagcaacagatacaaccatggatggatgaatcaccctagcctcacatg

SEQ ID NO: 1660 - DNA, 242 bp, Glycine max
  unsure at all n locations
tcgacctgactgttcaagattctgtataacatanaagcctacaccttaagatgacttccattaaggaagacaacttcttgatccatgcaattgctatatacttaattaacaaatacgtcaacaatcatatacaaaagttatctaacagatagaagaaaaagaaataccatacttacatatcaagataaacataacattagtgaagaattgtgaacagataaatgatgccatattgaaatgag

SEQ ID NO: 1661 - DNA, 270 bp, Glycine max
  unsure at all n locations
tagcttgtgtgtgaaagaatacatgttgtcatattaaaccgtggagaatgtgaatgtatgtatacatgattatgatgatgtcttaagaagaatanacaaggctcattattcttcaagaataatacaagattgtttcatcacacaaagtcttgattgaagagttcttcaagatcaagcctcgcctcacaatgagtgctttcaagtcattcaaggcacatgtaatcgattaccaatggtttgaaagtgtgtaatcgattacacatcatatgt

SEQ ID NO: 1662 - DNA, 400 bp, Glycine max
  unsure at all n locations
gtgcctagctccttataatatatgtataatgtataacttcgttattatngcattgtcaacattgcattntctgtcatcatactngattatgaatttttcttcatccttttcttttggctatantaactttagcanctttcttatttgggtagactaaatggtgttttgcattgaaggtttgctaactctttaannagtgttctgacagatatgtattgaaaccanaatatcctcacgattcatttatcagcatgctaaaagggtagtgctttaatatcaacatacctacatatcctngtctttgcttttgctntctcatcttgantccagaaccaatgttcatatcangctagcatgagatcactaatacaaaccatatttagaaaactatacatgcata

SEQ ID NO: 1663 - DNA, 639 bp, Glycine max
  unsure at all n locations
gatgancccgctgnanggctcttatgactccatttgaangngcactatagantactcaagcctatacantnctgagaagcgctaganactctctagcatatctcttacacacattttggtaattgctaaaatgtatagcacaatattagatcttatctatgacttatcacatccttatcattattagtcaatttaaccaataacaatgtatgtatacttaagagagtatgtgctcctaatatctntcttctctctacacatattatagactacttatttatctccactaaagacactgtgtggatctctcacggatgtcaattgcanattgcattgaatatagacaattgacttgcatcttaccttataggtggtcgatactatataacgactnttctttgttcttgcctatattgnngaccatangagcagcacaactctggcaggaatgtacaatgttctacactcttctggcattgaactaatccttcttgtcatactactgatgcacagacatcaatagcataatctttgtacgtactctcagaatgtacttcangctcagcncatgacatgatatattgaantcgcgcatgatttaaacataacaagtctacactgctaatacactctctgagg

SEQ ID NO: 1664 - DNA, 541 bp, Glycine max
  unsure at all n locations
ctccgagggcatggcatgtncagtttcctganatatctanaatctcgtctatgacgatcttttctttcttgaagagtccacagggtattgtancttcacaccttcatccacagacttgtcactcctactattctttgcagtcttatgacttttcgtcctccttatcattctntcactaactatgtctttntctttatctagcgccttcaattctatattctagaccatnttctgacctctcttgtcttgattactatnggatgacttggcaactatctgctcggccagntgtgccacctggacctcaaagttcttcagtgctgactcagtgcttttgcgatctgacatgtaccttcatatactgagtcaaggctccaccagctagtagtttctggatatgtaggtcgtcgtgattgcctgttgacgccacttgtcttgtgactgatgcaggcgtgctcctgacttgtataatgacctgtgaacctggatctctgagatacttgcctgtgatccataatgatctgaggttctancgacactg

SEQ ID NO: 1665 - DNA, 589 bp, Glycine max
  unsure at all n locations
tgaccctttaggccttatgctcgctgtagccctataatctagctcacgagtaaatcngaccggttggactggatacaaagactctggcccgtggattaatttatatcatcaacaatttggcagatatgaaacagatgcctccgattatagatgaattcatgcaaacggtgtataccaagagagctaatgcttcatttattgcttaataccaaaggactgaacccaatgcctcaacgattcagaccatctcctcattgctgntctacaaatcgtggtaagctgctaccaacagattgagagaactatgtatctattatagatgaacgtcgatctgcttcatagtcngaagacacttatacacnagcgtgcattgctatgaagtgtaacgaagcangatggaacaaagtatgctgatattcacgcgatttgaagagctacgatcagttcatggactnttctctacatgctanganggtgngtctgcaacaatgatactttgatganagctgctatatctgcaccgtgtngnngttagtactgaagtgtccacacanaaggtgtttccacaaaggctatacaacgtgaccnn

SEQ ID NO: 1666 - DNA, 462 bp, Glycine max
  unsure at all n locations
gtgcaccttttngctntttgtcccttgagtcacttgatctagctgccagtgtaccttgctgctgatcatatgagataaagtcgtaccaacaaatgaactaattgtattaattgaatatgagatacttaaacgttattgcctataatgtgcaaactgattcatgcggcaacacgtaattgacttaagacatgtcagctatgtcatgtgaattctactctggaatcatgaattcttgggctacatatacatgacttaatgtagcgaaatgaaacaatggaagaatctatgatgtctgttgctgaatagatgaggacatgtgcgaaatatatgtacacaacgggtgtgcaaattggggaaaactcttactagtttactttgcgttaagtacatgagacgagctttgtgtgacaatagtttgatatgcatgcatgtttacactgcactttatgataatcaattccn

SEQ ID NO: 1667 - DNA, 207 bp, Glycine max
agcttcgatcttaaatttcgagcttcacgatatattacgcgactcactcggacttacgagtgacaagttatttatcgtagaattcgctactatcttctattgtaaatatccagcgtattgatatattacgggactccatcggacttccgagtgaaatgttattgtcgtgcaaaattgctaccagcttcggtatttaatctctagcga

SEQ ID NO: 1668 - DNA, 457 bp, Glycine max
  unsure at all n locations
tactcaagcttcgttnccagagcatctcttatttaaagcattcagcgttgtcttcgtgttgcttacgaaaaacgccatttcttctcctttctttcttacaagccacttctaacatcccaagcactttctccatcacccacaaccaccattagccaccaccaactatcgttgttctccattgaaaccccacaccgagaggaaccctctcaccgaagcggaatcttctaactcggcttgcgatttcggtagagaacgaaaccctaatctgacctctcgttttttttcgaggtaaacataagtctatgctcgtttcttgttagattcatcttggctttgcatcttttctgactttggaaccgccattgtatgtcttatgctttctttganaaaccttagagaaagagactttgctagtgtatcctttcatgaaatgcatgttattttacgtacctacact

SEQ ID NO: 1669 - DNA, 279 bp, Glycine max
  unsure at all n locations
cgctgcatgctntctactttgagtagattgagatgaattcatcgctatctcatggactcctctaaggacaatagcattatttcttgcactgaatagatgggagctggaagtcatcattctaatcaaatgcctagcctcagtaggggtcatatcaacaagagcatccccattggcagcatcaaacatactagtctccatgttgctaagtccctcatagaaaattaaagatggagatgcttaaaaatatggtggngaggacaacttgcacacaatttcttg

SEQ ID NO: 1670 - DNA, 470 bp, Glycine max
  unsure at all n locations
tgctggtacatacgacatcctcacggatcagtaccaagtccttgctctcttgcaattctgtgtaaaaggacacaatatagtaaggagccgcttgtgttcccctggccttgtaatcttcaagacctgtagaaaccatgtgtggcgtctggactgcaagaaaaaaacgaatacgtattgtgagactacgatggaagtgttgaaaaagaaaacactcggaataaataaatcattctttacatgtctttttaataatatttcacgttctgtaagtagaaaatttgttaagaggaagcatgtccataactatgtgcagggagagattagaattcgatttcttgataggtaaggtatatccaaagggtgtcaacagtagtttatatgaatctagaaactgtccaggacctagtggcaaatattaacatctttntatatatgtaactaanactgcatctctttctccaggctcggga

SEQ ID NO: 1671 - DNA, 391 bp, Glycine max
attttagtaatgacccactaacctagagaaaaataaataaatgccattaacctagggaattaatactaactaaatggctgagtgtaactgaaatcgttggcaaccaaaagtcacccccaacagcctacaagtcagtcaccatttggtctcccaaaaggctgatgcctacgttgccaattgggcccttattacaacttgaactaaagccctcttagttgattaacccaaaacatatttttggtcacccaactttacaaggattgggccattatttagacaaactaaacactctaaaattgaaataaagtggtgtcatttagtcctccatttgcgccatgatacaactcaaaccttggactttctccttgaacttggcttgattcaaatatat

SEQ ID NO: 1672 - DNA, 437 bp, Glycine max
  unsure at all n locations
acgagcgtctcgatatactacgggacataatcggacatccgggtaaaaagttattgttatttgaatttgctcataggttctgttttcaattacgatcgcctcaatatattatgggattcattcggacatccgagtaaaaatttattgccatttgaatttgctacgagcttccgatntcaattacgagcgtcttgatatacaacgaaaaacaatccgacatccgagtaaaaagttattgtcgttagaatatgcttagagcttctgttttcaattacgagcgtctcgatatattacgggactcaatccgacatccgagtaaaaagttattgtcatttgaatttgctcatagcttctgtnttcaattacgatcgcctcgatatatcatgggattcattcggacatccgagttaaaatttattgcctgttgagtttgctac

SEQ ID NO: 1673 - DNA, 451 bp, Glycine max
agctatgaccgattctcaacatcatgaaaattatgcagtgcatgtgagctgatgtagaatatactttgatattgatggtgtttagctgtacataaaaatataatgtatggactagttaatttaagcacattacaccctttattgactccgtggtactcgcgagaatacacaagtatcacattccttgagagttgagaccgctgactcaaagccagttgtaactgtgaggccaagaaacttttgagcaaatcctgtaggtgaaaagataaagaaagatggtttgtgtacaatattatgcgaacacaaaggattctgtactataaagatggttgaaaagatgaatacatatgtgatatgtctatgttgcgagccttctctatatgctatcttctatgctatacaacccgaataattaatgatggaataaaacagattaatgtactgttaatga

SEQ ID NO: 1674 - DNA, 444 bp, Glycine max
  unsure at all n locations
gagaatcaagtcgtccaagcattgatgctgaacacttccacatatctcgctttccaaataaaccagtagacaatggaaaaacgcactccttcgttggatgttggtttattttgaaggaaaatacttctcatatttccattatctctttcatccaacttttacctttttttttttcatttatctatttctttatttgttatcacatcttctctacctttttttccctcatatatcccatcgatttttttttctctctaccttctttttcttccttaccttgnaatctctatttatttctttctaatccacccaaaatgagatatatgaatatgatcataactctaattcaaattggacattgcaaactcaaatataattaaactcgactattgcttaaccctaccattatagagtcgntaactttgtacgttacatttntatgac

SEQ ID NO: 1675 - DNA, 382 bp, Glycine max
  unsure at all n locations
agcttggagcttggagttgcttgctttgaggaagactaatatagctggtattttccaatgtatgggatttttatttatgtttatgtatctctttaaggttttgtaagacacacaagtgtcaaaagctttgtatttgtttgcttatgtaatataagtttatattttaattttggtgtagttaaattatgatgtacttatatactaagttttataatttagtaagataatgaaaccacattcaaatctccaactcatcacacgtgagttccacatcaagtataaaaatgatctaattgagctctttttgngagaaaaaaaacacaaaccatataggtatcactttaaagctttagtctcagtatcagtaccaaaattaagttag

SEQ ID NO: 1676 - DNA, 156 bp, Glycine max
  unsure at all n locations
tgtttcctgcataattgggtattttgtgtcattntactctcaattntgagtccaatttgggagaataagagacctgagantttagtttagaaaatcagatgacattgttgatgatgatttgtgatcatatttgaaattgcagttacaagaaaatta

SEQ ID NO: 1677 - DNA, 346 bp, Glycine max
agcgttatgatgaatcaacaatgattcagaggtgttttgatgataacaatgatgacaacaaaagatgatgaacaaaaagctcaagtgaatcaaagaacatccatctcaagatcaagattcaagactcatgaagaaagcctacaaacaagaatcaagattcaagatctcaagaatcaagatcaagattcaagacttaagagattcaagatctcaagatcaagattcaagactcaggattcaagaatgaagagaaaactcaatcaagataagtattaaaaaggttttcaaaactttgaatagcacattagtttttgacaaaacctttaccacagaggttttactctct

SEQ ID NO: 1678 - DNA, 436 bp, Glycine max
  unsure at all n locations
tgcagcaaattctaacgacagataactttcactcggaagttcgattgagtcccgtaatatatcgacacgctcgaaatttaaaaccgaagctcatagcaaattcgaacgacaataacttttcattcggaagtctgattgagtcccataacatatcgagacgctcaaaatagaaaacagaagctcgttgcaaattcgaacgacaataacgttttactcggatgtccgattgagccccgtaatatatagagacgctcgaaatttanaaccgaagctcgcagcanattctaacgacaataacttttcactcggaagtccgattgagtcctgtaatatatcgagacgctcgaaatttaaaaccgaggctcgtagcaaatacgaacgacaataacttttaactcggaagtacgaatgagtcccgttacatattgagacgctc

SEQ ID NO: 1679 - DNA, 299 bp, Glycine max
aacatccaggtaattccacattcaatcatcatggactatttataccaagcatcactggggacaggcacaatactctgtgcaaaacacaactgagaatcgcagcttttcatatacaactaccccataaacattttcttggttccaattccataaccgttggatcaactcgaaaattgtactggaattctctagtacataagtccacattttgaccgtagggatctgctagcaaatgtccagaacccgatatgcactacccttttcacaattagccatacacaagcatgtttctgcactta

SEQ ID NO: 1680 - DNA, 346 bp, Glycine max
agcttagctcaaccttggctagcttagcggaccaaatcatccttagatgcaagggttgggcgcttagcgcttaagactcgtagcttatcgcatgaatagaactgcgcttagcgcgaggcttgcgcttatcgaaaggacttattttttcaaaaaatattttctaagttatttttcagtcctttttccatgaaattgaaacccttatgttaagcattcaaaaattggctgatatactcctatgtacagattacatagcaagttccaaatgatcaaatgcatgagaaaccaaaaataacacacattgaaactatgttgcctcccacggagtgcttctttaacgtcatta

SEQ ID NO: 1681 - DNA, 357 bp, Glycine max
  unsure at all n locations
agctntataaaacagatatacatattccctttttctattctttttaaaaaaatgaaaggctatatatagagagctagcgggtgctatacgagtccaacccagctttaaaatcaaagtacattaataccttctatctatctatttccccaacaaaatttcaatgtgtctatatatgcaattatacattcagcaatgatattgagttacaaagcatatacaaaaggatacaaagatgtcattgaagctgtgactctcacgtgaaacaaagtatagagaggtttccttgtttaattttttatcgaatgaaatggctgctgtgaacgaacggctaaatggttatttggaggccatattgga

SEQ ID NO: 1682 - DNA, 445 bp, Glycine max
  unsure at all n locations
taatgccgacttaatccttggagatgctctaatgtccgactttcttgtttgaacatggattgcacaacgcttcttgaagcctgagtatagaagacgttctggttctccaatttagtcattggcgcagtanaggaaatgtgattaacgattgtcacgtgtctattttgggtctgtaaaaaagttggatatccncaaacgtgcatcgtatgtgtactaagtaatgtgctatagaaataacgtgccacagaagtactcacattatgtttaacgtatctcaattaatggaggagtaaaataggaatcattctacacacgtttacggatgctatcanagttttttttttatatatattttcaggaacctgaatgacactgaattatcatttgacgtgtcagagagactatttattctaacattaatattaatgttacactctctactatc

SEQ ID NO: 1683 - DNA, 420 bp, Glycine max
  unsure at all n locations
agcttcttaagcaagtntccaccagattcttacctcaatacatcattgcactaaaaaaagaaagtagcattgtgtatttatcgctatatctttcgtaaaagttttaaaatttttggtctatgtatatactatttatttgttctaacaagttagtatttggagcccaaaaaattatagtaccatttagtgatcttagaggtcaagaaaggaaattagcataatataattcaagcaacataatttgagggaaaaaaggttgagaaaataagtgaagcaagaattagcaatagataagttgcaaccttggatactaggtntggtatgaattgggcacaatagtatgaatcattatatatattcattggtcactttgctaagggtcatgaatttctttctatacccaacataatttcttctaca

SEQ ID NO: 1684 - DNA, 468 bp, Glycine max
  unsure at all n locations
cgtgtgtatgcactggtcgttcattgcccanaaaaagtatatatgagaccctacatgatctcatttttcttatagtatctttcttaaagagaggttaatttattttttcttaaaagtacttccatattaatatcacacatgtatctataattacttatctagttatcatcttatgacacaaatccaatgtttaatgtaaaatactgaagaacacaaagggaaggtgatgagttgaggctgaggtcccctctccaactaaagtgatgaggtattttaccacagaaaatctcacctgtcgatcaccagtcctaattcttttgattattnggaaaaatggtagggtcatgggagaggggtaccacaggtttcactttcacgtgaattggtgttccaaaatgcaattcagtgttgaagggataaaaaactgaatattaataactaaataatggtgaaaacaacaaaattagc

SEQ ID NO: 1685 - DNA, 434 bp, Glycine max
gcaagcttacagaaattaaagtcttattaagtttagtatgaccactctaaccatccaacgatagacactgtcataccaattaagtaagcgcgtagggcaatagtgaatgaataaagacatacgaaacttcatagaaattaaaactctctttaagtttcgaagagatagtatggtcatagttaaaaaaaagaagaagatatgaagcttcacagaaacgctataagcttaagcctgtataagttagcttggttgattagaatggagacccaacactcctccatctacaatcatacaaacctttattctaagttctgatggctgtgcgatcattctcctacgatgtgttcctcagcttccgaggggaagatactcgttatggtttcactggctatctctacaatgtcctccgggaaagggaaattgacaccttcatt

SEQ ID NO: 1686 - DNA, 222 bp, Glycine max
tgtcagaatctggcatatatatatcaacatgaccctttttaattaaataaatatattatatttaataaaaagcccttagttgtctctgcttaattatttcctttatattgtaatctatctccaaaaaagcccttttaattcctaaatcatatccttcactgaactgctctaacatcaatgagtaaacaatcctcgatcactgcttgccctctttctactttt

SEQ ID NO: 1687 - DNA, 318 bp, Glycine max
  unsure at all n locations
agcttcacaacatccaggtaattccacattcaatcatcatggactaacaaaaccaagcaaaacagggcaaaggcagaaaactctgcccaaaacacaactcagaatcacagcttttcacatacaaataccccagtaacatttccttcgttccaattcgttaaccgttggatcaactcgaaaattgtactggaattctctagtacataagtctacattttgaccggtgggatctgctagcaaatgtccagaaccccatatgtactacccttttcacaattagccatacacaagcatttttctgcacttatacanaattct

SEQ ID NO: 1688 - DNA, 445 bp, Glycine max
  unsure at all n locations
gagctcacacaacatccagtgaagtacacattctatcatcatggactaacaaaaccgagcataacagggcaaaggcagaaaactctgcccaaaacacaactcagaatcacagcttttcacatacaaataccccagtaacatttccttcgttccaattcgttaaccgttggatcaactcgaaaatgggactggaactctctagtacataagtctacatttagaccgatgggatctgctagcaaatgtgcagaaccccatatgactaccctttgcacaattagccatacaccaagcattttctgcacttatacaaaattctgctgcacatttccaacaacanaattctgcataaagtgcagatttcgaagaccactctgtccctcatccaaatttgcccaaattgaatcctacaagtcccaaatcatgtatgaatcatgtctaaacc

SEQ ID NO: 1689 - DNA, 457 bp, Glycine max
  unsure at all n locations
ctaagcttctanaagacttgtgtaatcgattaagaatagatggtaatcaattaaaacaaagagttatgcactgaagatgtttcttaacttagaaactatcttcctacttctatatggtgatgcatgatgtacacatagatagattaagactaaaaggcaacaatcaatacaaatgtcactcagtaaggagttgggcatgtaaaaagacaaaactcttcatagcttgatcttcatgttgctccccttatctctaacaatctcctcattttcaactttgaagatgccaaactctaatttccattgagtgcatttggagaggcttgagagtagagacttatcttatgatagacctgaaaatgactaaacactatggtgaagagaagtgttaaatcatatcatcatcataatagagtggtcaaataaatgagtcaaactgtatgtataaatgcaatacttc

SEQ ID NO: 1690 - DNA, 402 bp, Glycine max
  unsure at all n locations
agctcggcctcaacttctgatgtaaccatgtctcttccattcgcatggaactctctatatgacatgctcccatcctcactggactccatcaatcatctccctccaacctgcacacacacacaccccataaccaccctttccacatatgttccaatttttttttgtaaccctttcatgcttcgatgccattgcacactcgtaattcacatttcagaanaggctaaacaaaaactcatacacacatgttcaaaatcttcagaatcacaaagaagaacacagttccccatttcacacggcattgctcaaaactgatcctagcaatgccttatggcttataggattcaactccctgcaaaaactcgttntggtgaaatggggttccatgataacagaaaaatcatc

SEQ ID NO: 1691 - DNA, 433 bp, Glycine max
  unsure at all n locations
tcggttagagaaaatctacaacctcaagagtaccccgtggcattcaacactcggtgaaacttgaaaatctcactctctggggtgtgccaactgaagttaagcagagcattgatcccaatggaggacaagagcattggatgatccaacatgtgcctagcgttgctattgctgattcgtttatggtccagagattagaagaatttctagaggaggaaaggatgaagatattangaattagaagatatgttctttcctcttggtaatatttctatagattgataattttgtcccttattcttttttcaattataaaaatgaaactgtttcctaattactaatctgatttctttacttttgtctcccttccattacttttctttgtctacatatctcccgtgtctcatagaagttagagataaaatngtcttatagc

SEQ ID NO: 1692 - DNA, 400 bp, Glycine max
  unsure at all n locations
agcttgaagganaacttaatgccttggtcaacctagtaacccagcttgccatgaataagaaatctacgcttgttgcaagagtctgtggtctatgttcttctgcagatcaccatacaaatctgggtccttctttgtagcaatctggagtcaatgagcaacctgaagcttatgctgcaaacatttataatagacctcctcagtagcaaaaccaataacaacagaataattatgacctttcaagtaatagatacaatccaggttggaggaatcatccaaatctgagatggacaagtcctccacaaaaacaacagtctgtccctcattntcagaatgctgctggtccaagcaagccatatgttcctcctcaatacagcaataggaaccacaacagtcaccacaa

SEQ ID NO: 1693 - DNA, 480 bp, Glycine max
  unsure at all n locations
gcttctaaggcacttttctcaagaaagcttctcaaggaagctacctagtctataaatagaagcatgtgtaacacttgttgtaactttgatgaatgagagtcttgtgagacacaactcanagttcaacttctctccctttttcttccttcaatttcgtgctcccccctctctctttctctccctctttcttttcctccattgaagcaccctctccaagcttcttatccaaggctcatcttggtggtgaagctccttcttccatggcttattccctagtggatggcgcctcctctcaccttttctcctttgtcttccgctgcatctccatggtggaaaatcaccattaaaggacctcattgaagctcanagatccagcctccatagaagccccacaagcaagcttccatcacgggcggcccccatgatgtgcaaattcaaaacgagcacgctttcccgccatatggctggcctctcaactat

SEQ ID NO: 1694 - DNA, 428 bp, Glycine max
  unsure at all n locations
agcttgctcactagcttttcactttcatttgcttttgaccttgttacatcaacacactttattcttttattttcttttttttaacatacaacttgtgtgttgtgtgtgttgatgctttctctctttctttgcatcccaattagttccactcccccaaatttggggtaaatttgctttgaactatatgctctcctagaatctaaacaaggtatcaggagataattatttaagttcagggttcaatttatgacaaaatcattcagctcaaaaagggtgcaaaggatataattatcattcaaggtaagctttttggtcaaaaggcttgtgtatgtacaatcatggccttcatcatgttctcgtttatacatttcattctaaaaattagagaatcatgcanagattattactcacagctagtcgttcactca

SEQ ID NO: 1695 - DNA, 462 bp, Glycine max
  unsure at all n locations
gtagcttcaatgcaacgaaacatgcttatggctaggaatccaaaatttggttttaggattagaaaagcatgaaaatagggatttgtttgtaagaatttgggctgccccatgattggtacttcgcacctaagtaacgtgggaaatgcttttcaatggtgtgtagatatatgtgtaaatataaagggcatgaaattctttgtaaagggtgaaggaatattgaggtcccttcctaaatgaatgtatgataccacgggattcccttttgaatgcaagtatgtgcataatgttaaatatcttgccaatatgcataagtgtgagtgcaacaatgaaagtttgtatggtatatatantttgagtgtgtgtaagtagtttgtgatagcaagtgtttatgacatagttaagtgtaaattttgacgcaatgccttaagcgtgagaatgtgtgttcttttcaaaatgcatata

SEQ ID NO: 1696 - DNA, 454 bp, Glycine max
  unsure at all n locations
agcttggttcgaggtacttacccgttgaagatcgaagaacgatgaagatcgaatgaagaatgtcgaagaacggtcgaaaaccttcgcgaaattcctcacggaaaacgttacggaaacgtttcggaaccgcctcggcttacattttcttcacggaaacaatttttccaagcaaattcgaaagagagagaagtacctaaggggctgaaccctttttctcttcacttcctcccttatttatagcacaataggggaggtggttgccgtccagctcgcccaggcgagccaggttgcttcctccagaagcaacagccttctggaggaatattctggagggcccaagtgggcctgggtgctatctgcacccccattnttactaagtacacctccctctgcttttttggggattcttttccgaaagtaccgatcatacgactntcatacgatacttgtttct

SEQ ID NO: 1697 - DNA, 438 bp, Glycine max
  unsure at all n locations
tataaagagacatanaataaaggaacagagggaccgaatgtttgtgggaaagaagggtctggtgctgccttcttttggtatagtcctgcatctagatgtatccactttgatctatgaccatggtccacactctatactactccataataacaaggtcattgcttgcgaaatttgtataagatttttaatttgtaaaaatcagttcctttagaacaagagcatgattaattccgtgtaacaaattgtgttagttagtgggagaaggctntcttgttgttgatgtggttctgatttattatgatgaaataaactgcttctcctgcaccttagctaatgatagtggtaggtttattggctaaacttacgtttgtggtgcatttgagggactntggcgatgtatttgttttcccaaatacaagtataatggaggcatctatg

SEQ ID NO: 1698 - DNA, 463 bp, Glycine max
  unsure at all n locations
tagcacatcaaattatgatttcataaaaataaacgttatgaaataattttaaatttaaaagttaacataatacttataaaaaaaataaaaataatgaaacttttaaaatttagtatcaaagtgaaacaagacaaacataatggatcaaaaataatattaaatctttttatttttttattttttcacctctcactcaataataaaaatataattctattacaaatgaaaaagttatcctanaaatgtcatctcattatatacttttacgacaaaattatatttttatttatattttaattttttcacttctcatttaagcaatataaacatattttcattatatttccatcaaaagaataatttcaggatacgattaanaggcacattatatttccatcanaaagataatttcaggatacgattaanagacacccagatgaatagtgccaatagcaactccccc

SEQ ID NO: 1699 - DNA, 234 bp, Glycine max
actctcatcaatcatctttctccatcctgcgcacacacacggcggataaccaccctttccagatctgttccaattttttatagtcaccctttcatgcttcgatgccatcgcactctcgtaattcgcatttcagagcacgctagcctcaagctcgtgctcacttgtcctacatcttcagattgacatacattaactcacatcgccgtttacacagtattgctcaaagctgatcct

SEQ ID NO: 1700 - DNA, 465 bp, Glycine max
  unsure at all n locations
cgccaagacaacgcacacgtnctctnntttaggtcctttgactnttgaatatatatcatttgtccaatcagtagaatcttgggtgctttgtaaattttgcgaactctctgcttcaaccattttattttttagttcatcctacataaatacaccttataaattattatcatacatcaatatcctgaatacttcaatatcactaaacaaaactcatctccacattagttactccccctcaccccataaccttctattagaaaattgagcaaaacaaagaanaagtattgaaataaaaattaaaattcttacaattacaatagcagccttttcagtaataatgcttccatcttttcgagttcgagtgtcaatataaatttctgccctagaaggttgcacttccttagcctttgtagtctaacattagttaaaaaaatcaatcatcctatttgtattaagcaatttaat

SEQ ID NO: 1701 - DNA, 413 bp, Glycine max
agcttatgcctctacagcgccaacttcattgttaatcacctaccacaaatcttcaccccagatcttgccccaatcgttcacctcatactcgttccttgtggcaatgccaaactccgtgccaacgccacctttgactgccaggtactctcttctccaatcttatacacactcttcacctatttttatttaattctgatgacaattgcagcatgggccatatgagtgcttgctgaacacagatgacgcctgtgcaattcacatctggcctcaactcgtaagtaacaattgctgtgcctttgcccctgtctttctttctttcttttttctttattctttgattcgggatcagaacttaagaatggcttttctattattataatattatgttattattacggattattcagcatcga

SEQ ID NO: 1702 - DNA, 329 bp, Glycine max
  unsure at all n locations
tgatncaaatagggaatgagaaaaggtatagtattttttagaagtttaaatatgttgtgnttttgntattgntaaacagattgttgggctgcatgaaagttatactaaaataacattattttgttaattggtttataatgttgactggacagctgaaaaattaaaactgtggagaatgtttaaagttttaatttatatggatgaataggtggattttaatgatatatgaggtatcgattaatgatgtatagattaatcttgtttataagaatgattttaatttgggtttgaatagagtaaagacaagaagaaattttaatattttttga

SEQ ID NO: 1703 - DNA, 401 bp, Glycine max
  unsure at all n locations
agctttgatttcctttgttccgganacctttcttttctcatgtgcacccaaacccaatctccgggttcgaagacaaccttctttctccctttgttggcttgtttagcatagcttttatttttcctctcaatttgatctttgactctctcatgaagcttcttcacatagtccgcctttgcttgaccttctttatgcttaaaaacagaaacattaggcataggcaaaagatcaagaggagttagtgggttaaaaccataaacaacttcaaaaggagaacaattagtggtgctatgaatagctctattgtaagcaaattcaacatggggtaaacaagcttcccaagtttttaagttcttcctcaaaactgtcctaagcaaagatcccaaagtcctattaacaac

SEQ ID NO: 1704 - DNA, 447 bp, Glycine max
  unsure at all n locations
tccagattggtataccatgccactgctgctctggctaagctgtcttgaaagaaatgcatcaacagcttttcgttcgtagaatatgcccccatcttttggcaatacatccgaagatgaccttttggacatgtcatccctttgtatttatcaaaatctggtactttaaacttgggaggtgtcgcaatatgcccttttgcgggcgagtgaaggcgtggctcacgggtgcgctttccaaaggaagaaagatgcgcggagtcaccaccaacgtttatttgtgggaaacgtcggaaaaaccgaaggaaaccggtcgaaatgaaaattctaagttcgggagttgtatttacgtttgaggaaggtattagcacctcttacgtttgtctcataggacaacaacctattnttcagaattgtggaaattgtgttatcttaacttttagttctttttat

SEQ ID NO: 1705 - DNA, 258 bp, Glycine max
  unsure at all n locations
agcttgaatntgcatgatgttgttattgatactactacaaaaaacagttttaacatcggcttattaacattggttttgtccaaaaccgatgttaagttaaacgcggtgacatatttgtaaataaagtatccttcttaacatcggtttttccaaaaaaccgatgttaactaatgatgttaacatcggttattggaaaaccgatgttaacgtatgataatgtaacattgattttttggaaaaccgatgttaatgcatata

SEQ ID NO: 1706 - DNA, 456 bp, Glycine max
  unsure at all n locations
ntagcttctttaggaatcttctcaggaggtgatcttagttataagagggatgtgtgtagctaagctctagcttcccaaggaagttttctcacagaagcttctcaaggaagttntctcaagaaagcttctcaaggaagctaccttgtctataaatagaagcatgtgtaacacttgttcgaactttgatgaatgagagtcttgtgagacacaactcaaagttcaacttctctccttatttcttccttcaatttcatgctcccccctctctctttctctccctttttcttttcctccattgaagcatcctctccaagcttcttatccaaggctcatcttggtggtgaagctccttcttccatggcttattccctagtggatggcgcctcctctcacctcttctcctttgtcttctgctgcatctccatggtggaaaatcaacattaaaggacctcattg

SEQ ID NO: 1707 - DNA, 362 bp, Glycine max
  unsure at all n locations
agctttntgaacaacgttaaggggacatcatgaatgtgcccttcaatccaaaaacctactaaaaatgaatctgaaatccacaaataatgaaccaacaacaaatctacacaatttgcaagcaaggaaagatcacaagcctacgcatcatcactccaattaaatgtctcggcaattaaattcaaactagataacctcagcagcaacagaattcaaattcttcgaattggaaccagaaaccccatcctgtttcgaagtagtctcactctgacctaaaatctggcctttactcaagcctaatgcatccttgtcgctccaacaaggccggtacagattcctccctcttatggaatatcttccactcc

SEQ ID NO: 1708 - DNA, 391 bp, Glycine max
  unsure at all n locations
nttcccacataactcttccaatctttgatggagagaattatgatctttgggaagtgaaaatgcaatcctacatggagtctttggatttatgggatgctgtggaagaggattatgaaatatatccgctgcatgaaaatcccaccatgtcccaaattaaaaatcacaaggaaagaaagatgaagaatgcaaaggcgaggtcatgtttgttcactggtgtttcacaaatgatattcatcagaatcatgactcttaaatcacccaaagcaatttgggattatctgaaagaggaatacgctgaagatgatagaatacgaagcatgcaagtgctgaatttaaggagggaatttgagcttcaaaggatgcaagagtcagagacaatcaaagaatactc

SEQ ID NO: 1709 - DNA, 449 bp, Glycine max
  unsure at all n locations
agcttatacacggaaaatgtaattatgaaattgagatgcccgaagaaacaccatttcctagttaaccatgcattaggtaccatgttcaattattttgttttgttgttgtgtgttttttttttttgttagaaatgggtttatgatcccaacatggttggctcatggtgcctaacacatgcaactaagaatgtagtgtgaagtttcacgcttccccttttttgtttttgttttgtagaggaaaacgcaaggatgagcaaacatgaaaacaaatggtatgcaattttgcagatcaaaaagttggttgaacgcatatgcatgatgatgccatgactcatgcaaaatgtgagcctggaatatgataacggacaaatgcaggaacgatatgttcattatgatgttatgaagagatgcttatgcgatgcatgatatgaacgcattntacggacacg

SEQ ID NO: 1710 - DNA, 439 bp, Glycine max
tatgcgcacacttctttacgaacattcacttgcacaagacattcttataactaagaaaaatgcacccatatacaatcaaggcaccttcgttacctagattatttacatgtacttccaaggtgtatttgttacctacatcacacacatttcctttgctaaattcacatacatgcatactctaagcactttggctatcaaaaattgcatacgtgcacatcttggtatttctaatacctatacatacacaaacttcatgatgaatcttgactatctacacaataaagtgctacatttcatgcttttttcaagtgtttttttttactacctaaagccgcatgcaaattcaagtatattttcttttgctcactaaaattgtattcaaattaaaagggtattttgtaatgtattttctttacataacatgcaacatatttataga

SEQ ID NO: 1711 - DNA, 305 bp, Glycine max
agcttacgaccgcctgaaagacaattacacatcactatcgggaagaactttatgtacacgttttttttctaacatacatccttgtatcatgtgggcatagaatgtggttctggagcacgtacgttctattggagcacgggatcataaccacgcagcatgattttgcgaaaactctaggtgattgtcttcagctagctcttggtcacacgaactgcagcgtccatacattaaaaataacttacatgggattcttttatacagaaaaatagaagaactcatcagttctatacttagagcgttaatga

SEQ ID NO: 1712 - DNA, 478 bp, Glycine max
gacactatcaaactgaagctcgtgtccaggaggatatccatgtttctgtaacattcatcaacaatgtgatttgtgaatccagaatgtgtacaaaccttgtttcctttcccattagaactccctctgccagagcctccttggctacttcttcctcctctagaagtatagtttggaggaaaaccacttttcctataacatctgcccactgtgtgattatctccacaaacatcaagttgaacaaattgagcttatctttcattgactccgctaccacattaggcggcaccaccgactcctttccctctagcatcaaaatgtgcagcatcttattccatgagcttctttgatagagtttacagttatgccccacctttgtcgcggtttgtcggaaccaattatcatttctttcatccacaatggatctccatttacatgcctcttgtcctatgtatcttagaatattcatcataaacacata

SEQ ID NO: 1713 - DNA, 592 bp, Glycine max
  unsure at all n locations
cgctcacgtggntcgttattttggtgtnctataatatcttaccgtgcggatantcnnnnccacaaggggcgggtgggattgaaaccatgaagcccctgcgganacctgnagtcctcccgagngcatccgcgcgcatgtgacaaagttcctcgacatgctagagcccatttacacacactctctctgatgacgaagactcggcgccctgagacgctcgattaggaagatgcctatagaagctagagcttagctgcacatacctctttaatagctaagctcagcgccttgagatgagacgctcgagctgagctacgcaccccctataataggtagacgcaccgccgggacaaaagacatggggataataagagagatgggcttagtacaaagacaacgcagaatgccgcgtaagacaaggctaacacccgatactcctagagtggtcttagtgatgcgcctaggcgagagaaatcctattctaatcatgacctccaatgacggctcatctctaagccatgggtgcatatctccgtacgctgatggagacggagcgctgcctggaacctatccaactcagtggaggtgaaccagg

SEQ ID NO: 1714 - DNA, 421 bp, Glycine max
  unsure at all n locations
agatgaggaagtgttgaagggtgaaacttcctgcttttattgttgaccacagagtggtacctggagatatgtcgcggnggtcacgagaccttggggacgtcaggtggggtgctattgcccaaaaccaagcttgaccaatcccgacccaacccgggcatagtcggtcagtgagaacctgtgatgtacctaagcaggcgagctcctggcagtcaacagataataggaaaacaagaccacaaagcaaggaggcttgtggtggctggccagctgtgaattttgtgtaatatgtggattgtggcctctggtaatcgattaccaagggtgggtaatcgattacaaggcttaaaaatgaagacaggaggctaagatggtctctggtaatcgattaccacggngtgtaatcgattaccaggcttgaaaa

SEQ ID NO: 1715 - DNA, 448 bp, Glycine max
ctgcatgcttactgccatcccaaataattctcatactactatctcatacaattccctagcgcgattgctactttccccaccacaaatgccatcgaagaacacaatgtgtacatggcagattttctccaactcctcatataatgtccactggaaacgcatgatcaccaccaccacccaccaacacgcttcaccttcctactttcccctcccttccatgcaagatcttcctcgccagggttccgattcctcattcactttttctacctccaaatacattcttttccttttcctctgttttcattttaccaatattttatctcgcaggcactccaactcttccactccaagacgacgccgttgctcgaggactagctaatgctttgcccgaacacgaatccataatttaattaattattctaaagcctcgacattcctcttattttttata

SEQ ID NO: 1716 - DNA, 469 bp, Glycine max
  unsure at all n locations
cgcttctacatttatcacctttatagatggatgttcgtgatatatgaatatttatttgcttcataacaaaaataaagcattggatcccttcaaagtctttaaggctgaagttgagaaccaatgtggtaagaaaataaaaatagtgagattagatagaggtggagaatattatggcaaatatactgagaatggacaagcacctggtccttttgcaaagtttcttcaagaacataggattgttgcccggtacactatgcctggttctccaaatcaaaatggtgtggcaaaaagaaggaaccgaacattattggacacggtacggagtatgcttagcaactctgatcttcctaaatccttgtgggctgaagcactaaagacggcagtgtatatattaaactatgttccaaccaaggctgtccaaaagacaccttntgagttgtttaaaggttgaaaacaaagtttgaaacat

SEQ ID NO: 1717 - DNA, 400 bp, Glycine max
  unsure at all n locations
agcttgccacccagctcgcccagacgagcactgctgcttcttccataagcaactaccttctggaggatatttccggagggcccaagcgggcctgcttgctatatgcaccctcatttttactaaatacaccccttgcccttctttggtgattcttttttcgtaaagctacggaaacttatggatttcgcaacgatacttgttttcattctgtaacgtcacagaaccttgcggatgacatactcatcccctttttttacttacggaatgttacggaacctcactaattgtgcaacgatgcttccttttgatttccggngtgtcacggaaccttacggattgcgcatcaatacctctttttgattaacggcatgttccggaactttacaaattgcctaatgat

SEQ ID NO: 1718 - DNA, 76 bp, Glycine max
ttctctgcgactcattcatgaatcataaacacttgaaatcatagtggtttctttcattttccttttctgcctatat

SEQ ID NO: 1719 - DNA, 455 bp, Glycine max
  unsure at all n locations
tgctcaccactactagaggagaagcctttaggttgtttcatataaacctcctcttctaaatcaccattaagaaaagctattttcacatccatttgttgcaactcaaggtcaaaatgagcaactaatgccaagattatacgaagataatctttcttagatactggagaaaaagtctttgtgtaatctattccttctttntgagtaaattccttagcaacaagtcttgccatgtatctctcaatgttgcctaatgaatcccttttggtcttaaaaacccatttacatccaatggcctttgccccattaggcatctctacaaggttccaaactttgttactctgcatagaattcatctcatccttcatgacatcataccatannattgactctttacaactctnggcttgatgcaaaagttcaggatcattttcagctccatattatagcatattcta

SEQ ID NO: 1720 - DNA, 427 bp, Glycine max
  unsure at all n locations
ctctcanagccttgagactacacatatcataaacaactttctttatctcctcctcagtatatatttctccctaacatctcaatctcctcttgaaccaaaactgtaaatttacctcttaagcaaaaaggttaataatctgccacttcagtgaataaattcctatagaaagaagtcaccatttcttctaaatctatcgaattaagcacccaatagcccttttcattcaatagcctagcatataagttagattgctttcttaanagagtggtgcaatgaaagtaatgagaattcttatctccaaatttaagccacttgcaccaagacttttgaaaccacaaaacttcttggaacaatatctgctctaactccccacataaatcttnttgtagccttaaatggtacttattatccttaatccttcaacttc

SEQ ID NO: 1721 - DNA, 366 bp, Glycine max
agctttgatctaccaccatcgccgccaccattattttagttcttctcttattttaatattactagtactctgatttccagccgtgtatttggctatattattatgacatttgaacaatttagtatttctttatttgcatggtgtgtttgaacaattatgaattatgttatgtgactatgtgatttttctatatatttgatctggtcatgtttcttgcttcatgattagtttatattcttccatgattgttgtgtgaatgattagttgtattagtatgtttcatactcgttacgcactttggctttttgtgatgccaagggggagagaatagggattaaatcacgactcacatgagtaataacttaa

SEQ ID NO: 1722 - DNA, 173 bp, Glycine max
tacctcatgcactcctctaatgactatggcatcatttctggcactaaactgctgagaagtggaacccatcttctcaattaaatttctgcttcagcaggagtcatgtcttcaagggctccaccactggcagcatctatcatacttctctccataatactgagtccttcataaaa

SEQ ID NO: 1723 - DNA, 398 bp, Glycine max
  unsure at all n locations
agcttgcttgtggagcttctatggaggctggatctttgagcttcaatggggtcctttaatggtgattttccaccatggagatgcagcggaagacaaaggaaaataggtgagaggaggcgccatccattaaggaataagccatggaagaaggagcttcaccaccaagatgagccttggataagaagcttggagaagatgcttcaatggaggaaaagaaagagggagagaaagagagaggggggagcacgaaattgaaggaataaaagaggtatagaagtggaactttgaagtatgtctcacaagactctcattcatcanagttacaacaagtgttacacatgcttctatttatagactaggtagcttccttgagaagctttcttgagaaaacttccttg

SEQ ID NO: 1724 - DNA, 416 bp, Glycine max
  unsure at all n locations
ngagatgaggaagtgttgaagggtgaaactttctgctnttattgntgaccacagagtggtacctggagatatgtcgcggnggtcaggagaccttggggacgtcaggtggggtgctattgcccaaaaccaagcttgaccaatcccgacccaacccgggcatagtcggtcagtgagaacctgtgatgtacctaagcaggcgagctcctggcagtcaacagataaaaggaaaacaagaccacaaagcaaggaggcttgtggtggctggccagctgtgaattttgtgtaatatgtggattgtggcctctggtaatcgattaccaagggtgggtaatcgattacaaggcttataaatgaagacaggaggctaagatggtctctggtaatcgattaccacngcgtggaatcgattaccaggc

SEQ ID NO: 1725 - DNA, 429 bp, Glycine max
  unsure at all n locations
agctntctcaacaagcttctttgagaagctagatccttatctatccacacccctctattaactaaattaacttccttaaaaataattacggatgaaaataacgcaacaaataatcaaacatcaaacataattactaacaatatatagatatatatatcagggtgttacaaggagtgcattccttgcaagctaccttggaaagagcccattatttatcaacaatttttagattagccttggttgctttggtttttagtcttcttggaacttcagaaaggataactagtttcttagctacaagtgttgctctagccttcttaaaagcaagagatgcttgcttctgagtattgaccttccttttctgtagaacaagttgaacattatcaacatcgttatcctcagtttcacttcagtttttcaacttctaag

SEQ ID NO: 1726 - DNA, 470 bp, Glycine max
  unsure at all n locations
ntatatagacttcanagctntgatccattgagagatctcaactagccgntgtctaataggttaggtgctttacacgaggcatgttattatgcagagagagagtgtgggaccacaaacatcttctgcagtgtatcttcatagaagtacaacttgtcagtgtcgccttgtgctcaaagttgacttttagcatacaattcaaatacaacgttaatagcataggacaaaaggaataaagaatgcaagacaagacaatttgaaacttccctcttatgcactatggcacaaattgcttactgaaccatggaccttactttctgatgattatttcagaacttgagtattaagtaactattccatttcctttggactatgagccaagtgctaaagcacttgtcttcttagaactgggcactaaggcaatatcatccaatggctaatactttatctatcgtccaaaggctntctactcg

SEQ ID NO: 1727 - DNA, 457 bp, Glycine max
  unsure at all n locations
agctnggattggattggtctgacgaggatcgatgtttagtaatttaggctacaacatagaacacaaagcatgattgattagagaaatatatttatatgcattagcttgtttgttagaaagacccaacatttctacctactgctctcacttttacttaccttgcattttatagtttttagcataaaggtttagtttaaattctgtttgaaattatcaatcatacatgttctctcaacaatgcttcatttatgaacttaactcaggctaacattagttccctgtgttcaatactcagattcatccgttntaattnttaaatacttgatgatccggtgtgctttccggcaaaccgggtttcccatgaatatatgtgtacgaagaataagtggaacaaaaagtaaccgcaggggaaatccaacaaagtgtaattctcanatgatcaaagntcaaaaaatga

SEQ ID NO: 1728 - DNA, 450 bp, Glycine max
tataagaaacagaatgcctaaatcatttccaaatatgcatgtgaattaggaagcataaacaagaataaagccaaggctattgtgcaagcaatcaatggggcaaaacacaccaaaagattatgatgatggatggctcaaattcttacaaaggtaaacttatcactttcaaattgagctttcaaaactatcatgacatgtagaggaaaaacaatgatttcaaatcacaaaatgtctagagacttttattttcagaacaattacccatttcttgaacatatcctataattcaaagaaaaatatgcaaagttgtacatgcaaacagaattgacctataatattaaactagagacccaacaaaactaacaaaactaataaatttaacacaaactaactaaaaaaaattactaaacccaaaccaaagaacactctccccatacttaaacaacacat

SEQ ID NO: 1729 - DNA, 403 bp, Glycine max
  unsure at all n locations
ataataatataatatatatatcctaatgtcacatcctatcagagcgttgtgttcccgtgtcctctagcatgaggttcttcatagtcatccacctattcatctactcccccgaacacaaagttcaagatcattacaggatctaaacacaaacaacaaactaggagtgagttatcacattcctaactactagagagaaataagacaacatatagtagtcaaatacaatttacttagcatatctcacattatttcatcactgtgtcattcaaaatatacttttcaatcatcaatcacaatacacaagaatcacacactncgatcaagacataataacacatcaatttcataatatacaattagcaagcgtatgcaacagttatgctaagactcaagcctatattgc

SEQ ID NO: 1730 - DNA, 451 bp, Glycine max
  unsure at all n locations
cttgcttaactcttgattctttggcatcatcaaaataatcttggaaggcattgctttcacaaaactttatatgaaactactcctaggatttgaaggatggaacaataatagtgtgtatagtcagaattcgtagttaaagaccttgggcagctacaacactttcctgtgatggaagtgaccagaagcaggaaaggtattttcatctcccaaacgaagtacactattgatttgcttaaagaaatagggaaactaggaagcatacttacagtactatgaaatacaccattntatgaaatagtatactgaaatataaatccagctgctctaaaggtttattatcctaagcagctgttagtgctaccaaccccaaataactttagtgggatgactattatattgaagactataggtacaagaataaataattatttaactntagtgggatgatcat

SEQ ID NO: 1731 - DNA, 311 bp, Glycine max
agctatcagctagtgcaactctttcacacagtggattctatgctgaaaggaacaaagaatcaccgactaaccatgaggtccagacatgattgagcaatcctaaatgcacaccacattgttgaagatatagcctgtagaataagatgatctgaatgggggaaggaaagctcagcatccaacccttactctgaattggaaaagaaaaactatcagataggcctgctatgggtctattagaaacagaataaaattagactattaatttaaatacttgaattgtaaaaaagataatgctagatgttatgagattg

SEQ ID NO: 1732 - DNA, 462 bp, Glycine max
  unsure at all n locations
acactataaaactcagcttcttggaggctggattttcatggtgattttcagccatggtattgcaacgaaagataaaggagaagaggtgagaggaggcgccatccactagagaataagccatggaagaagaaacttcaccaccaagagagtgtcttggataagaagcttagagaggaagcttcaatggaggaagagaatgagagagagagagagagagagagagagaggcgtggaaaatgaaggagaatanggagagaagttgaactttgaagtatgtctcacaagtttctcaatcatcaaagttgtaacaagtgttacacatgtttctatttatagcctangtcactaactttgtgaatttcattttcattntatatgaatctannaggaatattccaagaatatgttaaaggcatcttagcatattccctttagatatcacaagcatggaagatgtgactc

SEQ ID NO: 1733 - DNA, 442 bp, Glycine max
  unsure at all n locations
agctattgcntacaaccttttctccccctttggcaacatcaaaaagccaaagaactcggaaatcaacacagttataacaatggagtagcaagatataagtatcagagtattaaatccaataagccaaactcataatcaagaaaataatcaaaccagaattcaaataacataaaatgtcaacaatcacaaaatatccaagaccgaaacacaagaaaaataagcaaagtacttagcataataatgtaaattctaagaaactaaaagccaaaatacacggcttataaaagataaataagcagaatctaaaatctaagaagacggaggaggtggtggaagatcaaaactctgacgaatgtatccgacatcctcttcaagctgtgtaagacgaatgtccataccggcaaagcgtgaatctaacgagtcanagcggtcaccaacatac

SEQ ID NO: 1734 - DNA, 429 bp, Glycine max
  unsure at all n locations
agctntgaatgctctattcaatggagttgacaagaatatcttcagactgatcaacacatgcacagtggccaaagatgcatgggagatcctgaaaaccactcatgaaggaacctccaaagtgaagatgtccagattgcaactattggctacaaaatttgaaaatctgaagatgaaggaggaagagtgtattcatgacttccacatgaacattcttgaaattgccaatgcttgcactgccttgggagaaagaatgacagatgaaaagctggtgagaaagatcctcagatccttgcctaagagatttgacatgaaagtcactgcaatagaggaggcccaagacatttgcaacatgagagtggatgaactcattggttcccttcaaacctttgagctangactctcggatagggctgaaaaggaggcacatga

SEQ ID NO: 1735 - DNA, 418 bp, Glycine max
  unsure at all n locations
caagagaaagaacatgtgattagaactttgactgagaatgttagtcagtttgtcagattgattgtgaaggaatgcattgatcgtatcccggtgagagtgtgatctttataatttgagagaaacgactatcatttagtactgatttttgcatgaatctctgaagtatggactgaatgcatgaaattgaggatgatgaaggccatgtttgattgtgatagccacttagccaaaaagctaaccgcgtgcttgaatgaattatcccttgcacccagtttaagctgaatgaattattgattgagtgaaccttgagcccatacagtgttatcttctactaccttgtcttaggttgtaggagagcatcatccacaggaagcttggttcaatgtaaatntgtcctatatttgggggagtaattatc

SEQ ID NO: 1736 - DNA, 436 bp, Glycine max
  unsure at all n locations
agcttctagccaaatggacttaccttgaattaattcctttgatagcccttttcagccttgtgtccctttccttgttttgaagctcactacaaaccttaagtgaaaaaccatgatattaccatatccttaaggaattttggagctttggaattgttttgggaataagtgtggggggtttttgtttcattggacaacttgttttgttggctatgcttcatgatgtattttgggccatacttgatgtacattgtatattggttaaatgttggacatgctgaatgaaatgttgtttctcaaaggctaaagagtaaaaaaaaaaaaaattcgaanaaagaaaaagaaaagcaataaagttgagtgaataagatcttaaatggcacaagaatgatgaaactttnggttctactcttcatggttaaatnttatctttacttct

SEQ ID NO: 1737 - DNA, 463 bp, Glycine max
  unsure at all n locations
tganatgaggaagtgtagaagggtgaaacttcctgcttttattcgttgaccacagagtggtacctggagatatgtcacggnggtcaagagaccttgnggacgtcaggtggggtgctattgcccaaaaccaagcttgaccaatcccgacccaacccgggcatagtcagtcagtgagaacctgtgatgtacctaagcaggcgagctcctggcagtcaacagataaaaggaacaaagaccacaaagcaaggaggcttgtggtggctggccagttgtgaattttgtgtgatgtatgggttgtggcctctggtaatcgattaccaagggtgggtaatcgattacaaggcttataaatgaagacaggagactaagatggtctctggtaatcgattaccacggngtgtaatcgattaccaggcttgaaaacgaggtcaggaagctatgagnggcttctggtaatcgatac

SEQ ID NO: 1738 - DNA, 455 bp, Glycine max
  unsure at all n locations
tgcttgaagggttgtacatgaccaaatctttagttaatcgtctttacgtttagcagtctntgtattcgtttaaaatgcatgaagataaatcagtacgagaacaattggatttgtttaataaactgattcttgatcttgaaaatatcgatgtcactattgatgatgaggatcaagccttgttattgttgtgctctttgcttaagagttactctcatttcaaagagactttattgtttggaagagactctgtttctcttgatgaagtgcaagttgctctgaattcaaaggaattgaatgaaagaaaggaaaagaagtcttctataagtggtgaagggctgacagcaagagacaagaccttcaagaaagatagtaaatctgataagaagaagcataagccagataatcatatgaatggtgaatgaaacatgttcaaaatcaattgtatcactgtaaaa

SEQ ID NO: 1739 - DNA, 472 bp, Glycine max
  unsure at all n locations
taccctatcctgngaacacgaanatcaaacacttttagagattattaaggttagaaaagtagaattatcagacactcacaagctctgatttgatgggatgatcatctgggtggaccccggtacaccttatgttcactgaagagaatgaaagaacaaaagggtaagtaaggcgaaactcaaactcaaaattaaaacagtgattacaaaaacagatgcgtntttgagattacatgcaagaagggtagatgtgactttggcgaggatgaagagggaatgagcccgttgaagagggggcatttgggagagggtttgagggtcggagagagacaaaaactcgttaaagtgcgttcggagttgttgaaggttggagagagtggtgttgactgaatccataaccggttcgggaactgcaccgctctcacttnctttcaccattntcaaattcagaggttggagagaaagggataccaca

SEQ ID NO: 1740 - DNA, 377 bp, Glycine max
  unsure at all n locations
agctngtgcttgttntatntaaattcctaggatcatgagctactaggtgtgtcctactatgacttgagaaacaaaaggtgatcaaataacaacagaaatttaaaaggtactaggttgcctcctagtagcacttctttaacgtcttaagctggacgcttgatgagttgtcgatcacggacctagtacttttgcttacctttggcgttggacttggtcgcctgctggtcgaccacaggttgtaggcaacgctccagcttttgtagatgagctaaagggctttggaggtggcggcggtgcgtctgttgcctgctgtcggccatccccaggctgctgtggttttcgccctgcgcctacactggggcgcagcacttcttgat

SEQ ID NO: 1741 - DNA, 464 bp, Glycine max
  unsure at all n locations
tgagatgaggaagtgttgaagggtgaaacttnctgcttttattgttgaccacagagtggtacctggagatatgtcgcgggggtcaggagaccttggggacgtcaggtggggtgctattgcccaaaaccaagcttgaccaatcccgacccaacccgggcatagtcggtcagtgagaacctgtgatgtacctaagcaagcgagctcctggcagtcaacagataaaaggaaaacaagaccacaaagcaaggaggcttgtggtagctggccagcagtgaattttgtgtaatatgtggattatggcctctggtaatcgattaccaagggtgggtaatcgattacaaggcttanaattgaagacaggaggctaagatggtctctggtaaatcgataccaaggggtgtaatcgattaccaggctcgaaaacaaagtcagaaagcttaaggagcctctggtaatcgattacc

SEQ ID NO: 1742 - DNA, 408 bp, Glycine max
gcttgagagattgtatctaggtggttgcttttcccttagaagcctccgatgcaatatccatttggactctcttcgttatctctccctctatggctgcatgtcactgaagtatttctcagtgacctcaaagaatatggtaaggttgaatgtataactcactagtatcaaacaattgccttcatctattggacttcaaagcaagcttgaaaagctacgtctagcatacacttacattgagaacttaccaacaagtatcaagcatcttacaaagctgcgacatctagatgtaagacattgcagggagcttcgaactctaccggagcttcccccgtcactagaaacactagatgctcgcggatgtgtatcattggagactgtaatgttcccttctactgctggagaacaact

SEQ ID NO: 1743 - DNA, 283 bp, Glycine max
tagccctgatcagccttgtgacccttgccttgctttgaagctcactacaaaccttaagtgaataaccgtgatattaccatatccttatagaattttggagctttggaattgttttgggaataagtgaggggggtttgtgttcattggacaacttgacaagttggtatgtgacatatgccatggatgcactgccttggcatacatgatgatcaatgttaatgttggacaggcagacttacatgctgacctgatagtgctcaagagctatacactcaaatatacg

SEQ ID NO: 1744 - DNA, 397 bp, Glycine max
gttgatgcacaatggcgtctataggtctttataatcttgtcgaatcattgacattaggaatattctgttccttccgtgtattctggatgattaaattgctcgagtgtacgacaaagcggttaatctataatgctgcgctgctcaggaaaattgtggagttcaaactgaattttctgtaagcataggtttggttcatggactggattatatattttgctccttgcacgtttttctagatgattaaatcgttcacatttggaatacagtgctaaatctataatgttgtgcgcctgcatccatatcccggaaaattgtggagttcaaattgcaatctctgtcagcatagattatgcttacggactgaattatgttatgaacgtgggtcttttgtatggct

SEQ ID NO: 1745 - DNA, 316 bp, Glycine max
aggcacccgccgcatgccccttggacttactacgaattattcactttgagaaccttttatatcttgtactctttaaatgattgagatgcgcactactaacacttaagagaccttcctgatattaccatatcataattggatcatggagcatggggaatgtgtatgcaataattgggcagtatgcttatatatgtgtacaacttgttctgttggctatgctgcatgatgtattctgagccatacttgatgtacattgtatatcggataagagaagcacatgctgaacgacatgttgtttctcagaggctacagagta

SEQ ID NO: 1746 - DNA, 464 bp, Glycine max
  unsure at all n locations
tcctctnttcttcggttggccggggcggtccttccgtggacaaaactattggttgtgtcgcgatgttgggttgaggcaacgtgctgggtgccggcccttcgaggatcgggggatagaactcaacatcccttcgagcataatcttgagggtctttgtgggcctcgtcaggctgttgaggaggttctctttcaaggacgggagaagcaatatggaccgcatcgtcttgcaagacgggtggtgagtagttgggcggcaatccataagggtaagccgctcggttgtatcccaggtgagggctgccatcgtgccccagtgtgtcccttcaccgtcctactacgtttgagggaggatggtgcgcagttgccaagagagttgggtctgcttcggcagccgaactgatagcggcagcggtggccacattcttttccatgagctgcctcatccctaacataggcttcatcatg

SEQ ID NO: 1747 - DNA, 417 bp, Glycine max
  unsure at all n locations
agcttgtaatcgattacaacatttgtgtaatcgattaccagacataaaaattcaaatttcaagtctcaagagtcacaactcttcagaaactaattgtgtaatcgattaccacatttatgtaatcgattaccaataaggaattttcgaaaagtacacccaagagtcacaattgttcaagaagtttttgaatggccatcaaaggcctataaataggtgacttgngatacgaaattctttagagttttttctgaacaacattgtcttatcctctcaaaaccaaattgtcttatcactctcaaaatattccttggccaaaacacttgcaaattcaataaggaatcttgatcgatcttcaattggaatatccttctcttaaagagagaaaatgcttcttcttcttattcaaagagatctgtt

SEQ ID NO: 1748 - DNA, 429 bp, Glycine max
  unsure at all n locations
ctacatttgttaagttgtctaaggtggtcgtacaactgccctagttaatgaggaccttggacaccatgaatatggcgaccacaatggagataatcatggggtcttcctcgtggatagggttgatgcccttgaagtctttatcaatggaaatggtgggagggagacttcatagtgatggtatgttaacacagttgatgtcgatgtcctagatgacatggaggtgatgcctacgagactaactggactgccctccataggaaaatcttcccgtaatggtattgattacacctataattagttggatgagctcattntcctattcttgaggaggttcatgctcgtgtctttgctggtgatgcctttgtctccctctatcttatgctcgatcccttcttctgtcgacatgttgattcctgtgctagtcctcat

SEQ ID NO: 1749 - DNA, 398 bp, Glycine max
agcttagctacacacacccatctaaaaactatctctcacctccttgagaagcttccttgagaagctagagcttagctacacacacccctctaataactaagctcacctccttaggaagagaagctagagcttagctacacacccctataatagctaagctcacccccatgacaaaatacatgaaaatacaaaaaaatcctactacaaagactactcaaaatgccctgaaatacaaggctaaaaccctatactgttagaatggccaaaatacaaggcccaaaagaagaaaaaaaaacctattctaatatttacaaagaagagtggacccaaccttgacccatgggctcaaaaatctaccctaaggttcattagaaccctaaggccttctttatcagctc

SEQ ID NO: 1750 - DNA, 424 bp, Glycine max
  unsure at all n locations
tctccctctntntcctattaatagggggaggagggtagaacataatattcaaccctcctggtatctgagaatcacttanaattagtgagaaaaattattttcgtgaagaanatccaagccggggtgcttccataatgcttccgagagggttctgtgggcgatttcgtgaagaatttccaccgttcttcatcgntcttcggtcttcaaccggtaagttcccgaaatcgaacttttcaattcattntatgtacccatagtgatccccacttgtttcgcatgcttttattttcatttcatttactttccgtacccccttttgacgtgctttagtcattctatttaagtcattttctcgcctaatcaaaaataaaataaatttccaccgatcatctttattgtaacatactttaatatcttttaaaat

SEQ ID NO: 1751 - DNA, 458 bp, Glycine max
tgctctattaagacaaagaaattaaagatattcaggattgatgatcaagacagtctctagagtcttaggaagggtatattaaataggaagggaatcccaattgacgtatcaaatggtttggccaagatatttaaattaataaagttgtttttcaagagatttactctctggtaatcgattaccagagaatgtaatcgattaccagtggccaaaaatgatttacaacagctattaaaatttgaattcaaatttgcactgtgtaatggattacacatatatggtaatcgagtaccagcagttactgaacatttcaattcgcattttatagcttgtaatcgattacacatatactgtattcgattaccataggagaatttcagataatattctcaatagtcacatctttttatttcattcttaattgccatccaaggcttatatatatgagacttgagaca

SEQ ID NO: 1752 - DNA, 457 bp, Glycine max
  unsure at all n locations
tgtgagagctgaagacttcttcagacatgtagaactggggaagactgacaacccaataggttcaaacgtgactcaagtgtttgttgatcaactatcacgactaaacacgttgggtttgaacgctccccacactcaccctcgaggcactgagatccttatagtccttgagggtactctctatgttggatttgtgacttccaatcaagatggaaatcacctcttcaacaaagtgctgaacaagggtgatgtgtttgtgttcccaattggtctcattgatttctgcatcaatgtgggatatggcaatgttgccgccattgttggtcttagcagttaaaatgcaggaggcattactattgcaaatgctttgtttaaagctaatccacctatntcttctaaggttctcaccaaagcttgccaggtggacaagagcataattgattatcttgaanagcaatct

SEQ ID NO: 1753 - DNA, 365 bp, Glycine max
  unsure at all n locations
agctattanattgttctcatggtggacatgatgtggcctaataatgcagttctcagttggggatgatgaagttgtgatggccatatcaggttatgcggacccatatttaaatcctttgttttaaaatatgcagttgttttaagtaaaatacatgtcaatatgggccttattttagcatacatacatctcttcttactaatgctcatagttgtcaatagcacaccaaataacagcgctatgacagaattgagaagctctgcttcacagtttgtagtagtggcagttgtgattgtgatggcagacataattacagaaaagtgtggctggaggggggcactattggagcgggtcacaaagaaaaccta

SEQ ID NO: 1754 - DNA, 437 bp, Glycine max
  unsure at all n locations
ntaaaaggcaattcagggctctaatggctcgtcgccatcattagtcttccacctaaattcacctatttatcgtcgccacctgaagcgtctctacaaagaaagcacaaaggcaccaagaagaattttcagtccaccagtaccggataaaccagcttgcgtaagaggaataagagaaaaaggttntgttactcgcctgtggttaaaggtttactagggaagaagcatgaatgtgaaggggggagaaaccaaccctcgaaagcatcttgacaaactcttcatgtagagtaaagagtcacccattatgatttatgcagaggtaatgctaaaaaaaacaggtcaataaaattttcgatttatggtatgaagaanaattaaaataaggtgcaaccatgcctaaaacattccttctgagttctaagtcgcaaccatttactata

SEQ ID NO: 1755 - DNA, 388 bp, Glycine max
agctatacagcagaatttagtaatgacccactaacctagaattaaaataacttaatgccattaacctagggaattaaaaaaaaaaacttaatggctgagtgtaactgaaattgtggcaaccaaaaggctgatgcctatgttgccaattgggcccttattacaacttgaactaaacctaaccaaagcccttttagttgattaacccaaaacatatttttggtcagccaactttacaaggattgggccattatttacacaaactaaacactctaaaattgaaacaaagcggtgtcatttagtcctcctccatttgggccatgacacaactcacaaccttggacttttctccttgaaacttgggcttgtattcacacagtatggacaacac

SEQ ID NO: 1756 - DNA, 403 bp, Glycine max
  unsure at all n locations
tctggtgggacatcttgacttgctttccaatctgacattcatcacanaatctgccttcttctatnttcagattgggaatgcctctaacagcacttttgtcaaggaatttcttcatgcctcttaagtgcagatgtccaaacctttgatgccatattctgacttcatcttctttggaggatagacatgtggaggagtagctggtttcttggggtgtccataggtaacaaatgtcctttgatctgctgcccttcattagaacttcactcttctcatttgtcaccaagcattctgactttgtgaagtttacattgaatacttcatcaaacagctgactgatgctgatcaagtttgcagtcagtcccttcaccagcagtactttgttcagactaggaagtccatcatg

SEQ ID NO: 1757 - DNA, 405 bp, Glycine max
agcttgcttctacacttgactcagtcatatgcctattgttgttaagacaaagtaaattatgtatgaatttaaaacaataacttaggtaattaacaataatctaaattgacttacagaatccacaactgtataacaaagatgttgagacattgaccatcgtgtgctatttcagagagatcttcatgctttatgtacaaggggaagtcttcattaaacacttcgaacatggtagcatcccacataacctgcaacagcttcaaaaaaagctgagggatggtcaatgtcatcagatataggggatcatcaacctcatgatctggcctatctgcaggttttgctggtcccatagctccctcacttacagaaaaatgacatatacttacggagacttttgcctacacacat

SEQ ID NO: 1758 - DNA, 474 bp, Glycine max
  unsure at all n locations
cgattcagatctaattgccacgtgtgtagtaggtatgtattttatgttcatattatgctacttttgcgttaattgtcatttaaattatgttattttattgacatgtatgattagagaagatccatcaataaaagtttctttgattcaagagaggattaacagtgaatttgcctacaacgtgtcgtacaaaaaagcttgtgtggcgaaacaaaaagccattgctattgaatatggcgattgagaagagtcatatgcgaaactttcgtcttggctagcacacatgcaaaatcattctcctgaattatattttcaaatactacatgacgattntatcgttgggaatacggctagtcgcgaacaccgttagtttcatagagtgttttggactctnggtcaatgtaaagaggctttcaagtattgtaagccaatcatacaagttgacgacacacatttgtacggcaaataccatgggat

SEQ ID NO: 1759 - DNA, 374 bp, Glycine max
  unsure at all n locations
agcttgtagggttaaagtctcacgattgtcacgtgctcatgcaacaattgttagccgtggctatacgagacatcttgccaaacaaagtcaagttcacgataactcgcctgtgctttttcttccatgctatatgtagcaaagtgattgatccagtaatgtttgatgagttggaaaatgaggccacaattatactatgccagttggagatgtattttccccctactttctttgacatcatgattcacttgattgtgcatctggttagagaaatcaaatgctgtggtcctgtttatctacggtggatgtacccggttgagcgatacatgaagatcttaanagggtatacaaagaatctatatcgtccagaagcatct

SEQ ID NO: 1760 - DNA, 474 bp, Glycine max
  unsure at all n locations
gcttggatggtttattattggtctggtgatagggattgagtttgagtttgctttggggcttaagagattcttaaggctgaaggcactgctagaagccattgcaaggagttttaaggagaaaagttcaactatgagaagggaggtcataagaaaaataaatttaaaaacataggaagtaacacttgaattctgaagctaagtaaagcctcttgaaagcacaaccataaacttccaaaaatgacaagattgagaaagtataggcttcttttgaacaaccaaataatgcactgagttgtccaagttatagaaaatagtgatagttttatgttaaatgcaaattatttctaatgtttgcatgtcactccctattcgctatgtatctaaactatgattntaaattgcagttatggtcatggcacggtgagtcagaaaacctttatattgtgaaaaatangactgatngtgatcacggtg

SEQ ID NO: 1761 - DNA, 341 bp, Glycine max
  unsure at all n locations
agcttgagtgagccaccataaagtgagtcaattntgtaaacacatccttgtaaccctactatctttatgtatagcggaagaatctccatattagagaattataatcgtgtgctcccattactacctttaattactaagtgtctatcttaacttcacgaagcgggaaagtctgataagataaatagcttgggaagtctctatccttaagcttgagtgagccaccatagagtgagtcaattttgtaaacacatccttgggaccctactatcactttgtatagtggaagaatcttcatatcggagaattataattcgggtgttcccattactacacttaattac

SEQ ID NO: 1762 - DNA, 467 bp, Glycine max
  unsure at all n locations
tttatgatacatgcattacggacctatgatactaagctcatataaaactgaattattttctaatgatgcatgcanataattaaagacaaagcgacaaagtcgattcttaccaacttcttgagacataacangtaagagagaatagaatgccgtatataaccgaaatctaacccaagagcagcattggatatattcggttaaaccttaaaaatataaaggtctaatgattgctaaaacgaggtttggtgggactggctactctgatacctatatttaataaccgtcactggtaggttagccaatatgaaactgagaattgggggaagccaatgctttaaattggaaatttatcatttatttgacacttgacacaagacattttttaattttcattttcgaaccatatatttacgagtattttataattcttaataataaataaacaccgtttatttagaagagttcat

SEQ ID NO: 1763 - DNA, 406 bp, Glycine max
agcttggcagcaatgtgggatatgagccgctccatattattgcaagtgacacgtgctgtagagaaagaagtgaaaggaggaaacgggtcgggtttcaatcggagctccagattcggaaatgggtcacaacgacccggttcgtttagtggaggacggggcagtactgattgggtgttggtaaaaggaaaggaagttggagggtccaaagggccagctattgggcctaagagagatgggtcaacccatggagacaaaaaaaaacatgggcctcgtgacaggggctttacccacttatcctatcaagagttaatggataggaaacagaaggggctgttgttcaagtgtggaggagcctttcatccaatgcatcaatgttctgacaagcagttgatggtcctggtgatag

SEQ ID NO: 1764 - DNA, 464 bp, Glycine max
tgcctcatagagatccaggatagacaaggcggttgaaggaaccagttccactcccgaatatgatagccatcgttttaggagtgctgagcaccagcagcgcttcgaggccatcaaaggatggtcattcttccgggagagacgcgtccagctcaaggacgacgagtataccgacttccaggaagagatagttcgttggcggtgggcattgctggttacccccatggctaagttcgacccagacatagtcctcgagttttatgccaatgcttggcctacagaagagggtgtgagagatatgcgatcttgggtgaggggttagtggatccctttcgatgcggatgccctcagccagttcctaggataccctttagtgttggaggaggaccaggagtgcgagtatggtcagaggaggaaccaggccgatgggtttgatgaggaggccatcgcccagatgatgtgtatac

SEQ ID NO: 1765 - DNA, 451 bp, Glycine max
agctatgaattcctccactaccacacatagtttacccttgtttggattatcttcaacctttcatatagaaatcaaaagacaaccaaccattcttcaacacccaaaagaaagaaggaaggaaaatagacttcagatgtaatgtaaaaagaaatctctattgtagatctaagcttacacttttactctttttttgtagatttttcaatccaaaatatgcctttctgcaaatgcctgaatatatgatcacatataagatagattatataaaaacaaattattcaaatgccatatgaatttaacatcatttccacaagaaaaaccttgtggcaatatcatgatcagctaaatagtaatatgcacagccacataacaacaatgcctctaaattattttcatcttccttgagaagaaacccagactcagcaatagcactctcatactctttatcagc

SEQ ID NO: 1766 - DNA, 464 bp, Glycine max
  unsure at all n locations
tcctcggatcctatggtcatatgataccactcctcattcattcactcacaagcccnctttcactctggtatatagaacaaatgccatgatccctatcgaagttactgagcccactttccaagtggatgtattcgaggaagaatgattaaaagaagactgatttgtggatctagacactattgaaaagctacaaaggattatgcagattcatgaagtggcgaccaagattcgagtcaagccaagatacaatcctaatttgacttgggagaattgaaagagggggatttggttataataagggcttaacctaaccagattgtcaacaagttatctcccaagtgggttggcctttatcgaatcagttaggtggtcgaaaaggagcatacaaggttgtgcactaactggtggagtcactagagccatgagcaagaggctccaagagaattgtgttatagctactgaag

SEQ ID NO: 1767 - DNA, 584 bp, Glycine max
  unsure at all n locations
nttcaatctcgatatgtanctctagattcgatatcgtattggcaatctcgactttnncnccncaacagggaacgggaanattganatccttgtcgaccctgtgagcctcgagagtcgaccagagtgcatgcgcgcgcatgctggcaagagtcactaggtcgtgtatcgcttgtgcgcacttatgttacaccggtgatgctgtgcattatgtcataacacagtcctacaccccaaagctcacagacgcacgctcttctctgctgtatgcattacaccgagcgatagcggcgcgcttgttcaagcaccaaatatgaacgacaatggtgtactatggggcgtgcgccatgtatttacacatcacactatgggacagccagacctaatagactgtgcattagcaaaagaagcaacagctgaggatagtacatcacggtagttagaccacatgcgcatacacgccagattcatcggtggacagtaactgcccagagagaggtgtcatctgttgcagagaattgtcaacaaacgatgctgttggcaaaatcgtgacaacggctgcacagcgtgagccgggacttttttcn

SEQ ID NO: 1768 - DNA, 277 bp, Glycine max
gaatcaagattcatgagaagatgagttcgagattcaagagaagaaaccaaaaagcatcaagtcaagacttcacaagggatgtattgaaaaaaaactaatcatacacccagcatagcacaattttgtttacaagaaacgtttttccaaattcttctaagttaccagagtatttactctctggttatcgattaccaattacctgtaatcgattaccagcggtaaatgttgatttcaaaagcttttaactgaatctgcaacattacaaatgcttttaaat

SEQ ID NO: 1769 - DNA, 391 bp, Glycine max
cgccgcgtgcgagcttcatggtgagacaaaggtgattcacatgtgtttcgatgataacaatgatgataacataagatgatgacaacaggtgactgactaacacagctcacatgaccatgtcgcttgatacattctccatgctgatatgatagaacaagtgattgagttcatgattgattgatgaagaattcaagactcacgaggatagtctatagtcaagaatcaagattcaaggctcatgatctcaagaatcacgatcaagattcgagacttcagattcacgaatcaagagaaggcttaatcaagataagtttgacaattttttctcccaaattgagtagcacatgatttttctcataacatgtctaccaaacagattttactctctagt

SEQ ID NO: 1770 - DNA, 440 bp, Glycine max
  unsure at all n locations
tctatcaaaactcttgtccttttattttgtaatgtcaacgtacacctctccttagttaactacggccatatattattgttatatatgcaagttgaattaagtcaaaactagcaactagcttaaacagctatgagctataccttatagggtctagcaaatgaaaacaaaggaatgaaaggggaaaaccacgatagatcaacaaccagggaaaacaacgatagattaacaaccaaaatatggggatcctacaaaaagaaatggtggattataaaaaggtcgaattagttctaggtattcatattattataaaattttataattaggttgctatgccctttatatttttaattgagtcgntatattaattntaaatctgtaatcacgtctctatattaatttgtcatgaaacatctgacgaaatctttcatcatatacatgca

SEQ ID NO: 1771 - DNA, 479 bp, Glycine max
  unsure at all n locations
ctggcctatgaatacatcggcacgaanataactttcattcttatatacttagcatgtctcggatcaacgcctgcgatactgcgtatcgacaactcatcatacatgataatgagcggcctcatctcagatgagcactcgcgagcgcttgaatccaatacatatctcacacacacacacgcacactcaaagcaagcaatagatgatgtcatagctataccgcccctgtcttcttctttctgcttcgaccgtaataaggcagaaactctcatcttggcttgctaactcacatgctgcagtctcgggagtagttgataggcgttcatacttgacagaaatggatggattccctccattggcaccataggcgtgagtttccccaaccgtcaaattcgaatgtgtaactgcaatgctgctactataagatcccatacatagtgttacgacggacaacctcgagccaaagccaacttctcaggccc

SEQ ID NO: 1772 - DNA, 458 bp, Glycine max
agcttgagtattggctgctgcgccgagtgcaagactacgagttgtgttaggcttgggagcaagactgcgaggtcactaaccatagaacttagacaccgctttttgtccaaacaatatataaactcagtattagggacattagacctcactcattcaaacaagcggcttatatcacctccgtgtgttatatatacagcatttttggaaacgcattatattctacgctatatattgaaaatttaggcattgttccaatagaattcaattcattaaaatacacccagtataattttttttttacatcatataatcataaaatgcagaataaaatgcagtgtttgattaactctcacatgcagaactgcagaagaccaaatcaaaagctaaaacaatataataaatgaatttcaattcaacacatctacagacatgtaaaaatagagattggcaagaatata

SEQ ID NO: 1773 - DNA, 441 bp, Glycine max
  unsure at all n locations
ttaaattctattgacaagagatttctgaggaggagtttcttgctttttggataacaaataaagtgtgtttagtaacttttataaatcaattcttactagtgttgatggtaccatcttcattggtgacatctatgcgagggcagtctcatatttcattggcttgtggagtggcgttgccacatttatctattgggactgacgagagtaacatttccatccatatgttttgttaaattttgttatttaaattgaatagggagtttcatgatatagatctatttttactgtttcttttatgtacccactgcgatttatcatattacttttcagtcattagtaggttactcactattgagttatgcatttgtgagttntacttaattgtttaaagtgcttctagtgtattagatgctaatctattatcgaaacacagagctaaat

SEQ ID NO: 1774 - DNA, 594 bp, Glycine max
  unsure at all n locations
tcctgtnagtctgaacgtaatcatgaattcaccgtgcaatcggatgcttgtcatcanacaactancaccagcaagtganncttgaaacccttgaggaccctagcancncncngaggnanccacgcgcatgaagatgaatctagagnccttcgatgtctgacattgctgatgtttacaagcccgaagaatgactccaagagtgagacaacaagaagaactcctgatgagtccacccataacccccaggtgtatgacccagatacgagtgctcgacatatcggaggaatatnccagacgacttcacaagggaagtataaaacagtttttgcttcaagaaacagaaaagagctctctcagaagtgtatcagctaccagagttattactctcgtggcaggcgaataccagttatttggaatcgatgaccagtggccaagttggatgcacgaggtttttaatgaatcggttccatggagctcgtatcttcaacggtgtaatcgagcactagacataggtaatcacctactcgtgcaactggaacgcaggaagttacatgtgagcagtgaactcgcgtctctctatatcaacgagcgtcn

SEQ ID NO: 1775 - DNA, 403 bp, Glycine max
  unsure at all n locations
agcttcatgatgatgaatcaagtagttntgataatgacaaagatgatgacaaaaagcccaaagaatgatttcaagattaagtcaacaagaagaaatcaagaagattcaagaatcaagagaagtttgatttcaagattcaagaaaagatgaattcaagattcaagagaagaaatcaagaagacttcacaagggaagtataaaaaagtttttttttcaaaaaacaaaaaagagtttttctcaaaattttataagttaccagagtttttactctctggtaatcgattaccagtttcttgtaatcgattaccagtggcgaagtttgatttcaaaagcttttaacagaatttgcaacgtcccaattgatttcaaaatggtgtaatcgattacaagatattggtaatcg

SEQ ID NO: 1776 - DNA, 459 bp, Glycine max
  unsure at all n locations
tctgcatgtctagagagttctagagagagaaaggtccaagttccagagagtttgagagattntgttgtgtgaagatctacagagaccagagcttgagaggaaaccgtcctgagagcttgagatgagtttgtgagtgattgtgaggtcctagaggtggaggagacatccccactacttgtatttctacaatctttcatctttctcttctcttttgtgtaaaggaagcttcccagttatggaaagctaaatcctctgttggatcttccttgtaggtacttgatgcaaatatctttttatttatttaatgatgttttttgtgttcactgtggtatcagaacttcattctaccatgcttttgccttgatcatgtagatgcatgtgtttttaggataattgaacagtggaaactgatctgattcttagaacttgataggacggngctagtttgtcgtatttaca

SEQ ID NO: 1777 - DNA, 450 bp, Glycine max
  unsure at all n locations
agcttatgaccattcgaatttctcaagagtttccgttgttcaatttcgagcgtgtagatgagttatgtccccgaatcggacatctgtgtgaaaagttatgaccattcgattttctcgagagcttccgttgttcaatttcgagcgtctcgatatattatgaccccgaatcggacatctgtgtgaaaacgtatgaccattcgattttctcgagagcttccgttgttcaatttcgagcgtctagatgagttatgtccccgaatcgaacattcgagtgaaaacttatgaccattcgaatttctcgagagcttccgttgttcaatttcgagcgtctcgatatattatgttcccgaatcggacatccgagtganatgttatgaccattcgattttctcgagagcttccgcttgttcaattcgagcgtctcgatatattatgtccccgaatcgacat

SEQ ID NO: 1778 - DNA, 393 bp, Glycine max
  unsure at all n locations
tgccgccacggagttntccgactatgctcttgtgtggtggaacaagctacataaggagagagcaagaaatgaagagccaatggttgatacatggacggagatgaataagatcatgaggaagcggtatgttccggctagttactcaagggacttgaaattcaagctccaaaaactaacccaaggcaacaaggtggttgaggagtatttcaaggaaatggatgtgctcatgattcaagcaaatattgaagaagatgaggaggtaactatggctcgatttcttaatggtttgactaatgatatccgtgatattgttgagctgcacgagtttgttgaaatggatgaattgcttcacanagcaatccaagtggagcaacaattaaaaagggaaggagt

SEQ ID NO: 1779 - DNA, 390 bp, Glycine max
  unsure at all n locations
catgcaagctngactataattcattatttgcgttatgagcctacatcaaccaattggattaatgatgtttttgtcacaatcaagtgattgtcaacgtctccatatgggtgtactttgtggtcatgttttcatttatagaattcatttggaatgtctgttgttaattctgaataagtgaccattcttcatttaaaattaaagtctcttaatcaattgagtgttcatctagttatgagttgatcatcttccaatcatgtcttgttaaattgtttgatatattgccatgttgttacttctgtcatgtatagagagagacttttccctctgtaatcacgcttcgacgttcgagaggaaatacttgtgtagacatgatccttgctacctactgat

SEQ ID NO: 1780 - DNA, 158 bp, Glycine max
  unsure at all n locations
ttctggtnactgacacaccttatattnntgtgctattgattttcttatgacaataggaccaaaaatttaaaaataggatttacattatgcttgtcaacagtgaattannnagagatttaaaccacactaaagaaaaaaattattccaggtgtctatac

SEQ ID NO: 1781 - DNA, 436 bp, Glycine max
  unsure at all n locations
agctnnttggagtagaaacatgggaccaactcattntatttcaaaaaggaagtcgtatctagtcaaggtctgagagaccatacaagtttcctaacgatttctaattatgtgggccattaagtctatcatatgctgacaatagccgagaagcccatgaatctcttcgggggtggagtaggtgtctgccatcgccttggccttggctaacaagccgggaagttcttgactctcgttcaaggtaagagcaaaccgatccatccacatggttgcctcttggtgtaaagagtcgatcacccttcctctagcctctttttccgcgtatacttgagcatactcgtncgcgattctatgcccgtgggccgcggctagacctaactcttcttggtacttggcgatgatagctagcatgttggtctccgtctctgataaacgctga

SEQ ID NO: 1782 - DNA, 480 bp, Glycine max
  unsure at all n locations
tggagctcggngtctttntgaagttcctcagctgacttgtagtagaatgagacatattcttccacccaagacttgatatcatcccatatctctagcccatcagaagcataaggatagtcctcgatcaaaagtcaaactccatggggagcagatggatccttaacagcaactcctctgaattaaaagcacccaaataacattgattagcataagagttatatcaagcctgaagccttttttcttcttatgtcattgatgactttttatatcatgcattcatgtgccactactctgtcaaagccatgaactgtcaaagccatcatttaggatgaaacagtctttgtctttccaaaatctgaaatacgagccacttgagcatctgctaaacgatatttcgtgccaccaatagtaacctcagatgaaacagtctccacatccaacacaatataatccaccaattgtctactagtaagtaatgac

SEQ ID NO: 1783 - DNA, 464 bp, Glycine max
agcttgccgcccagctcgcccaggcgagcaaggttgcttcctccagaagcaacagccttctggaggaatcttttagagggccaagtgggcctggttgctatttacacccccatttttactaaatgcaccccccctttctatttttttttgtaattcattttccgtaacgttacgaaactttacgaatttcgtaacgatacctattttccttccgcaaggttacgaatccttacggatcatgtatttactcttttttactttcaaagaagttacggaaactcacggattgcgcaaaaacacctctttttgatttccgccacattacggaatttcacggattacgcaagcctgcttccttttggatttctgagacgtctcgggacttcatttaatgcatgtcatcaagtaataatccccggacgaaatatggtatgacagttgcccctctttacttacctctcatc

SEQ ID NO: 1784 - DNA, 490 bp, Glycine max
  unsure at all n locations
tactaagcttacaacanattcaaaaccaacaacaacaaccacccaaaaccatatacaaacaacaatacaatcatgcaacaacatcacaatagcaaaaaatcattgaacgcttcaacaaaagcagcttcaaagggatgggaccacttacctggaagaagattacccaatgaccggaagaaaatgggaacaaccaccaacggaagaagtgaacggcggaagaacaccggaacaggagcaaccaccaatggaggatcggaagaggaacaagcaacaaccgtcaaacaccagaagaggaagacgaacacgtgcgtaggcagaagaagacgaagaagcatatgagaggaagatgaagatgaaacagtgtcgtatgaacgaaatgtagcaaatgcactgtacgaacgactaactntgggattntatagtaatagggtgaatggcattttggacttttcgccatgggtgttgggtgcacaaagtaacacccctgata

SEQ ID NO: 1785 - DNA, 346 bp, Glycine max
gcgcgtatgaccattcgaagttagtcagagagttttcgttggtcaataacgagcgcgtagatagagaatgacttcaagactggagcgccaagactcatacaatgaggcatcaaattgctacataagcagcggatgcatagtcctgagcgtatgaaccatttatttgcgagaagatatcaacagtgccttatgagactacccttcgacactttcaagacccttccttggagaatctgcacttttgctataacttttgcaccctattctaacatttctgcgacagctggtgaacttttctcaatcctaatagcggctcgtgttactcgtaaatacgcttgctctatgg

SEQ ID NO: 1786 - DNA, 419 bp, Glycine max
  unsure at all n locations
aatacgtggttcgtgatatcttttggtgtcatcctgatgcagtgaagttggtcaacacatgtaatttggtgtttttgataaacagtacctacaaaacaaacaggtacagactcccactgctcgattttgntggggtggcaccaaataagatgacattctctgccggatttgcatatctggagtgtgaacgtcttaataatgtggtttgggctttataatgcttctgaggtatatttttaagacgtgatgccctccctggagttattgtgactgacagagaccaaacattgatgaatgcagtgaaaattgtattccctgagtgtacaatttattgtgcagctntcacataaacaagaatgtggagaccaaatggtaatcgttgattggtcaaagaaatgctcgtgagtatgtcatggatg

SEQ ID NO: 1787 - DNA, 348 bp, Glycine max
  unsure at all n locations
gagcgtatgaccattcaaatcggtaagagttttcgtagatcgatatctagcgtgaacacgagttatgtacccgactcgcacatcggagcgagaagatatgaccagtcnagttgttcgagagctgttcgttgttcatttacaagcgggtctatgaaccaagcacgggaggctcacggtggcgagaacacgcatgatcaaacgaagtgcgagagagcatgcgttgttcattgtttagcggctgtataagatatggccccgcttctgccttaccaaacatgacaacagacggtatgcagtttgtcaaacataaagtatgttgaacgcgagcgcatgatgatgcaatgactc

SEQ ID NO: 1788 - DNA, 297 bp, Glycine max
  unsure at all n locations
ctcttctcctctcggacctgttccttctcaatgtatgcttaatttctaagtccaaaggaactaaattgcctgtgggagatctatgcatataaaatactaacagacacaatggttatccaattcaataagagaagttatatatgaatagaanacaaatattcgcagataataaaaaaataacgaataaagaatagacacctataaatgaactaacttgtcagataaaaagaagttccctggcaacggcgccaaaaacttggttgcttccggcaagtgcaccggatcgcacaagtagta

SEQ ID NO: 1789 - DNA, 453 bp, Glycine max
  unsure at all n locations
agcttatatactccactgtatatattaaaatgaaagctccacatgatatatgtatgaaaaacanagatagcagatattaaaactgggttgcctcccaggaagcgcttctttaacgtcattagcttgacacatagcttaatgccttcaaggtggcatgaaagtcacataaaacacatcttccttgcagtttcgccttttagctagaaattccatgaacttcatgtagtttgcaagtacattccaaatcatttcaggaaaggtgttagtgattaaagaaagaatggcacttaagatttcctcatgctctccttgccttcttttcttgtcaatctgttgatgaggaagggtattgatctggagaataccttcttgattgttntctactatcgagaacttctcncattgttgctgtgcttggtactcatctttttccttgactcatgctctnttaca

SEQ ID NO: 1790 - DNA, 462 bp, Glycine max
  unsure at all n locations
tctatagaaggttcgttcctaatttctctacaattgcatcatcttctaggaacttcaagttgtatcatctgttctaaaagagagaaatcattatgttcatcttataaaactcagttgtaatcaagagattgtttgtctcttggcatgtgagaaactcgaacataagggtgagggatcccaaggtgtgttcaaagattgtaaaggatttacaaggatagtggaaaatattaagtaggttacttaaggacaggacatatgcacgggaagtggccgaaccaatataaatcaagtttgcaattctctcttcccttgtcttgtttatttttattgcaatttactttgtcttgcacatttaaacaatattgttaaattgactattgcttcttcttctacattctaaatctatcacatatcatntaaaaggggattaanactttttagttggaaaatttaaagacttaa

SEQ ID NO: 1791 - DNA, 425 bp, Glycine max
agcttcttatccaacgcactctcttggtggtgaagctcctccttccatggcttattccctagtggatgacgcctcttctcacctcttttcccttatcttccgctacatcttcatggttgaaaatcaccattgaacgacctcattgaagctcatggatccagcctccatagaagattctcaagaagcttccatcataacctgatagagaaataaaaaatacttaattcaaattgaaaaacaaaacgatgctagtcccttgcatggttcaaattgttgagcatattatagtacatgatagatcgataattatgttaatactataaggacttgtgcatgttgtaaacttggataactcatttgattggacaagtgaatgaggttgggtgcgcacactctacatgagatcatgaatatcttataatata

SEQ ID NO: 1792 - DNA, 449 bp, Glycine max
  unsure at all n locations
gtagttattcataatcaaacatggccttcatcatcctcaagttcatacatccaatccatactttagagattcacgcaaaaatcagcactacatgatagtcgtttctctcaaaattttaaagatcacacactcactgggatacggttaatgcattccttcataatcaatctgacaactgactaacattttcagacataattccaatcatatgctcattctcttctaataacggcaaacttgatcaaaacaatcatccaatcatcccaatccattcaattcatacatttgctcaatcaatcatttcctaacactcattccataccaaacaagccactgcatacaatgttcaatcaattcactgttcaatcaagctttntgtacaagaaaacaaacaactatactactgaaattaaaagactgaaacacnaaagcttgaaattaaatgacat

SEQ ID NO: 1793 - DNA, 269 bp, Glycine max
  unsure at all n locations
gcttttatccaagacattctcttgggggtgaagcttcttcttccatggcttattccctagtggatgacgcctcctctcacctcttttcctttatctttcgatgcatctccatggnggaaaatcaccattgaaggacctcattgaagcttaaagatccaacctccatagaagcttctcaagcaagcttccatcaataggcaattaggcaatttgacctgctaaaccctaaatctcaaattcatctagcaagcaaaattgtccctatacag

SEQ ID NO: 1794 - DNA, 434 bp, Glycine max
  unsure at all n locations
ttctgagctaggtccatatttcaatttttaagatgcatggttctctgtgttgccatgtaatcctttattcctaattagntctgctagtctaatactattttcaaaatctaaatgttaaagataatgaaaacaagtgtgaatatttgtcttttctagtaaacttcttggattttgcttaatttcagaaagtatgtgtgcaacttgctatctagcttgtgtgtgtataagctctgctaaaatgattntaaccaaaggatatctactaacttatttacctatttccgtgtgtattacagcaacatagcttctatgagctaattgtgaacagagctagaggcgaaagcggtctagtatgaatgttttatttatatattatacatttctctattggaaggcgcatgttttgatgataaatgatgccatcaacactcaat

SEQ ID NO: 1795 - DNA, 431 bp, Glycine max
agctctgagccaattctaacgataataactttttactcggatgtccgattgagtctcgtaatatatcgacacgctcgaaattgaatggtgaagctctaggcctattcaaacgacaataacgttttactcggatgtccgactcagtgacgtaatatatcgggacgctcgaaattgaatgttgaacctctgagccaactcaaacgacaataactttttactcggatgtctgattgagtcccgtattatatcgagacgctcgaaattgaatgttgaacctctgagccaattcaaacgacaataactttatactcggatgtctgattgagacccataatatatggagacgctcgaaatggaatgttgaacctctgagccaattcaaactacaataactctatactcggatgtccgattgagtgacgtaatatatc

SEQ ID NO: 1796 - DNA, 440 bp, Glycine max
  unsure at all n locations
taaacattcaatttcgagagtctcgttatattacgggactctatcagacatccgagtaaaaagttattgtcgtatgaattggcttatagcataaacattcaactttgagcctctcgatatattacgggactcaatcagacatccgagtaaaaagttattgtcgtttgaatttgctcataggttcaaaattcaatttcgagcgtctcgatatatttcgggactcaatcagacatccgagtaaaaagttattgtcttttgagttggctcagaggttcaacattcaatttcgagcgtcccgatatattacgtcactgaatcggacatccgaggaaaaagttattgtcgtttgaatntgctctgagcttcaacattatattacgagcgtctcgatatattacgggactcaatcagacatccgagatacaagttattgtcgtttg

SEQ ID NO: 1797 - DNA, 394 bp, Glycine max
  unsure at all n locations
agcttgtctcagcgtttatgcgagacagagaccaacatgttagccatcgtcagcaagtaccaagaagaattaaatctagccacggcccacaagcacaaagtggcagacgagtatgcccgagtgtacgcggaaaaggaggctagaggaagggtgatcgactcgttacatcaagaggcaacaatgtggatggactgatttgctcttactttgaactggagtcaagaacttcaccgattgctagccaaggccaaggcaatggcgaacacctactccgtcctcaaggagatccaggaacttcttagctattgtcagcatatgatagacttaatggcccatataattagagaccctanngaagttgtattggcactcagatcttgactagttataactt

SEQ ID NO: 1798 - DNA, 455 bp, Glycine max
  unsure at all n locations
tgcttgtggtgcttctatggaggctggatctttgagcttcaatggcgtcctttaatggtgattttccaccatggagatgcagcggaagacaaaggagaagaggtgagaggaggcgccatccattaaggaataagccatggaaaaaggagcttcaccaccaagatgaaccttggataagaagcttggaaggatgcttcaatggaggaaaagaaagagggagagaaagagagaggggggagcacgaaattgaaggaataaaagagggagagaagtggaactttgaagtgtgtctcataagactttcattcatcaaagttacaacaagtgttacatatgtttctatttatagactangtagcttcctggagaagctttcttgagaaaacttccttgagaggcttctttgagaaaacttccttgaggagctagagcttagcaacacacacccctctcat

SEQ ID NO: 1799 - DNA, 456 bp, Glycine max
  unsure at all n locations
agctcgcttattaattaacaaccttttattgtcttaatagcttaagtttcaagattgattggtcgattgagatgaaattaaaactgttgacgttaatttcaaatagctggctcctacatgtgctctgttcttaaatttgtatagataattgggctttttttagtaatcaaattttagaaaaaataaaaaatgatgataagtagtaaccaagtttattttttatatatttttttctagcagtccaataattttatttgaatgtattaaaatataatagaaattactggaaataataaacatttgttttgaataaattgtgatagacaagttaagaatgaaaacaaagaagaaatgtcataattggaattgttgggtgaaaactaatataagttttgatatttatttctatgaaatgtanggtcacttcaagtaaatgaagtttcatactaattatat

SEQ ID NO: 1800 - DNA, 463 bp, Glycine max
  unsure at all n locations
gatgcttctagtgaagacaggaaacgcgatgaaattagaaaacacaatgaaatgttaaaggcttctgaagctgttgctgaagtcagagcagaggtggataagctcgctgagagggtgagcctgcttctcatattatctttggttattgaaacataataactggagctgagaatgaggatatgagtgattttgatttgcaagtatctgtcttggaagtggctgtggatggagggaccagggtttctgacaaagagtttttgatgtccacagagttgcttatgaggcaattgctgaaactggatagtattgaggctgaaggtgaagtaaagctgcagagaaaagctgaggtagtgtttatggtggttagaattataacttaaattctaactaattgcgtattagntattgtgtttattttggtatttacaaaatcccacctattagtaagtcatggacactgact

SEQ ID NO: 1801 - DNA, 352 bp, Glycine max
aagcttatgaccattcgaatttctcaagagttttcgttgttcaatttcgagcgtgtagatgagttatgtccccgaatcggacatctgtgtgaaaagttatgaccattcgattttctcgagagcttccgttgttcaatttcgagcgtctagatatattatgaccccgaatcggacatctgtgtgaaaacgtatgaccattcgattttctcgagagcttccgttgttcaatctcgagcgtctagatgaattatgtatccgagtcgtacattcgagtgacaacttatgaccattcgaatttctcgagagcttacgtagttcaatttcgagcgtttagatatattatgtccccgaa

SEQ ID NO: 1802 - DNA, 427 bp, Glycine max
tttccgactatgctctcgtgtggtggaacaagctacaaaaggagagagcaagaaatgaagagccaatggttgatacatggacggagatgaaaaagatcatgaggaagcggtatgttccggctagttactcaagggacttgaaattcaagctccaaaaactaacccaaggcaacaagggggttgaggagtatttcaaggaaatggatgtgctcatgattcaagcaaatattgaagaagatgaggaggtaactatggctcgatttcttaatggtttgactaatgatatccgtgatattgttgagctgcaggagtttgttgaaatggatgatttgcttcacaaagcaatccaagtggagcaacaattaaaaaggaagggagtggctaagaggagttttaccaactttggttcttctagttggaaagacaa

SEQ ID NO: 1803 - DNA, 452 bp, Glycine max
agcttagatcaggcatccgagtcaaacgttatggccgtccgaatatgcatgggcattccatttcaacttttaatcgtcatgatatattacgggcctcaatcggacatgcgagtcaaaactttagcccgtcagaattcacccgagtcttccatgttaaattttgagcgtcgcgataggttacttggcttattcgaagatccggaggaaaagttatggccgtttgtatttgcgatgggcttcacttttatcctaagagcatctcgatatattatgagcttcaattgggaatccgagccaaacgttatggctgtccgaatttgcgtggtcagtccatttctactttcgagggcgatgatatattatgggcctcattcggacatcgattaaaactttgccctgcggattcacccgagtttccatgttaattctagcgcccgataggtacttgctta

SEQ ID NO: 1804 - DNA, 478 bp, Glycine max
  unsure at all n locations
taacanacttaganatcaagtgatcatgtattccgaaatatatggggagaaaacggatgcacattttatctatatacagttgtttgttgtttgcttgaatcttgatttcaggtattgtattgtcatcatcaaaaagggggagattgtagatgcaattggctttgatgttttgatgatgatcatgatgatgtgttgcaattgatgcaaatgggcttttcaagattaaaattcaagacaatacttcaagattacaagtcacaacatcaagatgatcactagaatattaggaagggaattcctaattgaattagcaaaggtttggccaagtgatttaaaataaaaagtgtttttcaaaggttttactctctggtaatcgattaccagaggatgtaatcgattaccagtggccaaatacgttttataacagctataaaaatttgaattcgaaattttaaaacctgtaatcgattacacaatt

SEQ ID NO: 1805 - DNA, 172 bp, Glycine max
taattaattcaaattgagaaataaaatgatgctagtcccttgcatggtcttaaattgttgagcatattatagtacatgatacactgataattatgttaattctataaggactcgtgcatgccgtatacttgcattaactcatctgaatgggaccattcaatgtcgccgagag

SEQ ID NO: 1806 - DNA, 381 bp, Glycine max
  unsure at all n locations
tagaacttaaaccttcgattctcactcgattcttcaccaaatcacgtcccgtaaagcccaatcttcctctntttcactcctctttcacttccaccgatcaaaatccagaaaaacttcatcaaatggcagagccatcaaagaagagaaagggatcatcttccaccgccaccgctgctgcccatcgccgtcacgggccatccggagcacccacagcacctattcctccttctttgtcatctccaagatcatcaacactgttttcatccgatgatcaacgtctacggtacctttctcagttttcttctagaataatcttagaccctaagtacctagacgtagagttctttaatgatgaaacgtttgattgctatcaagtgtttc

SEQ ID NO: 1807 - DNA, 448 bp, Glycine max
  unsure at all n locations
agcttattattatcttggttcataaattggatgaaatatattcctaatttcattttataaagcatatcaccataataattaataagcaataataacgtcactataagtagtatcccaaagttaaggtgattcctagaggaactaacaagagaccttaactaaaatatgaatcccaagtgaagggtgacgattaatgttttgtcctcatgtaattcaacatgcccttgggtctttgaaatttactaatttatgccattgataatacaaataaatgattattaaatatttaaataactaaaagaaaaaagcatgcatgtctcanatattatgctacagcaacaaagagtggtaaaggagattaatacagacaactatggcaacggagaaatcgcgtattctttcataagtgtccacaatacccattctctgaagtgccataagccgacta

SEQ ID NO: 1808 - DNA, 453 bp, Glycine max
  unsure at all n locations
gcgaatatgagaaacgtagagaacattatcacaatccataccccaagctaactctaacccttcattggaataactattttgaacatgtgttttagaattttatttttgacaaaatgttttatcctaatatcatgaattgaccatttgattatattttcattnttttgtttttgattattttcaaatatatttttatttttttaaaaatctaatttgattaaaataatagctaaaaattttatttctcaaccatcttaaactacttggtcttttatcttntattgtatgggtgattttcttaattacttatctctttcaagttattattattatttttatttttaaattaaattttaatatatttaaaataaatcattaaatagttaaaattaaccttgtatcttgnaattaattatctattatanatctaacatatatctgtatcttaattat

SEQ ID NO: 1809 - DNA, 439 bp, Glycine max
agctatagcaactctttctttttgtttagtcaaaacttctaatgctcttaatctctcctcatctaaatcaactaactcatctgacatcattttccaataatggtcgattggaatgtccatttgtttttgtaccctggctgattgcaaatgtatttcgaccggaagtacagcatcatgcccataagtcagtcgaaatggggtagtattagttgattccttaggagaatttctacatgcccatagaacttgatctaacgttttattccaatttcttggctttagggcaatgtgttttttaatcaagttaattacaatcttattggctgcttcgacctgaccatttgcttgcgcgtaatatggtgttgaggttaataatcgaaagccagttttttgggcaaattcttgcatttttcgtccagtaaaaactgaaccttgatca

SEQ ID NO: 1810 - DNA, 442 bp, Glycine max
  unsure at all n locations
ngtgaatgtatatctatcattcccaacttgcaagtaaggtcttgaagttgctccgtgggaagtccttggtaagggatgtattcggtggctataagaccactgtctaattnttccttaataaaatgtcgattaatctctatgtgctttgttcgatcatgttgaactggattgtgtgcaatgctgatggcaaacttattatcacaaaccagtcccataggaacttcatattttattttgaggtcatcaagtatgatattcatccataacaactcacaaacaccttgagccatagctctgcttttgcacttgatcttgcaaccacattntgcttcttactcctccacgttactaaatttccacccaagaacatgcagtatcctgtggtagatctcccatcaacaatngatcctgcatagtcagcatcagtatatactttcatgat

SEQ ID NO: 1811 - DNA, 190 bp, Glycine max
agcttgctgcatatataacaatcttgagtactctctaaatgactggtaagaatatctgccagttgataatttcaattgatgaagttagtggtgatgtctctggataaaatctacagtgaggaggtagagagaagattgtaatggaatttcaatagatggcagtgatggaggggaggaatacatttacact

SEQ ID NO: 1812 - DNA, 423 bp, Glycine max
  unsure at all n locations
tatcagaaggggaatgagtaaataccacctcatgctgatattatgaaggtggcaaagtgtttcttttgcaagaagaagggacacatgaaaaagaattgccccggattccaganatggcttgagaagaaaggtaaatcaatctcattagtatgttatgaatctaatatggttagtgttaatattaacacctggtggattgattctggatctactattcatattgcaaattctttacagggtatgcataacctaatgaaaccagtgggaagtgagcaaagcattttatcaggcaataagctaggctcacatgtggaggccattggaacttgcattctgactttaagtagtggctgtattttaaaattagaaaggactttctatgtanccaagttttcccgaaacttgatttctatttcaaggctt

SEQ ID NO: 1813 - DNA, 393 bp, Glycine max
  unsure at all n locations
agcttcttgcgtagccgctcttggtgctcatataatccaaaaaacaaatccctcttattactagctattttgaattctttagttcctgaatgtacaaccttcaaattgttgctcgttcccctctttcttttctgcaaaaaagaaaatcaaatgctgtcaaaacaaggatgaagtcctaagaaaatcaatatcaaagaaaacatggatgaaatcacaattaaaaagcacaactacctatctttcagagtcctttggttaatttgtcttgtctccttatatggtggggttctgtttaataatcttatacttttgccttccaaaaaaaaacttatcactaatcctcttttcattaatccaatttttntatgttattgtataaaagatcatgggttc

SEQ ID NO: 1814 - DNA, 454 bp, Glycine max
cgcacaatatctatgagtgcagctatggtagcgaaaattgtatgagtttatcttcagtcaagcaacaagaagatagaagcgccttaacttcctatgccagtcaaatagtagtacctacaacgaatatggggtgatatgtgtcggtgagaaagttaagcagtcatttataatttggtgatgttattaacaaaaatgaatagagatagaaggagactcaattatttgttgaattagagacaataagtgacaccacatctttggaataatcgatgacatttgtagttaacgaaattcttcatttctaatctactgttgaggagcttatatatgaaagtcacagccagacctaagctagaaaaatttgcaacatcatattttacaaagcacaagggacttggtgattgtccagttaaaagctgtccaacataagagtctgaatgatgtagctagcatg

SEQ ID NO: 1815 - DNA, 406 bp, Glycine max
  unsure at all n locations
agcttgtagaatggttagacatgatacatgtcagggcttggtttggttcaaggataaaagggatgccccacattatttccatgacacaaatgcaaaaatgatgatttggaaactttatgcaaaactggtcatgcatgcgcctatgcggacgctcaagtgtcaaatttttatggtcatgtgatgctagggctcangattcatttcctctattttaaatcaacccaatgtttccaaaatatgttcttttatcaatttgtgcattcctccaagtccatttcgggcgtccgaggaaattttcacagcattcacccttcaggtgtagacacgttttttcttcaaaaatcggttatgatcaatgaattntttntcaaagaaaagttggaaatcatctcttttanaagcatgt

SEQ ID NO: 1816 - DNA, 442 bp, Glycine max
  unsure at all n locations
ntatagcacagcaacacagaatctaggtgtccaacacccctcaattcaatgggttntctaggtttgaaaagtgaaatcgagaatgaggtaaatttgaagcaaactctcacctcacaccagtccataacatcaatctaaacttgctcaaactggatttacgcttaaaatctcaccgaatcaaaatttgactcttccacacccaaatttgccctagaaatggctctntgttcactntggtcatttgtttttctctctagcacagcctaatctttctcataagtcctaaatgacatttcaagctaggattaactcactntaacctccatttaccacagaatccagaattaaccttccaactctcaaagcctcactctntntccactcataacatcacattctcactttctaaccctaggttaactctacccttcacctctatcag

SEQ ID NO: 1817 - DNA, 355 bp, Glycine max
agcttgagaaatctcttcgattctgcaatacatttctgactctatggcatgagatgcaccgcatagataggacctcccggtggttgttatcaacgaatatcttaaacacttgtgcttgagtgaaacagtcgctgtgagactgcaggaggagctactgtccttgatacctgtgttatgactaacttcgtctaactgtataggacacattatgttctactctttatctagctgcatattatgggagaacaagtgattggtacacattgcttcatcttctacatcatgcaatcaatgaattataacgcgtacacctttgaacatatacactgcgtgctttaccacttgaggacaagtg

SEQ ID NO: 1818 - DNA, 388 bp, Glycine max
  unsure at all n locations
ngccacccagctcgcccagatgagctaggttgcttcctccataatgcaccacaacgatgcttgttttgcacaacaatgctctttgtgacttccagaatgttgcgaaactttacggattgcgcaacaatgcttgttaaacatttcagaatgttacggaactttatggattgcacaacaattcttgttgaacattttgaggcggtcaagagaaggtcgtatgccaacaaataatgtgcccttgacgaaattagggtatgacagacgcccctctctacttatcttttattggagataaaagtgaagtaaagataagacactaatttcgttcgagtggaacatgatttggccgatcaatatccctacccgcggaacctgtcattcagaaaga

SEQ ID NO: 1819 - DNA, 303 bp, Glycine max
  unsure at all n locations
tcggatgtncgatntaggcgnatattatatttagacacttgatattgaataacagaagctctcgagaaattcgaatggtcataacttttcacacggatgtccgattcgggcgcataatatgtcgagacgctcgaaattgaacaacggaagctctcgagaaattccaatggtcataacttttcactcggaggaccgattcaggcgcataatatatcgagacgctcgaacttgaacaacggaagctcccgagaaattcaaatggtcataacttttaactcagaggtccgattccggcgcataata

SEQ ID NO: 1820 - DNA, 378 bp, Glycine max
atgacaatttgaattgctctagagattccattgttcaatttcgagcgtctcgatatattatgaatatgaatcggacctccgagttaaaaggtatgaccatatgaatttctcgagagctttcgttgttcaatttcgaggcgtttgatatattatacgcctgaatcggaactccgtgtgaaaagttatgaccatatgaatttctccagagattccgttgctcaatttcgagcgtctcgatatattatgcgcccgaatcggacctccgggtgaaaagttatgaccatataaatatcttgagagcttctggtgctcaatattgagcgtcttgatatatatgctccagaaattgacttgcgagtaaaagtatgaccatttgat

SEQ ID NO: 1821 - DNA, 434 bp, Glycine max
  unsure at all n locations
gagcccgggtagtcaaagagaagttcaagtctatagccatcaaagtctgaagagagtatgatgaactaagggacgtcaatatggccaccgatgaagccttggaatgagaaaccaagaaggcccgaaaggaagaacacgaccaaaacaagttttgaggggctttatagggcagcaatagtgagctcaagctccgaagaggtgaaaggaatcatcacgggtcaaaggcatgatcttgaaggacgagctaaaggcttgccttaggtcgaaaagaaatttgtcccaacagttaaagcgagactgaagggaatatgtgggccatcatcgatgagtgcaaagagaagctaaatctagcggcgactcacgagcanaggctagaggatgagtacgccaagatatcagcagaaagggaagcanggganagggtaattgattca

SEQ ID NO: 1822 - DNA, 460 bp, Glycine max
  unsure at all n locations
tcaaactatttgcttcccgagggaaattctataaacagacctcccatctttaatggagtgggttaccactactggaaaacccgcatgcaaatcttcatagaggcaatagatttaaatatttgggaagccatagaacaaggaccttatgttccctctataatagccggaagtgcaacaatagaaaaacctagagcagattggactgagaaagaaagaagattagtacaatataatttaaaggccaaaaatattattacatatagcttaggaatagatgaatactttagggtttcaaattgtaaaagtgctaaggatatgtgggatacactacaagtaacacatgaaggcacaacagatgttaaaagatctaggataaacactttgactcgtgaatatgaactttntaggatgaatgtaaatgagagtatacaagacatgcaaaagagggtcacacacatag

SEQ ID NO: 1823 - DNA, 443 bp, Glycine max
tggatactctgagtcacctgcagctgcagcttgaattgatacatcatttgtgtaatcttttaccagacacaaaagaaattcaaatttcaagtctgaagagtcacaactctatagaaactaactgtgtaatcaattaccacatttatgtaatcgattaccatgaagatattttcgaaaataactcccaagagtcacaactgttcaagaagtttttgagtggccatcaaaggcctataaataggtgacttgggatataaaattccttagagtttttttgaacaacattgtcttatcctctcaaaaccaaattgtcttatcactctcaaaatattccttggccaaaacactcgcaaattcaataaggaatcttgatcgatcttcaattgtaatatccttctcttaaagagagaaaattcttgttcttcttattcaaagagaattga

SEQ ID NO: 1824 - DNA, 415 bp, Glycine max
ctaagctaaggaaccgacacacctgtcggcaaccccaacactaaacatgagagagaataaaaaagacacttcactccaattccaaacctgttgctgaaaccccaaaaaacttacaacattctatgtttctgttcagaggaagaaggaaaaaaaaaaagttagcgtggttttgttgagttgaaaccgattcagctcaagtcaatccaaacacacatttggagaagaaacaataagtttcatttcgattttcaattattcaatgatggtccaagagcgttcacttcccaaatcagtgaactcgaagccccacgcgcgcacggcggcactggcctccacgaagagcctcgatttctccgcgtgggtctccgacaacctcgtcaggatcgtggcagtggtgctccttgtcgccaccgtc

SEQ ID NO: 1825 - DNA, 368 bp, Glycine max
  unsure at all n locations
agcttagtgactntttttctctcatttaccttttattattattgtaaaaaatgattgtaaagcatggctaaaatcagggttctacttaacttcaaatgccattcgttcgtttgtttacctttccttggatttcgggttctagtgccaacctgagttagctagcattttggggtatgttaaaaaaaaacgatgttaaaaggcagggaaacgcctttaaaaagctgagcttagttctctcacttaaccttatagaacgctgatggaaaatatgttcttatactttaaattctaaagcaaatttttttcttctcaatcagatatcccatatcttttaaaaattgtgttcgagcgattctctagattttcta

SEQ ID NO: 1826 - DNA, 447 bp, Glycine max
  unsure at all n locations
attttctgtggactntgaaggtttggaaccttagaatggaccacatatagagtcatggcccaaggaaacaaatagatccatggcgtgtacagttttgggatgctntgctttgagattctatgttctaagttccaactggaaaagttcctttccaagataggcatcaccaagggaagacattagacaaggtttgtgctaatgaaatcanggacattcaactttttaaatattgtaattttttaatgttttctttttcatgtctattctgtgattctgcagtatacactattttcccataattttagcgaaacaattgaaaaaggaaaagcaaaaaaataaaataaagggaaagcatatgtgagattgaaaatncgattttatctgaccaagtaagtgattanaacataataaccctttatttacataanaaaaacaaaacaaaacttt

SEQ ID NO: 1827 - DNA, 163 bp, Glycine max
agcttgccatttattatattaccatgatgtataagcaacaagcttatatatataacttatatatatacactgagaattctgtggcgtgtgtctcaatttctgtgtaagctaggatatcattttctgtgaaaaggtatccctatctctattcccctaccattct

SEQ ID NO: 1828 - DNA, 382 bp, Glycine max
aaaatgaagatacaataaaatagtgagaaaatatatagatttctaaattatttaatatgaaatattcaaaatataaaataaaagtttcttgcccgtacaacaattctatttataataattctatttaattcacataagattacatttaatagaagatacacatcatttaaacaaaaattaaagtttatagatggacaactagaaactaaggaagctatagctagctaagctactacatattaataaagaacaaaacattacaagaaaaggaaataattaaaaaaggtagataaagaaaaaagtgaggtgaaagtttcaaattttgtgtggttccaggcttgcaaaccaatcctccagaaaggaattgttgagaaaaagtaat

SEQ ID NO: 1829 - DNA, 298 bp, Glycine max
  unsure at all n locations
aagagatttttaagtttataganatgaaagtgtgaagagagtatgaggaattaagggatgttaatatggntattgatgaagttttggaatgagaaaataagaaggtntgaaaggaagaaaatgagtaaaagaagttttgaggggttttatagggnatgaatagtgagtttaagcttagaagaggtgaaaggaattattatgggtnaaagggatgatgttgaaggaagagttaaagggttggattatgtngaaaagaaatttgtgttaatagttaaagtgagaatgaatggaatatgtg

SEQ ID NO: 1830 - DNA, 391 bp, Glycine max
  unsure at all n locations
gcttgccactacagnagataagtgaacatatgaagtgttcacagtcattggatggttgcttggtagaggtacatgctaataactaataagatttcctgtgcagggtatcattgtttttgcatgactgatggctaccttgtggctggagattttggttgaatctgcctcaagtgttattttgaaggtagctgagataatcttttgttgttgtttgtttattatatacctaaatttgggttcaagactagttattcaacatgtggattatgtaccataagactgttctaataagtgatcttaaggtaggcagatgatcttatcattgaagaggtgtgtttccttctctgttgtggattcatgacctataagttaatacatgaaactgaaaaat

SEQ ID NO: 1831 - DNA, 463 bp, Glycine max
  unsure at all n locations
agatntagtgtttgcgagcgaaaggatcgaagtaagtctgagaagaggtaaatntgattatgctgctctgatgaataagaagcctgcggcaaatggattgaataagaaagagggagaaacccatgttgtgattgtcgttcctacatggccaaatttcccactagctcaacaatatcaatgcacaatttctttcatttcttcttgctacaaggtcatgacaaacgacaacaacatatacctccaaaccctacaccagggcaatgacagacatcatgcatgagcttcaaacaaacctaggggcagacaagaagtcctatggcctaggcaagttaacgaaataaaaaaaaaaacaatcaagggcgtgttatgaaaggttntgtcccaaaatccacactggtaaagtctctggtcaagaattgaaatgacaaatggtcgtgtttcttcattccaaacacctgattat

SEQ ID NO: 1832 - DNA, 431 bp, Glycine max
  unsure at all n locations
agcttgtcanaataattattttttcagtagacttcacactcatgtctacaaataagctctcattttataagaacttatagaataaatgcttagttaacttgtttaccaaaacatgccaaagtctcaagtaataaacctagaaaggaagctataaagaattgaaaggtcagtcacttgtaatttagtaaaaagtcatataaagcttgtacattgctgtttccactaaaagctatcaaagatgttgggctattatcaacataatgaccttattcgccaaatctgtgatatttcaaatagcacgcaccaattaatataaattattcaaagagaaaaaaaaaaccactgtaataattgatagaaaactccagacaccatatatgatagggaccatattattgacgccaaatgagataaaatgacgtcccatatta

SEQ ID NO: 1833 - DNA, 473 bp, Glycine max
  unsure at all n locations
ctgactccacacacgttaganaattcagtcattttcttcattagtgctttctttctcttcgcgaaagccaaatcacgatctctcccatttgggatgggctttaagattaattntgggcgtcccatgttctaaagcatatgcacatatatagaaattgatcaataaagcaaaacttggggtcatacgttggggatagagagatcaaatagacaactagttcatgaattgatcgaatgtttcggataagatgttgttctagaaatttaaaataaaaaataattcaacaaaaaagaaaatcatcaaggatcaaagaagaatggttcaagtctaatctctcctctcatcaaggattaaagaaatttatagaagaaaaagtaaactggttttgaataatagcaaaaatgaaagaaaaaagggaagacagaaagaaacaatagagatatatggatagataataattttcctaacagctg

SEQ ID NO: 1834 - DNA, 367 bp, Glycine max
  unsure at all n locations
agcttgacaagttataataataataataatgttattttatcaaattctatcgtattcagagtttattttatttagattttattttatccagattttattccatctatattttattttatccagattgtatttcatccgatcttatcttattttatcaagattttagtttatttcgtttatcgggttggccttaaaatagatttgtaaactttggggctgaagacctaatccatacattttttaatattatatgttcttttgttttttttatatattttgggctttaacgactttaatataatatgattttgttgatcaattattcttgggatnttacattacttatatgacattgtataagtttttt

SEQ ID NO: 1835 - DNA, 427 bp, Glycine max
  unsure at all n locations
cttaaaatntaaagactgaattaatttattgtttgaanatttaacgatcaaattaaatcttttaaaatttaaaaatcaaattaaattatttaaaataattgaacgactaattcataattaaacccttttttttatttttttgttggtagacttcgatttcacattaacaagtatcatgcgaatacacaacatcgatgttgttgccaaaggttaagattttctgtctcttttttcaatcccaatttccctttttttctaccaaacccctcatttccaactctccattatcactttcactctaagtctctatcccttgaaaatgttgatgatgattgttcccaattcaatcgcatgttgtgcatgcatcataccacacccatcattgaatttaacaagattttagattcctttgcaaagatgatgcagt

SEQ ID NO: 1836 - DNA, 245 bp, Glycine max
  unsure at all n locations
agctatgagccattattctgtctcaacatatatcttgactcagngcgaacaatcctatacttaccctcgcatacgcactgaaagagtaccgcgttattatacaatcaatcgatataggagagagatttatgtcaagcacatgatttgtatttcttaacacaagagagcttaaatgcatacataatgtaatgaatatttgatctcgatgctgtgagaaagagcattggagatgtactctagattat

SEQ ID NO: 1837 - DNA, 489 bp, Glycine max
  unsure at all n locations
ntgaggcctgcattacggacctatgaaactcagccttctcaagtgtgtagcgtggcatattagcatcgngtatgtgttccgtacacctctcttaattttatggactgccttcggtctgaatgttgtttcatcataattccttgatgtgtgctcgaacatgtgttcatataaagacacataacatggcctctcacaccactacaccagatggtcccatccaaataatgagtatgagcattttggatatagtgaggcgcacgttgttgagtgtaggactgtccgagaccttactgggcaaagctgcacacgcagcggcctatgtgatcaacagatgttcatcatcagacctaatacttcagacaccaatcgaagcttggagtgcagaaccctctacttactaccaagtgtagatgtatggatgactagcacttgctcatgctaacaatgaaacttgctggtgggctgtatgcgtgagtcattggccatccg

SEQ ID NO: 1838 - DNA, 385 bp, Glycine max
agctatattgcctaacaagccaacttacaactttatgccgcaagagactcaacataaggatgcacaggtcaaagttgagtatgagaaaagattgtatgaccaagtgaaggtgcaaattgcaaagaagaatgaaagctatgccaagcaagccaacaagaaaaggaaggaagtggtagttgaacccggtgatgatcctggacatttgaggacaaatgttttccaagaaggagggaatgatgagaatcctgaaattggccaaatacaggctaaaggcccaagtggagaagggcaaaggcccaagtggagaatgctaaagcccccgagtggagaaggatgaaggcccaagtggagaatgatgaacgcccataggcagagacactatcaa

SEQ ID NO: 1839 - DNA, 447 bp, Glycine max
tataatatattattacgctcgaaattaaacatcagaagctctcgagatattcaaatggtcataacttttcacccggatgtccgattatggcgaatcacatatcgagacgctcaaaattgaacaacggaagctcttgagaaattctaatggtcataattttaactcggatgttcgattcaggcgcatcacatatagaagcgctcgaaaaggaacaacggaagctctcgacaaattcaaatggtcataactttccacactgaggtccgattacggattataatatatcaagacgctcgaaattaaacatcgaaagctctcgagaaattcaattggtcatcacttttcacacggatgtgcaattctggcgcataatatgtcgacacgctcgaaattgaacaacggaagctctcgagaaattcaaatggtcttaactcttcacacggatct

SEQ ID NO: 1840 - DNA, 461 bp, Glycine max
agctttcaagaaacttgcaaaagttattcaaaatgaaaaagatttgaaaattaagaccttgagaagtgatcatagaggtgaattccaaaatgaagattttaaaactttttgtgaagaaaatgggatttcacgtgatttttctgctactagaacttcacaacaaaatggggctgcagagaggaaaaatttgtgtttgcaagaactagcaagaactatgttaaatgaaactaacttagcaaattatttttggacggatgccataagtacaacttgctatgttctcaataggattttaataatacctattttaaaatccacaccttgtgaactttacaaaggaagaaagcctaacatatcacacttaagggtctttggaagcaaatgctttgttttgaataatggaaaactataccttgggcaagtttgattccaaactcaatgaagcactctttttacgatat

SEQ ID NO: 1841 - DNA, 370 bp, Glycine max
cttgaatctaagcttctaaggaagttttctcaagaaagcttctcaaggaagctacctagtctataaatagaagcatgtgtaacacttgttgtaactttgatgaatgaaagtcttatgagacacacttcaaagttctacttctccccctcttttattccttcaatttcgtgctcccccctctctctttctctccctctttcttttcctccattgaagcatccttccaagcttcttatccaaggctcatcttggtggtgaagctccttcttccatggcttattccctagtggatggcgcctcccttctcctcttctcctttgccttccgctgcatctccatggtgaaaaatcaccattgaaggacctcattg

SEQ ID NO: 1842 - DNA, 492 bp, Glycine max
agcttaagcttggtatatttaacttaataggcttttaaataagcgtaagcctaaccttttaattaaataggtccgttcagatcagactttatgtaagtcagatcgtaggtccttataggtcggtctgacctattcccacccctaatcataggtttattaattctctgaccctttaaggcatattataatatttatatcactatttacatttaaagaaattgtatttagacgaggctggcctaacgattagttagacttaaagtgattaatgatagtgctatatatgatttttcttatttataaaaattaataacaattttttttttgttgaaactaaaacttgagtggcttattgtatatgaataagaaaaaatattgtatctcgtaaaattactttctaacaaaataaggggattatactggacaaacaagtgtcacttatgttgtgacagttgtgaggaatacctttactcacccggccattttattgat

SEQ ID NO: 1843 - DNA, 273 bp, Glycine max
cctgtaccttttttttttatctttgatagtgtgttttggtatgttattaccttttttcctctggctcactactttccgaggttgatgtaactgcctattttcctaatgccttctttgagttgacttttctttactaatatgaaatatagcacctaatattaatttagagataatctcccaattttttcccatcatgtatgtatgaggtggagtgcgttttgtgattctagctgctgaatatacttgtctacatatattaaaagccatcaaatg

SEQ ID NO: 1844 - DNA, 488 bp, Glycine max
  unsure at all n locations
agctttgagccaattcaaacgacaataactttttactcggatgcctgattgaggcccgtaatatatcgagacgctcgaaattgaatgtggaagctctgagccaattcaaacgacaataactttttactcggatgtctgattgacgcccgaaatatatcgacacgctcgaaattgaatgttgaagctctgagcaaattcaaacgacaataactttttactcggatgtctgattgagtcctgtcatatatcgagacgctcgaaattgaatgttgaagctctgagccaattcaaacgacaataactttttactcggatgtctgattgagtcccgtaatatatcgagacgctcaaaattgaatgttgaagctctgagccaattcaaacgacaataactttttactcggatgtctgattgagtcctgtcatataccgagacgctcganattgaatgttgaagctctgagccaattcaaacgacaataactttt

SEQ ID NO: 1845 - DNA, 590 bp, Glycine max
gacactatagaaactaagcttaacattgaatttcgagcgtctcgatatattacgggcctcaatcagacatccgagtaaaaagttattgttgtttgaatttgctcagagcttcaacattcaattccgagcgtctcgatatatgacgggactcaatcagacatccgagtaaaaagtcattgtcgtttgaattggctcagagcttcaacattcaatttcgagcgtctcgatatgtgacgagagtcaatcagacatccgagtaaaaagttattgtcgtttgaatgggctcagagcatcaacattcaatttcgagcgtctcgatatattacgagactcaatcagacatccgagtaaaaagttattgtcgtttgaatttgcctcagagcttcaacattcaattttgagcgtctcgatatatgacgggactcaatcagacatccgagtaaaaggtattgtcgttggattggctagaacttcacaattaatttcgagcgtcttgatatatgacggactcaatcagacatccgagtaaaagttatgcgtttgaattgtctaaagcttcacaataaatttgagcgtctcggtttatgacg

SEQ ID NO: 1846 - DNA, 817 bp, Glycine max
  unsure at all n locations
cacaggaagggagagggaaaatacataagaagaaagctncgggaagaaaaaaaaagaacgaataagagccccntgggttgagctgtgacaggcgnntnggaaanagcgagggagaaagaaaagaagaaaaggaggggaaaattttttgtgaaggggaaagagagaagggggggggaaaaaggagaaaaatgggagggagaaaaagagagtgttgagaagagaagagggggaagggggacaagcagaaaaagaaaaaggtaaaagggtcaggaaaggaaaagaaggggaaaatgagaaaaggagagcaagggaaaggagaagagaaaaaaaagggggagggaaaaaaaaaaaggagaaaaagataaaggaaaagagaaggaagggaaaagggaaaagggaaagaaaaagagggagaaaagagggggaaaggaggggagaagagaaaggagggaaaaagaaggaaaagaagatgggggagaaaaagaaggaaagggaaaaagaagggagggggaagaggaaagaaaaatgggaagaaaaatgagaagaacaaaaagggggaagaaaaaaagaggaaggaaaaaaagaggagagagggggggagaaggaaaaaaagagaggagagaaagggaggaaaagaagaagaaaggggagaatgaagagggaagggggaagaatggagaaagaaaagggaagaaagaaggagagaatgaatgagaagagaagaaggagaaaaggaggaagaaagagaagggtaagaagagaaaagatagaggaggagaagaggaaagaaggagaaggaggaggaggaggaagaggg

SEQ ID NO: 1847 - DNA, 836 bp, Glycine max
  unsure at all n locations
ttggtctgatcgatgcnatggcgacaccatataatatctaagactgagacgaggaagtgtacaaaggtgaaacttcctgcttctattttttgttattgatgtggtcccggagatatgatcacgggggtcttgaaaccttggggaccgcttgtggggtgctaatttccataaccaagctttgaacaattgcgaacgtacccactcgtatgttgtcaaacagaacctgtgttaggactaaacaggtgagcttttgtcgggcaagatatatggggaacatacaccacataccttaggggcctgttgctggctggccagcatgtagatatcgtgtgaatatggggttgcggtctctcgttattctattccaaagatggcgtccacatttaaatgggttcaatttaagactgtatgcttagaatgtattttggttattgatatatagaggatgtgacctattgccttctcggaaagatggaaaggatcaattgatacattacactaatgcagttcgtatggtgaccattgcctaaatctttttgtagagatggtgccgtatgtcctttctatattttgattagatcctattgggatgatttctagtcaaaagaatttgatcagattctcttgaaatattagcttatttggttggtatccacgtgaacgaacagaattgctttgcaaactaccctatcggttcatatggaaaagaagcgcaagcgattcgattcattatgaatagtaaatagatacaccgtattgggagtgtatggtctacgttttaattttcattgaaacgtcaatgggttcgtgtctttcttgtactccaatgtgcgtcg

SEQ ID NO: 1848 - DNA, 285 bp, Glycine max
  unsure at all n locations
agcttgttgaaattgccatgtttggatgagttatacatacccattctgntntagggttntgtgatgatgtttatatgctgaaattgcctatggaaactgttagagatgaagggtagagttaacctagggttagaaagtgagaatgtggtgttgtgagtggaaaaagagtgaggctttgagagttgaaaggctaagtctgaattctgtggtaaatggagattaaaatgagttaatactagcttgaaatgtcatttacgacatgtgagaaaggttacgctgacctac

SEQ ID NO: 1849 - DNA, 515 bp, Glycine max
tcttatccaaggctcatcttggtggtgaagcttcttcttccatggcttattccttagtggatggcgcctcctctcacctcttctcctttgtcttccgctgcatctcaaaggtggaaaataaccattaaaggacctcattgaagctcaaagatccaacctccatagaagccctacaagcaagcttccatcaagtggtatcagagcacaagagcttcaagtaggtgatccttaaacctccattaatttttggctttatcttctcttccattgttggttcttcatttttccccatgtatctccttacatgtcttgtgctaaatgttgttaacataattctttagagttttcaccgattaaacttgctataaaagctagatttgattttctatggttcaaatttcttgttcttgttcttgaaccatgaatagtgttgagtttaagttcctttgagttttggcatgctattttttgtggatgaaacctaaaccataaaattcttaccaaaatattaaagt

SEQ ID NO: 1850 - DNA, 82 bp, Glycine max
agcttgtgtggctctatccatatttgaagcttattatatcgctgctgctggttgttgtgctcatatcttttggatgcaaaca

SEQ ID NO: 1851 - DNA, 301 bp, Glycine max
gtaagctggttgttaaaccaaactttagcaatataaaatagtttatgttacacgggactgaagtgtcccaaattgcaaactgataaaagacaagaaattttgtttgcaggtacttactccttcgtactccctccaaggaggcttccccatgaacatttctataattgtacaacccaaacttcaaatatcaacaacgaaagcaacgtcaaagctgttatctttttgcacaaccgcttgaaaaagctacatgtatgtggaataagtgtttatagagaatgcatgagacatcatgaagtaaaat

SEQ ID NO: 1852 - DNA, 553 bp, Glycine max
agcttccactcctttgatgtctcctattatacctgcttccccgggaatatacctgccaattacctcccgtaggttttttatgagtagagggggtatggtccaagtaagtttgaggttcataaggcaaatctgttagctggcccaactgaggcccacattgtatggacttagcctgctgttcagctctgtcttccttatcatatatttgtttatttgcctccttcatgatgtgcttaccctttagcctgctgtccagtaggtccatttaacccatgcaatttttttctgatcaaggccaccaccctataggaacctcctctggattagccccgattggtattcccaaataagagaaaggcagaggcatgattttgcaatttagataattggcagcctgcaattttcattgttcagataggcccaacaccccacagctgctcttcccataatttattttaagtcccttgctcagctgagatcttgctgactttcaacacacccgcccttcccacccccgaaacacacaccccccctctacacagtcccccctcac

SEQ ID NO: 1853 - DNA, 934 bp, Glycine max
  unsure at all n locations
acagcacacagtggatatattatctgaactcaccaacgcgtcaattgaaattgtaanagagagaagattactgtgtctgantctntaagggtnnnnnnnnnttgctgctgnctctattagcgacacntanaannanaaaacccnagcccctaacagnagacaaaagaaagaagggcttcagaccgttcatccgcgatggaggcaggctaaatccggggcgacgtggaaatggacacccgaaagcaccaaggacggtgtggacaacaccgggaaaaaaaggcactaaccaaggaaaacagggcccaatttagcaaacccgcccagaacccccgagggagggatgtaccatgtaaaatgaaatgggtctcactaaaaactcaggactcataaaacgattggagcaaacaccctcaacaatgctggacacttgcaagaagggcggagaaaagcaccaggccatcatgaaggcaaaacatactccccccacgagctggcccgcggggggggaagaagtatcaaaaacaaaagcggaggggcgagaagaccaagaaaaacccgagaaaggctccaagtntggaagccctgagggcgcaataacccctcaatcccccataagacacaccgagaagaggaagaaggcgcgccccacaaaacctggagacaaaccgtcaaggccgcgaaagaaaaccctgagaacaaggaacggcaattccaacaaaaactgaacaaagggcccttacaaaccaaagcccgggacaaaacaagggctacggccaggactaacggaaggaccagggcaacaaggctcgttgccccgcaaggaccacacgaaagaccgaatggaagcgcaggagaacaataacacatgcaccgcgaccggcgcaggtaccgcaggccccaacaaaacagctaggaacgagcacaaagatggcca

SEQ ID NO: 1854 - DNA, 600 bp, Glycine max
  unsure at all n locations
agcttcatgcttaagtatgtatggcaaaactttgttactgttgttcaagacatacaagtgagcttgtaacaaatgttctacacttggagtgatcacatgcagtcctcttgaacccttaccacccactctgtcttcatgccgagactcgagaaggctaacaggtttagccttctctaagtattctgaacaaaattcaatggcttcttctgcaatgtacctctcaacaatagatgcttctggacgatatagattctttgtatacccttttaagatcttcatgtaccgctcaaccggatacatccatcgtagataaacaggaccacaacatttgatttctctgaccagatgcacaatcaagtgaatcatgatgtcaaagaaagcagggggaaaatacatctccaactggcacagtataattgcggcctcattttccaactcatcaaacttgacaggactaatgactttgctacatatagcatggaagaaaaatcacaggcgagttatcactaacctgactttgtttggcaagatgtcttgtatagcccaccactaacaaatggttgcatgagcacatganaatcgtgagacttttaaccctac

SEQ ID NO: 1855 - DNA, 449 bp, Glycine max
  unsure at all n locations
tgtcaagctccccacgtagtttctgcatatcccattaccaagagattgttaggctcaagcatggcttaaaacaggattaggctcctctcaaatgaggggaacacactttagagtttgatttcatcacaattaactattgcgaatgcacttcctcgctttaaaggagccatatcccttataaagacaaagcatcagagctttgctgggaaaggatagagggaacattacccttattaactcgatgacacttttcgaagcagagaaatgacggtaacctccaagcatgtcaatgccctcaccacttttgctagggacaagattaccaccaaatagaagtagggcataatctgaaatgttcgtagagtctttaatatagatgctggtagttntcaccttttcactatacaccatgtaaggaagagggaagagataaatcccagcattaacag

SEQ ID NO: 1856 - DNA, 229 bp, Glycine max
  unsure at all n locations
agcttgggaggattgatggggacccggtgnngtgnataaacgaggatatgggctacgtgggagtacgtgagctcagttggaggtgggcaacatgggatggtgggtttatgcgcgcattgtggatgtggaaaacttgttgtgcaccatcgcccgaccgttacctaataccacatgtgatggttaccctatattcctcctgggattctttactgaagagttgaacggtgaa

SEQ ID NO: 1857 - DNA, 464 bp, Glycine max
tgatgaagaatgcttggaagttttttagactttgaatgaaaaccttgtatctgccgcaataatggttgtatctgactagagtaaggagtttgagttgatgtgtgatgccaacgactatgctgtgggtgcaaatctaggacatcgacgagacaagatattccatgccatatactatgtcaacaaggtcctgaataacgcacaattgaattatgcgactactgaaaaggaaatattggtcaacgtctatgccttagagaagtttcaatgctttctggtgggctccaaggtcgtcatcttcacagatcatgcaacaatcaaatatcttcttaccaaggcagattcaaagccaaggttgataagatgggtcttgttgattcaagagtttgacatcgtcttcaaagacaagaaatgatctgagaatgtaatagctgaccatttctcccggttagtgaatgaagaagtga

SEQ ID NO: 1858 - DNA, 896 bp, Glycine max
  unsure at all n locations
acacgacactgtgggattcgaagatgcgcattcgaactacagcttgtggatgctatantatcgctatacatagttataattcacaaagaannnntnnnntggtctgacgctgcataccntggccnntncangaagaanncaaaactcaagccactagactcattcttcagaaactgggccattttatctttcattgctgggacccagcattcaggggacatagcagaatctatgcgtatcggcccaatgccgaaaaggaaaagaagcatgctagaaagagctccttgccaggacatttggcctaagtcaccaaagactcaagaatccggatgagggtgtctcaacaaacataaaataggctctttgactacttcaagggaatcatccattcgagagctggaagcaacctaatatggctgaatgaacagggaacacgcgatatatccaagtgctcaatgtgcaaaggactacccagctgtgaaatataggggggggctaatgccttaaaaactacaggaaggagctttacaaaacaagggtctaaagaattcactccataggcgctgggtaaagggaatatcccaccgagagtcctgaacgccatgggaggcgaaacctgccaaggacaactgggggacgaaaagaaacgcttacatccaaaggggcgaaataagacgaacagagccaacgtccagacaaaaggatagggaggcgtccttagaaggccccaggcagacgtgcgttgtaaaaaaccaccggatgataaagggacgccccgagcagaaaacaatgcagcaggagcaaggacgggcctagggggaacccaagagaagcacaatcgaaggtgcttgaccgagagcgtacccatcgaagggcggggtactgaacaaaacggt

SEQ ID NO: 1859 - DNA, 191 bp, Glycine max
agcttgcttgtggagattctatggaggttggatatttgagcttcaatgaggtccttcaatggtgattttccaccatggagatgcagcggaaggcaaaggagaagaagagaggggagacaccatccattagggaataagccatggaagaatgagtttcaccaccaagaatgcgcctaggataacaagcttgc

SEQ ID NO: 1860 - DNA, 573 bp, Glycine max
ttaattataagtaacaaaacaaaaatgtgattgctgattgcagtttttttatgaattgatggtttcatttttaattgccttgaatatgtttttgtgactaaaaatttagtatttttttatttttgatccatataaatttatttttctaattttaattcttataaattttcgttgttttttcaatttttatccttgtaagatattttgtatatttttttagtcatgtaaatatgtgttttttaactctgaaaaactataaataaaaaatcataattttaaggaactaaaattaaaaaatataaactcaaagaaggactaaaaatgaataaagaaaacttactggaaccaaagttaaaaaaatgaagagaaaaattaaaaaagaataaacttaaagagaacataatgtaaaaaaaatacttaatgaaactaaaaacatatctaaagtatttttaatctacttaaatatattatatacgtattaatctttacaaaaagatattaaaagcgacaaatgtgtatataatgacttttaaactggtcaattcatttccttaaaagaataaaaaaactgtt

SEQ ID NO: 1861 - DNA, 112 bp, Glycine max
agctttaagccaattcatacgacgagagcttttttattttgatgggacgtccgtcacacatccgagcaaaaagatactgtcggttgaaatccgctccaaagctttcaaacat

SEQ ID NO: 1862 - DNA, 62 bp, Glycine max
taaacattcaatttcgagagtctcgttatattacgggactcactcatacatccgaggaaaaa

SEQ ID NO: 1863 - DNA, 264 bp, Glycine max
agcttatagtggagtagcaacttttatatcccttattttcttttattctcttacgaacttatcctttcccacaagatctttacacaaaccggttttcaaacagaacataaaatttgtgatggacatgcgagtccactttagtctggtggtagacctaattcccaaggcgggaagcaatagcaatgtgacaaaagctattttctttggctgatgaaatacatagatgctgaatcacctactcactaaaaaagagccgtgtcggcg

SEQ ID NO: 1864 - DNA, 474 bp, Glycine max
  unsure at all n locations
tgatcaaaacaaacatctaatcattccaatccactcaattcattcatttgctcaattaattcattcgcaaacactcatttcatacaaaacaatccactacatatcattttcaatcagctcactgttcaaacaagctttttgtacaagcaatcaactcaaagtactgaaatgtttaaagactagaattaaaacaactgaaatataaagcaaactaaatagttggtaaactaaaatgttcatgctttgtagaaattaaactaaacacgatttaaacaactgaacagaatttaaacatcttgctcatcttgtggctgatcttcattaagatccagtgctggagctactgatgaatcctgaataagctactctggctccatgactggtgaagatagcaaggtctccttaggagcaggtgcatgagatggctntggtatctgatcagtagaagtctcctcctgagccatgtgtacatct

SEQ ID NO: 1865 - DNA, 370 bp, Glycine max
tctatataagctgaaccattttatcaataaacacaagttgagttttattcagaaaattagagtttatctcttttatcttagtgagagtgattctcctaaattcttgagtgattcaagaacaccctggctgtatcaaaggactttcacaacctttgtgtgttgccctcgctggaaagagtgattctttccttccaatcatctccacccttgttctttcaaaccacaattccagaaaatccacctctgcccaaaattatctcgtgaaaggtctctgtttgaaattcaatttaggctcaagaatcacttaatttgagtgtgtaaaatgggaattatggtcacgagataattttggccgaataaatgggaaaat

SEQ ID NO: 1866 - DNA, 138 bp, Glycine max
agctttagtaatgggctgagttagataaaggacatactatacacaccaggttaaacatgattcaatctcacgtttttaatgcttttttccttacccactgaccaacttcatgaacgtggttggatttgtatggagtgg

SEQ ID NO: 1867 - DNA, 428 bp, Glycine max
tcacagtgcatatcaaccttgagtactatctctgggggctcttcatcctttttctcttcttccttcttttcctctgtggtctcttctttcctttcttcttccttgttctcctttaacagcaaagagaatattaattgaatatagcaaagatgtgactgaaaaatctccaccatgtgtagaactagagtatatatggcatgcattacttgataatgatgccaccaccatatatatcatagagcagacattatatacaaaagatcataaaagttaaaaaaatgcatgatcctagtcctatagtgtagttagttctaaggctaaagttgtcgaaaaaaggaagagacagattgattaagaataaatagacaagaattttctgtgtaagagagaactcttacttcaccccatttctgtgacaatgaacaatg

SEQ ID NO: 1868 - DNA, 751 bp, Glycine max
  unsure at all n locations
cttatctctatatgtaatccggagnctttgcaattgcgcgcgggaataagcctggggggctccccaccccacccaaccaacgcctcccgctctctcccccgccaccaccgcccccacacgacgccccccccttccctcgcctcacccctctcagtccctcgctccccctcctcccccccctctcccccatcgtcccacacccctccctcccaccccctccccccccctcccaccccccgcaccccctcctccctctccctcaccaccccctcctccccccctcccctccccccccctcctcacccctcacccatcaccctccccgccccaccccaccctctctcctccccgccccaccaactctctcctctcctccccctctcccacccctgccacccccacctcccccccccctccacccgtcccccccacccctccccctacccccctcccccccccccctcccccccccccccccccccctcccccctcgcccccccctccccgccccgcccacccccctaccttctcctcccctcatccccctccccctccccctctcctcccctacccctcccccaccccctccctcctcccctcctccatcgaccctcccctctcccgcacccccccctccacccccccccactcctctcccccccccccncctcactacctcctccccctccgccttccctcatccctccccctcctccccctccccccccctctctcaccctccccctccccc

SEQ ID NO: 1869 - DNA, 256 bp, Glycine max
caccggcgagcctttgaattgcttcgattaagtatctatgagacacatgtttcctaccataccctttgaccagctcctgagcaagtaatatgttatcctggatattcctaccaggaataaaagctgaatgagtgtttttcaccacactatttatcacatcactcagtctgctagtcaaaatcttcgatgtgaccttataaattgtgctacaacatgatattggcctcatgtctttgatggtttttgcctccgggga

SEQ ID NO: 1870 - DNA, 420 bp, Glycine max
agcttcaacattcaatttcgagcgtctccatatattacgggactcaatcagacatccgagtaaaaagttattgtcgtttgaatttgctcaaagcttcaacattcaaattcgagcgtctcgttatattataggactcagtcagacatccgagtaaaaagttattgacgtttgaatttgctcagagcttcaacattcaatttcgagcgtgtcgctatattacgggactatatcagacatccgagtaaaaagttattgtcgtttgaatttgctcagagcttcaacattcaatttcgagcgtctccatatattacgggactcaatcagacatccgagtaaaaagttattgccggttgaatttgctcaaagcttccacattcaaattcgagcgtctcgctatattacaggactcactcacacatc

SEQ ID NO: 1871 - DNA, 368 bp, Glycine max
  unsure at all n locations
ntgagcaaattcaaacgacaaaagctttttactaggttgtttgattgagtcccgtaatatatcgagacgctcgaaattgaatgttgaagctttgagcaaattcaaacgacaacaactttttactcggatgtctgattgagtcccgtaatatatcgagacgctcggaattgaatgttgaacctctgagccaattcaaacgacaatcactttttactcggatgtctgaatgagtcccgcaatatattgagacgctataaattgaatggtgaagctttgagcaaattcaaacaacgataaccttgtactcagatgtctgattgcgtcccgtaatatatcgagacgctcgaaattgaatggtgaagctctga

SEQ ID NO: 1872 - DNA, 533 bp, Glycine max
agctttagaggactacacgtcttcgccttcagaggactactagtcctcgccttcagaggactacacgtccttgccatcagagggctacacgccttcaccattagaggactacacgtcctcgccatcacaagactacatgtcctcacaatcagagggcaacacgccctaacctttagaggactacacgtcctcgccgtcagaggacttcacgtcgtcaccttcagagggctacaagccttcacctttagaggactacacgtcctcgcaatcagggggctgcacgccctcaccttcagaggacttcacctcctcgccatcagagggcagtacgccctcaccttcagaggactacacgtcctcgccatcagaggactacacgccctcacccttagaggactacacgtcctcgccattagaggactacacgccctcgccatcagaggactacaggtcctcccctttaaaggactacacgccctcccttttagacgactacccgctctcccctttaaaggcttccacgccctcccctt

SEQ ID NO: 1873 - DNA, 258 bp, Glycine max
ttttggagtagaaacatgggaccaactcattttatttttgaaagtcgtatcaagtcaagatctgagagaccatacaagtttcctagcgggttctaattatatgggccattaagtctatcatatgctgacaatagctgagaagcccatgaatttcttccggggcggagtaagtgtccgccattgccctggctatggctaacaatcggggaagttcttgactcccgttcaaggtaagagcagaccgatccattcacatgg

SEQ ID NO: 1874 - DNA, 163 bp, Glycine max
atcatctatgatcctatatttgcacaagaattattgtgcttgtcgttggtttaccctataacatgctggaacaactcgtttctttttcaacaaaataaaatgactagattgtattaataacaggtaaaccaacctatttcacacatgcttctcaagcatattt

SEQ ID NO: 1875 - DNA, 471 bp, Glycine max
tacttttttctttcctatagatggtttcagttactatatcttttatgacagtcttgagctggtcacaaaaggtcaaacaatagactatggaatgaacctgcactttgtgagcttaattgatatgtcaagttacaatttgtctggaataatacctccccaaatgttcagcctcattggattgtactccttgaacttttcccacatcaaattaacaggacaaataccaaatgagattggcaacattgaaaacttggagtcccttgatttctcaacaaaccaacttcggggtgaaattcctcaaggcctttccaatttgtcctttcttgcttccttagacctgtcatttaacaatttcacaggcaaaataccatcaggcacacagctttaagggtttcgtgcactcagctatataggcaatcgcaatctttgggacctccactttcaaaattttgctgcagggtagtgaaccta

SEQ ID NO: 1876 - DNA, 379 bp, Glycine max
agctttgaagtttttcaccttctcgctaagccaaactactggcttagcgagcgtccgctaagcacaacactcatgggctaagcgcgtggaagactctggaagaagataagttgtacaggttcgttaagcgcaccgcttcatctcactaagcgcaccgcttcagttcatccgctaagcgagaaaggcacgcgctaagccgaaattcactaatgtgcgctaagtggtccataagtgtgctaagcgcacgagcacgaacacgaccacctatttaagcctgaaataagattttagagggagtttggattgggattcagagctttgcatgtctagagtttctagagagagaaaggtccaagcttcaagagttttgagagatttt

SEQ ID NO: 1877 - DNA, 422 bp, Glycine max
tgactattggattccaaaatgatgggaaaattaatgatgttacacacaaaatataagttgggtggttaaattgtagaaacacgagtggttatttgtgaccgtaaggaatctaccaaggtcaaaggaaagttttattgtactgctatacgaccaacaatactctagtaatgagtggtgggctttaaaaagaccacaagaaaaaagtgagagtagcataaaagagaatgttcggattaatgtgttgtcattcaagaaagggcaagatacaaaatgattgtatatgagaagatattgatatgacacttatcctgaagatgacaacaaaaaatcaattaaggcagtttgaacatatgcaaagaaggccactgaaggcactggtgaggagagtagattacatgaattttagccatttgaataaaaat

SEQ ID NO: 1878 - DNA, 189 bp, Glycine max
agcttgtgtgggttccactccagaatccaaattcaaaagcaaaaatagtcattccttgatccatatgggctttattgggcttgtaacatggtcagggggtaagaaggctatgaaagaaaagatcaaagaggctcaaagagtgtttaagggttatattgagtaagaaccttgagatccttgcctgtactt

SEQ ID NO: 1879 - DNA, 327 bp, Glycine max
tgcctcaaagaggtccaggaaggacaaggcggccgatggaacttgttccgctctggagtatgacagtcaccgctttaggagcgctgtacaccagcagcgcttcgaggccatcaagggatggtcgtttctccgggagcgacgcgttcagctcatggacgacgagtataccgatttccaggaggaaatatggcgccggcggtggacatcactggttactcccatggccaagttcgattcagaaatagtccttgagtattatgccaatgcttggccaacagaggaaggcgtgcgtgacatgagatcctatgtaaggggtcagtggatccc

SEQ ID NO: 1880 - DNA, 888 bp, Glycine max
  unsure at all n locations
ccacatagcacttcgctgcacanacacnanagntaanccgcccgcacgctgccttccatataggactgcatagcctgcggcatttttattttatttgccggaacctgcttaagagcgacccgcgcctagtgcatgatgaagcctttacattctttcaaacagttgtgaagagatactcctctctcttgccatctatcaagactaccttgcgcctcacaacctacagggccagcaccccccctaactctttacaagcgacactcgcgtctctccccttgcacaccgacttcctcgtcctccctccctccgaggccctcctagccctccacccccagaggctccaccctcacatccccctcccgcgcgtcgcctccccctctccctcatacgaccttcccctccccgcccccctaaggtccctccctcctccccttccagcttggtcactgcccctcccccctccacccccacgacacgctcgcccgtcacaaccctcttcggttacccccctcccgacccctccgaccccgcctgccatcgaaatctgactcgctcctctacccaccctgccctcccccccccctcccccgcctctgcgcctctccttccgtcctccgtctcactcctctacccctcttcccctccctactcacccctctcccctctcctacaacacccacttcctccgcgctactatactcgctgctccgcctcaccctcgtaccacgccccgcttctccgtcctctcgcgccactgccnatacccactctctttcccgcccaacgtcaccgctcccattctccttctctcgccccgcctctccacctattctaccctctactctcctctccgctccccctaccccgcgcccgtacctacccggcccg

SEQ ID NO: 1881 - DNA, 301 bp, Glycine max
agcttctagccaaatggacttaccttgaattaattcctttggtagcccttttgagccttgtttccctttccttgttttgaagctcactacaagccttaagtgaaaaaccatgatattaccatatccttaaggaattttggagctttggaattgttttgggaataagtgtggggggttactgcaagcctatagcgcataagcctacattttgaccgttgggatctactaccaaacatccacaccttactctgcactacactttccacagcccaccacacacaagcatttttctgcacttgcg

SEQ ID NO: 1882 - DNA, 431 bp, Glycine max
ttacagcagattttagtaatgacccactaacctagaattaaatttacttaatgccattaacctagggaattaaaagaacttaatggctgtgaaattgtggcaaccaaaagtcacccccaacagccaacaagtcatccaccatttggtctcccaaaaggctgatgcctaagttgccaattgggcccttattacaacttgaactaaacctaactaaagcccttttaggtgattaacccaaaacatatttttggtcagtcaactttaccaggattgggccattatttatacaaactaaacactctaaaattgagacaaagtggtgccatttagtcctccttcatttgggccatgatacaactcataaccttggacttttcttcttgaaacttgggcatgtattcaaatagtatggacaacacttgttgatgagc

SEQ ID NO: 1883 - DNA, 186 bp, Glycine max
  unsure at all n locations
agcttccacttattagtgcatagctccttcaagaatttagcatatcttggaatttgctttattgcatccagcagaggcatgtttacctctacttttccaaatgtttccaagatctccttctctgcctcttccatttttttgntggaaattgctcttggagggaatggaaaagggatatgttgcttt

SEQ ID NO: 1884 - DNA, 886 bp, Glycine max
  unsure at all n locations
natatatctacgtagtanctgtcactatanacatactnnnngccttttgagatcctaagaaaagagagccatatgtaatcttgaggggagcaaggcttccctttttattctgggaanagcgccaccggagggcctgagagggtataattataatcgcccacccacgtgcacccaatcggacctcacgcgcatagaaggaaggaaaatattgcggcacggccaaacgtgacgggtggcgaacaaaagctcgagccatgctacaaaagcccccgcaagacccaaatgaggaaaaacggatagtagcagatgcaaaggatcgacacgacgataccacacaccccgggcgcctcggaacgacatcgcagccatatgagcgacgcgcccacgaaccccgtaaggcataggggccacaagaaagacgatagaagaagagaaacacaagccactcttcgacgaagacaagagctcagacacacatcgtaagagccgtcgaagaaaagaaggcggggcacgtgacagacgaggcgcagcacaacacagagtgagccccgacagtgaagaccccgatcaagtatacgggccatcgaagaatcgaaccgatccgatggacgtcatctggacgcaacacaagcttgcgtacagcaacgactaagaatggcacgtgtaccaaccgtatcgcaatacgaaaagccgactcgctctcgtacgacagcacacagctgtgtacacgatgcaacagaccccgacatgaactcggaaacgcctgcgaaccgtatactatatgaggacccgaactgggagggtactcaaacacaagaaatgcaacgccagcagctacaacatggtggcgtgaacgcggactcggataacaagaatcgagaaggct

SEQ ID NO: 1885 - DNA, 462 bp, Glycine max
agcttatccttaaataagaaaaagtatccctcccattataatccaaagtttgataaaaaaaaaaaaagaaaaaacattgctgtttcaatagcaatatccttacaatatctctgcggataagctcctgaagtttaaacataatgcgttgacgagtggtgataggagtatttttccatgaaggaaaagcttgcttggctgcactaactgcagctttaaactcttcatatatagttaaatgaacttgagatacaacttcttgcgttgcctgagtaaagataaatattcaaattactttttacataaaccatcacaatgctaagaaaatttcaagcaaatatcattgaaaaacatatcaacttacgggatttataacatcaatgattacagaaccctgagaatttacaaatttccccccaataaaatttgagacctttagctacataccaataaaaaaggccataa

SEQ ID NO: 1886 - DNA, 424 bp, Glycine max
cgtccaactttagaagcaagaaaccaaaagaagaagggcagtcttgttttctatgtcaaagtgcatatattagaagttgtatatgactagaagtatcattttggaggtagtttaagtcaaggggcagatattggaagctgcacatgacttaagaatcattagaagatgcaatggtttgactacaagtgaagataaacatgtctacatagtcaagaagcacacattgagagttgtaatggtcaacaccatgcatcagtgtattgatgcattaccttgttgaagcactcttgatccaacaaatctaattcaaaataagagagataagctctactttagcaagataaccatgaagaagaaatgtagtcattcacaagctgcaaatagtaaaaaagaatgaacaccatttctgcgaatgactcacttt

SEQ ID NO: 1887 - DNA, 523 bp, Glycine max
  unsure at all n locations
agcttccccaacatcaaagtaatacaacattcatacagcacanactatcacagccaagaaaacagaacaaaggcagaaaactctgccaaaacaccaaccaaaaatcacagcttttcccactcaaagaccccagtaacaattccttcgatccaattcgtaaaccgttggatcgactccaaaattttactggaagtctatagtgcataagcctacattttgaccgttgggatctactagcaaacatccagaactcattctgcactagactttccacagccaaccacacacaagcatttttctgcacttgtgcaaaattctgctgcacaatttcacagcaaaaattctgcataagtgcagatttcgaaaatcacccttcctctcatccaatcttgcccaaatcaaatcctacaagtcccaaatcatgtatcaaacatgtctaaaccaaagccaagcttcaaaccacagcaacacaaaatctaggtgtccaaaacccctcaattcaatggcttttctaggcttgaaa

SEQ ID NO: 1888 - DNA, 443 bp, Glycine max
  unsure at all n locations
ctaagctttataggtgaaatcaggtgcagccatttcccttagagtcctctcacgaggtggaggttgtgccatgttctcagaatgtgcaaaatcagaatgctcagaatcagaatgctcaaaattataatgctcaagatcaggatgttcaaaatcaccaataacagaatgcacagattcaccagttatggaatgctcagaatgatcaaaaggtataaaatgatgcctaactaatctatgaaatgtcctatctatctcaggatcaaagggttgtaagtcagatggattgcctctagtcatacactacattcagcatgcacacaactagttgccttgtcatgtaaataaaggtgtaggtttgaactacagctaccctcaaatgatatccaaatgacttgaaattntgtgagcaaccctataaaatgatgagaagatagcacaaaaaa

SEQ ID NO: 1889 - DNA, 152 bp, Glycine max
agcttgagctcattgttgctgacccacaaagctctacggaatttgtctcggccatgctcttccttgcgagccctcttggtttctttttcaagggctcttgcggaagcttaattttcttctcgtaactcgacacactcttttcagacgtctat

SEQ ID NO: 1890 - DNA, 317 bp, Glycine max
cgcatttggagaggttccatcaaccgccctaattccgtgatgcttgtggtttctaagctttaaccttgacttggtaggacctcttgccagtttgttttgtccccatgcttactaaagtgagacaaaaagctagtgcaaatcaaaactccgatattttatgggtgggatggatgaatgcatgatggaatgcatatgacacagatgcaatatttaaaagcgggggttcggggaatctgaccccatcttagacacaacgattaagggtagcaaatggccccaacgtacgtttttaataatgcgacgcaaaccctccgttg

SEQ ID NO: 1891 - DNA, 376 bp, Glycine max
  unsure at all n locations
agctntaggactcgccccccattccttatattcagaaataatatacaattcaagaatttctctttgtcccttaatcatttctaatttctcaaatgggcaatgcagaaaatgcttatttcaaacatatccaatatccatctcctcaaacaacctccaaatgttcttaatctccaaaagtttaggtaactaaaacaaaggatattttttaatatgaagatatgaagaaaaattgagattcctatcatctagaataaaatcgaaaatagggtgtgcgagcatgtttgcacgggtggacagacattacaaatatctcacgacttaacttccaatctgttaaaagattgtaagtcccatcatacatcacatgatagtcttt

SEQ ID NO: 1892 - DNA, 511 bp, Glycine max
ttggggctggaaaactttataatagcaccaaggttctagtttagctctctctcttctctttctccttttttttcgtttttgcaattcaagttctgacttttcattttagcaataaaattttgttcttcaatctataatttcgttctctattgattaatggaaggctaagtccccagcgttgttttctcttgaggatcaaacacagttctctttgaggttctatcattattgttaaattctgttcagtttttcctcttcactaattactctgaatttgttgctattaattcatgcatgcttagtgcttgattaattgtctctgcgcttaatttatgttcatgcttaatgatcatttatgagtaatttctgtatgtgttgcttaatcacataatgaatgccttatgttaaattttgcttagtaatttaatatacggttggattaagtggttgaactgataaacgataaattctcgcaacctacgataagagacttgcttgtgaatcaagggga

SEQ ID NO: 1893 - DNA, 262 bp, Glycine max
agcttttattttctgatgagtaatcgttctagtatgtcttgaatgagctcctcgaaaacttgatgtaaataaacgaatttttgtccttcgtttccgagctatatatcctcgtttaattctggtcattgaataattgagactttgatgaataactatttgatttttcagctattcttttcttcttactagtctattaataacacaaatggattcttccaatgtataaaaaaagaacttcacaggctcttgctactataacctc

SEQ ID NO: 1894 - DNA, 447 bp, Glycine max
caggcttcataagtaaaaaaaatgttattgctggctagactgttttctctcttttggtaagcatgtgatgtgaactacttatatagttgaatttcaagtaaaattacagtgtccatttgactcctgttcccaaatcagtatttcgctttttgtttgttttaataggatggttggtgatatatggtttgttcatctttaaaaactgtttcaaacccaaaaaaataagaacaattattgttctcaaatgttctacttactgttcttgactgctggccactttgtagataaactggacactggtgtagcaatttgtaaattacttgggacagtggtatttcatggcaattttctaggttagtaaaactacaagtagaacacatagactactgttcaaacaagtcaattgtcatggttttagtgaactttcttttgctactcaagtttttt

SEQ ID NO: 1895 - DNA, 450 bp, Glycine max
  unsure at all n locations
agcttgagatgaggaagtgtagaagggtgaaacttcctgcttttattcgttgaccacagagtggtacctggagatatgtcgcgggggtcaggagaccttggggacgtcaggtggggtgctattgcccaaaaccaagcttgaccaatcccgacccaacccgggcatagtcaatcagtgagaacctatgatgtacctaaacaggcgagctcttggcagtcaacagataaaagaaactaagaccgcaaagcaaggaggcttgtgtggtggctggccagctgtgaactttgattgatatgtgggttatggcctctggtaatcgataacaagggtgggtaatcgattacaaggcttaaaaatgaagacaggagattaagatggtctctggtaatcnantaccacngggtgtcatccatttacccgtcttacatatgaatgtagcccgttgtggag

SEQ ID NO: 1896 - DNA, 183 bp, Glycine max
tggagcagacaatctatatactcaaggtggagggggagtgttttgttttctgttgcattttatcctcaggacgacaataaagttgatttactcgtatctactttggcatagtagatttaagcttttcccctatgtaaaacttggtatgggctctctgtgaccaaacattacatatatttaaat

SEQ ID NO: 1897 - DNA, 180 bp, Glycine max
agcttagtttgtttcaaattgtctgtcatttttaaaatcaaaccaagaaaacattaatgtttttatttttttaatttaatggttgtttcttggtgagtgtgtgtgtaccaatcctgcaaatagcttctctgctggcagggttccccaggccccacctccttgtgctctaagcacccattt

SEQ ID NO: 1898 - DNA, 551 bp, Glycine max
  unsure at all n locations
tgagttaagcaagcctaaagagggtcgaggtttagtactttctgctatagcatagaacacaaaagcatgattgattagagaaatatccttatatgcatcaacttgtttgttagaaatacccaacacttttgtagaagcaagcttcatgatgatgaaccaagtaattttgatgatgccaaaagcccaaatgattgattcaagattgattcaagacttcaagatcaagcatcaagaatccaatccaagattcaagattcaagagaagaaatcaagaagcaacaagtcaagacttcatataggataagtattaaaagaanttttcaaaaaccaaatagcacagttttgttttacaaaagaattttttcaaattttctaagttaccagagtgattactctctggtaatcgattgcctgttatcagtaatcgattaccagtgaccaatttagttttcaaatgtttgcaacgttccaaaatgattttcaaatagtgtaatcgattacactatattagtaatcgattacaagtgaatcggaacgttggaattcaaaat

SEQ ID NO: 1899 - DNA, 359 bp, Glycine max
agcttgctgcctcatgaggaatgccttgcgcttatatagcatgaaaaaacccttcgataatatgtatgtatgtaaatgtgtagcatgaaatgccttgcaaaatgttgaataaaatgccttgcaaaatatgaatatatatagcatgaaaatgccttgcataatatgaatatatatagcatgaagtgccttacaaagttgtttggatgggtagcgtaaaagtgtttttcaaaatgtgtatttgcaagtaggtagcaaaagaagccttccaaaaaaaatgtgtgtatatgtataggatgtagcatgaaaaggtttgtcaaaaaatatgtacatggatgcgtgcccaaactgcctttccccaa

SEQ ID NO: 1900 - DNA, 531 bp, Glycine max
tgtaggcgttggatcttcttcatcaatggagtcatttgcttcttgaatatcatggcagcggaatagagaaggaagaaagatgattggagaccccacttcaaggagatgatgagtcaagaagaagctcaccaccacaggaagccatggataagagcttgaaggaaggcgaagatgagtggagggagagggagagaaggggcacgaaattttatgcctcaaatgaggtctgaactttgaagtgtaattctcaaatgatcaaagttcaaaataatgcacacacatggcctctatttatagcctaagtgtcacacaaaattggagagaaatttgaatttctattcaaatttcacttgaatttgaaattgaatttgtggagccaaaatttcaataattatgattaatggaatttagatatggttcagcccactaatccaagatcaagtccaagattcttcactaagtgtgcttaggtgtcatgagacatgtaaaacatgaatgacatgcacaagtgtgactatatgatgtggcaac

SEQ ID NO: 1901 - DNA, 115 bp, Glycine max
agcttcaaaagcctatttttgtggacgagctttactaggtgagtttgattttagccttagtttcactttagacattaataaattctcaaaagggcgatgcagaaaatgcttattt

SEQ ID NO: 1902 - DNA, 217 bp, Glycine max
ctgctctaaatttacattggtgcctgtgtttatgggatgtggttatatgccattcttgcattaagagtgatggcccactggttaaactaactttccaaatgtatgccttcacatgaatggcccctaggaagcttgcctcaaagaggtccatgaaggacaacgcggccgaaggaacttgtccctctccggggtacgacaattaccccttttagagctt

SEQ ID NO: 1903 - DNA, 360 bp, Glycine max
agcttgtactattgcgtaagctttattttgtgtttcgtgtgttatcgtttattttcaattttataatgtttgtaggattttgcttcatttcttaaaactaaattaaatgacattgaggcttgagcacgaatattagagatttgtggttgttcctcaaccctcatatacaggttccttgattggctaatataatcgaaacaagtatttctgcctcatgtttctttctgtacagttaaatttcttttggatgcttagaaatatttcataaaatttaactaaattatttaacttgtaagaggatttgtggttcggattacacaagcatataagtacaaccctttacagtcatttcacccctac

SEQ ID NO: 1904 - DNA, 419 bp, Glycine max
  unsure at all n locations
ntgctgtgagctcctagatttaaaggattctgtggagaacttttgcggcaatatgcactccaagttcttggctttcttgaggtaaacattttgtgtattgctctgaatcacaatttatttgaagttacccaccaaggaatttcatgacccttttataaattggtgtgccttttgtctatattgcactgttacaagttcaagtaccagcacacatatatgggtatgatgggtacaatgttttaatctcaatggtgtatcgtgctttagtcatgtggccattatccttgttcgtgcagatttaactttttgcgctaactagtatttgtttcttgaatcaatattaaatggtcatttgtttttgattctgcagaagatcttatttctttgattggaaattcttgataggaattatttgtaag

SEQ ID NO: 1905 - DNA, 354 bp, Glycine max
agcttgttggagagagcaatgtcaatattgtcatcaacttcagccctaatagttgggcctggaaactgaccgttgattcccatcagaacgtgttccaagcaatctggttttctgatcatgtactccacatcaaacttgtagtgtctcactattcctccgattgacaattctaccaaacccaaccatattatgcacccaacaaaaagagctttgaagctcattcttaattaattttgatcagagaaagcctaattagcaatataacaggaaggtatcaagtagtagaacgaagctattgatgaacaaattgaaagaataggtatagaggatcgaggatttggattgctggtaccc

SEQ ID NO: 1906 - DNA, 561 bp, Glycine max
ttttaaaaaaagcggggtaaaattcatcaatatataaacaagttgttgtaattttgattaaaatgaaaaagttgaggattaaaattaactaaaaaaataattattttagcctgctacatcaacttaatggataaaatttgtaagttttttaaaaattagaaataaaatatgtcaaattaatttgttgaggataaaattcctctaaaaataaatcgaaggtagaaaggacaattattttaacattccatgtcaacttatatttgaaaaaagataaaaagttgaatgtaaaaaatgaaattaagttttttttaaaaaataacttagacaacccaatattcgcagaattctatcaatgacattggttaggactatgggtatgtttggcccaaaggctctacacacgttcatttggatgaaataaatatgccagaacatgttttgtagccagataatacagtgtttaaagccctaaacatcgagactgagagagagacacacacatagccctataggagcatctttagtggtaaatcccaagttggatttaaactactttttggt

SEQ ID NO: 1907 - DNA, 333 bp, Glycine max
  unsure at all n locations
agctttgagcanattcaaacgacaataactnttgactgttttttccgatgtgccccgtaggaaattgagccgctcggaattgaaaaacggaggctctgagaacaaactaacgacaataacctttaactcggatgtctgatagaaccctgtaatatatcaagacgctcgaaattgaaaacggaagctctaataaaagtcctacgacactaacttttgacttcgatgtccgattgagccccgtaatatatcgagacgctcctaaacgaaaacagaaactttgaccaaattctaacgacaataacctttgacttcgatgtccgactgcgccccctc

SEQ ID NO: 1908 - DNA, 248 bp, Glycine max
ctcagtccctgagaaactgattcccagaagacaacagggagtgtttattgctgaaaaccctagccttgcaacaagttctagggaagtagacaaggagatggacaagaaaatccgcagtatcgtgagtagcattttaaaagacgcctctgttcctgaagctgatgaagatgttccaacatcttccaccccgaatgtttctgtgcctgatgttgagaaagatgttccaacatactttcggtccaaatgct

SEQ ID NO: 1909 - DNA, 76 bp, Glycine max
agctttggcaggtcaaggagagtggacttcattctgtgatgttttagcactgccgatgtttgggatcgtgctcttt

SEQ ID NO: 1910 - DNA, 561 bp, Glycine max
  unsure at all n locations
tggacttttatgatttttgaatgatggttatgaaaacaatagatataataataaagggaatggtactgataatttgagaaggagtagaagaaagggagcatcatacgagtgctggaagcgattgcggcatttgttgcagcgaaaaagcttgtctgggaaaccaacgtcgccgcacatgcagcaaacggtttgaagatccaccattggttttggtgtcacagggatgaatgaaaaaaagaagaggaaaaataggcgaatttggagggtgggagagacaaagagagagacccagaaagccaaagagtaaacaagaacccaaaaaagagagagaatataatcactccgagaagagagaagaaacacaagagaagagaggagagagaaatagagatagagagagtttacactttatatagaggaagattagaagtgcggaactgctcatgttgangtggtgtatggaactgatgcatagtttattttttaattattagaaatttaagaaactctattggatatattttttaaaaattaaatttaataaaagaattttttttaaac

SEQ ID NO: 1911 - DNA, 460 bp, Glycine max
agcttttgaatcctagaaaaaccaatgaatttttgtagccaagcctcatgacaagcctgcgaaagtccttctgattctgtttatacatttttgactttatggcatgagatgaagtgcaaagattggatctcttgttagttgttattaatgaatagcttaaacacttatgcttgagtgaaacagtagccgtgagactgtggtttaagctactttccttgatatctgttttatgcctaaccctatctaattgttcaggttacattttattcttctctttggataactgcataccttgtgaaagacaagtgatgagggcattttacttcattctcttatcatgtaatcagtaatttttgctgcatacacctttgtacatgatcactacatgttattatcacttgaggacaagtgagctattctctttttgcttgaggacaagaaaaattgtaaatttggggga

SEQ ID NO: 1912 - DNA, 427 bp, Glycine max
tcctcctcagatccctcttgttggactaggcttaatttagactgccttcctaggtttagactaacttaaactaagcttcatcctcagatcccgcttgttggactagactcaacttaaatagcttacaaaagtttagataaatttagcctaagctttttcctcaaatccctcttgttggactagacttagaccaaacaacatatttaaaaccaaaacttaatccgcagatccctcttgtaagactaagtttcaattctgcttcattcaagttctaaggcaaaaatcatttcccaatgctaaagtcatctaactaggcacacaaatggttgattagaccaaaagcatacagaatttaagcactgaaagaatcattgaacacaagaaacacaatcaattagatattagaatattaaatcaattgttattt

SEQ ID NO: 1913 - DNA, 599 bp, Glycine max
agctttgtttacatagatacatagatacaacttttttaaaatgtaacggaaatgatgaataaaaatcaaaagaattggaatgaaatgactaagacaatgatgaagattaacagaaaaccagaggaaatgttcaacatagttcatattaaggatcatgttaggaatttcaagactattcttaaataaacatggcataatataacacatcagtattgcttatattagtttactttaaatgtagcctcatggtgaagtgagtaggtcctttgatgcatgatggaaggatcaactagagcatatttagcatctgctagacagtaatgacaatatgcactttgttaaatacaaccaagatttggtgaacccaactacattggctggatggatagaactcatatatttctatggactcataggaaaacatcaagtgaccatgacccattttggatagtgtgttcatcctgaccatcttcaaaagcagctctgagctaaaaacttatcctaaatggaactcattgtactaccaaattcttttctatcacttttaaagtcttaccgaatgagtacaaagtgactggcaacagtttgatgagcaactt

SEQ ID NO: 1914 - DNA, 538 bp, Glycine max
gacactctgaatctaagcttaataggatagatggacctatggcatccctctatgaccttaattcatgaaagtttcactcggtcatataccaaagtgtaacaatccatttccatccttcaatggtttatgcagttagtctcaaagccttatatttccttattgtgcaaactataagggtgttcatgggtcggctcgaaccggttttggccaaattcaagactcaacccaatcaaatttgatcggtttggtttggttcagttttcacaatttgtttttgaaacccaacccattcattaacggttcgattcgattcgggccaacagattacccatttaaatttgatctcattgtcaatatcatgattcatccaaatatccaatattattaacacaatattgtcaaatgtcttaaatagttaaaattgatcattaatacaatcacactatatttaaatagactatacaaattaaacaaattttcttatgagattactttatagtctgaatataactgtttctacaaataatttttgcataag

SEQ ID NO: 1915 - DNA, 428 bp, Glycine max
gcttgactacgaccacaccctagctcactgatgttcaacacataatagatcatggtgcttctagacatatgaagagggtaatcttttccttgcacaaaatagttctctttttttttccccctcttttggtactaattgaactcaagagtcttggaggacaatgaaacatatatatattgcggatttggtaagaaaaaattataaacagtaggcattgaagacttactaataaaacactccagaatttcatattactcatcccattcttagggaagctcagagtatatgccaacattgttaaagaccaagaatgtataaaaataagaagaagaatgttaagttatatatatctaatccctacttgataatgaaagcttcgttatttgagtcaaacttctgatgccttcattttgtttgagtggaaacat

SEQ ID NO: 1916 - DNA, 424 bp, Glycine max
cttctcatcatcaatgaaagtgtggattcccttgctctgaagagtgttgtagagatggccagtaaaagcactacgtgtgtcttcacccctgaagctgaggaacacatcgtaattggaggaataggaagaggaacgtgatccccaagccatgatatgaaatcttagtatgaatttggatggctgcttgttgggtctccaaaatcaaacttgagtaggtatgaaactgataagtgtgtattactctcagaaccatacatatctattatcagatttttatccggcatatttacctttatggaaaatctttctctgttccggctctttttcttagaagattaaacctttggctgggctaacccggggatacgtttctctccgcactatctaaactctacaataaatacctttttatttgttataatca

SEQ ID NO: 1917 - DNA, 445 bp, Glycine max
agcttatccaaacaaggtccactatatatttttttatctggtactgtgccatatatatggatggtggttttggacatttggatttgtgtagttgttgttaataacaatgatgcttatgcctttgggcatgggtttggactagttgtatcaaactatgcttgtgtattggaattttgggggaggatttccacttgcttactgcatttttacatgtatattatgtaactggtttcattttattgctacatgtgaggtataactattctattttttaaagccattgcattccttttttatttttttgctaaaagtttaaagttggcactgacaggcatttgaatcgatttaaattccacttgatttgcagagatgttggtgcttgaaagctccacacctgctgattcagttctagagttcttgggttcgatgctcttgtcattctgca

SEQ ID NO: 1918 - DNA, 894 bp, Glycine max
  unsure at all n locations
agcgaggacgggggcgagcgaaaaacgacacagcgcatcaaagcggctgcatgggaaaccactataatttctaggtggtnngnttggtgatgcctcataccgaccttnaaaaanaaacccngcgccgaaaaaagcacatgaaagtacccggaagaactctgcccaaccttcgacaaacgtgagagcgagcgcaaaggggggcagcaacggcacgagacacgtgagcacgagccgaccggagagacctgtgagaaggagacaggagtgggcgagaaaccacacaaggaagcaacgggaagacgcctcggacagaagctggcggggaagactacatgcagcggccgcgaggaaaacacgggccagagcaggaaacccgggggagcgggcacactgacgaggagggacgccgcagagacaatggaccacgagactaccggaggggagcaagggagaacacgcccggaaggggaaaaaaagcagcgggacccagagcgaaccgtaaatcaagggaagagacggtggccacgaggaggtgaagaaaaaaggagcgaggccggatcggctgggggaggggcagactgaaagggacagaaggtaggaagcaaccaaggaacggatgggacgagagaacgcgaagggcggtaccgggagaacggagagggaaggaagaccgcggagcggaggggacggacgaaatcggctgcggggagaggataagaaaggaccccgaacagacggcccgatgcccaggagcagcgcggaagcgacgggaggcaaaggagaacagacacacgcgcagagaagggacggcgatgagcagagaggagatgggaggcgaacgggacggacagggatagagaggagacacgccaccgtaacggaactgaacacgat

SEQ ID NO: 1919 - DNA, 181 bp, Glycine max
agcttgctgcctatataacagacttgagtaccccctaaatgactggtaagaacatctgccaggtgataatttcaattgatgaagctaccggtgacgtctctggataaaatctacagtgaggaggtagagagaacattgtcatggaatttcaatagatggcactgatggaggggaggacccc

SEQ ID NO: 1920 - DNA, 918 bp, Glycine max
  unsure at all n locations
acgaggtaacgaatgtgaataagcaaccgaccacgagaaggaatccggaagtggcaatggaacgaaaaatcannaaagnnaannnnncagggtactgctgcactggcataccatcacaanagannaacgtgtggaaggggaatgatataaccaacaccacttttttttattaaagcgaacggccataacgagggaatggggaactaaaagggaacaccgccccccatacgacaagagacgatcaacgtaagggacaccaacacacagcacgacgcgacacaaacaatccgaaaatgcagaagactgaaaggaacgacgatggaaagacataaacagagcgtaggccggaaacatggcaggacacggacaaaccagaggaaacgagggggaaacacaagaacggaatcaacgcaatgacagaagaaagcgaagcaacacgcgacagagaaaacgccataatctcacgcaacgagggaccataacggcgaaacaacagacgagagcgaagatacgtatgcaagaccaaattgatcgaaaagaacgacagaatcgacggcacgcatcgacagaccgaacgaagacaagggacgaccaaataaattgacacgaaagaacgaaacacaactacttcacgggaatgaatagaacaagcagaatgaaacacgacgggacagattaaatggatgtagcaggtggggaaacggaatggaatcgaagcgaaaccaacagacatgccagaagagtgcacggacaagaactgcgacggtcagggaaagagaaagacaggaacagtcacggacgcgaagtggatatggccaaagaaataaaaacgccaccggctgggcaatgatagatagaggtcacacacacgcaagagagacgagaagaataggnactggaattgaactgcaaacaccc

SEQ ID NO: 1921 - DNA, 178 bp, Glycine max
agcttatatatccgcaaacgggccccacttttcttggctcgccatatcccttgccttgccttccaagtatttccgtggcaggcctactacgccgttgcgagtttgcttcatgcgatccaactcttttgccgaatcctcaaccacagctacaatcttgctcaaggagggacgattctta

SEQ ID NO: 1922 - DNA, 466 bp, Glycine max
tatgcgcatatttccttacgaacgttcacttgcacaatacattctattaactaagaaaaatgcacccatatacaatcaaggcagcttcgttacctagattatttacatgtacttccaaggtgtatttgttacttacatcacacacatcttcttggctaaatttacatacatgcatactcaaagcattttggggtaccaaaaattgcacatgtgcacatcttggaatttctaatacctatacatacacaaacttcatgatgaatcttgactatctacaataaggcgctacatttcttgctcttttcaagtttttgctacctaaagccgcatgcaaattcaagtatattttcctttgctgactaaaattgtattcaaattaaaacgtatatatttttttgtaatgtattttctttacataacatgcaacatatttatatatatatttttttgtgagacattttgacta

SEQ ID NO: 1923 - DNA, 490 bp, Glycine max
agcttaatcatacagcgaagaaaattaatgaattgagaaagacaataaagagtactttattgttggccttttttccttgctaaaattgagaccaaattacgctcctctgtccgaacccgccctttccttcgctggtctcatcgacaaattttatttgaaaaatttcaagttggccctaccccacacgggtgtccctttccacttttgcccccatttctatactcacgtttattgcctccagctcctctgtctctttcacacccccttttcctttttgccacccactacactacccacttccccgcatcctctttctttctctgttcaactcaaataaaatcaaatgttatctaagctctagttcacttacattcacttccagtttcaccctctttctaggtctctacactttctttctaggtagagctcgtgaaacaaccactcttcaactactctcactcacattgcgcttctcacttcactttttttt

SEQ ID NO: 1924 - DNA, 395 bp, Glycine max
tgactagtttgcaaaatggcatacttgaaatatatatgttggatcaagtggcctcggaataattaagaagggggggttgaattaattattgatgtgccttgactaattaaaaatctatccttcttaatgttactagatttaattaagtttttactacaaagttaagaaagtaaagaacagtaattgaaacttaaccaaaagtaaaaacgataattaaaagagcacaacgaaaattaaaagtgtagggaagaagaagacaaacactataattttatactggttcggcaacaacctgtgcctacatccagtccccaagcgacctgcggtccttgagatttcttttcaaccttgtaaaaacctttacaagcaaagatccacaagggatgtacccctcc

SEQ ID NO: 1925 - DNA, 280 bp, Glycine max
agcttgttgttgccatggtctgtaggttaactttgttgcttgattatgtgcacttcgcattcgattatgtttattcaatgagtttaatttatattaactatcaatatattcggtaatttatgtgatgctaaggcaagtttcaattagatgtacgcgttaattgtaaaatgactttacactgataatatatataaattaaactcattcaatattgtctaacataacttactcaacctgaaatggcatcgttattacagggatctgcccaggtttgggaccc

SEQ ID NO: 1926 - DNA, 474 bp, Glycine max
tcctatagaaactcaaaatcttctagctgtgtgcaagagggaaagcatggctgagtatccatcacccgaaaaggatgataataattgtaagcacatggatgactacccttcacctcaaacagataatccaaagcctttctctcaaatatacaaacgaaggcggcataacttgaactccaacaactctcatgtttctggagattcaatccgaaccagccaggatccgtgctcctctacaataactactgctgcaactgcactcccaaccactaatgctgctgctggcacagccaccaacactgcaccgaaaaaacattttctttccgcactggtggagttttcgctgctagagtcccttgaatcaaaggacagccttgcttcaattaagacaccggattctgacgtggaaaatcttgagtcatccatgcctccaagcttgcgcaaagttcttcaaggaaatgaaaagtgagatgc

SEQ ID NO: 1927 - DNA, 1054 bp, Glycine max
  unsure at all n locations
ccgcacaccaacgagagtgagaagaacagccacacgcaccgcgcctaacacacgaaacacgacaccacacacgccggacgcntacagaatacgaagcatnnaactcccccaagccnccnncccccnnnnnggagatggaatggaagncnatngnacnnnagnnngnnaaannnnccncgggcggaaggagccaaccaccnaccagagacaaaaagaaacgatattaaattaaacacaccaagaaaaaaaaggaggggaggggggaaaacaaaagaaaaaacaacagagacaaaaaacaagacaaaaaaaaaaaaaagaacgagagagaaaaagaagacaacaaccaaaaaaaacagcgagacaagaaagaaagacgaagagacgaacagaaaaggagaaacaaaaacagaagagaaaacaaaaacacgcggcgaaaacaaagagaaagggaaaagacagacgccagaaaaaaaaagagacaaacaaaaacaccaaacacgacaaaagaaggcgccaagaaaaacaaacggaaacaaaaacaaagggaaaaaaaaaaaagaagaacaacacagagacgaggaaaaagaaacaacaaaaacacgaagcgcggaaaggaaaacaaccaacaccaagcgaacaaagagaaaaaaagcaaaagaagagaaaaacaaaaacgcacacagaagagagacggaagagacaaaaccacgcaagcgaacaacaccagcaacgcaaacagaaacaaaacaacgagaacaacaaagagagggaaaaaaagaaaaacacaaagaagaaacaaaaaacaaggagaaaaagacaccaacacgaagacacaaacccaggaccgagaaaaacataacgagagaaaaaagcaaaaaaacacgaaaacaaacaaaaacgcgagaaaaacgaaagaagacaggaaagagaaaagaagaagggagagaaacaaaacgaaaacaaaggagaaaganaagaaaaacgaaggagaagaaaacaaacaagaaaagcacaagaaaagacaacgggagaggagaaaaaccaaaaaagacan

SEQ ID NO: 1928 - DNA, 437 bp, Glycine max
agcttgtcaagatccggatcctactatttaaataccaattttcaataactcagtgattcataagaaacacatacacagaggggttttataaggggcaaggtatagaacttaaactatctgcattatttaaaagctacaccaagcttacctgctcaagatgtatgcttccaccattctcattagtaatgcccaccgaatgtgaatgagaagtttttgagtcaacaatcccctctcctgtatcttttacacgatcaacctctccctgactttctttgccaccaccagacatagctctaacagatgaagttgttgctccactataaaaattcagtgcacatccatgagtacgtgcacaaatagcaaaaaaaaaacatttagcagctatcatattcaataataaaatggacattatggttctaaatacagtactacatttt

SEQ ID NO: 1929 - DNA, 474 bp, Glycine max
tgttgatttaagcacagataatccatcaattgcttctgatggtttagcagcatttcagcgtgtaagcaaattgacaagaaaagtgaacctttttgaaaaggattatatcttcatccccataaactatagtcttcactggagtttgaatgtcatttgtcaccctgctgaagtcatgacatgctacagagatgaagaaactaaaggatctcccaaagaagcttgcatcttgcacatggattcccgaaaaggaattcatcaagatctacacaatgttttccaaagttatctatgtgaagaatggaaagagaggcacaacaatgtgagggatgatgatgtttcttctatatttttacatcttccattcgtgccacttgagctgcctcagcaacaaaatgcatacgattggggcatctttttgtccactatgtggaacgttttctggacatgcttcaatcaacttcaaccgtccatgat

SEQ ID NO: 1930 - DNA, 886 bp, Glycine max
  unsure at all n locations
caccccgacgggggaggagagacgaacatcaagggggacataaataacatcgccggagagacacccccccncagaccccncccnaactgatgctgaaacncncagttgnnaaaacccccggggcagcaagccccaagcaaaacgcaacacagcagttttttttttttncnccccagaaagacaggggggaaagaccctaagcggagagaacgaaaccacctatggttgtaatacaaatatacggcaaggggaaaaaaaaaaactgccaaacacaaaatttaccttacaccacggggaatatgaaaaaaaacaataccatggcgggagaaaaaaaaaagaagggaaaaataaggcncaacatcataaatcaaacaagccaaaaggaaaaaaggaccaatcggtaaaaggaagaaagacaaaaaaaagggaaaaaataatgcagaggaaaaaaagaaaaggaaaggcctaaataaatgggacaaaaaaaaaggcgaaacactgtaattaaagaaaaaagattaaaaatagcgggaaaaaaacaacatgaaaaaaaaaagggagaaaattaaaacacagaacgggggaaaaagggaaaaaaccgggcaagaaaagaaatttttttaacgggaaaaaaaaaagtaaaaaagaaaaccccaaatgatttgggggaaaaaaacccaaattggaaanggggccccaaaagaggggaaagggacaaaaaaccatgcgaggaagaaaaaaaaaaaaaaaaaactgaccccaagggaaaaaaaagggtaagaacaagctgaaaacaaagagggggaaccacacgggggcaaaaaggaacgggaagaaacaaccgacaaaaagcaaggaagggaggacaatggggaaaaagaaggaa

SEQ ID NO: 1931 - DNA, 647 bp, Glycine max
  unsure at all n locations
ccgcaagcttcctgcacaatgactatattattaagatttgttctcaagctggtataatcttatcatgcttcagcgagtcagtggcacttacactaatcaagtgtcaagtaccaacgaagcatcagtaaggaaagttagtttacaataatttatctccacaagtaatactgagttctggcaacaaagaaaaaccataccaagaataaattagaaaaggcacaaaacagtctaccttgcatcaggaattccatggcagattacttcattaactgacctgttagataaagcaaatttcattcttaacatataccatggcaataagagaaaaatatgacattacagaaggaaagtacctacgtgcagcaagatttagggaagaaaaggtaattgagaggtgatggatatcctcctgaaaaagtaaaaagtcagaaaaaaattcattaccaatgaccatttgtaatagccatatgacaatgacatcatgaaactcaatgaaccatcatttggaagaggaattataacaaagttaggaagcatcctctctgtaatgctcaaggcttttttttgactttttcaaattctggtaagcagatagcagccttgatatacattntggtatttttttggcccccccttctctgacccat

SEQ ID NO: 1932 - DNA, 484 bp, Glycine max
acactatataatacataagccttagttacaatctaacctcaacaatgaagagatctaactaccttttctgatgggtagcacaaaaaacaatgatgaaaggagaaaatgaaagaaaagaacaatggaaaagcttttccttcaccaaatattgtttttgtcttgcaatggagtcttcccttaaaatggagatttggcccctttttatataatcccaaaaaatctagctttttaatgaagatcggcttaaactaaatcttttccaactcaaaccaaaattgctatagctttaccttttaagctttctcaatcttttctctaagatgcctttcaacccacttcaaattcttaaaaaaatccattaattagcacaagttacctatttaaatgattaacttaagagaaaaattgcctattcattaaatttataattaaaaagaaccaattaaatcctaatgagagaaaaaaattagataattccctaaat

SEQ ID NO: 1933 - DNA, 187 bp, Glycine max
agcttggtctaaaattcccgaaaaattagctttttatgattatatcggaaataatccagcaaaaggggggttatttagagcaggttcaatggacaatggagatggaataaccgtcggttggatacgaccttctgtgtataaagaaaaagatgggcatgaactctttgtacgctcccccccctccttt

SEQ ID NO: 1934 - DNA, 344 bp, Glycine max
cttttctagttagagaccaacgtcttggggctaatgtatgatctgctcaaggacctacaggtttaggtaaatatctaatgcgttccccgacaggagaagttatttttgggggagaaactatgcgtttttgggatttgcgtgctccttggttagaacctctaatgggtccgaatggtttagacttgagtagactgaaaaaagatatacagccttggcaagaacgccgatctgcggaatatatgactcatgcttctttaagttccttaaattccgtgggtggcgtatcttcagagattaatgcagtcaattatgtctctcctagaagatgggtagctacttctcat

SEQ ID NO: 1935 - DNA, 297 bp, Glycine max
agcttgaagcttcctttacatatattatatagatatatagatataatagataatagatgagccactaacaagtaacaactcacatttttcttaaaaaaatttgttgttacatgatatttgagttctattgacataacattttagaaatttacttgtcggtttaacaaatctagtttcaactatgataatatatactacatgtgattctttacttaagaaataaataattaagaggagggtttgaattacatcgctaactttgataattattatattatttttataaattaatataaa

SEQ ID NO: 1936 - DNA, 546 bp, Glycine max
ttctccactaagttgcctgatgcctgaaatgtcttttctgatggcagtggtcctagatgcagggaagaatttctccaagaacaccctcttaaggtcatcccagctgaaaatggacctgggagcaaggtagtatagccaatctttggccactccctctggagaatgaggaaaagtctttagaaagatatgatcttcttggacatcggggggcttcatggtggaacaaacaatatggaactccttaagatgcttatgaggatcttcacctgcaagaccatgaaacttgggcagcaaatgtattagtccagtcttgagaacatatggaacaccctcatcaggatattgaatgcacaagctttcataagttaaattaggtgcaaccatctccctaagagtcctctcacgaggtggagggtgagccatgttctaagtaggaaaattagtagtggaatgctcacaattagatattcagaatcacccttaacagaatgctcaaaatgcacagaatgaccaggatgcacactatgcctaactaatctatgaaag

SEQ ID NO: 1937 - DNA, 620 bp, Glycine max
agctttcaagcacaatcccaacacttcagttttctttttttttttttttgaaggtcaaaactgaaatcccttaagctgtgagaatgaaacgacttatggttttattactactattttgcaattggataaaattaatttttcaatcacagattttactttacaccatgtagattatgaaaattaacattactattgctcgagacaaataatagaagtaaaaaataagttttaattcatatattacacaagtcaaatgtaatatattatcattttttataattattaattacaaaagaagtaaaaaattattcatagtaaataattaaagtaaattcttatatatatgtcacatatataaagtttaatcattttatttatagaagaatatttaaatatatctgaatataataattatgaatataataaggaacataattaaattacataacgtgggaaaatgtaaaaacacgtgtatgaatagtactttttttaccgttaaaaataagttaaatatgacactcttaattttttttgttgataaatacccattttgatattggtccctaaaagtgggagatggtaacaaattcattcatgcaagataaaaaaaaaattaaatt

SEQ ID NO: 1938 - DNA, 375 bp, Glycine max
ctataaaatacctcagctttgggctcaaatgattcctttggattcataatggatctcgtactttaataactcaacgaaccaagccatcatcctcttggctaacttagactttcacaacattttagctattaggtagtcgatccaaacattaatcccatgtttttgtgaatactaccgatgacactgagcagtagtaaccaatgcctatgccactttctccattacctaatactgagtttcttgatcttgtaacacttggctaacaaagtataccgattttaaatcattgttttcttcttggaagaggacatcacttatggcttcaacggagaccgagaggtatactatgagtatcttactagtgccagaagttga

SEQ ID NO: 1939 - DNA, 379 bp, Glycine max
agcttataagtatgtttacatatggcaaatatatataacaaatcactatacatatatagaataaaagtgatacacaagcaagatactcaaactcatgaatttccaaattggttcctaaagtatacttaagcaaatacatatattttatatatgaaattgaaatctaaaacaaaatcactacatatgtatccttatatatatatatatatatatatatatatatatatatatatataacacattagaatcttatatacatataatcatataattttatatatggaaaacaaatatacatatatcactaaacatactccaaggcaaccataggaatctagccacgagaaatttactcaatagaagattatgatcaattttc

SEQ ID NO: 1940 - DNA, 367 bp, Glycine max
tctactacacgccgaggagaggcgaaacgccgcgttttgaaatatgatagctgcgatagtgacaaagcgacgctgcttgcgagaatcggtgagttggacgagaaattgagattgaagatgcatgagattgaggaggcggagacaaagcggggtcggcctagacgccttcactctttctttggcggcgggggtgttttttttccgctttaccccatcattcattcatggtctttggaagtctcctttactccttctatcatcattgggaactctcttttgctcttgattgtgatcgtttgtgcccgtgagaggattttttttttcatttggaatttttggtgagcacccggtgcatgtaaaaatcaaa

SEQ ID NO: 1941 - DNA, 225 bp, Glycine max
agcttgatgatttccttttatagaagtgaaattggatgataaaatctcaatttcctttttagataatgtaaaataggaaaatatatgattttatcttatctttcctctaataacagataatattcgattttagaagatatttttatctttctagtagaaaatagaatttttctcttaccttaattaaatccattacattctctaaatccgagttgcctgctcagc

SEQ ID NO: 1942 - DNA, 487 bp, Glycine max
tggtaatggcgtcctccagcctatcggaattggctttggatctagtggactctgccatggaagcaactcaatgagagcaccaaattgttagagcacaatttctggactttgagggccagttcctctaagaagaaaaataaagagtaagaaggataattttcatttcatgtctgccttattacattatgctagtatttacacaacaaagagaaatagttggaagctaaggtggggaaagggagacaatttgtctgctcatgttgggttgtatacttggtttcatgatggagatcaaggaaatcctttaagagaagaacgaagagcatggaagagggagaatataattgggctaggaggcccaataacaagggtaagacctaagaaagataaggagatgttgcttgaaaaaaagatctacttacaagctcaaacctaaagtgagaaagaagaacccaagatacatttgatctaaggcgaataacagtga

SEQ ID NO: 1943 - DNA, 323 bp, Glycine max
agcttcttacaagagactaagaaatttttgacgaaatttttttagaggaaagatcttggggaagcctcgatcttgcggaagcctcttttgtattaggaatcaagatattaagagatcgctcttaaggtatcctaaggttgtcacaaaagagttatatcgataaggtcctagatagattcaacatgaaagatagtaaaccaggagatatcccgatagctcaaggagacaaatttagtctcaaacaatgccccaataatgaccttgaaagaatagagatgcacaagattctttatgaatcaacagttggaagtctactgccccct

SEQ ID NO: 1944 - DNA, 435 bp, Glycine max
tgccttgccccttgatatatttgagggactcatggtcactatgaatgacaaattccttgggataaaggtagtgttgccatgttttcaaagcccgtactaaggcatacaactccttatcataagttgaatagttaagggtatgaccacttaacttttcactaaaataagcaattggatggccttcttgcatcaacacagccccaatcccaacatttgaagcatcacactcaatttcaaaagatttttgaaagtttggcaacgcaagtatcggggcattagtaagcttttgcttaagaacattgaaagcttcttcttgtttctctccccatttgaaaccaacatttttcttgagcacttcattgagaggtgctgccaatgtgcttaaatccttcacaaatcgtctattaaaacttgcttagccatgaaaacttccta

SEQ ID NO: 1945 - DNA, 440 bp, Glycine max
agctttgctaagagcaaaaattaacctttaatattattttatacaaaatagattttcaataataatcatacaaaagtttctgggtatgtgaaacaatttgagctagcttaagagttatatatcaaagatataaacatttaaaaccaagctactcaagcaaaagatttagaaaatagacaaattagaagcaataagaagagtaaagcacacatgggaactatcatggttcaccccacctggactacatttagcctctacaactgtaggctttccactaatactagcaccaatcagatattttttctttcatggcgctcctccccaggatcctacacctaaatattctctaagtctctataagttctcccacaactttttcaccaaccctcttcaggtcacccctaccttatctaatcctccccaggcctatctacccccct

SEQ ID NO: 1946 - DNA, 554 bp, Glycine max
  unsure at all n locations
ttctaatgggcctaggggggcccaggggctaaggaatgcccccaaattgaccatttggcccccattttgagtattttgctcatttccttctgaaacgtcacaaaaccctatggattgcgcagcaattggtgttaagcaactcaactcggccggcgaaaatacacatgttgacaaacaatcatccccggacgaaattagggtatgagaataccctcattatcctaataagattaacatatataaaacattttctaacattattgatgcacacattaagttacatcgagtcgattcctcacactcgagaatccaaagaatatttaccaaatattgatccctcgcatatgaagtcaatatcccaacattagaatcataatctcatactatntgcaatcaaaacgttatgctctattcctagcaacttaatataaagagtaaaatcattcagttcaaattctaagagtactttccaatcaaacttaaaatccaatttcatgaaactagtgatcaaatagaaatcagcattacgaacaaaatgaaatcacccataatgg

SEQ ID NO: 1947 - DNA, 293 bp, Glycine max
atgcaagcttttaactgggaaatgctccaagaaacactatcttctttttccgattctctggctgcttgctccagtaaagcacaagaagaaatatgagcaccagcagattgccccattagataaatcctattacatagtaacaaaaaaaaggaaaagataaatctcagttgaatgtctaaatatatgatgaaaaggaatcttgtatcatagtagcacgccacctattagggtcacctccataattagctatgttgttgatgatgaacgaaattccccgcgaagtatcatttacc

SEQ ID NO: 1948 - DNA, 504 bp, Glycine max
  unsure at all n locations
taagaccatttctaatgggttagataatntatttttaattgtttatcctatgctaattagtccttataatatcacattataattaaataatttatatatttcttgtttcaataagtaattcttaaataataagaaaatattttttctcataagtaattattattatatatatataattataggttaattttaaacaatttaatgtgacatataaataatctaccatagttaaaaaaattaacaattatatctaaaaataaaccaatcgttaaataatgagcattgaagatgctctaagataggaatactcccataaataataaatcatgccattatgttattcctgtatgaatatctaatcatgtttctttttttactccccaattttattacctatatatcctttgaaaaatatactataaatattttgatgtattttttaagagaacaaaggctcctggtttaacaaaaagccaagacaggggaattaaggccatttaaaaa

SEQ ID NO: 1949 - DNA, 911 bp, Glycine max
  unsure at all n locations
aacgacgagagtggagggagtgatgaacaacttatgaagtggcggaaaacatctttgtggtcgggatgttggtaaattggggggcccnnncnnnnnnnttctagcatgaaaagcnagcnnnnnntttaagaaaccccgnatgnnntnatttacaagagagtgaggagagagnggattttttattttgggaggaaagataatggggggggggggtaattgaggaagcgtcttttggataaggagagaggaaataaagagaaggggtgtaagggaagataagggtgggaaagaagagagatggggataaggggagggatggagatggaaaaggaagagagtagaagaggagggggatgggagaggaagagggggagagaatggaggggaaagaatgaagtaagagagataggggaagaattgagaaggaagtggtattggatggaaaaggagtgggaggtgaagaagaggagtgaaagaatagaggttggaatggggtgatgggtaaaagggggggagaggtggataggtggaatagaggatgggaaagaagaataatgtagataaagaattaatatgtgagaagagggaagagcatataataaataggggtagagagataagaagagagaataggggaggatgggaagagaaggagtggagggtagagatgggaagaatagaaggtgggagaggggaaagtagagataagtgaatagagaggaatgtatggaagagaagagagagagaggatgtaaaagaagagagaagaagatagtgaaatagagggaagtaagaggtagagtgtagaggagaaagtgaggggagggtaaatggttaaaagtagagatgtgaggtaaggaggtagtaagatagaaaattaggggaaagaggtaggtatagagaggaaatga

SEQ ID NO: 1950 - DNA, 397 bp, Glycine max
ttgtaagcaccatacaaaagagggtcactctctttatgagggttttagcctaaacacagacttgtcactcagagaactatcacaatgtgttgtagttttggaatgcttcaacttgttctttatagccttcacatctgccttattaaactcccaagaaaaaccattgtagtggactccacacttctggagtaagtatggtcacttctacaactatcatgaagtgacaatatacatccattatgaggaacctttctaatgggcattctagtgtttacaaagaatgaatccatgtattgatgaagactagattggtgctccattctgatgtagtgtgactttattactcttaacactttctttaaatccttaagcatttctgaatttgattacttcaaaa

SEQ ID NO: 1951 - DNA, 131 bp, Glycine max
cgacagcttgtcatctctcagactggcttagtggcttgttaaagagaatgaaatcagaatcatgaatttttagacaaatattctacccggaagagccagcactctaagtgatgtttaacaaaaacgtcatg

SEQ ID NO: 1952 - DNA, 386 bp, Glycine max
tggactccatttctctagagtatggaacatagataaaccactttctactccttctctgcacagctcttctgctcttgtgtcattgagccacatgagaagcaccatgtcaccgccaatgtattttggtttaactcttcacctccatcccacataagtacttcatcaagtctatcaaacgccattaggttcctcagtctacctatccaagctttggttagccatgccttcttattcattgatagtgttagttggatagacgagcgagaggtcataccttgatgcctgcgcatactttaatgtccaccgtttcaccacatgcatactgtctgctgcaaccacattcggatatgatctgaaagttgcctctcgcttgggattctgctggt

SEQ ID NO: 1953 - DNA, 183 bp, Glycine max
caagcttgtgattgttgaaatatatatatatatatattctataaagaaaagaaaaccccctgagggtcgcacttgcacatttgagaagaaaactcattggaccaaaagctcatgggaaaagcccgaagacaattgcgatagtagggtgcatttgatgattgtccctcatgcacactacttatg

SEQ ID NO: 1954 - DNA, 395 bp, Glycine max
ctgattctatttatgcatttctgactttatggcttgtgatgaagttcaaagattggacctcttgctagtttttattgatgaatagcttaaacacttgtgcttgaatgaaacaaaagttttgagactgtggtttaagctgctttccttgatatatgtcttatgcctaacttcatctaattgtacaggttacattttattcttctctttgaacaactgcatgctttgtgaaagacaagtgatgagggcattttggttcatccctttatcatgcaatcaatcaaaactgtaaatttgggggagttcttagtcgatgaatacgactaacttttggtataaaacctgtgtaattgttcaaaatctccaatttatggtattttgagggttgcattactttt

SEQ ID NO: 1955 - DNA, 852 bp, Glycine max
  unsure at all n locations
ccacctcaaaactaacaactccctcctccctctccaccccaccccttccccctatttcgctcccctccacccaacaccccnncccnnnnnnnngatatctccacagcagccncnnatttntaaccccccctcaaaactctcacccaaccgcacacacgtttttttctccctcttgtccttccccacgggccgcccgtacaaaagacccccaccacgcacaacccccaaaagaaacaccaccccctacaaaaactaccgatcaacccaaccacccccccccccacaccctcccacactcccacccaacccacacccctncccaacacatcataccaccccacccacacctccctccccaaccaccctacccacaccccctcccccacccccctcatacccaacgcccccacccacaacccccacctcaccccactcccccaccacccatacccgaccccctacccctcccaccccgcgcccccaccccacccccccacccccccacgcccccaataaacacccgcaccacaaccccaccaccgaaccccacacccccctaccccggcccaccccccccctgcccccaaccctcaccctcgcccactcccacccaacacacaccctacccccaaccaaccaccatacactcacgtactcccaccccaccacccaccacacactcccacaacccccccccccactaccacaccaccacataagcaacccaccccccacaatcaccccccatcccccacacacacgcaccccctccaacaactaccacccgcactctcttacacgcaaactacaataccaccaacctaacccaccacacacgaccaccccgacaca

SEQ ID NO: 1956 - DNA, 674 bp, Glycine max
tttcttgaaacggggattcttaaagacctgcggcatgaacctcacaataggttagtggaaattttttttttccgacaccgaaacttctggggggtttagggaaaaaggatctccccattaaaaccgtttataacttaccaagttcttagacaagttttcattttcctggcctaccactcaataaaactcgacgatgttcattagaaatttgtcctaaaacttttatctgaacggtagttacattctttcgaacgtggtcatgtttacagcggtgtcgcatgttccaaggaggcgacctttttttcaatgtaacgggtctactccacctctcgtagcgagcttctctattttcctccggatgttgttattggttctcacgtcccttttaacgtcttccgtttttgctagcgggcctctattctcgacccatcaactcccgtcctttgataggagtttacagtctatacctttcctgtgcttttatctccttcattttttttcccttacttacaacgttacttggttctttttacagctatctgctcggtacccactcctgtatcttttcctgctacttcataatggtattcaattatcactcttgtcgtgtgctacgtctcgatgaataccgtgactctttaatgtatgctccttttccacaatagcgtctcatc

SEQ ID NO: 1957 - DNA, 240 bp, Glycine max
cgatgacaatcatgaaactggccaaatacaggctaaaggcccatttggataatgacaaagcccccgagtggagaaagatgaaggcccaagtggagaacgatgaacgcccataggcagagacactatcaagactatcaattgttgctaaaggcccaaactaaattgaaagcccaagataaataagctcttagtcatcaactatttttatcgcaattttgacccaaactgtttagaaggccc

SEQ ID NO: 1958 - DNA, 240 bp, Glycine max
agcttctgagagtgccttattgtgtgctgtttttttttaggcaaattcccttagcaatctcccaaattaaggacttatcataacttgaaacccttatgctctcttagaaccctaaaacaaggtcaaggatatcaaaattaggatcaggggcttattcaaacaaatcattaattacttttggctcaacagggctgcaaggaaaaaaactcacacacgggaactattctggctcaccccccc

SEQ ID NO: 1959 - DNA, 605 bp, Glycine max
taagcttgcaaactagcttgtttaaataataataataataataagaataattattattatctataccatttttatggcattatgaatgacagtatgaagtagcataatgtgcttagagagttcacttgcattggaaaattttcaaaaagaaaaaaacttaagttaaaaggataatgcaaccagattaatacttccaaagaaaaaaatgttttgtaaaaacattttcagacaatttaaatatttttatttgactatattagtataaatcatctctaatccatatatttttaatattatgttctttttttttcattttcttttgatatactttgtgttttaataacttgaattcaatatgattttgtttatcaattatttttggatttgtgcattacttatacgaaattttataagtttcttcttttggttagtatgttagtatttcacgaggttttaaaataattaattgattaaagacgtctttaagcagactcttaaataggttcgtaggccgataagccgagtcgagcctttaaaaaaagctatgacagataatgagtcgaactcaaatcttacgtagttaacttaagtcaaactccaatcta

SEQ ID NO: 1960 - DNA, 246 bp, Glycine max
agcttcgaaatcgaaaactaagcggttgatgatcgacgaacaatgaagaacgaacgaagaacagcggagaacgctcacagaattgatcacagaaacatcacgaaagcattacagaagcatcttggcttgaattttcttcttcttgatccttcttttcactaattttaagtgaaatatgtttgcccagggtgctgaccccttcccttcagcctcccacgcctttttatagccaaaacagggaaggag

SEQ ID NO: 1961 - DNA, 323 bp, Glycine max
cagccccttaggcacctttttttcttttgaatttgcagaggaaaattatctccggaagaaaatcaagccgaggcgcttctgtaacgtttccgtgagtaattactcgaagattcttgaccgttcttcaagatccatcgttcgggcttcattttcttcagtctacagcgggtaagtaccttaaaccatgcttttcaattcgttgctatgtacccgtggtgctccacattttgttgcatgtatttttagttattggtgtgatgtactttttatacccccttttgatgtgcttaagtcatttatttaagtcatttctcgcttaatct

SEQ ID NO: 1962 - DNA, 247 bp, Glycine max
agcttgtagaatggccagacatgatacatgtcatggtttggtttggttcaagggtaaaagggatgccccacattatttccatgacacaaatgcaaaaatgaagatttggaaactttatgcaaaactggtcatgcatgcacctatgtggacactcaagtgtcaaatttttatggtcatgtgaagctagggtttacgattcattccctctattttagtcaacccaatgtttccaacaaatgctcttttt

SEQ ID NO: 1963 - DNA, 426 bp, Glycine max
  unsure at all n locations
tgctcgtggggcttctatggaggctggatctttgagcttcaatgttgttctttaatggngattttccaccatggagatgcagcggaagacaaaggagaagaggtgagaggaggtgccatccactatggaataagccatggaagaaagagtttcaccaccaagatgagccttggataagaagcttggagaggatgcttcaatgaaggaaaagaaagagggagagaaagagagaggggggagcacaaaattgaaggaagaaaaagggagagatagtgaactttgagttatgtctcacaagactcccattcatcaaagttacaacaagtgttacacatgcttctatttatagactatgtagctttcttgagaagctttcttgagaaaactttcttgagaagtttttttggaaaaacttcttgaaaagct

SEQ ID NO: 1964 - DNA, 347 bp, Glycine max
agcttcattaagaggcttcctccagaagcttcctcgtggcttctttgcgaagctttctcaagtggattctttgagaagttagatccttatctatccacacccttctattaactaaattaacttccttaaaaataattacggatgaaaataacgcaacaaataatcaaacatcaaacataattacgaataatatatatatatatatatatatatatatatcagggtgttacaatcatagctcatacgacacaggaaatagagtaactgtggccaagtgtactttgtactagggggctgtcacctggtagggaacacctttgggctcccaggctgatcacctatgggag

SEQ ID NO: 1965 - DNA, 454 bp, Glycine max
tgagatgaggaagtgttgaagggtgaaacttcctgcttttattgttgaccacagagtggtacctggagatatgtcgcgggggtcaggagaccttggggacgtcaggtggggtgctattgcccaaaaccaagcttgaccaatcccgacccaacccgggcatagtcggtcagtgagaacctgtgatgtacctaagcaggcgagctcctggcagtcaacagataaaaggaaaacaagaccacaaagcaaggaggcttgtggtggctggccagctgtgaattttgtgtaatatgtggattgtggcctctggtaatcgattactaaaggtgggtaatcgattacaaggcttaaaattgaggacaggaggctaagatggtctctggtaatcgattaccaaagggggtaatcgattaccaagcttgaaaacgaagtcatggaacttagggagcctctggtt

SEQ ID NO: 1966 - DNA, 573 bp, Glycine max
agcttccaagaatcaagatcaagattcaagatttaatattcatgaatcaagagaacacttaatcaagataagtatgaaaaagttttttcaaatactaagtagcacatggatttttctcaaaatctgtttaccaaagagtttttactctctggtaatcgattaccagattattgtaatcgattactagtagcgaaaatggttttaaaaaaacttttaactgaatttacaatgttccaattgatttcaaaatgttgtaatcgattacaatgttttggtaatcgattaccagtgtgcttgaacgttgaaattcaaattcaaatgtgaagagtcacattctttcacaaaaaagctttgtgtaatcgattaccagtgaaagtttttgaacaaatcaaaagatgtaactttttaaatagtttttgactctttcaaattggctttaagtttttctaaaagtcataactcttctaatggttctcttgaccagacatgaagagtctataaaaacaacgctttgttttgcattcttacagctattcaatccaatcaatcttatacaatcctttacaagccctg

SEQ ID NO: 1967 - DNA, 419 bp, Glycine max
tgcctgaaactatatgagatccctttgtcgttgccttccaactagggttaagcttaaggagaacccaatctcctatctggtagttcacttcacgacgtttcccatcagcttggcttttcatagcagcttgttccttagaagcttatttcgaatagcttggaaagtgttatccctatcagttaacatctcttcaacggcctcaatgttcgaagaccctgtaatatattcaggaaagttaaagggttttcggccaaaggtgacaccatactgattggctccagttcccgcattccatgaagtattatgggaccattcgacccacgggaggagctatccccccatgcttggcccacgatggatgaaggctcgcaaatattgttcaattatgcaattcaaaacccttgtctgtccatcaattt

SEQ ID NO: 1968 - DNA, 69 bp, Glycine max
gagacgagccgcagcatgcaagattgcactaaatttacattgatggttgtatttatgtcacgcaccccc

SEQ ID NO: 1969 - DNA, 305 bp, Glycine max
ctttgctgcaaaattcctttttgttggtgtttttttggtttgtgctaaaggtggtcttcgtcattggaagtgccgtagacaggctttgtggttgatttagggatggcctttgtggataatcgggtggtggggtacggaggacccttccctcccccaccccaccccccctctccccttccctcccccccccccaccgttccaccccctcactccctcctccccccccaccctcctccccgccacccccccccctcccccccccccctccccccaccctcccccctcccctccccctcctctcctcc

SEQ ID NO: 1970 - DNA, 320 bp, Glycine max
agctttacaaacatgcttgtttaaaataaaaattaaagtagtctacatatgggtttagttagttacagttatagatgcacatgtgattagttggcgtggcgaatagtctctctactactacataagccgtatatagttattatgttaacgactttcacatttcagtaatttcactttctttctttcaaattcctagtcctagtcctacctaaactcctcctccttctatcttggcttaaatttttcagagaaataaaatacaaaatccttcaaaggatgattctattaaccatgatatcaacgtgccatatcccgaattg

SEQ ID NO: 1971 - DNA, 453 bp, Glycine max
tccaccttctatgtactcataaatcagtatcttctctgaaccatttaggcaccaaccgtagagtgtgaccaggtttggatgtggccaaccaaagccatgaccactcagaacctccatttcagccttgaattccttctcaccctcaagaccttccctttgaagcttcttcactgccacttgtctgccatctgaaaacactcccttgtacactgttccaaaccctccttttcctataactctgtcctctgagaagctgctagttgctttcagaatgtcggcatgtgtgaaaactgtcttgttcagacggataaccttaactgtgtcagacatccatgatgaggatccggagctgctggaatcatgccattgttttgtatccctcaagaggtatcttggttcctctgaagggcttttcaccgatacacagactaggatcgtaagaagcccgatact

SEQ ID NO: 1972 - DNA, 493 bp, Glycine max
  unsure at all n locations
agcttgcatttggaattgcgaaagccccactccatcattatgattagtacctgacatctcaaacaaacaaatcaaacgtaacaagacaattatagttgctgtttgaatacctcacccactcaagtgtatcacacaattatggcttttctctaatgaaacactcttgccttttaccactctaattccccttgagttcttaggcaattcaagagattatggccacaacaaagaacaattcaccaatatgtgtaaggtaaggctagacaaggaaaaggttaaccaagaaaaaggctaacaatgtttttaggcacaaatgaaggaaataaaattcagaatttaggaattcaagtaacaatccttcatgcaaccaatatattaccttaaagagattttttttttaaaagttcttcaagcatgaaccattcagcccaatttttttttttttttttaattntgcttatacgaaattctgcttcttttttttttttataac

SEQ ID NO: 1973 - DNA, 548 bp, Glycine max
agcttgtgcatccaataccctgatgaggatgtcccatttgttcttaaaactagacgaatccatttgcttccaaagtttcatggccttgcaggtgaagacctgcacaaacatctgaaagaattccatattgtctgctacaccatgaaacccccagatgtccaggaggatcacatatttatgaaggcctttcctcattctttagagggagtggcgaaggactggctttattaccttgctccacggtccatcacgagttgggatgacctcaagagagtattcttagaaaaaaaatttccctacttccaggaccacggtcatcagaaaggatatttcaggcattagacaactcagtggagagagcttgtatgaatactgggagagatttaagaaactatgtgccagttgccctcaccactagatttctgagcagcttctcctccaatatttttatgaaggactcaataacatggagaggagtatgatagatgcttgccgtggtggagctcttggagacatgacccctgctgaaaccagaaatttaattgaga

SEQ ID NO: 1974 - DNA, 546 bp, Glycine max
  unsure at all n locations
agctcaatcaatatttttgtctccactgttctttccaaattcagccaaccaaacattgttctatattttgtttgatatttcaaagggttaacttttctatttattaaatataaaaaatccttttaaattaatttagtgtttatcataaaaaaaatactagatactttatttaactcagtctattttgacctagtctaatatatagttttagaaactctattttttcagtaaaaatatctatgcttaaaatggtttttgagaactctctcccacatcttttctctttgccttttgtctagtaacaatgtcacatctcatgttaattttgtttgtaatcaaataatttcttaaattggatatgaatcatagttcatgattgatcaattcaagataggtcatagttcatatttaattgtgattatggatagtaaggacaagaaacacaacctaaagagtcctataagttagcattctttgaattgggaagagtaccatttctttcctcanattaaatatatttaataccaaaaggtgaccaaacattta

SEQ ID NO: 1975 - DNA, 230 bp, Glycine max
tccattattcaaaagttgcctgtgcttcttcaacccgtggctgttaatggtaatttagtccccctcggacaaagaaaactgatgtgtaatgatgactgtgctaagttagagcggaaaagggttcttgcagatgcttttgagattaccgctccaaatctggattcactccattttggtgagaattcggttgcttctgaattgctggctgacatgttgagacgtgattctaa

SEQ ID NO: 1976 - DNA, 311 bp, Glycine max
agcttgaaatgaggaagtgtggaagggtgagacttcctacttttattcgttgaccacagagtggtacctgaagatatgtcgcgggggtcaggagaccttggggacgtcaggtggggtgctattgcccagaaccaagcttgaccaatcccgacccaacccgggcatagtcagtcagtgagaacctgtgatgtacctaaacaggcgagctcctggcagtcaacagataaaaggaacaaagaccacaaagcaaggaggcttgtgtggtggttgcccacctgcgaactctgactgttatatgggatatgccctct

SEQ ID NO: 1977 - DNA, 496 bp, Glycine max
tcaagaaaaggtcaaactccctcagaaatcttatttcaggcttaaataggtggctttgttcatgcttatgcgcttagcgcaattctgaaccgcttagcgcgcattagtgaatttcggcttagcgcggcttttctcactcaacggatggattgaagcagtgcgcttagcggaatgacccttcgctcagtgaatatgcacaactcatctttcttctagattcttcctcgtgctcagccgacatgtgttgcgctcagcggatggctcgctaagccacaagattggcttagcgagagggtgaaaataagcacttcaaaacttgcttaattaacctgaaattgagagaaaaatgattattaaacacacaaaatggaagtactaagtacttattacctatctttagcaaaaagtatttaccacactacaaaataccaataaattggaggattttgatacaatttaaaccaagtttatacacaacaagttagtcatattcatc

SEQ ID NO: 1978 - DNA, 435 bp, Glycine max
agcttatcagatatagtggcgttaattggctccacagcctacaacatttacatttacgagtaacatggccgagaaatttattagcaatttagcatcacttacctcgtaaggtgattaactacaacaataaaagaaatgggcttttcaataaagaagatgaacaaatgtttggcccagttcgttatttaagaaaaagaaaaactaaaaataaaagagtgaacaagcattatcacagactaaagtttcaaaggatatttttaaaatattcttaaaatttgagtttgatttaactcaatttagtaactagtaattcaaaaagtggtgagaattctcttccacttatatattattattattattattattttaaaattttcaataagtctcatgccgaacaattgtttctttttgtaaaacaagatatcacattttttt

SEQ ID NO: 1979 - DNA, 466 bp, Glycine max
tcaactgtgaagctatcttcgtatcgagcatggccaaatatgcatgactttcggtttgcgctttacaagttgccattgcgggttcccaaagatgaccaagaatatgctggtttatggggaggaacttttggttggcctcctggaaagccttctgaagacaagcctggaaaggctttattctttcttctgctcttttatgaggagttccagggacaacagcttcttattgcaacaaaaattttggaaggcacacactatgtgttacatcctaacgtgtcagcaatgtttacagcaaatatcaatgatccttcatccgaaccctttccctgggacactgatgcagactcggttccagtgaatatcaagcaagctttcgtgggagagggtattgcaagtggttacgggttcagataccctggatcaaagcctggttccctctttgttttagaaaatggtatccttgcct

SEQ ID NO: 1980 - DNA, 418 bp, Glycine max
agaccagccgcggcctgccagtcttgtaacaatttttcctagctcgcacctttattatgaatctattcacagacctacacccagaacttgaggtacaaaggaaagctttgtcgccgctgtttgaatacctcacccactcagtgtatcacacccttcatggcctttctccaaagaaacactcatgccctttacccctctaattccccttgagttcttaggcaatgcaagagattatggccaccacaaagaaccactccccagtatcgtgtagggtcgggctggccaaggaaaaggttacccaagaaaaaggctacccatgtttctaggcacacaatgatcgaaataaaattcataatttatgaactcacctgaccatccttcctgccaccaatactattaccttaaacagaattctttt

SEQ ID NO: 1981 - DNA, 207 bp, Glycine max
tcgctgaatcactattctggtaggaaagatagacactttattatcctgacatacccagtgtggatgacacatttactcctgtgtctaaaacatttagaatctgcacaaaataaagctgaacacttcattactcattccctagttaaatgttactccattcggatgtatcatcaattcaaagaaaatgacttcgctcacaaatgaatt

SEQ ID NO: 1982 - DNA, 277 bp, Glycine max
agcttttgattgaaaggaagtcttcaaaactttgccacaacttcatcaaaatgtgtaaatggtttgttatggcaggattctaaagctttcaatggcatcaaatcaaaagactagacatcaatgaaggcgaaagggtcagcgtttattggatctatttctccttgaaaatgttcggcattcttagttggagaattttcaacgacaactataataaaaattaaaataaaattagattcgatattcgaacaaagaataattgagcgcatagtttatttac

SEQ ID NO: 1983 - DNA, 436 bp, Glycine max
tcttctatatatagccttcatatttaagtatccattgtctctctatagttggattcttcactatattcttcgtttgatgtcttgagtccgtttgagcatttaatgcacgtctcttttcatgcaaagaccatgatgataggataacatgttttatacttaaatgaggaagtcacttctttcatcatagtaggtctacaacaatagagagcgccctttgatgaggatcaacatctccaaagtgtgggtttcatttattctttataggactatgatagatcctaggagaatggtgggtggagagatcgtctaaagcacatcttgatgttacaacaatggtggtaggagagatcaccacttgagtcttagcaacagtccccttgttgctgactccatcttgtcttgttgttcttaaaaaaacctattggtcataatgaca

SEQ ID NO: 1984 - DNA, 326 bp, Glycine max
  unsure at all n locations
agcttatattcacaaaggaccctagngttgggtgccttagtctcttttttcgggctgggagttgtagattggttgtgattgcttgtaaggattcttgatgcatagtggaaatctaattcaggttgtggattagataagttacttagcttctctagaaatagagagtgaactagtataaaagattgtgtctttcttctcttgtcctaatctttttctctcatttaagggtcaatcaactcattcaagtttaatcaagtcttttgagtattaaacaagtttttcacaaagattcaagttttatgattgtgaaagaaaggatgttactg

SEQ ID NO: 1985 - DNA, 528 bp, Glycine max
actatgaaactaagctttaacaaatgtcttcacaaataatcatcacatagcttaaacctagcaagactacccatcatatctccccaaaccccatacccacgaaaatcaaaggagaaagaagtccacccaaacctgaatttttgaagtcccactcgtagccacgcacttcacgaccccgaaaatgccctccttttgcgatttggagcagaaatgatggccaaaggttgaagctttgcttggagcttcaatggaaaatgaagaaaaagaaaatggcaacgtgagggcgagagagggctgtctgaaaagtgtggtggggctgagtgaagagagagaaaagctttttggtttaaataaaaaggggtttctcttttttctattattttatttatgcaaatgccacatgtctccatttgagtggagcaagaaaggcccaacttctctttttgactgtgacccatactcagtcaccaaagtgaggaaaaatctgaccctttgaaacgctaaaatcctgcctcggtttgcgtgccg

SEQ ID NO: 1986 - DNA, 461 bp, Glycine max
agcttagagccaattcaaacgacaataactttttactcggatgtctgattgagtcccgtcatatatcgagacgctcgaaattgaatgttgaagctctgagccaatccaaacgaccataactttttactcggatgtctgattgagtcccggaatataacgagacgctcaaaattgaatgttgaagctttgagccaattcaaacgacaataactttttactcggatgtctgattgagactcgtaatatatcgagacgctcgaaattgaatgttgaagctctgagccaattcaaacgacaataactttttactcggatgtctgattgaggcccgtcatatatcgagacgctcgaaattgaatgttgaagctctgagccaattcaaacgaccataactttttactcggatgtctgattgagccccgcatatatcgagacgctcgaacatgaatgttgaacctctg

SEQ ID NO: 1987 - DNA, 430 bp, Glycine max
taaacattcaacttcgagcgtctcgatatattacgagtctcaatcaatcatccgagaaaaaagttattgtcgtttgaatttgctcagaggttcaacattcaattttgagcgtctcgatatatgacgggactcaatcagacatccgagtagaaagttattgtcgtttgaattagctcagagcttcaacattcaatttcgagcgtctcgatatgtgacgggactgaatcagacatccgagtacaaagttattgtcgtttgaatttgctcaaaggttcaacattcaatttcgagcgtctcgatatattacgggactcaatcagacatccgagtaaaaagttattgtcgtttgaattggctcatagcttcaacattcaatttcgagcgtctcgatatatgacgggactcaatcatacatccgagtgaaaaggta

SEQ ID NO: 1988 - DNA, 441 bp, Glycine max
agcttttagaaacaggtcagcattcactctctctatttctttttaaaatattatgtgcaatattattgttcttgtatatctcaaaatttataaagattggctcttgcttctttcctgtttaatacaacaatgttaagaggttaaactctttctgtattatatattagaggaaattgcactagcatcccctgagattttcctaaatgatacaatccagtcctctagattcttttgacttgctgaatacagtgagttgtattttacatttttttagagtactgaatacagtgagttttatgactaatagatttatatcttaaatttgtagtatatgaaatttgaaagtataattaaatttggatggtgttgaaaaaatattttactttgttctgcattggaaaaacatgtattgaaacattatttacaaacattgtatcatct

SEQ ID NO: 1989 - DNA, 553 bp, Glycine max
tgcatccatgtgcactagttattgtattattgaagagaaagaataaatttgaggtagagactacagagtgtagcatacatgtccacttgctgtttctgacagttggcgggtccataaatttgaaagattcaatgaaccatctttcagagacattgctattcccattgttgcagctgagtgtgatgatagattgctggaatatgaagcacaagaaacattaaaaggattgctaaaacaggcaaaagagtatgttcaatttgatttactgaatacaaaattacccaccgagttgtttgcaccccgattagtgcacgcagaccagccgaggccacaacctctactgacgaaacttctgaaagttgatgcctaaacacagcagtagcagctccaccaccttcatctccattcactgctaaattacctccaatcgtaacagcattgtgctttgataactgagaactgaattcacttgtcatagccattctgatactcataaacgtaataaaatacacaaacaatcagaccaaaaacaaagaagtgcttaacacattaa

SEQ ID NO: 1990 - DNA, 485 bp, Glycine max
agcttcatcctcagatccttcttgttggactaggctcaatttagacaaccctcctaggtttagacaaacttaagctaagcttcatcctcaaatccctcttgttggactagacttagcttgtcataccctaatttcgtctggggactattgtttgatggcatgaaacctttggttgaccgcttcgagttacttggcaccctttgttgcacaatacgtgaagttccgagacatgccggaaatcaacaggaagcattgttatgcaatccgtgaaattccgtaacatgtcggaaatcaaaaggaagtattgttatgcaatccgtgagtttccgtaacattccaaaagctaaaaaaggagtaattacatgatccgtaaggttccgtaaccttacggaaagaaaacaagtatcgttatgaaattcgtacagtttcgtaacattacggaaaatgaatcaccacaagaagcaaaggggggtgtatttaataaa

SEQ ID NO: 1991 - DNA, 320 bp, Glycine max
ttcttgtagcatgcatgggtttgacgtattcttttgcttgaattcactagatcccttcccgcctagtatttctcactggtaggctaccggggaaactcggtggagccgctgctggttctttgtctctttggcccttaattggcgccctagtcgaccctttcttctctttattcattccacattctactttctgtaaaccccttactctgtgtcttgcgcttttcagcctgaattccattcccgaaatcttctatgatatgaaactacatacatcaattaagaaaatagtgtaggaatctaagataagatagagtcctact

SEQ ID NO: 1992 - DNA, 357 bp, Glycine max
agcttctatagaaggttcattcctaatttctctacaattgcatcacctctcaatgagctggtgaagaagaatgtggcatttaccttgggtgataaacaagatcaagcctttgctttgctcaaagaaaagcttactaaggcacctgttctagctcttcctgacttttctaaaacttttgagctagaatgtgatgcctctagagtgggagttggagttgtattgttacaaggtgggcaccctattgcttattttagtgaaaaacttcatagtgccccccttcactaccccacctatgataaagagctttatgccttaataagagcccctcaaacttaggaatattaccttgtttccaag

SEQ ID NO: 1993 - DNA, 551 bp, Glycine max
tgtatagttccccaatttatggttattttgtattgatttttgtataataaatcttgttttatggttaatgttgtctctagaatatttccattggatttaatgatgaaatctgtgcattttcaggtgaaaaagaggctaagttttgaattgcaaaatgtagtagtggggctaagctcagcagttgggctaaagcgcatatccattgctaagtgcagcttcagcgcgcttagtgcaaaagataatctggcagagtatcagtgttcggctttcggcaagtgcaccggatcgcacaagtagtataaaacggtaagaaccgagtatcgaacactcggggaacttgttgtatttggtaatctatttcagcaaataggcgtctattgtgtaaaaataagtgtgaatatgaacaagtgtataaactatctgtgcaaaaagaatgaaaatcacgcgagagaaatgatgtgtaaaaacaagtagagtacacgttggtcttcctaataggtgcctgatgcgaaaatgatattctctatctaacaatgctcatgtgctcttat

SEQ ID NO: 1994 - DNA, 603 bp, Glycine max
agcttctcaaggaggtgagcttagttatgagagtgggtgtgtgtagctaagctctagcttctcaaggaagctcctccacatactcctctcccacgcccctcaccctccagccggccctcacctatctctctccacccccactcccccctctccctcccctccgacccccctccctccttgcctgcccccctccccttaccctcccccactttcctccccctccccgcccctcccccacccccccgcccccccccccccccccccgtctcccccctcccccccttcccccccatctcccccccccctcccttcctcccctccccccccccctctcccccacctcccccatccttacctccccccctccctcccatcccccccccctctaccctccctgcctcccccccccccccccctcatcctccactccctccccccactccccccccttccccccctcctcccccagccccgcctctctctccccccccccccccctccccaactcccccccccgcccctccccctcttcccccccccccgccccctcccttcccccctctctcccccacccctcccccacacccccccccccccctcctc

SEQ ID NO: 1995 - DNA, 400 bp, Glycine max
tctaaactttatacaagaatgaagctctgataccacttgttggataagtggcctcagatatcttacgaaagggggttgaattaagatatcacaaactatttccccaattaaaaatttattttactttctattcaagttataaattcccttaaaaatgaacttcttaaatattgattcaaataaagcaatttgaatatgaatataaaacaataataaataaaggagtttaagggaagagagattgcaaactcagacttatactggttcggtcactcccttgtgcctacgttcagtccccaagcaacccgcttgagagttccactatcttgtaaaagcctattacaagatctgaaccacacaaggacaacccttcctttgtgtttagatttctttacaacaa

SEQ ID NO: 1996 - DNA, 111 bp, Glycine max
agcttgcataactgaaaccatcttttggggtattttattggtaaaaacagcagcaccttcaacagaattcattgaataaccacatggcttaaaagtaaagtcacaaatctc

SEQ ID NO: 1997 - DNA, 416 bp, Glycine max
tgccagaataatgggttggatacagattattctgggatggtttgtcatcttggtaagccttttgagtctcactagattctactctgcaggctttttcgtccacaatgaaggcatatgccaacacttctacaatgtgagggatgtttctgatggttttgatgtcaaatcactctctgatagagttggagaagtgatagacaagttggaaactttgcatgccaagcttgagtcaaaagtgcaagaaatggagaaaaacaaaggcacctagttggaccaagaagtttttaaaggatcaaatagtttggccatttcatagtgctaatgttgctctaaggcgggttcgggttccgaaggttgatgaatggatgaagttcgcagtgaaagaggatcatgtgatcaatttttttcatcactga

SEQ ID NO: 1998 - DNA, 948 bp, Glycine max
  unsure at all n locations
accttttttctttcacacgccaccaccncgttcacggcgctcgtgaagaagaacggggcattctctcccgcggcggtcaaccaaccacacaagccctttgcttctgctcaaaggaaaagccttacttatcggcccctgcgcctagctcttctccgcacttttctataaacaccttccacgccttaaagcgcgacccccctctaaaggcggactctcgagacccgcctcccgctcccacgccgcgccccccctcttggcctatttttacccgcacgaaactccgcttgtggccgcccttcgtcctcccccctccccactctaaacaacaacctctcatcccgcctccaataagccacgccccctcgctcatccactagctcccccctctgttctctatggcccttgcctcttctttcgacgtctctatcccctctacctcccgccgcacacgatccagctcccttccttctctcaacctaatctctcttaccgtcccttcgtccctcggctccctcttcaccaccctcctctctctccgccacaccgacctctcttccccacttccccctcgcggcgccacgctccattgctttccgcaccaccgcctgccaccgatcactctcccgcccctccccacttactttctccccgccaatcacccccgtcactcccctctcctctgcccacttctctcctctcgcacgctaccatccactcgtcattgctccacctatccgacgctcctacctcctactctctatcacctatcttacctntncttgactacaacgctacctcgcgcgtcctcgcctctacgcgcaccaccagttccttcctatctccgctctactctgttcaacagccccgttcttattgcgactcnccatcttcgtccctacctccgacgctcacgcttgcgcgtcgcctncagctcgtctcactcgccgn

SEQ ID NO: 1999 - DNA, 382 bp, Glycine max
  unsure at all n locations
tgtcctgaaactggantaagaagaaaaaaatacattttgagaattatagcttagtcaggaggttccttggcctcgaatcaaggaaaaacgcgtctctctccgtactctcacctttttccctctttcttctttaaccaacgcataacaacatggggtggagtatccctaacaggccgtaacaccctaatgcattgtcggtagtgtcatctcgatgagagtgatagtgtcaagttgtccattgtgcgacaatctatcgactacatggactcccagcctacattcacaaagtattttcaaaatggtaccatatgcatgcaaatccataagttaaatgtgaatcatcttgcatgtgtgtctatgtgtatgagacatttgaagggga

SEQ ID NO: 2000 - DNA, 431 bp, Glycine max
agctttcccgccatccccaaaataattttcatactattatttcataaaaatccctaacgcgtgtgttcctttccccaccacaaatgcgaacgaagaaaacaatgtgtacatggcagattctctccaactccccaaataatttccactggcaacgcattaccaccaccaccacccaccaacacgcttcacctccctcctttcccctcccttccatgcaagatcttcttcgccagggttccgattcctcaatctctttttctatttccaaaaacattcttttccttttcctctttttttattttaccaattctttttctcgcaggcactccaactcttcccctccaagacgacgccggtgctccaggtcgagctaatgctttgccccaaacgaattcataatcttaattaactattttaaaacctccgcattc

SEQ ID NO: 2001 - DNA, 387 bp, Glycine max
aatactaagctcgcttctacatttatcacctttatagatgattgttcgtgatatatgaatatttattcgcttcataacaaaaataaagcattggatcccttcaaagtctttaaggctgaagttgagaaccaatgtggtaagaaaataaaaatagtgagattagatagaggtggagaatattatggcaaatatactgagaatggacaagcacctggtccttttgcaaagtttcttcaagaacatacgattgttgcccggtacactatgcctggttctccaaatcactatggtgtggctaaaagaacgaaccgaacattattggacacggtacggagtatgcttagcaactctgatcttcctaaatacttgtgggctgaagcactaaag

SEQ ID NO: 2002 - DNA, 358 bp, Glycine max
cgcatgcatgctattgcgctccaatttgaagtgttttctttttcatgacagacaaacccaaattgaagttgcgttcggaaattatccttgcccatcgcccattttattgatctcttgcatcctcctaaaacattaatcatattatagttaattattaagatacagaagtacttataatattatattatgaggtgccttgccactgatagatacatttgtgtaagattaatgaatcgaagcctccacacaattacagttacataaaatattcattaaccctagtatgtgataatcacatacctaatgcattgagtttagtctggtttgaatattactactgtgtttcctatatattttt

SEQ ID NO: 2003 - DNA, 953 bp, Glycine max
  unsure at all n locations
accacgaacgcgagacgggcgtgtgtgcgactngancgtacgttcacactcncagcacatanacngagtgctntncagcggngcgtcagcattaaagtgtagcacacaggaancacgcncnctctagcagccnncccccccnnccgagagatgaaaccnctgtaacagacgccgggcatctataaaagagagctggcgggaagccagctttgggtaaggagcattaaaaggagattggtatggggaaaaaaaaggagggggcttaaagtatacacacagaggcatatgcacaagaagctgccagggtaagagtaaaaacaggcattgatgctgagggtgacggcccctatgccccctcagaaatacaatatgtgaagcaggccggctatacattcgtagcatggcccacacaacttgggaaagctgtattaaatgagggaacatggtagatttgacatgcgcaaaggaaaacaatcatagaatacaggacaaatactcgcccacttttattaaacaggtaggaaccacaaagtaattcacacaacgaggatgcacatgtgccgaagccggctaatggggaagcagatgaaccggtgcggggaacgataaagaacagttcggagaattaagaaaacccacgggagactacgtttgatgggaggtttcttggaatggagacggctcacatcgaaatccataaaaatcacgagggagggaaaaaaagcggggaaaaaagtctgaacataactggcacacaacaacgcgaaaggaagggaacaccttaattaattagccctcattaatggagtaaacggagcaatacaaagcgttaaatacagggaaagggcaaagggcgaacggagccacaaatntccacgggggtcaggaagccatcgcgtggggcacaaaggaggatcggccgaagaggaaaaaacaccaccggcgacaaaact

SEQ ID NO: 2004 - DNA, 321 bp, Glycine max
gcttcgggagttgtatttacgcacggggaaggtattagcattctctctcgtccatcacaagagacgacagcctttaatcaaatgtgcaaatatgactttaattcatggtatcttccctttctgcgttcttatggttttgtatgcttttttatatttttatctttttgaggtcgacaagggggtttccctttgctcctacgtattcctcaattgtgataacgaaatcatacctacgttagtctttgtgaataaagtgtttggttaagtttgctctattcctttttgcgagatatgtctttattgaatgaaaggtcattttaa

SEQ ID NO: 2005 - DNA, 401 bp, Glycine max
  unsure at all n locations
agctttgttcactgcagtttcaaatttctgatttattactcttctaatcatatccccaatcatataacaatatttaattgtttgttgttaagcacattactatttattttctttaaatttatgaagctacaaagtataagacttttatgatgatatgttaaaaataaattctgagtcactttatgaaaacaaaaacaatggtatcaattgaataataactacaattaatgactctaatttgttaggactaagctcagacatatttctttcttcatgtaggtgttcaagctgcaaccagatattattacaaatgtggggatagntctattccagccatgacccaagagcatttcttttagacttttccaaaacctagtgccaaataattatccaactccaat

SEQ ID NO: 2006 - DNA, 426 bp, Glycine max
tgatgaagagtgcttgacagcttttcagaccttgaataccagtctcgtgtctgctcccataatagtgacacctgactggagtaaagagtttgagctcatgtgtgatgtcggtgactatgcaatgggtgcaattcttggacaacagcaaaacaaggtattccatgccatttattatgccagcaaggtcctaaatgatgcacaactgaattatgccaccattgagaaagaaatgctcatcattgtttatgccttagagaagttcggatccctatttgttgggctccaaagtcatcatctttactgatcatgcagctattaagtatcttctaacgaagaccgatttggagccaagggtaatcacatgggttcttctgattcaagagtttgatatagcgattaaagacaaatagggctaagagtaaagtc

SEQ ID NO: 2007 - DNA, 301 bp, Glycine max
agcttttagagatggattgtatgtatttgactaccttttgtctatctcaccgtgttttgtgacaccaagtttgtaaatgtgttcgtaacgattcttcttttatttcgtgcataaaaaatattttaagtcatgtaacaatgtgaactctgattagctaatttacatttttaaataaaatgtcttttgtttgtgtacacattgtctcggcaaatctctcaaattgacttttctaacagtacgtaacaccatgtatgctaacatggtactggatttggaggcaatgtgaacaaaaacaagagta

SEQ ID NO: 2008 - DNA, 390 bp, Glycine max
  unsure at all n locations
tatagaaactcagctttacaagttttccttgtctttcagatactgagtcattggcatgctttcaagaaacaaatggttgagttggtctttagtatcaaacaatccatatttaatatactcagaagcatgtttaccaagaacatcttgcaacttctcaatgaagttcccatatgctggcaacaagatgtgttggagtgacattattattttctcacttagctgcttatcaaaggcacgccatttagaattgagtgctacatatatccttgaagtgcatgttgaactaattgaggctgcctttcagtgactctgcgttcgcattatgctccactagctngttgtctctagctccagaaagttagcgccatattccaagaactactttgatta

SEQ ID NO: 2009 - DNA, 353 bp, Glycine max
gcttaaggagaccactttgaactttttcacgaacaatatggcaatctaagtcaatgtgtttagtacgctcgtgaaaaacttggttaaaagagatctggatagcgattgattgtcacaccaaaaattggggggtgaacctaccaaacacgtaaatcttgaaggagatatgtgagccattggagctcgcaagtagtggaagccaaggctcgatactcagcttcggaggagctgcgagacagagtgggctgtttctttgagcaccaagaaataatggaattgtcgagatagacggagaagccgatgatggaacgtcgagtgtcatgacaaccggcccaatcagaatcactgaatgc

SEQ ID NO: 2010 - DNA, 609 bp, Glycine max
catcccatgcttctttggccgtcgttgcgttggatatcttctcaaatgtatcttcatccaccgattgataaatgagaaagagagctttcttgtctctctttcttgactccttcaacgtctcctttacaccttggcttagcgaggcttcatcttgttcctcgaagccattctctatgatatcccacacatcttgagctcctagtagcgccttcatcttgatactccaattatcatagttgttctttgtgagcatcggcatttggaaaggaaaacctccattcgccatcttttgaggatcttgaagctctgataccactttgttggaaataaggctttttatgtttaggaaaagtgtttaggaatattggagactttgaataggaaggagaattctctatggaggagagaactttgtatttttgcttgatacaaatgtgtaggattacatctctatttatactactctaaggagaactctagacacactaattctagagagttctcaactctagagatccaaagaggattctagagaatattaaaaccataagaaatatctagacacttcaaacactacaaaaattctctagaacatgacccataattact

SEQ ID NO: 2011 - DNA, 348 bp, Glycine max
agcttgcacactctattatattggtctaccaagtgttataacacaatagtgaagcgttattattgcacaacagtgaagtgtacttattttcagtctaggccacaatcttcaccccattctccctgctcaaccactgaatcaaaatttctccagccacaccaaaatagagatgcagaaaggaggcaaactaatactaccaataacccccaagttccacgttttaggtgggaattatactattaccaaaacgggttctacaacctcttacagtagcataactcttgcaaacactctaaatagtaaaaaaaaaaacttcaacattacagaactcacttccatgtgaaaaac

SEQ ID NO: 2012 - DNA, 460 bp, Glycine max
tatggatcattatgtggatcaactcattgcatatgcatatctctaggtacacaaaaatatttttaaaccttttcccattatttgaccggtagacactacacatacacatgatttggtccccaagtaagttactagggttttagaagccagcagcagtaggcaaaaatgtcgagttccatgatgacgctctcaaggaggctctattgctctctgcttcgaacccccaatgcatatcgccacttctccaccgatcaccttttcgactctggacgaggccgactcagcacccgacccacccgcacccgacgccgttcaagaagaagaaaagttcgtcatcgatcgccccctcgagaatggcctcgacgatggcatctacagggtatcgtatttctattcgaaatccaatttacaattagcgattcattttcccattcaattgtgctgtgttgtgttaggctat

SEQ ID NO: 2013 - DNA, 988 bp, Glycine max
  unsure at all n locations
acgacataacacattaccgagatgtggacatacatatccttaccgtgtgaacgataagagataaagagatccttataaaactctaagganntnnnntgtgatgatgcctgcaaccgtgcaatagcgcactatncaatacccagctatgagggcgcgtcagccaccaacacagcagaatatagtattaattgatgtgagcaaccaacacgagcgacggaacgcgatattaacacaccgtactaaactctacacgacgtaatacgaaaccacaaaaggaacacatactctaggccagccaaacagaacgacaacctaataaagacccattcaaaaacgtcaacagagggggcgggcacaatgcaacaagacacggatagagactaacgacaacacaacaacgaaatagggattgcacacccacacaacacaggagcctanaaagacataatataaacaaaataaatgacagtgaggagacagttgaaacgggagcgatcaaattgccacccagacgattgccaccgcaaacaaccgggggacaattgaaggaatgataacgaactaagggacccatgataagaacgacacgaatgcaaaagaaggcaatggtgataaggaaacaaattaactcgaatgaacacatacaaagtgaaataataaacaagtgataacgcatagacggtcagataacgactgggttattatcaaggagaaatgacctcactggatacgaaacgacgtggaaccgaacagaacagcgagatcaatgaaaccaaacggaagcacataacaacgaaattgaccgcacagaaatgcgaaacggaccgtctgcgatacggccgtcattgacaccgagcagtcatcgcaaacgaaccacatcgtatgaagcaaacacagagagatatgaactttactacacgatcacgccacgcatagtgaacgagacggagagtctcaactcggaacacacaactcactactacgagct

SEQ ID NO: 2014 - DNA, 370 bp, Glycine max
agcttgcttccttttgatttcggagacgtctcttgacatcatttattgtgcaaccaaggacgccaagttttctcaaagcggccaatccaaggttgtatatcatcaaataataatccccggacgaaattagggtatgacaggagccaccagaaccaccttagattgttttgtcttttttctcttccttccttcctactccttctccttaccttcttctctttcttaccttctttgtaacaccctgaaatttcatcttaaattatttcctacattgtgaaagactagatagtgtaagttcactctatgtaaatttactttgtgaatttatgaatttaatttattgtttggataattctaatccttgaaattt

SEQ ID NO: 2015 - DNA, 577 bp, Glycine max
tcttcagaaacgtggcatttgtgtgcaatacacaatgctcggttcaccacaacaaaatggtgtatcagaaaggtgtaatagaacattaatggatatgattaggagtatgttaatcaatttgactttaatcatatctttgtggatgtatgccttgaaaactgtcatgtatttgttgaataggattcctagtaaggcagttccaaagacacctttgaactgtggacaaataggacacctaatatgaggtacctgcatgtttggggttggcaagcagaaataaggatttataatctgcaagaaagaaaattggatgcaagaacaatcagtggctatttcattagttatccagagaaatcaaaggggtatatgttttattgtcctaatcataatatgagaattgtcgaaactggaaatgcaagattcattgaaaatggtgaaatcagtgggagtacagttccacgagaagtggaaattaaagaagttagagtgcaggtcctttttgcttgggcctctaacagtaaggtgattgctcttttaattggtgttgcataattaatgaagaggagcaacacattaa

SEQ ID NO: 2016 - DNA, 450 bp, Glycine max
  unsure at all n locations
tggagacgatgcttcaatggaggaaaagaaagagggagagttagagagaggggggagcacaaaattgaaggaagaaaaaggtagagaagttgaactttgagttgtgtctcataagactttcattcatcanagttacaacaagtgttacacatgcttctatttataaacaaggtagcttccttgagaagcttccttaagaaaacttccttgagaagcttctttgagaaaacttccttgagatgctagagcttagctacacacacccatctaaaaactaagctcacctccttgagaagcttccttgagaagctagagcttagctacacacccatataaaaactaagctcacctccttgacaaaatacatgaaaatacaaaataaaaagtccctactacaaaaactactcaaaatgccctgaaatacaacgctaaaaccctatactactagaa

SEQ ID NO: 2017 - DNA, 331 bp, Glycine max
gtacatatgttctcaacacgagaacgtttgaggtatctaataagcatgtctgcaagttggtcaccggagttgacaaagtcaatgatgatttctcctgagagcaccttttctctcacaaagtgacagtcaatttctatttggttagtctgctcatggaagatcggatttgatgcaacgtggagagcaacttgattgtcgcatagtatcttgagtgtctccaaattttagttggtggagaaattgcctagccatgtaaccttggatgcaatagctgccatagcatgacacttagcttcaacactggatatagcaattgtttctgcttcttact

SEQ ID NO: 2018 - DNA, 446 bp, Glycine max
  unsure at all n locations
tgcctcanagaggtccaggaaggacaaggcggccgaaggaactagttccgctccggagtacgacagtcaccgctttatgagcgctgtacaccagcagcgcttcgaagccatcaagggatggtcgtttctccgggagcgacgcgtccagctcatggacgacgagtatactgattttcaggaggaaatatggcgccggcggtgggcaccactggttactcctatggccaagtttgatccagaaatagtccttgaattttatgccaatgcttggccaacagaggagggcgtgcgtgatatgagatcctgngttaggggtcagtggatcccgttcgatgccgacgctatcatccagctcctgggatatccgatggtgttggaagagggccaggaatgcgagtatggccagaggaggaaccggtctgatgggttcgatgaggaggccatcg

SEQ ID NO: 2019 - DNA, 136 bp, Glycine max
atacgcctgaatcaacatccgtgtgaaaagttatgaccatttgaatgtttcgaaagcttcctttgttcaatggcgagcatatagacataatgagagcccgaatctgaccaccgtgtgaaaagttatgaccatttga

SEQ ID NO: 2020 - DNA, 415 bp, Glycine max
tagcccaagaggcgatggaccttttcaggtcttggagaggatcaataataatgcctataggttggacctcccaagagagtatggagtcagcaccacttttaatatttctgatttaattccttttgcaggtggagctgatatagaggaggaggaaccaataaatttgaggtcaaatcctcttcaagggggaggggatgatgcaatcctccctaggaaaggaccagttaccagagccatgagcaagaggctccaagaggattgggctagagttgattaagaaggccttatggttctcatgaaccttagggtagatttttgagcccatgggccaaggttgggtccactcttctttgtaaatagtagaataggttgttttcttcttttgggccttgtattctggccattctagtagtat

SEQ ID NO: 2021 - DNA, 205 bp, Glycine max
  unsure at all n locations
ctcacaaatgccaagttacctttcaaataatggacattaaccccccctacagctgtctgttggggtgtccgtggatccactcagtgggagttgttccctctacacanccaccaaaagtgaaattcgtagtggaagggcatctggtcatcgtatcangcgaggaagacatcttggtgagctgcccatcctctatgccttatgtgga

SEQ ID NO: 2022 - DNA, 453 bp, Glycine max
  unsure at all n locations
ntaganacttgttntaaagatgtaccctcttctggttgcttcctcttctaagagggaattggatccttgtatgactgactctntgtccttgccatctacaaattacaacataagaaagatatgcaatttctatctcgttagcaaagaaggagcattgaaaaaaaaatctagaggagtggaagaatgacatattctgcatcaaatgggtaggtctcaccatggcaaaattgagccctgaaactcattgaagcttctggaagtgcatttgccatggagatttggacccatgtagttgagatagcctctggaggtcatttcactttggcaaatgataacctcattgtagctgaatagatcttgaaacaaaagaatatctttggaagtcctttcgccttggcaagatgaatttttgccatgatgaanagttacccgtagagaattcttggtctctat

SEQ ID NO: 2023 - DNA, 448 bp, Glycine max
  unsure at all n locations
agcttggaacatataaactgaatcctagttcctcttaaggacttagtcaaaatgtctgctggctgatcattagaattgatgaactcagtggtaatctccttggacaataatttttctcgaatgaagtgacaatcaatctctatgtgcttggtcctctcatgaaagactggatttgatccaatgtggagggctgcctgattgtcacaaaataacttcattcgtgtaacttcacaaaacttcaattcttgaagaagttgcttaatccacataagttcacatgtgaccaaagtcatagatcggtactcagcctctgcgctggatcgagcaacaacagtttgtttcttgcttttccaagagataagatttcctccaatgaaaacacagtagcctgaagtagatntcctatcaataggacaaccagcccaatctgcatacaatatccagatac

SEQ ID NO: 2024 - DNA, 450 bp, Glycine max
tcgcctttgccttttcctaaactactgtaggaatattagggtatggacgaatgggttagggtgttggggcacataaagttgggatgcaaatggttagcgtggcggtgtttgggttgggacgcaaagaagactgacggacgagaatgagtacaacataagaaggggaagggtttggggtgtcttgcgacgatgcaaaggacggtagggggtgggtttggggtgtcttgcggcgatgcaaaggacggtagggggtgggttgggagtgttgagtctttggctctaaaagggaatttttttcatgcaggaagcaaatagggaggtgtgggaagtaaaatcctaattttatcggtattgacatatacaactaaaattgtttaaggacattgttatcactaccataattgctattgacactatgaagtcttggcagtggccattttaaccttttga

SEQ ID NO: 2025 - DNA, 211 bp, Glycine max
catgtctgcagctgcagattcaccatttcctataatctaaagttttatctaaatagctctgagtaagtattctgacaaagggtggagtcttaattaaacttgttgaaggagatatgttattgagagaaattgtgttaatgcgctgcatacttgatctcttatttatgacttgattacaatcgaccaatgccataatcaagagcttaattag

SEQ ID NO: 2026 - DNA, 449 bp, Glycine max
tatgagagtcacaggctatatttataagttcaaatatgctcttctaatgctttcttaatataaaaccatttatgtgtcttcaccttatagcttaagctttttggggttgtagttcatgagatgatatcagagcctctatgaccaacttgtctagagttcaattcttgctgcccacactcttataaaaaagttgaattactgcacaaggtaggtggacttgtgcattatccatgctaaggttcttgtgtgagggggtgttggagatgtaatataaaactgtttgtatgctttcaccaaacaatttaaccttttgggattgttggtgatacaactattttttcaaacacatccctccattggtagtttggtacttctattttcacttcaatgtagcttgcagttgcagtgtttaatattccaactatttgcaattaccatttcctttccta

SEQ ID NO: 2027 - DNA, 191 bp, Glycine max
agcttcaccaccaagatgagccttggataaaaagcttggagaagatgcttcaatggaggaaaagacagagggagagaaagagagaggggggagcacgaaattgaaggaataaaagaggtatagaagtggaactttgaagtatgtctcacaagactctcattcatcaaaagtacaaccaagtgtacacatgc

SEQ ID NO: 2028 - DNA, 453 bp, Glycine max
  unsure at all n locations
tgtaggattatggcgtacccatcacatgtggtactatgtggtggccgggcgatggtgcacaataagttttccacatgcacaatgcacgcataaacccaccatcccctgttgcccacctccaactgagctcacgtactcccacgtagctcatatccatctttctctcaacaccaggaccccatcaatcctcccaagcttgcccaacatcaaagttatacaacattcacacagcacaagctatcacagctaatcaaaacagggcaaatgcagaacactctgcccagaacaccaaccaaaatcacagcttttcacatacaaataccccaganacattttcttcgttccaattcgttaaccgttggatcgactcgaaaattttactgcaagactctagtacttaagcctaaattgagaccgttgggatctactatcaaacatgcagagctcattctg

SEQ ID NO: 2029 - DNA, 401 bp, Glycine max
agcttgaacgtatgtaagacacatcttcttaacctttgtgattctggactccatttcattgaagcgcatatccacttgtaattccaaatcgtcaaacctctcaccaacaaaggtttgaagaccatcaaacctgtctaaaatctgaaaggagagatgaatcctctccatcatgtccttcttcaccaacatggcgagtacctttcttcacccaagagccatcatgctccttttgataaccaaaagatgctatgactaaagtgcctataaggaaagatctcttgattggaacataaggtttagaatcaagagggatgttgaagtgttgaaggaaaagggtaacaagatgagggtaaggcaatggagcattcaatcgcaatgccttatgcatgcaatatctaaca

SEQ ID NO: 2030 - DNA, 445 bp, Glycine max
tcaacctagaggagacggaccattccaagtgttggataatatcaacgacaatgcctacaagattgacttgcctagtgagtataatgtaagtgccactttcaatgtgtctgatctatctctttttgatgcagatggaggggccttgtatttgaggacaaatccttttcaagaaggagggagtgatgatgacataaccaagggcaaggaccatgaagcacttgaagggcccatgaccagaggcagacttaaacaagcccaacacgtcatagagacaaggctggtcatttgtatagctaccattgatgatgattgaaggcccaagtggagaaagatgaatgcccacaggcataggcactaccaagactactaattgttgctgaacgcccaagttaaataagtttttagttataatttatttttattgtaactttggcccaaactgttt

SEQ ID NO: 2031 - DNA, 433 bp, Glycine max
  unsure at all n locations
agctntaacctcatcgtccctcacagtctttatatttgggagccaatccaatccttgtgttcggactctcaaccacttatgatagccgccgatgatcccattactgcttcccctaagctctctgttctttcttcacgccgcatcccatgccttgcaaactccttggagtaccctcgcgttgtggtcactaaaaccctgtgcgatgaaaggcgtgatgctttcgtctaatggcgctcctctcatggggtagccaagctgtcttatggtgagaacgggattataattaatacaaccccttgttcccatcaagggaacatttggacatccttcgcatgaagatagaatcctgattcttccttccttctagcgagggaaccaattaacagatgcccccccatgctagccaggagttggtcccaattcgccttttctt

SEQ ID NO: 2032 - DNA, 450 bp, Glycine max
tataagaacaaaattgccttaatcatttccaaatatgcatgtgaattaagacgcatcaacaagaatcaagccaaggctattgtgcaagcaatcaatggggcaaaacacaccaaatgattataatgatggatggctcaaattctcacaaaggtaaaaccatcactttcaaattgagctttcaaaactatcatgacatgtagagaagaatcaaggatttcaagtcacaaaatgtcaagaacttttattttcaaaacaattacccatttcttgaacctatcctataattcaaagaaaaacatgcaaagtcgtacgtgcacacgaaattgacccaaaatattaaactgaaaatccgacgaaactaacaacattaacaaattaacacaactaacaaattaacaaaaccatcataactagcataaccaaagaacactccccccccccccatactta

SEQ ID NO: 2033 - DNA, 410 bp, Glycine max
  unsure at all n locations
agctntaacttgagtcttcaagagattataattatgtgaccatggcatgaatttacttatcaatcatataatctatctttcaatatcttctttcatctctttcaacactttcaatagatctttctgatctatttctcttcatctttctaaaagtttttgttcaaacactttctcttccaaaaaaagttctttgttcaaaaacttgtgctattcatattttttattctcttctccctttgccaaaagaatagaaggactaaccgcctgaattcttttgtgtctcctttctgtcttacaaaagattcaaaggactaaccgcctgagaattcttttgatttttcccttccccttaagcaaaagatgtcaaaggactaaccgcctgagaattctttgtcccaacacattggagg

SEQ ID NO: 2034 - DNA, 441 bp, Glycine max
  unsure at all n locations
ctctcttaagtcctaaatgacatttcatactaggattaactcactttaacccccaattaccactgaatccagatttagccttccaactctcaaagcctcactctttttccactcataacaccacattctcactttctaaccctaggttaactctacccttcatctctagcagttttccataagcaatttcagcacacaaacatcacaagcatcatcataaaaaccctaaaacagaatgggtaagcttgactcacaccaaacatgacaagtttaacatgctttcatcaaatctcttcacaaataactatcataaagcataaacctagtaaaactacccatcatatctcccagccccatacccacgaaaatcatgtgagaaagaagtctacccaacctgaaatntcgaagtcccacacgtagagatgcgcttcacgactccga

SEQ ID NO: 2035 - DNA, 375 bp, Glycine max
  unsure at all n locations
taatatccaagcacttttgctntacttgcttgctttgctctttaatttgntttctattttcagtttcatgctccatgtaggtgaattgttctgttttattttctgtggagtttttttctatttacttggtgcatggtttttcagttatgtcaacacttgcattgcttttcagtttcatgcaaccatggcatgatttacattgcaaaattgaaggccgtgctgcatatgatatactcactaattntgagcagcgctggagaaaagccaccaaatggtctgagatgggtcggaaactcaagagagtatctaacttgaacgatgattctttgatcaagatagaacacatttcttggattcttagtctttcgaattact

SEQ ID NO: 2036 - DNA, 335 bp, Glycine max
ttttatattatctaatggacaggcaataccttagcatctcttactacttttttatagaccgtttaccacactatccctcttcctttcttaagctctcctggggcttacacagagtaatctattactcatcgagacatgctactatcaatatctatgtttttgcacgaccctcaatatttcttagaagctaataatttattgactcaacaaattgcaccacatagtacaagctcaaccgccataggtacatgcgcacacatgcataacccaaccatgttgggccagcaatgaagtgtgtcacacgatactgtgacacttcacttgtgctattaatc

SEQ ID NO: 2037 - DNA, 425 bp, Glycine max
  unsure at all n locations
agcttanagtatgcccgagtcattcatccctatgagatgttgttgaagtattggcgatcagaattgccattccttggattatagggttgaaccaagctcatgcttttacaaaaaggttcatcaagtcaagttgaaatatggaagtaaccgtcttgcaaaattggggcaaaagatgaattgagtcacatcactgcttcgtctactgccaaacatatttaggattgttgatgtccttgttacttccagtttcaccttgacaaagatgtcatggaccatgttgaaaatctaaattgattcaaccccatatcttgcgtaaaaattcgcaatacttcaactgtacatcattcgcatggcatccatgctttcattagttgcattgctcgctgcattctttccttgaaaaataaaataaaatgaacttaatc

SEQ ID NO: 2038 - DNA, 439 bp, Glycine max
ttcatctagccaaggttatacagaggtgttacaagagaacctaacgattcctaattatatgggccatcaaatctatcatgtgctgacagtaattgattagcccatggatctcctcggtggtagtacacacttcggccatggcttttgctttggctaacaaacgcgggaggtcttgacttccattcaaggtcaaggcgaatctatccatccacatagtcgcttcttgatgcagcgcatcaatcaccctccctctagcttctttttcggcatacacttgtgcagaatcctccactagcttttgttcatgggccatggactggttcaattcttcctggtattgcctatgatggctagcatgctttgctccgtggcttccacgtgttgagccaaactccttttggaccttgcgcaagcaactaactcttcttttaagatcatg

SEQ ID NO: 2039 - DNA, 253 bp, Glycine max
tcacatctcgtattcacgtcatactgatcttagtataaatgtaatcaacctacacagtatagatgaggatgtcatgagtaatgtttgtaagagttcagcgagatgatgaaaaccagaaaagtctagtgacaaatcttgtgcaactatgatcagacaatggttcattcgttatacaagcatattatatctagaccattttgtgttgggatatacagtctactgaactcaacatgagacctctagtttaagaccg

SEQ ID NO: 2040 - DNA, 363 bp, Glycine max
ctctaacagctttgaaccatatacttggcctttatttaactggctctgggcttggcgggcaccctcaacaaaggactttcgacacctattggacgttgatttgacccatggtggtatgggaatggtgcgaccatcccttcaaaccttattgatacattctgaaaggttgggtggcatgtggccatatcgacgtccttctctatcataagccatcgtccatttttcctttgaaatgccatcaattcattgtgctatggctggactcaattcacgaaatttttctaaattttgatcaaaatgttcttgcaggagtgaggctgctaaaatagttatgaataacaatttagtatatatgaagtaaat

SEQ ID NO: 2041 - DNA, 449 bp, Glycine max
  unsure at all n locations
ttatgtganaggatgggactcttcacactttgaattgaatttcaatgttcaaaggcacttgtaatcgattaccaaaacattgtaatcgattacaactttttgaaattaattggaacgttgtaaattcaatttgaaaactttttcaaaacaatttagctactggtaatcgattacagcaatctggtaatcgattaccagagagtaaaaactctttggttaacatgttttgagaaaaaaatttcatacttatcttgattaagtcttctcttgattcttgagatcttaaaccttgattcttgattcttgactctaaactttcttcttgtgtcttgaattcttcttgattcttatcttgaactcttgaattgttcttgattcacttgagttgtgctttgattgatctttgattcacttgagttgttatttgattgatctttgagctttttgtc

SEQ ID NO: 2042 - DNA, 445 bp, Glycine max
gcttaataatcctgagctggagtgagccatgtgatcccagtcctctgtgccgtagtgacggctactacataatcatcgtcaatatctggctttgctgcgcctgaaactccttcctcagcagcctccactggtgtgtcctgagcctctgcctctgcctttggggtatccttagcctccccaacctctggagtgtcttcagcggcctgtgtttgtggctcctgggccacaagagcctcacccccccaaaaggaaggctggactccagaccaagctacctgtgccaagaagtcctccatgctcatgatcagccgctgctgagataaattctgcatactctgcatgaccaggaaaaggtcgtgatgaatggcttgtagcatgggcacgataacagcactgctatgtacgaaggggccggttggagctgaaataggtgtgggaggtggag

SEQ ID NO: 2043 - DNA, 451 bp, Glycine max
  unsure at all n locations
ntcccatagaccatctaaaatggtgatattccaatgggagtcttgaaggtagtcctgtaagcccatagggcatcatccaacttcacaaccaatccttccttgaggatgcaacaatattctccagaattttcttcaattctttgttggatacctcggcctggccatttttctgaggatgataaggtgaaactaccttacgtttgacattataatgcccaataccttctacaactatctattgcagaaatgtgaaccctatcactgattatcactctggagaccccgaagcgggagaaaatgtttctcttcaggaatttgatgacaatcttggcatcattctttgaggcaaccacaacttccacccacttggacacttaatcaacaaccaccaagatgtactcattcccataagaggatggtagagggcccacaaaataaataccccaacagt

SEQ ID NO: 2044 - DNA, 370 bp, Glycine max
tcacaactatctatgggagaactaacttcatatattctaattataacattctacaaccatttctctttttctttctctcccagatattctaaatgaataaccaaataaaggaaatcagatgccgttactggacaagtacactgtaaatacacatgcagacacatttaaaaaatgcaacaaattttggtaatatagcaagcaacaaataaacattgtattattgtatcacacatctgttaatatgtatcataattctgccgtggtccacaatacagaaatataaccatgtagctgtatttcaacagtataaacataaaagtttcttccccatttgtctttcactctctttttaaaacaagcagaacctata

SEQ ID NO: 2045 - DNA, 452 bp, Glycine max
  unsure at all n locations
tgatgaggtgatattgataaagcanaccgaggggtttgaagctagaggtaaagaggattatgtttgcaaattaaacaaatccttgtatggtttgaaacaatcctctaggcaatggaataagagatttggtgaatttatggctcatataaagtttcatagaagtcaccatgatagctgtgtttacttcaaattttcttctaaagctgagtttgtgatattgctactatgtgttgatgatatcttgatagcaagtaataacaagagtgaagttgaaaaattgaaatgtaggatttgggaacaactaggaggatattgggaatagaaatcaaacaggacagaaaaaggaaattgttatatttgtcttaagagttatatatcagaaaagttcttgaaaggtttggaatgtcaaattccaaacctgtaactactcctatgtcttagcagtttaagct

SEQ ID NO: 2046 - DNA, 367 bp, Glycine max
agcttacttttaaataatagaagtagaatattataaataacaaatatctaaattatgaaatatataaattcacgtaagcttttccttgagtaaagtaagttatgcagccttaggtacaactgtatataagaacaaagtagataaatgaatatacatataaataaaaggactaaagcctaagccaacccagaccaaatacatataataggaaatgccctagacataaagtaatcatctctaacacccaactcagtgtgaaaattacgcaaaaacataagtcaataggtgttcgcccataacagagatacctaagggagtaatccatgcctttggtcacgtcgggtatccatcacctccaagtgcactc

SEQ ID NO: 2047 - DNA, 459 bp, Glycine max
  unsure at all n locations
actcagcttatcatagttggtagttacatgaataattaagaaattatatacattnttcgcgttaattaagtgttctatttggggctctagcccctcgttaacaccaaaaaaagtgttctttcatgaaatcctattataaaattaacctgcttcttttttttttttttcttctttgctgcctcactgttttttgctcggtcttttaccaaaaaaaaaaaaaggaaacttctttaatttttttttctgcttacaattagtcaatcattactgtgatgagttaaaaataaaagaaaaatcgcatcgcgtgctatattttaagatcaacgaaacgtgaaataagttatatttatgttttaaggttggaaaaaaatgaataagcataaatgatacttacacatcactgaaacataaatggagtaatatttagatagaagtattttacatatgtgaaacgtgaat

SEQ ID NO: 2048 - DNA, 356 bp, Glycine max
  unsure at all n locations
aatggagagaaagagagataggggagcacgaaattgaaggaagaaaaagggagagaagttgaactttgagttgtgtctcacaagactctcattcatcaaaggtacaacaagtgttacacatgcttntatttatagacttgggagcttccttgagaagctttcttaagaaaaattccttgagaagcttctttgagaaaactttcttgagaagctagagcttagctacacacaccccactcataactaagctcacctccttgagaagctctcttaagaagattcctaaagatgctagagcttagctacacacacctctctatagctaagctcacctccttgagatgagaagctagagc

SEQ ID NO: 2049 - DNA, 450 bp, Glycine max
  unsure at all n locations
tatgctgcanatatttacaatagacctcctcaacctcagcagcaaaatcaaccacagcagagcaattatgacctctccagcaacagatacaatcctggatggaggaatcaccctaacctcagatggtccagccctcagcaacaacaacagcagcctgctccttccttccaaaatgctgctggcccaagcagaccatacattcctccaccaatccagcaacagcaacaaccccagaaacagccaacagttgaggcccctccacaaccttccctcgaagaacttgtgaggcaaatgactatgcagaacatgcagtttcagcaagagaccagagcctccattcagagcttaaccaatcagatgggacaattggctacccaattgaatcaacaacagtcccagaattctgacaagctgccttctcaagctgtccaaaatcccaaaaatgtcagt

SEQ ID NO: 2050 - DNA, 304 bp, Glycine max
  unsure at all n locations
ctctggggatctctctctaatataaccaacagtgcaaagtgtatcaattttcagaattttttttggttcttgtagctagctgctactattggtaattaataaatgaaaatgaaaacgaaagtgattacaccacgatttgggtgataatggtgcccaccgtcgcgatcctaatcacatttctcgtttgccattactggtcttattatatatatgattggatatccttcttttctttatttcttgatcattnttaatccagctttttggagtgtatgctactctngttggcataacatgggctcga

SEQ ID NO: 2051 - DNA, 451 bp, Glycine max
  unsure at all n locations
tcttctatttatagccttcaactntaagtatttgttgtccctcagcggatggttcttcactatattcttcattaaagtcttgaagctcttggagcatttaatgcatgtctcttcttcatgcaaagtctatgctaatagctaggttgacatgtcttatacttcaacaagaaagtcacttcttccatcagagcaggtatgcaccagcaaagtgcgtctttcgatgaagatcaacactttcaaactatggactttatttattattcataggatttaatagattctaggagaatgttttccgcaacaaagaatctcatacataaaatattaaatgtaggtattaattaaatgcactacttaatgttatgacaagatcatcttatattgatgtaacatcagaaaactcanacccagaaatacaaaccataatctgataacacatcanacacaattt

SEQ ID NO: 2052 - DNA, 372 bp, Glycine max
  unsure at all n locations
gcgttctataattattaagaagactatgctactatacaagtgtttaggcatcttggaattaaatcatgtaagttgcctgaagcaactttctgagcaaagatttataggcttcatttaatcatgacacagaataagctggccaagaaagaattgcattcttagcagcttcaaccagtaggtttcgggttttttgtttttttttttggtttggccaaacatactttgtttgaaataaaatagaataacanatttataaatttgccgaaagatttctgacttggttgttgtgttacaagttaatcgacacctacaggaatcaattccatgggtttaatcannaccagtgctactacgaaaacttcagtaactgat

SEQ ID NO: 2053 - DNA, 411 bp, Glycine max
gttgcttcgtttattctgttagcgtttccaagcgtttgagataagaagagattgtagcctccattgtactgtcaacgtgcgaggctgatttctctctacaggaacattatttcgcaaatctcaatggtgagactatgctgaaatgacatacaaaggtggtctccaaatgtcgtgatgatccaacaattaatgagttggggatcatagttttactcggacatgtttgggtgtatgcgggaaaagagaaagctcagtgtaagggacatttctttcaccagagacattatctcaaaactcccaacggtgtgtgtgtgcgaaaataatgtttgaaactcgtgttcaaatttcacgacaatccaacggttaacaagtatgagatcattcgtctattgagataggtttgagtgtata

SEQ ID NO: 2054 - DNA, 459 bp, Glycine max
  unsure at all n locations
atgagcctttgtagaccgggnaccttaagtcacctgagcatgcagctatacactgtattccatccancgatcttggaagagaaaaccaaccaccacaaggggttgaacttggcgggagacttngttggctaattggtaaacacaaacacacatttggcctaaaaaaatattgccataatgtggggtaatgccaattggaggtcccaacattggtgggtaaataaacactcttcaaaaacaacaattattccttcctcccaaagaaatgagaatcatcaagaggcactgttgaaaaatactactaaatactataaataagttatattttataattttcattctataaaaaatattgtgtcatcttatattcttggaagttggattttagattttgacctttgaatatttatttattttaatcctataaattaagaattctgatttagtgatgaaactaaa

SEQ ID NO: 2055 - DNA, 418 bp, Glycine max
  unsure at all n locations
agctnggcatggtttttaatagctntanaagcgttacttttagaagatatgaataaagtccaggtatatctagagtagtcatctacaataaccgaagcataataatttcctctaatacttatgggtctagaagaaccaaaaagatcttaacgtaaaagttcaagcactctcgaggtagaaactgcatttttagatttgaaagatactctatttgttttcccttttgacatgcattacataatccatccttttgaaattttagctttgggagacctttaactaattccttatagactagcttatttagttgatccatgaggatatgagttattctcctatgccaaagccaagagagatcatcattacttcttaaacaagccatgtngaagtgagatgcactttctacattaagcatata

SEQ ID NO: 2056 - DNA, 451 bp, Glycine max
  unsure at all n locations
nggattgatttagcctaactagggatcgaggtttagttatttatgcaacaacatagaacacaaagcataattgattagagaaacatctttatatacatcaacttgtttgttagaaagacccaacacttttacctactgcttgcattttactgtttttagcctagacttagtttaattttgttctaaaccatcaattatcaatgtttctttcaacaatgccttatttttgaatttaaccctgtttaatactagttccctgagttcgatacttggattcatccgttttaattttaaatacttgacgatccggtgtgctttccggcgaatcggatttcccttgaacatatttgtataaagattggaccaaaaagtaactacaggggaaatccaacaaccatctagctcattctctgcttctgatgaggaacataatgacaaatcattcaacaac

SEQ ID NO: 2057 - DNA, 403 bp, Glycine max
  unsure at all n locations
actcaaagtttttaaaagacatgttgacaaggaagcacaagtacattcaccaggaaaatatatntgtggagggtaattgcagtgctatgattcanaaaattcttccaccaaagcacaaagactctgggagtttgaccattccttgctgaataagtgaaggtacagtgggaaaagttctcattgacttgggagccagtatcaatctgatgccactctccatgtgcagaagactgggagaagtgaaaatcatgcccactagaatgactttacagttggttgaccactccattaccagaccatatggagtaattgaagatggtttgtcagagtaaaacattttattcttccagcagacttttgtgtaatggatacctatgaagatatgacattccctaatcttgag

SEQ ID NO: 2058 - DNA, 233 bp, Glycine max
tagaaaggaagcttcaatggtggaagtgaatgagagagagagagaggagggcgtgggaattgaaggagattatggagataagttgaactttgaagtgtgtctcataaatttctcattcatcaaatttatgacaagtgttacacatgtttttatttaaagcctagcacatgggaagctcccttgggaagcaagaaaggtagcttccttggaaagctagaggggggctactcaca

SEQ ID NO: 2059 - DNA, 364 bp, Glycine max
  unsure at all n locations
ctcttggttcttgattcacaactcttgtttttttgcacttggttggcattgttctttaatccttgatgtccgatttataggtagataaaagctcgtaattatggagagtatcttcaagattgaataatatggtcaatgtgtagattgatcttatttccttgaataagtggatcctacatgtttttgtctgatatgattagaactttccatanttgtcattcataactcaatatgaccattagacttataaaaggaaatataagatttattcgcagatatgctccttttaaacaaaatcatatanactgataaatcaaataaaatgcatattcaaaatgttgtttggatggactggacgagtact

SEQ ID NO: 2060 - DNA, 401 bp, Glycine max
  unsure at all n locations
ntgtatcctagggaggggattcgagctaaatgctgatggtcagcccttanagatattaaggaagaacatgaccactttagctaagacatggagtgttctttccttctctaatttgattcctacctcccacacatctgatgtcacattggatagagccaagtaaatctatggcattattatgaagatggatatgaatgtggggtacctaatctcccaccagatctttctaacaacatagcatgattcatccagagttggattccctgccttgatcatagctctatgcaaggccagaggagtccaatcatattctagatccctggagagcctgagccctgccattaacttggcatatattaagaagaactgttggaatctagatgatccaacagtgacattta

SEQ ID NO: 2061 - DNA, 331 bp, Glycine max
gagaatactcgccagtgcctagacgctgaatgtcaaaatgtgacctgggatgtcttccagagggtatctttggagaaatatttccctgaggatgttaggaataagaaagagatggagttcttggagctcaaggagggaaacatgattgtggctgaatacgcagccatgttcgagaaagtggtgaggtactttccccattatcaaggtagagatggcgaaagttccaaatgtgtgaaagttctgaacagttcgtgacttgaagtgaagcaagcagtgaattaccaaggtggtcgtcagtatccactcttggttaacatgtgtccgatttggg

SEQ ID NO: 2062 - DNA, 441 bp, Glycine max
atataagcgcggctctgggagacaaaggtcaagcgttcgtgatatgctaggatgatattccgagcactttggatttggtacgaccatgccctcctgatttccagctgggaaattggcgagtggaggaacgctccgacatttacgcgacgagcataatgtaaacctttacggttttaaaagctctatagttgggcctacgctttagagcttttccttttgttaaggctatgagtcttttgtttttgaatctataatacaaggatctctcttcatctgatcctggactctacccattctcattcatttgcatgtttacttgtttatctgaaacggcagatacgatgacgagtcccccgaaggtactaatacctgggacccgcctatcgacttcgagcaagagatgaatcaaacggaagatgaaggaaatgaggatgtaggact

SEQ ID NO: 2063 - DNA, 311 bp, Glycine max
  unsure at all n locations
cttgtctttaaatctttctgactttgtaaccgncattgcatgtcttatgcttgcttcgaaaaaccttatagaaagagactttgcgaatgttatcctttcatgaaatgcgtgttattttcgtaacctacactgaaccctggacacattggcgtggtcggaatttccaaatgatgttcctttggaaaacctgaaatgctcccatctctttcatgaagagatgtgggtgtttgacccacagcactgttactagctttgttttgtgaaatccatactaagtctccttcattttggcatggtagaggcttgcgtgg

SEQ ID NO: 2064 - DNA, 462 bp, Glycine max
actaagcttcttatccaggcacattcttggtggtgaaactccttcttccatggcttattcccttgtggatggagcctcccctctcctcttctcctttgccttccgctgcatctccatggtggaaaatcaccattgaagctcaaagatccagcctccatagaagcttcacatgcaagcttccatcagagttagtgcaactcgatgtcaaaacaacctttctccatggaagattggaggaagacattttgatgcaacaacctgaaggttttgaaatggaagggaagaaaaattatgtatgtaggttgaaaaggtttatatatgggttgaaacaatctccaaggaagtggtaccagagattcgatgagttcattattactcatgggtacaacagaagtgcctatgattcatgtatctattatagtaaggtgggggatggttttcgcatctaggtgctactctatg

SEQ ID NO: 2065 - DNA, 359 bp, Glycine max
ctcatctcttctttggttgagctttgtgcaaatggagaaaaaagaacttcaatttggtttttaaagagacatgatgatgagggttaaaggttaaggtgacaagcttaattgaccacctgaatgacttataaccagcccatgggtaacgtgcccagccatgcaattttagtgcattatgccttttgaaaatttaagccaaaatggctaaagtaggtttaaaccaaaaaatggaaatttctgcttttgctaaaactagtaaaccctatcctaatcccctagatggacgtgttaccctttcttggattaagcgtaatcaaagtggacgttgcacaaagttcactctcacagaaactaaatac

SEQ ID NO: 2066 - DNA, 448 bp, Glycine max
  unsure at all n locations
tccttgagaagctagagcttatctacacacacccatctaataactaagctcacctccttgagaagctttcttgagaagctagagcttagctacacacccctataatagctaagctcacccccatgacaaagaaacatgataatacaaaaaaaatcctactacaaagactactcaaaatgccctgaaatacaaggctaaaaccctatactactagaatggccaaaatacaaggcccaaaataagaaaacaacctattctactatttacaaagaagagtggacccaaccttggcccatgggctcaaaaatctaccctaaggtttatgagaaccctaaggccttctttatcaactctagcccaatcctcttggagcctcttgctcatggctctggtaactggtcctttcctagggaggattgcatcactntataacagaacgtcccccaca

SEQ ID NO: 2067 - DNA, 441 bp, Glycine max
  unsure at all n locations
gtcgcttcacccaaatcgtgtcttcaagttcaccanagccaatactgttgacaaccttgtgaaacctgtgcacctaggatacaaaggcaacttgaaatcattttctagtttgtcataaaaaagggcatgtgctcgactaaatccctcttggcctagatcgtgaatcatttcttctatacaatttcccatgtctacatccacagtctgagtgtcagcaactgatggtggctgttctggaaattccccatgccatatccatttagtgtaagttttaatgatcccgtgacatataagatgtgatcttatctcacttataggctgatgtctcccatttgcacatttgacacacggacagaaatatttttcccacacagatgaaacattgagttcagtaaaatgggaggaattgttcaanctccattctcatactcctcactaatg

SEQ ID NO: 2068 - DNA, 457 bp, Glycine max
  unsure at all n locations
tctgggggacatcttgacttgctttccaatctgacattctccacagattctgccttcttctattntcagattgggaatgcctctaacagcacctttgtcaatgattttcttcatgcctcttaagtgcagatgtccaaatctttgatgccatattctgacttcatcttctttggaggatagacatgtggaggagtaactggtttcttgaggtgtccataggtaacagttgtcctttgatctgctgcccttcattagaacttcactcttctcatttgtcaccaagcattctgactttgtgaagtttacattgaatccttcatcacacagctgactgatgctgatcaagtttgcagtcagtcccttcaccagcagtactttgtccagactaggaagtccatcatggactagctttcccattccagtgatctttcctttagagccatctccaaatgtcaca

SEQ ID NO: 2069 - DNA, 542 bp, Glycine max
  unsure at all n locations
ctctactctacattcacntacttctatctaatgtatcgtctattnntnacttaatcccctnaaccncacnacgnnttttgacccttgatttgcnancttcntgnaccgggatccatanagacgacctgangcatgcaagcttctcaggaagtgtcctaatattatagggncgcggaactaaactctaacttctcaaagaagatttctcaaaaaaacctctcaaggaagctacctaatctataataaaacagtgaacacttgtgaactttgagaagaaatctggaacacactcaaggtaacttctctccctttttcttccttcaatttccggctccccctctctctttctctccctctttcttttcctccattgaaacatcctcttcaagcttcttatccaaggctcatcttggtggtgaagctccttcttccatgacttattccttaatcgatggcgcctctttcacctttttcctttgtcttcgctgcattccatggtggaaatcccataaaggacccattgagctaaaaaccagctcatg

SEQ ID NO: 2070 - DNA, 451 bp, Glycine max
taccctcaagaacagtacgttgtagggcacgtcaacactcataagggcacgatgaccctaggttgcggtggtgcgaacaacacatgatgcggaggtagcggaggcgctgacaatgtatgcttccttttgcggagctcacggtggtgcaagggagattgagggcaataggagacatcggctaatagcacaattttcaaacagtgatttcgaggtacgcgtgttcaattaacgcacaaaagggaggatatatgaaagcatgttaacgacggtgtagttgtaaacccgtctttgatactcaatatttctacgatggtgtttacaaatacaccgtctttaataagctccggcctaacctacaaagacagtgttagcacaaaacgtcgttgtagacatcatgtgtcgtgcacatgcccagtaaaaatgtcatatatttacgtaaatgccactgatc

SEQ ID NO: 2071 - DNA, 302 bp, Glycine max
  unsure at all n locations
ttattcgntgaccacagagtggtacctggagatatgtcgcgggggtcaggagaccttggggacgtcaggtggggtgctattgcccacaaacaagcttgaccaatcccgacccaacccgggcatagtcagtcagtgagaacctgtgatgtacctaagcaggcgagctcctgacagtcaatagataaaaagaactaagaccacaaagcaaggaggcttgtgtggtggctggccaactgtgaactttgattgatatatgggatatggcctctggtaatcgattaccaagggtgggtaatcgatta

SEQ ID NO: 2072 - DNA, 466 bp, Glycine max
  unsure at all n locations
acggaccttgaaactaagcttgaatcgatacacaaggcttgtaatcaattaccagatgttttaaacattttataacaaccttctgaaatttgaatttaaattttaaagacctgtaatcgattacaacttgtgtgtaatcgattaccagacatgaaaattcaaatttcaaatctaaagagttacaactcttcagaatctaactgtgtaatcaattacaatagttatgtaatcgattaccagtaaggaatttttgaaaataactcccaagagtcacaattattcaaaacgttntttggatggtcatcaaaggcctataaataggtgacttgnggtacaaaattccttagatttttcctgaacaaattttcttatcctctcaataccaaattgtcttataagtctaaaaaaagaattctttggccaaaacacttgcaaattcagtaaggaatcttgagtgatgttcaat

SEQ ID NO: 2073 - DNA, 402 bp, Glycine max
  unsure at all n locations
ttgtggataactgggtggngggtaaagagaaggtttgtattggctgagtaatgacattggtgggttggtgggttggccgtataagaatggtaatcacaagatgggtttcttcctttttcttacccttttcatttggcccagtcttctcaatcggcctaggaggatgatcaaatttgcctcttttcggacccacatcgatcctttcactggcgaagaccaaatccggaaagctntgagggtgtgcagcccaccatcttttcatagtagagtatcgataatgtgtctaccatcacgattatcgtctcccttccatcattgnggatacaccctgngccgcagatcccttcaccttttgggcgtgttctttgaaagatccgncccctttttgcacatgttttgatg

SEQ ID NO: 2074 - DNA, 443 bp, Glycine max
  unsure at all n locations
tcctcttatgagtgcatagctctttcanaaatttagcatatcttggaatttgctttattgcatccagtagaggtatgtttacctctactcttctaaatgtttccaagatctccttctccgcctcttccattttcttgttggaaattgctcttggtgggaatggaagagggatatgctactactgtaagtcagaattaccagtagaagattcacctgcatagaaattgttaggcaacttactctttaaatttttgtcatcatctttttctggagttgagtgacgttgggcaggttcatttgcagatgaggaagatgctactagttgaggtccttgatactgttttcccaacctcaatgtaattgcactcacattcttgggattctgtacagattgagaaggtaatctgtcagaattctgggactggttttgatttaactatgta

SEQ ID NO: 2075 - DNA, 596 bp, Glycine max
  unsure at all n locations
atcctctctctgcgaacgagcagttctacnattcgctcttccnntatcactcatattatntatcgnaagcccaatntnactatgactcacacntattcgaagccgtatgatttgaaaccatcttgacccgtgatctcttagtcgactgcagcatgaagcttggcttcatncattctataagcttatttgaaccatttacatgaatattggtcatcatatatcataaggaatattacttatgagttaactaacaaagagattgtgtaattcacatttacttaacatcatcacgcaacttgtagtatagatatgtttcaacactttgtcacctgatattatttcagctacatctgcatgtataatgaaaaacgatgcttgtacattangaatacccaattttgtctcattccacgacaactcaacaagctttagtaaacatcaaacacgttcttaatcaattctcccaatggatcaactctaagtactatatttgacctttcaaaagctccactcggtcttggcacacaatatgtgaattctatttgggtaatcgacaataacaattaggctatatttatgatacaattttaacactn

SEQ ID NO: 2076 - DNA, 472 bp, Glycine max
  unsure at all n locations
tcacggaactatgaaactcagctatgactcttggcaatttctttaaaactagtcacttaaaattttgtgacttttgaaaaaatcttcagaaacaagtcacttgaagaattgtgacttttggaaatgtatttttcgaaatcagtcactggtaatcaattaccattaaggtgtaatcgattacacatcaacagatgtgacttttcattntgaattttgaaaattaaaacgtttagaagctctggtaatcgattacaagtgttgcgtaattgattacacaagtttaaaatgatttaaaactgttaaacacaagttgtaactcttgaaatttgaaatcttaacgttttaaaacactggtaattgattactaccttctgctaatcgattaccagagtgtaaaactctttggtaatgatnttgtgaaaactntntgtgctactcaatattntgaaaaacttttctagtacttatgttg

SEQ ID NO: 2077 - DNA, 437 bp, Glycine max
agcttatgcgcatattttcttacgaacgtttacttgcacgagacatcctatcaactaagaaaaatgcacccatatacaatcaaggtagcttcattacctagattatttacatgtacttgcaaggtgtatttgttatttacatcacacacgcctccttggctgaatttacatacatgcatactcaaagcattttggggtaccaaaaactgcacatgcgctcatcttggtatttctaatacccctacatatacaaacttcacgatgaatcttgactacctacacaataaggtgctacatttcatgctttttttcaagtttttgctacctaaagccacatgcaaattcaagcatatatttctttgctgactaaaaactgattcaaaatagaacggattatattttttgtaatatgttttcctcacataacatgcaacata

SEQ ID NO: 2078 - DNA, 428 bp, Glycine max
ggatcaatacaattatctaatcattccaatccactcttatatacaattgctcattcaaatcattctcaaacactcatttcataccaaacaatccactgcatatcatttccaatcaattcactgttcaaacacacttttggtacaagcaaataactcaaagtgctgaaatttaaataactgaaatttaaagaactgaaaatgttcatgctttgcagaaattaaactaaacacaatttaaacatgctgctcatcctgtggctgatcttcattaagatccagtgttggcactgctgatgaatcctggataggctgctctggctccgtgactggtgtagctggctgggtctcctcgggaacaggtgcaagagatggcttaggtatctaatctatggaagtcccctcctcttgatccatgtgtgcatatgcat

SEQ ID NO: 2079 - DNA, 423 bp, Glycine max
  unsure at all n locations
ctgcagcttgttctttgataattgtgcataacgtctgtgaattatttattatgaaattggtgagtggtggtacatcttgactcgagtgtgtgattcatgtgtaatgtgattggtgattgaaaaatgatatttaaatgatatagtagtgaggtgacatggattgtattaagtcgagctatgttataaatattactataacgcatttttcttatatctttgcttatctataatttatttaagaatttgataacttactccctatgtattgtttgtgtttggattctatgatgatcttgaaccttgtatttgtgggagaagatgattangtggatgacttctaagaatcttgtgctagaggacgctgagacactatgctctaataggatgtgacattggggcattgggttttgttttaatcgcatg

SEQ ID NO: 2080 - DNA, 443 bp, Glycine max
  unsure at all n locations
ntgcagcagatgccactctactctaaattntttaaagatatgttaacaaggaagaacaaatacattcatcaggaaaacatcagagtggaaggaaattgcagtgctgtgatccagaagatccttccacccaagcataaagatcctaggagtgtaacgattccttgttcaattggagaagtcaatgtgggaaaagctcttattgacctgcgagccagtatcaatttgatgccattctccatgtgcggaagattgggagagttggaaataatgcccactcgaatgactntacaattagctgaccgctccattaccaggccatatagagtaattgaagatgttntggtcagagtaaaacattttaacttcccggcagactttgtggtaatggatatctctgaagatactgacacccctgtattattgggaaggctattcatgttgac

SEQ ID NO: 2081 - DNA, 424 bp, Glycine max
  unsure at all n locations
agcttaananaacaagaaatgaattgaaagtctcggattcaaaaacttacccgttgaagaacgaagaacggatgaagaacggtgaagaacggacgaaaaccttcacggacttgcttacggaaacatctcggaagcgttacggaagcacctcggcttggattttcttcacggaaacaatttttttcacccaaaacagctgaaatacatagccaggggcctgaggcatccttagaacagcccccttcagcctataaaagcaatctagcttcaaaaaaacattctggaaggcccaatccaaaatttcgaaattgctatttgcacccccccaattttgataagttcacccccttctttcgtaatttacgggaaagttacggaagccttacggaagcatataggacttgattttattctntttttctct

SEQ ID NO: 2082 - DNA, 361 bp, Glycine max
  unsure at all n locations
tgagatgaggaagtgttgaagggtgattctttctgctnttattgttgaccacagagtggtacctggagatatgtcgcggnggtcacgagaccttggggacgtcaggtggggtgctattgcccaaaaccaagcttgaccaatcccgacccaacccgggcatagtcggtcagtgagaacctgtgatgtacctaagcaggcgagctcctggcagtcaacagataaaaggaaaacaagaccacaaagcacggaggcttgtggtggctggccagctgtgaattttgtgtaatatgtggattgtggtctctggtaatcgattaccaaaggtgagtaatcgattacaaggcttaaaatngaagacagg

SEQ ID NO: 2083 - DNA, 493 bp, Glycine max
  unsure at all n locations
nttgaaacatgagtaccgncatctntagaccgacctgaggcatgcaggctgaccaaaaccggtgagagtgtgactttaactattagtggacgactaactgtgaagaataatctttggcttcatctctggattttaaaatggagtggttaaatgaggacatgatgaagggcatgattatgcctacaccagcctttttgacaaaaaagttaccttgaattataattggattctttgcacccttttatgagctttcaaaatggaaccctgaacttacatgattatctccagaaaccttgcttagattctaggagagcatatggttcaaggcaaatttacccaaaatttgggggagtggagttaattgggatgtaaagaaaaagggtaaagcatcatcacacacacaatannataaatggtgtgttaaaaaaaacaatgaaagggaaggtgggctgatataataagggtcaaagcaaatgaaagtgaaaagctagtg

SEQ ID NO: 2084 - DNA, 365 bp, Glycine max
ttcgcacatcgttcgcgtgtatcatatccactccacaatgtttgaagttgatgagaccttcaatcctattacgcaacgtggcggacaaaagtgggcatttaacttgaatggtcattattgtcaatgcggaaggtattctgcgcttcactatccatgtttacacattattgcagctcgtggttatgtgagcatgaactactaccaatatatacatgttcgctacacaaatgaacacattttttaagctttctatcgcacaatgagggctctcttaggaatgaagccgctattactcctcctaatgacgcatggacacttatccctgactcaactataattcttgcgaaaggtgtgccaaatcaaca

SEQ ID NO: 2085 - DNA, 450 bp, Glycine max
  unsure at all n locations
tagaaatcaagtgatcatcaattccaaaacatagggggagtgatcgtaaattntatatatatacattgcttgcttgaatcttgatttcaggacttatattgtcatcatcaaaaagggggagattgtagaagcaaatgcctttggtgttttgatgatgatcatgatgagttgatgcaaatgatgcaaatgggcttttcaagtttaaattcaagacaatgattcaagaatgcaagccacaacatcaagatgatcactattattttaggaagggaattcctaattgatatagcaaaaggtttggccaagtaatttaagttaaaaaagtgttttttcaaaagatttactctctggtaatcgactaccagaggatgtaatcgattaccagtggccaaaaacgctttacaacagctactaaatatttgaattcaaactttagactgtgtaatcgat

SEQ ID NO: 2086 - DNA, 180 bp, Glycine max
aatgaagtgaaatccaacatctatatgcttggttctatcatgatgaacctgatccctggccatgtatataacactaaggctatcacagtagatattaacatactcttgattaataccgagatcatttatcagacctcttagccaaattccttcctttggcagcttcagtaagagtcatat

SEQ ID NO: 2087 - DNA, 455 bp, Glycine max
ggatccatcatacaattgttaattgtatcaggtatttaatgcctacaaaaatggtgagttgcaatgaagttgtaattgcaagttgagagacagactaagtaacagcgagttagtgatatacaaatgctaatatatcaattatggtcaataattcgtctttagtcctttaaaagtgaaaatactataatatagtagatgtatcttgttgtcccttaaatttatacaaatcaaacaaatcctaattgtcttattcttactggtttctaaactttatttaggtttgtggttgcattcagagaggaattctataagttgtagttgccgactttgggtgacatcaaggaaagggtaagatttaagctaggattgcctattttgagcattatttaacttttttatgcactttaagtatattccttgtttaattccactttaagttggcaccaagtaaactg

SEQ ID NO: 2088 - DNA, 343 bp, Glycine max
  unsure at all n locations
attcaattaagaaagagaaatccccaagagaaacgttccattggttttttgggttattttactaaaagaaattttttgattattatattaatattttacctctttttggtttccaacgtggttaccgcatgaccgaacgattggatttcattttaacagaaattaacggatattacaattcaaatgatcagtggaagtttattttattttttgattangcgagaaaacggcttaaacgatcagttaaagcttcgtcaaaacggaagaaaagaaatcaaaattgaacgaaataaaaatgaaagcccagaaacaataaataaattaaaagtctcagatttggaac

SEQ ID NO: 2089 - DNA, 436 bp, Glycine max
  unsure at all n locations
tttctaaaagctgttacaaactatttaaactttnggtaatcaattacataccttgtgtaatcgattacatccttttaaaatcaaattcgaaatttgtaaaactgtttcagaaatcaatttggtcactggtaatcgattacatcctctggtaatcaatcagagagaaaatatcatatttttgaaatctcaaaaagcttttgtaaaatatcctttagccaaatctgtgcaacatcaattaaggaatctttctaagatcctaggaactaagtacattgttcttcttgaatttatggattcttgacttgaatcgcactcatctttagcatcattgaaacttcacatcatatatgcttctacaatctccccctttntgatgatgacaataatctaaaatcaagataaacgatatacaatttgataatgcgtgctcacaacc

SEQ ID NO: 2090 - DNA, 422 bp, Glycine max
  unsure at all n locations
ctcctctctctaaaatctgattntaggcttaaataggtggccttgttcgtgctcgtgcgcttagcgtaattatggaccgcttancacacattaatgaatttcggcttagcgcgtgcctttgtcgcttagcggatgaactaaagcaatgcgcttagtgagatgaagcagtgcacttagcgaacctgtacaactcatcttcttccagagtcttcctcgcgcttagcccatgagtgttgcgcttagcgaaagctcactaagccagcagattggctaagcaagaaggtgaaaaacaacacttttcaaagcttgcctaattaacctgaaagtgggagaaaataattattaaacacacaaaatggaagtactaagtatttattacctatacttaacagaanatacttataacactacaaaataaccat

SEQ ID NO: 2091 - DNA, 469 bp, Glycine max
  unsure at all n locations
tactcagctttgcaagctggaatcatttatcctatcttcgacagccaatgtgtgagtcccgtctaggtattcccgaagaaaatctgcctcaccgtgataaaaaatgagaaggatgagctgattcctactcgagtgcagaacagttggagagtatgcattgactataggaggctgaaccaggttaccaaaaaggaccatttttcactgccattcattgaccagatgcttgaacgcctggcaagtaaatctcactactgtttccttgatggtttttctggttatatgaaaatcactattgctcctgaggatcaggaaaagaccacattcacctaccccttggacactttagcttataggaggatgcctttcggcctgtgcaatgcccctggtaccttccagcggagcatgattagtatttttagtgattntttagaannatgcatagaggtgtttatggatgatttcactg

SEQ ID NO: 2092 - DNA, 358 bp, Glycine max
  unsure at all n locations
ctggtaatcgattaccgaaacattgtaatcgattacaacattttgaaattaattggaaccgttgaaattcaatttgaaaactttttcaaaacaattttgctactggtaatcgatcacaacaatccggtaatcgattaccagaagagaaaaactctctggtaaaagggtttgtcaaaaactcatgtgctattcaaaagttttgaaaaactttttaatacttatcttgattgagtcttctcttcattcttgaatcttgatcctcattcttgacatctngaaccctgaatcttgantcttgactttagactttcttcttgagtcttgaattcttcttgattcttatcttgaactcttgaat

SEQ ID NO: 2093 - DNA, 449 bp, Glycine max
  unsure at all n locations
ntgngaagtacgggcggcccccatgatgtgaaaattcaaaacgagcacgccttcctgccatatggcttgcctctcaactatacgccacccaatgtggcgtacactcccaatgagaatgtcaataacttcactcctatacccattgagagccaacaaccccaaactgatcatgcacatgtctcttaaaccgtaggggagacacatgaaattccccaccacaatctagccgacttcgagccttgcctcggatatgccactgaagggcaagcagttggtggtatacccctacaaaaccctttggagggccctcagtatcacccccagctacacctcttgcattccacaacaagtaaaaaccctcgtgctatgacagaaatgggaaagttggatcatctagaggaaaggctcanggccattgaaggaggtgaagattatgcctttgctaacct

SEQ ID NO: 2094 - DNA, 405 bp, Glycine max
  unsure at all n locations
gcatctatggaggctgtatctttgagcttcaatggtgattntccaccatggagatgcagcggaaggcaaaggagaagagaagaggggaggcaccatccacaagggaataaaccatggaagaaggagcttcaccaccaagaatgtgccttagataaaaagcttgaagaggatgctttaatggaggaaaagaaagagagaaggggggagcacggaattgaaggaataaaagagggagagaagtggaactttgaagtgtgtctcataagacttttattcatcaaagttacaacaagtgttacacatgcttctatttatagactaggtagattccttgagaagcttctttgagaaaacttccttgagaagctagagcttagctactcatatccctctcataactaagct

SEQ ID NO: 2095 - DNA, 467 bp, Glycine max
  unsure at all n locations
acggacctataaaactcagcttaagggacaacaccccatgatctgcttctgattgacacctctgattccttctctggcttgttgttgttcacaataggatgccttctcttgatggttgcttttgttaaggacatagactttcagagtttctttgcctaagggtgtgtgatgcttcacatttccattgcagtgtggagattcttctttgagaggaagcttggggatcttgcacatgagtggcctaggcatgctgttggggacattgcattggccatttcatgggtcttttttcttgtgtacacatggagagagtaatatgattagttaatttatttaataactttgtaagtttttggtgcttgtggttgtagaaacaacatggcccanattggccttgtgaatgctcagattcttgacataaatggagaaccattatatgagttctgttcttcttcaaagagagaatg

SEQ ID NO: 2096 - DNA, 421 bp, Glycine max
  unsure at all n locations
agcttatcgccatctttcatggcggcaccctttcttctcgccattgcagatggcggaacagccatcccgccattaccacttgcgggatccattgaaaaaacagacccccaatggtaaaatcgaccctgaatggtaaatagtttttaaaactaaccccctacagtaaatttggcttggctaagtcgcaaattcttaggtctgagagaaaccccaatctttctcggggagttggcaccagccaagcaaaaactgggtggcgcataggtctctctaanaacacattactattggttcctactaaattactcttgacctttaccggtcaataataattatcaaactacacttcttcaccttacccaaaatactccctcaatttctggccctttttcattcattcattctctctccctaatctctt

SEQ ID NO: 2097 - DNA, 444 bp, Glycine max
  unsure at all n locations
nggagtcgttgacttcgaagactntgtcagatctcttttgttttccacccaaatgcttcattaaaagacaagatagcttgtaagttaaagttcatatccttagcccatgatttattggaaatactttactgtaatctaagttgttgatacattacgttggtttggtatcttgtttcagtttcatttaggctctatgatttgcacaatactggctttatagagcgccctgaggtaagatggtgattntcctttctaccttcttcatttaccaccagaccaaccttataattgttagttgttgaagtgcttattgctacaaatacaaatacaataagtgctaacctacacgtacgtagagatagggctttgatgtgatgggatgatctcattntggctcggtgtatttttttcatggcatctatcttcagtggttgtgcactccta

SEQ ID NO: 2098 - DNA, 415 bp, Glycine max
  unsure at all n locations
cattctnatgaagattgaccacatcatctaattcttctcatagnagaagattaagggtatgaaccagcgatggggcgancgcaccccnncncccnccctctttctccccccccatccccccccccctattcccccctcccctctttaccttctcctccctcctcttcccctctcctctcattctctccctccttcccctcttcctctcctccactcttcctcctcctattctcttctctctcttctcttcctctccctttatctctccctcccttctctctatctctcctcctcctctctcctcccttcccctctcctgcctcctctcctttcctctccttcttctcctctttccctcctcctttctccatcccttcttctctctcccccccttccctcttcacccacctccccc

SEQ ID NO: 2099 - DNA, 438 bp, Glycine max
  unsure at all n locations
nttcgactcttttctctcaatgaactgatgggtcatctattntgtgtaaaatcagccaagtcaacccaagtccattgcattttcaatctagtatgttgctcagtttggccatatgtagggttcctaggccaactggttcgattgactgatctgagctagttctaataacattaagcgccccggaggcaacaatttgggggtaagaactaaacatatataagtattttgtttaataaaattttattaaattattattattatgaattaaaaggtattttaaatattaaattaaacaaaatgcaaacttgtcaactaaattgtgtcatgtcacaacatccttaacaagtggcaactgcaaagtagacaagtgtacatacatgccattagttaatgacctangcaacaaggactcaaaaattntttgatagagaaaagtgt

SEQ ID NO: 2100 - DNA, 386 bp, Glycine max
agcttatgcgcaagatccagtccgtctagtgtgaatgacgactgtcaagtggcattccccccgtgcttatgtcgttggtgcccaggagaccccttatcctatacatgactgtgttggatgggtcgatggggtgtatgctggggaagcatgtcgtgtccggaaagagggaacgggttgtctactacttgagcaagaagttcaacacctgtgagatgaactactctttgcttgaaaagacatgttgtgccttggtgtgggcggcacatcgtctaatgcagtacatgctgagccacaccacttggttggtatccaagatggacccagtcaagtacatttttgaaaagcccgtccttaccggacggatcgcccagtggcaggttctgcta

SEQ ID NO: 2101 - DNA, 431 bp, Glycine max
  unsure at all n locations
tgtgcgaatcanatcactcctgcattntatctctagcatgcattttttctttctttacccactcctcacgttaggttttttagggaaaaacaccataactaaacgcgccacaaggcatccctatcgcaccagatccaaatctagaacgatgggtgatcaagaggagacacaagaacaaatgaaagccgacatgtcgactctgaaagaacagatggcttccatgatggaggccatgttgggaatgaggtagctcatggagaaaaacgtgggcaccgctgccgctgttagttcggctgccgaagcagacccaactctcttggcaaccgcgcaccattcttcctcaaacatagtaggacggtgaagggacacactgtggcacgatggcgacccttatggattgccacccaactactcaccacccatcctacaag

SEQ ID NO: 2102 - DNA, 422 bp, Glycine max
agcttcaacaattgtttaatatagataaaacaatttgtaggtaagacaatgttcatgaattgtttaatagagataaaacaacaaccaagccttttcccactagagagaatgaataacaacccttgttataacccagcaagggtcctaagatattgctactaactttccagcacattaaccttgaatgtattgagcttgaatatttaatttaatggattaaaaaggtacttcatatcaccaccaaatcagtggctaagacaatccatcatcaaatttctcattaaaaaagaaatcttgacattaatgaaatggataaactttcaatcatatgagctattcaataaagtatatgtggttccaaggtgctaatatgactggattttgataatttaaggtatcgtttgtgattataaatacatgac

SEQ ID NO: 2103 - DNA, 436 bp, Glycine max
tcaggttgctcattgactccatattgttgcaaagaaggacacatatctgaatggtgatctgcggaagaacatagaccacagactcttgcaataggtgtagattttttattcatggcaagctgagttactaggttgaccaaggcaacaagttttccttcaagatttttattttcagtagatgaagatgaatctgtggccacctcatggactcctctaaggacaatagcatcatttcttgcactgaattgttgggagttggaagccatcttctcaatcaaattcctagcttcagcatgggtcatatcaccaagagctccaccactggcagcatcaatcatactcctctccatgtttctaagtccctcatagaaatattgaagaaggagttgctcataaatctggtggtgaggacagctagcacacaatttcttgaatc

SEQ ID NO: 2104 - DNA, 424 bp, Glycine max
  unsure at all n locations
agcttcaaccctttcccaaaactcggcaaggtacgcgaaatgttattcccactcagatccaacaatgtcaaagatttcaaactagtccaattactcggtatcgtaccactaatatcattacctcccaaccttatctcaacaagagaatctaacttggcaacagaaggactcaaagtcccactaagattaaacttttccaaaataatcatgtccacctttccgtccccattgcaccttatccccaaccatggcccgtgacaagggtcatttccactccaagaatcaaccaaaatccaaggataccccaaccctccaagaaactccaacaacaccatcacttcaaaagcacacataaccccggcctttgcctcacaaaattcattgttctcataactcactttactcgctgcanattccgggatcg

SEQ ID NO: 2105 - DNA, 419 bp, Glycine max
tgttaaagaacttagagaagatcaagtataagcttgctctcacatcgttcgtgtgtatgatatctactcgacaaggtttgaagtagaggagaccttcaatcctatcacgcaacgtggcggaaaaaagtggacagtaaacttgaatgaccattattgtcaatgcggaaagtattctgtgcttcactattcatgttcacacattattgcagcttatggttacgtgagcatgaactactaccaatatatagatgttgtttacacgaatgagcacatcttacaagcttactccgcacaatggtggcctctcatgaatgaagcgacaattctccttctaatgacgcatggacacttatccctgacccaactacaattctttcgaaaggtcggccgaaatccacaatgataaagaatgagatgga

SEQ ID NO: 2106 - DNA, 311 bp, Glycine max
tgatagcagcgtaatggagaaggagaagggtgattggagatgccacttcaaggagaagatgagtctagaagaagctcaccaccataggaagccatggataagagcttgaaggtaagaaaagatgaatggagggagagggagaaagggagcatgaaatttaatgcctctaaagaagtttgaactttgaaagttaattctcaaatgatcaaagttgaaaaaatgcacacacatagcctctatttatagcctaagtgtcacacaaaattggagggaaatttgaatttctattcaaatcttactagaaatttgaa

SEQ ID NO: 2107 - DNA, 455 bp, Glycine max
  unsure at all n locations
nttgataatgattgaatgttttgttaatgaatataatttgttggtgtggattgtggaaagtatatattgaacttcaatgctagaaaacataggaaaaggaaaaagttagtatccaattgtatgtctatgagcacgtgttgcaaatatactatgcatccaattgacagtcgaataacttgggcctcgaatctcaagtgtgcaaaaatgatataagagttaaccaataatcattaagttttggaattaaagccaaccattatgcacattaaaaacaatgacaaagaagcaaacatgtactttgatgattaggagcctaagatcaacggacttttcacattctgaatcccaaaagaaagattttgaattaaacttgttgtgataaacttcatcttcaactgttccgaatttattaaattgcgtatgaaaataaagcaaagactacaatatttaatata

SEQ ID NO: 2108 - DNA, 447 bp, Glycine max
  unsure at all n locations
agctnttatgtgaaaggatgtgactcttcatatttgaatttgaatttccacgttcaaagggactggtaatcgattaccaaaacattgtaatcgattacagctttttgaaattaattggaacgttgtaaattcaatttgaaaactttttcaaatccattttgctactggtaatcgattacaacaatatggtaatcaattaccagagagtaaaaactctttggtaaacatgttttgagaaaaaccatgtgctattcaatttttgagaaaaaccttttcatacttatcttgattaagccttctcttgattcttgaatcttgagtcttgaatcttgatattgattcttgagatcttgaaccttgaatcttgattcttgactctaaactttcttcttgattcttatattgaactcttgaaatgttcttgattcacttgagttgttctttgat

SEQ ID NO: 2109 - DNA, 474 bp, Glycine max
ttacggaccttaaaactaagcttagacacttgttgaatcgattacatgaggttgtaatttattaaaacaaagagcttttgtctctgaagaattttttttaacttagaaaattttcttcacacacactatgatgattgttagttctttggcaagtgtaccaaatcgctcgtagtaataatttctcgataagccgagtgtcgtaccacatggattttgttacacttatatgaagtacttttcagtttgcaaattgtaaatttagtgtataaaattaaagggaaatttaaatctaagaaaaactcaagcaataaataaagaataaagtctataaaatattactaaatctaataatcctaaatacctactcctaaataaaataggggatactacttctaagaaaacccaacaataaaataaggaataactacttctaagaaacccaacaataaaataagaaacttcatacaataaaat

SEQ ID NO: 2110 - DNA, 349 bp, Glycine max
  unsure at all n locations
catatggccttggcatctctgttagatntacatgatctgctaactccatggatgaacatacaactacactcagacacttcttagtattcgggctggtataagataataagctaatattactcctttgaggtacccctttgacggaagtttagatattctctcaagaaattaaagaaaagaaaaagttactgaaaaatgtggatcacataattaatgcatctaaaagatattttataatctaaagataaaaaaaaatgacanattattgatgaagtgttaggttctaaaatatgaaatcctgattacctgaacaacataaataggaaatattaacatgattatatttccc

SEQ ID NO: 2111 - DNA, 454 bp, Glycine max
  unsure at all n locations
tgtccttagatggtttactaattctgaatgctntagattgtgctttagacccttttatgctatactaattctgaatgcttttagcttgtgcctctgaaatagtgaaatgtgtgcatgaattcaaaaaatggtgtaaacccatcagtcattttaatttactggctaagaatctttgaccgtgtgctaaatatgaaagaaatgaagaaggtgaacggaagctgcaaatggtgaagtgaatggagaaggagatgaaggctaactatgaaggagaggttgcatgaaggaagagaatatggatttctaaaaccccaaattccattactggngaaatatatgtttctagtcatgttacatgttagcaaaacaaatggaggattaacaaaacttacgcatagggagctgataaaggatccaattacaaaatattatagtttaagaacctaattatacaaat

SEQ ID NO: 2112 - DNA, 435 bp, Glycine max
  unsure at all n locations
agcttggactcgattgcgccaactggactgttcctgtctattccgatctttcaaagtgtgtttgttnttttgtttttttgttagattaaattaaaatgttctcttgattatgcgtgtatgtatgttcgtatgtgtgattgaatttaacttgccaaatttgcctttgggttcgagtaaatcaatgcgttgaaattctttttgaaatctcttttggtcgttacatgtttgagtgtttttactatttacagtgctgcaagttaatttcagtgaatgtccacgtttcttataaactgttttctaatgactttccaggagaagtgctggagatgaggaaaagatggtgtntctgtattttaatcgtgtaagctgttcgtcttttgtctgtggtaggaaattttttaaagaaaggggtaagggtagtggtacattatttat

SEQ ID NO: 2113 - DNA, 456 bp, Glycine max
  unsure at all n locations
gggaagcaagtgagatagtcgacaattntcctaatgaagttgattaattctctaacatctttttattgaatttcctaatcctaatactgatggtcttaatttaaccatattaaaaaaacaactaaaatttaagcaaattaacctttacatgatcacatcacaacaataaaccacataagattttttaatgatgcaacggctatacttcatttatacaaccgtgcatcatgcgttgttgggttatgcgatttcaagaggaatcttacaccagtttaaatttagtaatttagaatttcttttttacgaatttgtcttaactcttaaccaaaggcaatttttattttgtggtccctccctcatattctcttagatgccatgttcttgagcagatattgaacggtggtgttcatatatatcatcatatatatgcgcagcaagctntcacattaacattat

SEQ ID NO: 2114 - DNA, 322 bp, Glycine max
gcaaaccaatagcagcagaataattatgaccttttaagaaacagatacaatccaggttggaggaatcatccaaatccgagatggacaagtccttcacaacaacaacagcctatccctcctttccagaatggtgctggtccaagcaagccatatgttcctcctccaatgcagcaacagcaacaacaacaaagacaacaagcaactgaggcccctcctcaacctttcttagaagagttagtgaggcaaatgaccatccagaatatgcaattttagcaagagacaaaagcctccattcagagtctaacaaatcagatggggctga

SEQ ID NO: 2115 - DNA, 450 bp, Glycine max
tagtggacatgaaaaggttgttgtcaacttaataagtattatatcaaatcacttatctacttttgtggttttgttattgacaattttattttttaatttaacaggaaggatattgtgttacagttgcaaccactaaaaagttgttggtagccaatggatggagctatgaaggttgtccaaatgtaatagaaaagctggagacaccacactttcattcatttgctaagagtgtaggaatgaaaattcaatgtttaggtgatcaatgatatacattgtatctcttttatatactttaaatccataggtaatataagatgaaatctatatgaaatactaccatattttgtaagaattttttttctttttttggaaataacgtatttatattctgcaagacattttgtatccaattcttgtgagtttgtatgtttatggatatgttaagatgga

SEQ ID NO: 2116 - DNA, 326 bp, Glycine max
tattcctttattaatatatatgcgaggggtagaaggtgtcacaaatgatgccattttttttttgttggagctagttgaggaacctggaaaaaggatttgacaatccttttcatcaatggtcaagccatatcagagattaatttgtattatagctccacagatagggatcaccaatatatacttaaaagtttggttctttattccatcacgattagtttgtattatggaaccaaacctccacatgggagacttcattgatgattgtaaaaatcacagtacgacttatactaaaacttacctaatatataatattatttttgcggata

SEQ ID NO: 2117 - DNA, 445 bp, Glycine max
tgttgacggcttcctcgagacgcttgagtgatgtattgtgtatggtatgctccgacatggtgtcaccgagcatagagcaggttagactagaattgttatgactggactactatactacgaattaacaagctaagaggtaatttcttcttgctgattttactcaattcactggtatttatagacacaacaatagttgcaaggctaaaaaaccactaattggccaactgtgctaataactgactagtagtggagctaacataatttgtttttgatcactaagaaactctggtagtggaattaacagaaattggtaaaatatatgattgagtatcctaacacctagcacgacaagaatagcataagcaattcacacgaagtcctgtaatgggccggtttcctcatattcctcttaggcctgctattgacttgtgccctcttgctatca

SEQ ID NO: 2118 - DNA, 272 bp, Glycine max
atgggaggagggtatatgccatttttgctttaaggatagtgtcccactggtaaaattaactttccaaatggttgccttcgcaggaatggccccgaagaagcttgcctcaaagaggtccaagaaagacaaggcggccgaaggaactagttccgctccggagtacgacagtcaccgctttaggagcgctgtacaccaacagcgcttcgaagccatcaagggatggtcgtttctccgggagcgacgcgtccagctcagggacgacgagtatactg

SEQ ID NO: 2119 - DNA, 451 bp, Glycine max
  unsure at all n locations
tgtggtattcannaattgtaaacatttgaagttatttgatgaanagttcaggaaacattttgcaattttgcagcagtcattttgttgcattttttgtgtgaaggaatatttgtattttttaactcttatttttctatacacttttcaaaaggggagattctgaatggccaaagctgcaagagaaaccacctattggatgatgtcaacctattcaagaagttaaaaataaacgaggacaagtcaggcaagttcggcatttctcacccttaattctacccttcacatttggctttgttttctttagttttctcattaacttttattgcaatgtgtggtctcttgaccaaagatgaacttttcaagccttctccctccccttcctaagaaaattcttttcttatctgtctgcatctgcctcaacattaacacatttaatgaactcttcacagat

SEQ ID NO: 2120 - DNA, 432 bp, Glycine max
  unsure at all n locations
agcttatcanagaattttgtctcgcgtggtctttaaacaagaacaaagtgtgtgtaaaattaaatgtaactttgaaaaagtaaacaacaacatcagaagctgttaaaaaactgttnaggcccgatatcctgacccataaaagtaaacaaactccaaaatgaaatcacaaatccattaccagatttaaaccatgacaagtgtcacgtcctatgaaatataggtttgaaatataattnttttagtcagntttcttattatattttctttttttacatctaaaataaaaataaattttaattttaagtattaaactagtaattttgtggaaattattatttattaaatatttctaacataaatatttaaataattttttttaaaaaatgagtttccttcaatagatttccggatctgtcccgaattaaaaataca

SEQ ID NO: 2121 - DNA, 436 bp, Glycine max
  unsure at all n locations
tccattggtgtcttgaaacctaaggctgatgaaggacatctattaatcaaatatgttgttgtgtttgcagcttctccccaaaaagcctttggcagtcctgcacttagaagcatgcaccttactctttccaaaatggtcctgttcattctttctgccaaaccattctgttgtggagtgtgagggactgttttgtgccttttgatgcctattttcctgcaaaactcattgaactgctctgaaacaaactccaggccattgtcagttcttaaaacttttaattttgtaccaagttgatttccaacaagagtatgtcattctctgaatttttgaaaagcttccgacttatttttcanaacatacagccatactcttcttgagaaatcatctatgatggtgagaaagtatgagcttccaccatgagttttcactctagatg

SEQ ID NO: 2122 - DNA, 359 bp, Glycine max
  unsure at all n locations
agcttgctctanatttacattgatgtttgtatttatgggaggaggttgtatgccatttttgttttaagagtagtgtcccactggtaaaactaactttccaaatgtttgccttcgcaggaaatggccccgaggaagcttgcctcanagaggtccaggaaggacaaggcagccgaaggaactagttccgctccggagtatgacagtcaccgctttaggagcgctgtacaccagcagcgcttcgaggccatcaagggatggtcgtttctccgggagcgacgcgtccagctcagggacgacgagtatgctgatttccaggaggaaatagggcgccggcggtgggcatcactggttacttccat

SEQ ID NO: 2123 - DNA, 400 bp, Glycine max
  unsure at all n locations
ctggaaaatgttgttnttcaccttctcgctaagccaatctgctggcttagggagcgtccgctaagcgcaacattcatgggctaaacgcgaggaagactctggaagaagatgagttgtacaggttcgctaagcgcaccacttcatctcactaagcgcaccgcttcagttcatccgctaagtgagaaaggcacttgctaagccaaaattcactaatgtgcgctaagcggtccataattgcgctaagcgcatgagcacgaacaaggccatctatttaagcctgaaattagattttagaggaagagtttggactgggattcagagctgtgcatgtctagagtttctagagagagaaaggtccaagttctagaaagttgtgagagattttgttgtgtgaagatct

SEQ ID NO: 2124 - DNA, 416 bp, Glycine max
  unsure at all n locations
agcttcatgcttaactatgtatggcaaaacttcattactggtggtcaagacatacaagtgagcttgtaacaaatcttctacacttggagtgatcacatgcagtcctcttgaacccttaccacccactctgtcatcatgtcgagactcaagaagcccaacaggtttaaccttctctaagtattctgaacaaaaatcaatggcttcttctacaatgtacctctcaacaatagatgcttctggacgatatagattctntgtatacccttttaagatctttatgtatcgctcaaccgggtacatccaccgtagataaacaggaccacaacattngatttctctaaccagatgcacaatcaagtgaatcatgatngtcaagaaaganggggaaaatacatctncactggcacagtataatt

SEQ ID NO: 2125 - DNA, 428 bp, Glycine max
  unsure at all n locations
tgtgattgaatgaattatcccttgtacccagtttgagcttaatgaattaattgattgattgaacctggagcctattcagttgtatcttctgctaccttattttaggttgtaggagagcatcatccacagaagatggttcaaggaaaatttgtcccaaatttgggggaggtattatcaaggtaaatttgttccaaatttggggaaggcactcggtaaggattgaaatggtcaaagaaaatagtatatacacactggttctattttctgtgttaaaaaaaaaccaaaaaaaaactgtaagtataaataaagttaataagtgtgtatgctataaattcaggcatgaaagctaagtgcctaagaaaaagggcaagtacggcgaaggaatgaatgaatgaaaaaaanatgaaggttattctatggatgaatgt

SEQ ID NO: 2126 - DNA, 414 bp, Glycine max
  unsure at all n locations
agcttgagatgaggaagtgttgaagggtgaaacttcctgcttttattgttgaccacagagtggtacctggagatatgtcgcggnggtcaggagaccttggggacgtcaggtggggtgctattgcccaaaaccaagcttgaccaatcccgacccaacccgggcatagtcggtcagtgagaacctgtgatgtacctaaacaggcgagctcctagcagtcaacagataaaaggaacaaagaccacaaagcaaggaggcttgtggtggctggctagctgtgaaacttgattgatatgtgagatatggtctctggtaatcgattaccaagggtgggtaatcgattacaaggcttanaaatgaagacaggaggctaagatggtctctggtaaatcgataccacggngtgtaatcgattac

SEQ ID NO: 2127 - DNA, 413 bp, Glycine max
  unsure at all n locations
tcggtactctatttaaatntacaataggttttaatatatatattagtttgctactaaaaaaattatctagttaaaaattataaattacacaaaataaaatataaaatcatatatataaaaagtttatttgtaaataatgtttggagtggagtagcccaaatttggggtagcccaacacactttttgtaatacctctagttttcgacttctcagtggctcacacactactacacttcacgtggtgatactttactgaactgctcgttggtcataaccctcccactggtcagaatcctctataggtaactcttttcgagacctcgataatcatcccttactgctttcaggatcaatgactatccccacaaaccaacacaagattttntagcatactttgtcctcactcacacaca

SEQ ID NO: 2128 - DNA, 459 bp, Glycine max
actaagctatgctgctacatttatataaacctccacagcagcatatcctttatcagataaataattatgacctttcaagcaacagatacaatccatgttgaaggaatcatccaaatctgagatggacaagtcctccacaacaacaacagcctgtccctcctttctagaatgttgctggtccaagcaagccatatgttcctccttcaatgcagcaatatcaacagcatcaacaaagacaacaagcagttgaggctcctcctcaaccttccttagaagagttagtgaggcaaataaccatccagaatatgcaatttcagcaagagataagagcctccattcagagtctgacaaataagatggggcagatggctactcagatgaaccaagcccagtcccaacattctaacaaatagtcttcacaaactgtgcagaatctgaaaaatgtgagtgccatcacct

SEQ ID NO: 2129 - DNA, 333 bp, Glycine max
  unsure at all n locations
aagatatgggcctgcctatctgatcttctatgctttaataggtggaaagaagaattgagttcaagaggaacctcactcttatgatgaggtcataagcaacaaggacaattcaaaatggattgaagctatggaagaagaaatgtcttttctaaaaaagaattgtcctaaagggcagtaaattgttggatgcagatggctattcaagaggaaagaaggttttgaaggagttcaaagtgtaaggttcaaagctaggctagtagcctgtgggtttactcaaaaggaaggagtagattntgtagaaatcttctcacctatggtaaaacatagttcaat

SEQ ID NO: 2130 - DNA, 456 bp, Glycine max
  unsure at all n locations
tcttggtggttntgcgtggtcatgtgaaacaagggcaattttgtataagagaagttttcttcgataagttaaattaaataaatatattataaccaaatatgttgacaagtgtcactaatcaatatttcaaaagatgtttcggttacctttggtcttttgtggtagattttagcttcagtatttaaatattattaacggtgataactttaaaccaattgaaggaatattatgaatcatcttaaaaggataaaacaactaaaataaattcttaaaagaaacgatcaaataaaaaaaataagataaaaaataaaataatcatttagtcaaatatagaatacgtggaaagtaatattcaaacatttcatggatgttcgattcgatttctcttanataatcgattattttcattaatatcatgaaaattaaaaaaaatacaattatctttataaatntatg

SEQ ID NO: 2131 - DNA, 390 bp, Glycine max
  unsure at all n locations
cctgcggcatgcaagcttctataaaggaagtttattaagtntcccatcattggaggaatttgtcagaatctcttgcgagtggatggaaacattatgtccaggtaccctaaaagcagacaagttggttcaagttcaacttgaaccaaattggaggcacttagatcatatacaacaacatcgccttatcttactaagtggggtcggcgactggcactcaaatcctatcaaattggaaaatgacctgaactctaccatgcgggaggcatttagggaaaaggtatgttttcaattattttgattagatatgattgatattggtgtatgttggtgttataatgcaaaatatacaccgctaattaggttaattagattcatcttcaaattaacttt

SEQ ID NO: 2132 - DNA, 455 bp, Glycine max
  unsure at all n locations
tctgagctntgataattctttaagtttcaaacaattgagatgctgaaatattatctcattctcgtgattcatccccttccttagacactatctcttcaatttaatcacaccaacttatctcaattgttttgagttgacccaaacttttgggtgttgaggatgtgaacaaatatagcagtgttgcaattttttacttccaaaaatgtcaaattcgagaagggcactgtgcatggttccaaattatgcaacactccgcttttatgaaaattcgtagcattattcttcgaataatacaccacaacctattcataaattctctcattctatttcatccccttggttaaagatgatggaacacaagacttacccaaaataaaataaaacatgccagaatagttgaattggatacctttaaactaaaagtctaaaacataaccttttgtgtttgtgtgttg

SEQ ID NO: 2133 - DNA, 339 bp, Glycine max
gcccatagggcatcatccaacttcacaaccaatccttccttgaggatgcaacaatattctccagaattttcttcaattctttggtggatacctcggcctggccatttttctgaggatgataaggtgaaactaccttacgtttgacattataatgcccaataccttctacaactatctattgcagaaatgtgaaccctatcactgattatcactctggagaccccgaagcgggagaaaatgtttctcttcaggaatttgatgacaatcttggcatcattctttgaggcaaccacaacttccacccacttggacacttaatcaacaaccaccaagatgtac

SEQ ID NO: 2134 - DNA, 442 bp, Glycine max
ctcagcttaataatcctgagctggagtgagccatggatcccaagttccctgtgccgtagtgacggctactacataatcatcgtcaatatctgcctttgctgcgcctgaaactccttcctcagcagcctccactggtgtgtcctgagcctctgcctctgcctttggggtatccttagcctccccagcctctggagtgtcttcagcggcctgtgtttgtggctcctgggccacaagagcctcacccccccaaaaggaaggctggactccagaccaagctacctgtgccaagaagtcctccatgctcatgatcagccgctgctgagataaattctgcatactctgcatgaccaggaaaaggtcgtgatgaatgctttgtagcatgggcacgatagcagcactgctaggtacgaaggggccggttggagctgaaataggtgtggga

SEQ ID NO: 2135 - DNA, 461 bp, Glycine max
cttagagccacctgcctgcatgcaagctcgcctcaaagagatctaggaaggataaatgcggtgaaggaaccagttccgctcccgaatatgacagcctccattttaggagcgctgagcaccagcagcgcttcgaggccatcaagggatggtcatttctccgggagcgacgcgttcagctcagggacgacgagtatacccactttcaggaggagatagttcgccggcgttgggcatcactggttacccccatggccaagttcgacccagacatagtcctcgaattttatgctaatgcttggcctacagaggagggcgtgcgagatatgcgatcctgggtgaggggtcagtggatcccgttcgatgcagatgctctcagccagttcctgggataccctttagtgctggaggagggccaggaatgtgagtatggccagaggaggaaccggtccgatgggttcgat

SEQ ID NO: 2136 - DNA, 454 bp, Glycine max
  unsure at all n locations
tctacatgtctagggttttctagagagagaaaggtccatgttccatagagtttgaaagattttgctgtgtgaagacctgcagagaaccgagcttgaagaggaagctgtcctgagagcttgagatgagtttgtgagtgattgtgaggttctaaaggtggaggagacatccttaccacttgtatttcttcaatccttcatgtttctcttctctttgttgcaaaggaagtttcccagttatggagagctaaatcctttgttggntcttccttgtaggtacttggtgtaaatacctgtatatctatttaatgatgctttgtgtgttcactgtgctatcaaaacttcattctaccatgcttttgccttgatcacgtagatgcatgtgtttttaggatcattcatcagtggaaactggtctgattcttagaacttgataggacggcgctagtttatcata

SEQ ID NO: 2137 - DNA, 271 bp, Glycine max
agctttgagtaataatttttccatcaatctctgaaatttagaatgaaatgtatgaatgaggactgttagtcagcgaataccactaacttttgtgataaaacttgtgtaaattgtatcaaactcttccaatttatggttattttgtagtgttataagtattttctgttaaatataggtaataaatacttagtacttccattttgtgtggtaataatcattttctctcatttcaggttaattaggcaagctttgaaaagtgctaattttcacc

SEQ ID NO: 2138 - DNA, 444 bp, Glycine max
  unsure at all n locations
tcattcagatggattaaaaggctcaatgttcacatgtctttcatgattgggtcacgattctcatgcctttcatgataatagtagataagcctatgttgtatcaaaaggctaactgctataagggcaacgagattcttattgaagatgatgtgtagatgctcctccaattagataagagagcttgtcttggaaggttgttcaaacataagcttgaatctcttaagcagaaaattgagcacactagtatggattggtgtgttataaagaggttctataaactgaaagctcactattaaggtctggaaccatttatgttgtaaggcgtttatcatgcagaaagcgtttatcacgcagtaaggcgttattatcatactctaaaccatttatgctctactgaggagatttctttcaacatggtttgcccatggactanggagtttcatg

SEQ ID NO: 2139 - DNA, 411 bp, Glycine max
  unsure at all n locations
caagctacncttcaatctgcctatacatatattaatatgcaactactccacagncaccgattcaaaattggggatcagtggggtcctttgacttcaatcttttggtgatgattgaaatgcaaattcgcaatcatcaaagttatcacctgaccaaagaatggggccatgcacctagatcttaattcaggacggatgtaatcagttcaagacttcaaatacgttctagtatttgaaagttagattagacgtgcatgtccatcacatgttagaacatagttttcaggtaaggaaacaaattanaacaaatcttgtgcgaatcttaatgaatatgaagccgggtttctacggtcattagtggacattccgtagtcggcaccttatttactttttgaaatttgggttcacttttat

SEQ ID NO: 2140 - DNA, 437 bp, Glycine max
tgcgaattgctgctggtctgataacaacatcaattctatgtttttatttgcaattcctcccattacgcgaatggcactctcacgtgatacttggataaccgtattatgcagaaaattgagagattggtggcaatgggtaattaaacatttttttaaaagcaaagcacgctgataattcagaattcagaataatataacattttgcagtttcaagagctaatatgaaaatggaattcaaatgcaggttgctgatggggatcttcctattgttgcttcacatgggtaagtaatcagttagtcttgcaatatctaaaatccactttatgtgtttaccaagtctcatgttatgctgatatggcagaatggaggttgaagtatataaatcacttgatccaggggttcgtgtggtcatcttaaaagcattatgtgacattcgt

SEQ ID NO: 2141 - DNA, 427 bp, Glycine max
  unsure at all n locations
agcttctcaagcaagctttcattaagtggtatatagcacaagagcttcaagtaggtgctctttaaacatccattaattntcagctttaccttctcctgcattgttgnttcttcatatttctccatgtatctcctcacatgtctagtgttgaatgttgttaacaatgaattttagaatttccaccgattaaacttgctatagaagctagatttgattttctatgattcaaatttcttgttcttgctcttgaatcatgaattgtgttgagtttagattcctttgagttttgtattgttattcgttctggctgaaacctaaaccatataattcttacagaaacattaaagtataagacaacctcanaaatctagagtgacatgttcatctattatagttntgtcgtagacgtcatgtctagtcatgaaac

SEQ ID NO: 2142 - DNA, 429 bp, Glycine max
tgagtgagagagtgcaagtgggttcgagggtcacatctgttaacacaaaggcaaacacacttttaagcagaaattctatgagggtcatagaaagtcgaacagaaatataaaactaagcgaggtttgagggagtcattgaattcaaaccttcgagggaatccacaacttggacaaagatgaacgtaagtaaataagaaggttacactcgattgatacgaagctaattaatgattttgggaataataagtaagattattcaaagacggtcttatataaaaatcgtctttgtactagcaatacaattatgacgggttttgtcaacctggtcgtgtactccttgttcaaaggttaaactcactattgaaaatggatattcaataatacgcatcatatacattcgttaaaagtactacactatcaccacctata

SEQ ID NO: 2143 - DNA, 278 bp, Glycine max
  unsure at all n locations
acacatgcttctatttatagactaggtaggcttcttgagaagctntcttaagaaaacttccttgagaagcttctttgagaaaaattccttgagaagctagagtttagctacacacacccatctaaaaactaagctcacctncttgagaagcttccttgagaagctagagcttagctacacacccctataatagctaagctcacccccgtgacaaanaaacatgaaaatacaaaaaaaatcctactacaaagactactcanaatgccctaaaatacaag

SEQ ID NO: 2144 - DNA, 434 bp, Glycine max
  unsure at all n locations
ntctcccaagtcctaaatgacatttcaagctagtattaactcactntaacctccatttaccacagaattcagacttaaccttccaactctcaaagcctcactctttttccactcataacatcacattctcactttctaaccctaggttaactctaccattcatctctaacagttttccataagcaatttcagcatataaacatcacaaacatcatcacaaaaaccctaaaacagaatgggtatatctaactcatccaaacatggcaatttcaacaagctttcaacaaatgtcttcacaaataatcatcacacagcagaaacctagcaagactacccatcatatctccccaaaccccatacccacgaaaattaaaggagaaagaagtccacccaaacctgaattttcgaagtcccactcgtagccacgcacttca

SEQ ID NO: 2145 - DNA, 434 bp, Glycine max
  unsure at all n locations
agcttcgggagttgtatttacgcatggggaaggtattagcaccccacacgtctgtcacaagggacgacagcctttaatcaaatgtgcaaacatgacttcaatttttatgttcccttttacgtctttatttctttttgtactttttatatttttatctttttgtggncgacgagggtgtttcccttgctcctacgtattcctcaattgtgataaggaaatcagacctacgtagttcttttgtgaacaaagcgttttggttaagttatttttttatccttttttgcaagatatgttnttattgaatgaaaggtcatttaaggcgttggaccattaaacaatctttcgtttcttttaanaagtgagaaaacattaaggcattggaccattaatgatttctttatttttgaaagaagtacacaggtacatatcgattt

SEQ ID NO: 2146 - DNA, 412 bp, Glycine max
  unsure at all n locations
tcactgaattgctggtcttattgaagaacatgcttctctgatcaaaacacttttccgaanaatcactacgaggccaaaaagattttgtgtccagtgggaatggagtacaagaagatccatgcatgccctaatgattgcatattgtatagaaatgagtatgcagaactacggcaatgccccacgtgtggggtatcatgatacaaagtgcaacatgatgaattaactgatgatgcaggaaccaaaaattgtcgtcctgccaaggtgtgttggtatcttccaataataccaaggtttaagcgattgtttgctaatacacatgatgcaaaaaacctttcatggcattcggatgaccgaaaatctgatggattactgtgacatcctgccgattcgccgcagtggaagacaattgatc

SEQ ID NO: 2147 - DNA, 423 bp, Glycine max
  unsure at all n locations
agcttatgcggcattntctacatgagtatgactttgtttgctntatttcaatatatatttatgttaaattatagcttttaattaagcacaaagctaacatgcttgttgaaggtgttttcacaatataccaaatgacatgctatgcctttatcacccgtctttttcaatatgttcgtgagtttgaataaattccacaatgtgttttatgtataaagtaactactatcaatatcaaagaggtaataaaaattaatgggacacattttggtatgttccatagttaaaactagtgttacttatatctgccccaaaatagtgcaatgtcttgagtatctattccaactttgctatacaatgtacttgtattgaatttgccactttcatattctttgaagccataattttatgtgcctcttaatatttc

SEQ ID NO: 2148 - DNA, 447 bp, Glycine max
  unsure at all n locations
ncgcttcgtgaccaggtggtcttcgtaatagaagagacatttggctataagcctgtgcttgtttggagagatcgtcataaatgattaaagtgtgacgttcatggtacataaaatattcaaccagagctactcctgtctaaggggcgaagtattataatgtagttggagaatccactgtttcagctactacaatagtgtattccattgctcctcttttttgtaaggtattcaccacttgagccacaaaagatgctttttgaccaatagctacataaatacatattacattttgtccctgttgactgagaatagtatctgtggctactactgtttaacctgtttgtctatctccaataattagttctcgttggccacgtcctatggggatcatcgaatcaataaaataagtcctgttggagaagctcatatatggaacgtctcgaatan

SEQ ID NO: 2149 - DNA, 273 bp, Glycine max
  unsure at all n locations
catggggaatgcagcaataggtggtgttattccgtgttaaaatcggaagatgcttcattactcaagctaaactttgagccattgtgcttggcattcaagttgaaatatccagaggctttactgagttattagtggaatgtgattcaaagtttgctatttctctcattcgagatggttgtccttctacacacttatgttatcagggggttgcaataatcaatatattcgtgaatgatggcggagtnttccctcgatcccttttttagtcaggca

SEQ ID NO: 2150 - DNA, 457 bp, Glycine max
ctcagcttcttatccaggctcatcttggtggtgaagctccttcttctatggcttattctctagtggatggcacctcctctcacctcttctcatttgtcttccgctgcatctccatggtggaaaatcaccattaaaggacctaattgaagctcaaagatccagcctccatagaagccacacaagcaagcttccatcaagtggtaatcagagcacaagagcttcaagtaggtgctccttaaacctccattaatttttttgctttaccttctcttccattgttgtttcttcatttttcaccatgtatctcctcacatatcttgtgctaaatgttgttaacatgattctttagagtttccaccgattaaacttgctatagaagctagatttgattttctatggttcaaatttcttgttcttgttcttgaaccatgaattgtgttgagtttaggttcctttg

SEQ ID NO: 2151 - DNA, 241 bp, Glycine max
  unsure at all n locations
atgaattccaccccctacaaccacaattccagcatgaatggtggaccttgcatgtggacaactcctctaatcaacatggaagtggagctaggataattttgaagggacccaaccacataactttaggataatcactacactttgattntcaaagccagatgtaatcaggtcaaatacaaagctcacctagaaagcttaagattggctaaagaagttggaggtcgtanggttaactaccaaa

SEQ ID NO: 2152 - DNA, 453 bp, Glycine max
  unsure at all n locations
ntgcgagattcctcacggaaaacgttacggaaacgtttctgaagcgcctcggcttagattttcttcacggaaacaatttttccaagcaaattcgaaagagagagaagtgcctaaggggctggacccttttcttcttcacttcctcccctatttatagcaaaataggggaggtggttgccgcccagctcgcccaggcgagctcagctcgcccaggcgagcagggttgcttcctccagaagcaaccgccttctggaggaatcttctggagggcccaaatgggcctgggtgctatttgcacccccatttttactaagtacacccccctctgctattttttggtgattcttttttcgtaaagttacggaaacttacgaatttcgtaacgatacttgttttctttccgtaatgttacggaaccttgcggattacataatcatcccctttntgacttac

SEQ ID NO: 2153 - DNA, 418 bp, Glycine max
  unsure at all n locations
gattacatagagggtttcagggacttagctttgatttacattntgaatttcatccaaatttttgacaagtcattgttacttccatcaatattgatattggatcatgcttaattatatgcgtttgcttattctgatcattgtgtgttgggtgattatttcttccatgcaggtacatgattcctatttgttgtgagagtgaaatgatgggcagcagcaccaactgaggtgagtgtatatttccttttttttttgtctttatctttgctagtttgctatatattttttattttatatgtttgagttttaaatgtgtaaaaaatagaaatagaaaggtttgctatcattctttgaatgccatcatctacctttaatgattgacatctaaattggtccctgtttaatcgaattaattagttat

SEQ ID NO: 2154 - DNA, 455 bp, Glycine max
  unsure at all n locations
ngtctctacagaagaaagaaacaaaaataagagtagattcattgtagataattctttgcagtgatcaagaataattatgaaccaaccaatcaatcaacaagcataaattgaaaattggtcccacattctaaaaatggtcatctcagtgcttcaaaaaaatttctcaaaagaaatagaaagtacaaaatcatacataaaagcttagaagcaaagtttgagggttttatcttacttttgatatcctgtgtccacacctttgctggggatgaaccaatttcttcatctcccagagtgttattccaattggcactttctttcttcaaatgaccaagctcgctcaacaaatattcaacattgatgtaatggcattccctccgagtcttccagaaaaggagttccacaaacaagagggggtgctttttcattntctttagcatctttctgaccaaacaagt

SEQ ID NO: 2155 - DNA, 446 bp, Glycine max
  unsure at all n locations
gcttctgtcagcccagctttgcctcttgttattgttacgattgctgagatgtgtgcgtcacgtatcaaacaaatccatggacactgatcacttgatttgccactaattttgaaagaaggtcgtcatgactcattcattcttcacgaaaccacctccttcagccacctggcagtttatcatcaactgtgggggtcccgctcttcaatttttaaggtgtcaaatgctgatcaaacatcacactaattaattaattactactcgagtcgattgctataacctaattggcggtgtttaaatgttggaagcaagggtattgaaacttgattcatttatatcctcaacaaatcaacttcccatcaaattaaaaagaanataatatattttacaccaaanaagaaaaggaagggacaacgtatgagtttgagcagtatcatcaatttcattca

SEQ ID NO: 2156 - DNA, 473 bp, Glycine max
cggacctatgatactcagcttgattaatatgctaattgaaatagtgtgtttataagttattattcaattttttttctattaatttcaaaaagtggcatttttttaccatcaaactaatatcttcatttaactttcttttttttatgaaatatactttacataataataataatgaaggtcgattgtattatctaaagagattgtttggttgaaaaaagaagataataattatgtttttacattttcaaaaacataaatatccagggaatagtttatttatttatttatttattaaaaacctaaaataacaataatgagatgaaaactggcttcatatttggctataagtatgtggcagcagcagaggcaataaagttaggaaagcccttggacccttcctgcttcctgtttggaatttggataccttactcggccgacagtggtattcatttattactcgatagaattattat

SEQ ID NO: 2157 - DNA, 402 bp, Glycine max
  unsure at all n locations
catgcaagcttgagagctattcttcgaggaggctngattaaagataaggtataaatagggagggcagtgaggacagaattgatgagagtaacctttccagccatggataanattttctggttccatttagacaatttatcttcatatttcctgatcagcggttcccacaccatgctgttggtggacttttccccaatgggaatgcccagataatagaaaggaatctccatatgtctatagttcaaaaattctgctgcctcatgaatccagttgacctcagctccaaagatcccaacttgactttttgcaaagttaatcttcaatctagatgccaattcagaacccctcagcatagacttcaaagcaataacattatcccatgaaacatgccccacaaatact

SEQ ID NO: 2158 - DNA, 411 bp, Glycine max
catgtgtggcctcattgagtgcttgcgcaatagccttggcttgattcttgttgatgctgtcctaattcacaagcatatttggaaatgaactatgcaatattgatcttataaacttctagccaaatggacttaccttgaattaaattctttgatagcccctttgagcctatgctcccctttctttgttctgaagctcattacaagccttcagtgaaaaaccatgatatcaccttacccttaaagaactttggagctttggaattatcttgggaactagatgggactaagtgcggcggagggtatgtttcattgcaagatatacaatgtggccatgcttaacgttatattttggccatgcttgatgtactatgatatcgactagatcttgctttaatcgtcaatggacgactg

SEQ ID NO: 2159 - DNA, 361 bp, Glycine max
aaagccatatcttgaggatcataaaaaaagactttacctagcttattttcaattggcaaatatgactatgctctattcacttatatttcagaattctctttcgaaaaaaaaaaaatgatagtgaaatcacgaaatactaacatgaagagataatgtagaagtaattttgctcaatttcttatcatatacttacgaattcggaaacagtcttgttgcatatgcacgggtaaaggttatgtacaatgaacctcctccatacctttgcatataccagttttataccaattgattttgcatgaacggatttcatccattagttaattacccaactatgggctatatatgaaatatgtgaaaagct

SEQ ID NO: 2160 - DNA, 429 bp, Glycine max
  unsure at all n locations
tatctgccaatccttgtggngggactctactgcctcttttatattgttccctcagtccacacatctggtggtttgctttgcatgtggaacaactcagtttttgaggtggataggagggcgaaaggtacaaatttcttaatgcttgatgggaggtgggctaaggataatcagacgctgtacattgttaatgtatacgccccttgtgaccttgctgggaagagagttatgtgggaagaattgaggcagttaaaggtttctaaccctgatggactatggcgcttccttggagatttcaacagcatcacatgtcacgaagaaggaattggttcatcccaaaggaatgctgacacctatgacatctctgctttcaatgactggatatctgacatatagcttcaagaaattaaatgctttggtagcaggtttact

SEQ ID NO: 2161 - DNA, 402 bp, Glycine max
  unsure at all n locations
agctngngcgttgacttataaactaanattttaggcttgaatattngngcattagcataagactgaaactagtatagtcataaacatgtaccacatggaaggttatcttcaagtttacttactactatcttcgaagtctattgaagccttagccaacttagttgcccacaaggctaaagccataatagtagatactagtcaacgtgatcattgaccttgccatctcctccaccagaagggtgtcctagctccctgtgaatgaggaggtgtaagagtatcaagcattgtttccttctcttttggggtcaatggaacacctctaacaagggttaaagccatgatatggacattagtcttttgtttatgcctgttgtaagcccatactcctgcagctgacctgca

SEQ ID NO: 2162 - DNA, 446 bp, Glycine max
tgaactctagtgtgtgtgtgtgatgtgtgcaaggtttccatcttgtaagagttatgtacacttagggtgcgtttgacctattcaactctccccttccttttattttttattgtattgctttggaatgtgtaaaacctccgtccagtcatgctgaaacgggtttccaaacacacacttatccactaacaagtgatatagtttcctgagtgtaagtctaatttagttaatacagatcaaatttcattttcttccattatatcgcttcaaaacaattgtgttgacgtacacacttgaatccaaaaacaattgtattgacgcattcttacgtgtatctttgaaagggaaataaagagatccgtcaacactgaggacgcgttcggcaacggagatatctttttatatttgaaaaataccatttgtgagacagtctatctatcggaatcttg

SEQ ID NO: 2163 - DNA, 378 bp, Glycine max
  unsure at all n locations
agctntaaaggaaatctatattngnctcttgtcctatnttccttgcaatggaattttgttggattgctgctcactcctttgagtattttgcaattggtatctctatttagatattttctgagagaagaggtcaatggaaggcagcagctcaatcccaggaatttattcgaacactacagcgttattataacaacacatatttagatggtgataagcaaaaagcaattaacttgtaagtcaaataagccaattttttatttgtatttacaactgttttcatatgtaatatggtttacagcaaacacaagttatgtatatatgtgattgcattataatgatttactaattggtgggtctgattttgtttggttcacactc

SEQ ID NO: 2164 - DNA, 438 bp, Glycine max
tcaacgcagataatcacttcctaacattacgcagggttatacttatattggcttcaaaatcatcaacttatcatttaacaataactaatgttttgcattaaagaaatgcacactgcacaatatcatcgggatttcagagaaatggtgaacaacaaggaatgacttaaccaaattatagtgatataggaatatctctaacttgcatttacaaaccctatagatactcactatattaacctatacattatctgcatggataggcagtctgcgcctgttcatgaaagtttacaaataaaaaagaccatcaactgatccaatatatgtcatttgatgatagaccatctggttataataattctatttgacaacaaaatactacatattaaccataggttacacaaactaacactagcacaaaataagcttaaatttcaaagt

SEQ ID NO: 2165 - DNA, 428 bp, Glycine max
  unsure at all n locations
agcttgtgtgatgaatataaacgaactagatacaacccccatatgtttgactntcttctttcgtggatcaagatgacaccaccatattacggtcttgctaggcctgtcgagatntatcaagtgttgtccaattttgatgtccagtcggaggattntaaggagactttacctgctgccaagtcacctatgaccgtgctcacggtaactcgcactttcccattagggactagatgtcctctagtgctagagattgctgtgaaacagggtacatcgtctgaagtagggattcgagcttattatttgaaggaccaaaaggatccagagctgatggaggaggacacagaggagactcctaacggcgatcttgctaggagttcagtgtagtttgattgtttgagtttgatgggttagacagtgcggtacaatgg

SEQ ID NO: 2166 - DNA, 456 bp, Glycine max
  unsure at all n locations
tgtaggattatggggtacccatcacatgtggtactaggtgtcggtcgggcgatggtgcacaacaagttttccaaatccacaatgcgcgcataaacccaccatcccctgtagcccacctccaactgagctcacgtactcccacgtagcccatatcctcgtttctctcaacaccgggtccccatcaatcctcccaaacttccccaacatcaaagcaatacaacattcaaacagcaaaaactatcacagccaagaaaacagagcaaaggcagaaaactctgccaaaacaccaaccaaaatcacagcttttctcacttaaagaccccagtaacaattccttcgttccaattcgttaaccgttggatcgactccaaatttttactggaagtctctagtacataagcctacattntgaccgttgggatctactagcaaacatccagaactcattctgcactg

SEQ ID NO: 2167 - DNA, 420 bp, Glycine max
  unsure at all n locations
agctntgaccaaaccccagtagcagttgttttcttagagacttgcctcagcaccttgtctctgagattaaggataattgcattgtgttccttctgcaatagtgctttcttatccccatcagccatcatcttttcgagtttggcttctccatcaagtgcttccaccaggccctgctgaacaagaaaagctctcatcttcaatcgccataacccanaatcattttgccctgtgaatttttcaacctcatacttggccgagcccatttcttgaatcgaactcaaaatcgatccacactcaccgcaccaatttgttgtgccaagatcagattttacttcacaaaagaatgagtttcttgtatgaacaagaataagcaaaatgcagaaaaatgaaccataaactgcacagaactcacaacagtca

SEQ ID NO: 2168 - DNA, 397 bp, Glycine max
  unsure at all n locations
tgctcaagattccttattgaatttgcaagttttttgaccaatgaatattttgaaagttataagacaatttggttttgagaggataagacaatgttgttcagaaaaactctaaggaatttcgtgtcccaagtcacctatttataggcctttgatggtcattcaaaagctntctgaacagttgtgactcttgggagttatttttgaaaattccttactggtaatcgattacataactgttgtaatcgattacacagttagtttttgaagagttgtgactcttcaaacttgaaatttgaatttttatgtctggtaatcgattacacaaatggtgtaatcgattacaggcttttaaaatttaaatttaaatttctaanagttggtacaaatagtttaaact

SEQ ID NO: 2169 - DNA, 420 bp, Glycine max
  unsure at all n locations
agcttatcattaanataaatctaaatggntgatgatgccatgatctatatctttcaatttttgtatgattacttctatgatatgtctaaaaagatttgattgattgctcatgattttcaaaactattatattctattttcaaataaaattattttgatatattaaaactttctatgttaaacaaaaattcatcttggtaagtgttgatattttttttacacttagtttttagaaaaaagtgtctagtaatcgattaccttcacatgtaatcgatacaggcagttaggttaagtgtaatcgattacaacattccttgaatcgattacagagtgtctgtgtctataaatcaaaatttcagaaattgcgagaacgcgatttctccacaacacgaccctaaaattctaaacttagaactcgatt

SEQ ID NO: 2170 - DNA, 440 bp, Glycine max
  unsure at all n locations
ctntagggtttccaaactgtgttgtcactgcaattatggtcagattagcttcatttatttataatttttcatttcaaatttacaattgtgaccactatttaatttctcaattggagtgactatttaaaattttctagtaaagatattcgtgatctcatgcatcatgattggaacatcttcttccagcatatttatagaaaaagaaatcagtgcgttggttggcttgctaaacatgaagccacatctaatgatagtttcaagtttttgagtgtttgaacttcccctcttgcctccgtgtgtttggtagatgctacgagggtctttaagttttctgtttctgttttgtttcctcctttcctatgtgtatatataaaaaaaaagttgttggagggactatagtttcagcacttctcaatttttaaactataagttttgaactt

SEQ ID NO: 2171 - DNA, 421 bp, Glycine max
  unsure at all n locations
agctntanacaagaatatataacaagacattatgaacaactgtggcagtgaacttcccgtttacatgatgataaaagtattgaagagaaaataagacaaaaattcgaagacaataaacaggtaataatgaactaaccaaaatgaaaaaaaaaaaatgatgaatgaacaaaatagagagctgaggttgggcttcggggccttgcagatgcaaagaagatggtgctaagccagcagctgagtctgtgatttggttaacgagatggtagtatacatggggaataggttgcatgatcagtgactgagaggggcagactcgagatttaatgattcgggccaaatatgaaaattaaaatttatttaataaatatattaattagcatcagaattcatatattatgtatttaattatgtgttcttcaaa

SEQ ID NO: 2172 - DNA, 436 bp, Glycine max
  unsure at all n locations
ntactttgtgctgcatcgctacatgaatactttatgtttgataacaatatatacatttcaatgtattaaaaaatattgcttatgtttctcacctacacatatcgcctcctattggttacaggtaatactatttgagaggcattggaaggtaacgcacatttctctgggtgttgcttcagtgaagatacattcatacagtttttaagctagcatcaccgcactacgggtttgtatgttggcattttacttaattggatattagaattgtgttaatatatgaattatgattattatcaaattgtatgcattatgagtgaacctagcttcctgtttgaggttcaatatagtgagtaatatggacaagttgcgataatcattgtttcgatattgaatttccattggacaggttggaacacttattttttacttattctag

SEQ ID NO: 2173 - DNA, 397 bp, Glycine max
  unsure at all n locations
gaagctctaatatcttccacactttttggtgtgggccattcttggatggccttgattttctcagggtccacttggaccccatttctaccaactaccaaacctaaaaaaactatattatctacacaaaaggtacacttctctatatttgcataaaaggtgtttttcctaaggactgaaagaacttgtctgagatggtctaagtgatcatctagcctcctactatacactaaaatatcatcaaaataaacaactacaaatctacctatgaaatcccttaagacatgatgcataagcctcataaaggtgcttggtgcattagtgagcccaaaaggcatcactagccattcatacaaaccaaacttggtcttgaaagcagntttccactcatcaccctttt

SEQ ID NO: 2174 - DNA, 415 bp, Glycine max
ggcctgtccgatgcagcagtaatgatggcccgagttatgtttgttaacggttacgaacccggaatgggtttaggcaaagacaacagcggcataactagcttgataaatgcctaaggaaatcgtgggaagtatggtttatgctataaacccactcaggcggatataaagagaagcatcgcggaaagaaagagcggtggtcaaagctcgcggttgaggcaagaaagggaaagaagcccgccctgccacatgagtagaagctttgttagcacgggtctgggagacgaaggtcaactggtcgcgatatacgaagatgaggatccgagtacattggatgtgagacaaccatgccctgctgaattctagctgggaaaatggcgagtggaggaacgcccctgcgtctacgcaacgagcataa

SEQ ID NO: 2175 - DNA, 394 bp, Glycine max
ttaattgggcaccttaaaattggaggcttaaggttggaatccaaggagaagatgatgagaggactaccctttattaacccccgtgaataactttgggaaggatggttacttggaaagcaatttaaaatgaggttttccaaggaagcaaacttatgagctaagaagccacccgagctaatacatgctgacatctgggggccaatcaagccaagctcactaggtaaaaataactatttccttcttttcattgatgatttttcaagaaaaacatgggtttatttcttaaagcaaaaattaaaagtcttttcttgcttcaagaagttcaaagctgcagtggagaaagaaaatgatcaagatatcaaagccatgaggactgatcgaggaggataattca

SEQ ID NO: 2176 - DNA, 453 bp, Glycine max
tcggaagaaagtgatgaggtacaagccctaaaggcagagcttgttagagtccgagtagtcgaagagaagttcaagtccatagccatcaaaagtctgaaaagagtatgatgaactaagggacgtcaatatggccaccgctgatgccttggaacgagaaaccaagaaggcccaaaaggaagaacacgtgccagcaaagttttgaggggctttatagggcagcaatagtaagctcaagctccgaagaggtgaaaggaatcatcacgggtcaaaggcatgatcttgaaggacgagctaaaggcttaccttatgtcgaaaagaaatttgtcccaacagttaagcgagactgaagggaatatgtgggccgtcatcgatgagtgcaaagagaagctaaatctagcggcgactcacgagcaaaggctagaggatgagtacgccaagatatcagcagaaagc

SEQ ID NO: 2177 - DNA, 369 bp, Glycine max
  unsure at all n locations
agcttcttatccaaggcttatcttggnggngaagctccttcttcgatggcttattccctagnggatgacgcctcctctcacctcttctcctttggcttctgctatatctccatggtggaaaatcaccattaaaggactttattgaagttcaaagatccaacctccatagaagctccacaagcaagcttccatcaggaggtacgctagggaagttactttgtttgtgggctggtttaggcctaacaatattaatgtctgaagcagtaagcgagtgtgtgattcgtgccacgaaactgaacggccaaggagaggagtgggtgtgtgacccgcatcgtggagcaatcaagggaggtgttaaagacggtggcg

SEQ ID NO: 2178 - DNA, 370 bp, Glycine max
  unsure at all n locations
tcttgcgtagccgctcttgggctcagaaatctanaaacaaatccctcttattactagcttttttgaattctttagttcctgaatgtacaaccttcaaattgttgttcattgtaaacagcacaaagtggaccttgtctgtctccaagaaaccaaaagggagaaatttaataaaagtatttgccaggccatttggggggactcgactgcccattaggattatgttctttctgtgcaggctgctggtggcctattatgtttgtggaataactccatttttgaggtggataggagagagaaaggtagaagttttttaatgcttgaaaggacatgtattagtaataatcagaggatgatgattggcaatggctat

SEQ ID NO: 2179 - DNA, 370 bp, Glycine max
atttgacagagcaacgccacacactggatctcctataagactgaaaagcatgagggacacctcagataatcatgcattataaatgaaacagcttacacagaatcacattgaagcctaaattttatctcacatcaatatattttcgcattgcgaacggcatgttactgaggaaatctcattgtcttgcaaatctacaagctgcaatcggggacaaatgttgtcacccaagtccaaagcaatgtacaatgcattgcttcggagtttcctgtcgaaatatgaaaactatgacgactatcattctattgctcgataactacttatgatcaccaaaaagatacggacttacacctgctggatttgaggaatgcca

SEQ ID NO: 2180 - DNA, 447 bp, Glycine max
tgccacccagctcgcccaggtgagctaggttgcttcctctagaagcaaccgccttctagaggaatattctggaaggcccaagtgggcctggttgctatttgaacccccatttttactaaatacacctcttgctcttttttggtgattcttttaccgtaacgttatgaaattttacaaatttcgtaacgatgcttgttttctttccgtaatgttacgaaaccttacggattacgtaatcatccctttttttccttccggaacgttacgaaactttacggattgcgcactaacacttccttttcaatttccggcatgtcacggaacttcacggattgtgctacaatgccttcttttgacttccgggatgtcacggaacttcacgaattgcctaacgatgggtggtcaaacgagggtcgcatcccaacaacggatggtccccggacaaaa

SEQ ID NO: 2181 - DNA, 424 bp, Glycine max
agctttgcggatatggtcttcgccggcaaaatgatcgaagtgggcttgcaaagaagcaaatttggtcatcctgctccgataaaaactggggcaaatgaagaggatgagaatgagggagaaacccatgctgtgacagccattcctatatggccaagtttcccaccagcccaacaatgtcattactcagccaataacaaaccttctccttacccaccactcagttatccacaaaggccatccctaaatcaaccacaaagcccacctaccgcacttccaatgacgaacaccacctttagcacaaaccaaaacaccaaccaagaaatgatatttgcagcgaaaaagcctgcagaattcaccccaattccggtggcctatgctgacttgctcccatatctacttgataatgcaatggtagctataaccc

SEQ ID NO: 2182 - DNA, 446 bp, Glycine max
  unsure at all n locations
tagtanagctaagcactaacaatctctctctttggcaaattntgtctaaaacatacttagacacttcctgagcaggtacgagcagttatgcaagtgggatcagcaactttcattatcagagtaatcaagcacagcggtatctgtagtggcgacagcaaaattctgcaagttgcaagtcgtttcccggatgtcaagacatctcacgtgacatcagctttctgctccccctgtctccatgctcttactgctgtgaagcagttcactgcagcatcttctatcagctactagtcttttccaggatgtcaagacatctcatgtgacatcagctttttgctccccctgtctccatgctcgtactgcatcttctatcagctactagtttcagtagcttacatcaatcatcatcagcagcagcagtctgcccctagaatcatatacatacaact

SEQ ID NO: 2183 - DNA, 229 bp, Glycine max
  unsure at all n locations
tccgtactgtctcatgcattaattcacttgtgtcataagatttgtggtgttaatattaaaatcttttggtgtgggaagtggagaaaggacaaaacaactaggtttccttttccttttctgcattggagtgagaggtgctgactctcccanaatagaacagtagagctttccatttttactgttgttggcaattgccagcttttccgtaacttttttccccctcgacatc

SEQ ID NO: 2184 - DNA, 448 bp, Glycine max
  unsure at all n locations
tgtaattggcatcgtanagtttgatattntaaaaaattgtttatatctgttgtacgtgccctttcttacctgcaatcaacaatttgttttgtgaaatattatcacattctgcctcaattgtgattttcctctgcttatctcaaaattaggaggcaaaccattattgaatatagtgtgacctcaaaaatcactgcaaaattatgatatttctgcgctgattgagaagctgagctaaatatacactgattagttgcaaatataagatttaaagttcgttcaattacaaacaaaatgcatcattgtgtcaaatgaattggatctctctcttgcaaattaattatctgtattttttatttttcttcttaatagtattgcagggctcttcaggatgggacaagaattggagtttgatctgaatgacaagtcttccgtgggtctcagttccgat

SEQ ID NO: 2185 - DNA, 433 bp, Glycine max
  unsure at all n locations
agcttgtgcanatcanatcactcctacgttttatctctagcatgcattntctttctttctttacccactcctcacgtttggttttttaaggaaaaacaccataactaaacgcgccacaaggcatccctatcgcaccagatccaaatctagaacgatgggtgatcaagaggagacacaggaacagatgaaagccgacatgtcggctctgaaagaacaaatggcctccatgatggaggccatgttaggaatgaggcagctcatggaaaagaatacggccaccgctgccgcgttcagttcggctgccgaagcagacccaactctcttggcaactgcgcaccatcctccctcanacatagtangacggngaagggacacgctggggcatgatggcaaccctcacctgggatacaaccgagcggcttacccttatgga

SEQ ID NO: 2186 - DNA, 449 bp, Glycine max
tgtcagttataataataccgtgttgagacatcaagacaaacaatataccataataacaaggttttttttccaaacatcagtcacttggaggatatttctagtgcaatcaaatagggtcaaaagtcacaacaacaataatctctcaaccaaaacatcaagataaaacaataggataatgcataataattttaagataaaagcttctcataaactagatacttaagtcaagagtggatcccgtcatgcagtatgtagtaaattccaattaacactaggtggatttattaaacatcatcatacattctgtttaaaagccacctaagtactttcttccagaagatgagtcttcaaagttggcaatcctactgggacaaaaaagacaaaacgatgcctcaaaaggacatatctattaatttccacctcctcctaacatatgaagaggggaagga

SEQ ID NO: 2187 - DNA, 417 bp, Glycine max
agcttgtggttgttccttaagtttcagagtatacattttttttcttccttagttaagtaattaggaaaattttattagtaggagtattagtagtacaactatgatggaatagaattcatggccagcgagttcccaccttaatctgttggataactgaagctagttatgttcacaaaagcttcaatctaagaagaccatattatcccgctaaaatggcccattaagtgtgattggaaacataggcacatgcaaatttcatgtgttttagttaacaacaacttagttatctttagtcttgtctaagcaatatgacagaaacatgagtgtctaaagaagatccaagcccatataaccttgaagttttagagaataataaagaatgagagagttatatggcttttaaaaattgtgaaagga

SEQ ID NO: 2188 - DNA, 439 bp, Glycine max
  unsure at all n locations
tgtgtgaatcanatcactcctgcattntatctctagcatgcattcattcttctttacctactcctcacgtttggttttttaggaaaaacaccataactaaacgcgctacaaggcatccctatcgcaccagatccaaatctagaacgatgggtgatcaagaggagacacaggaacagatgaaagccgacatgtcggctctgaaagaacaaatggcttccatgatggaggccatgttaggaatgaggcagctcatggagaaaaacgtggccgccgctgtcagttcgactgccgaagcagacccaactctcttggctaccgcgcgccatcctccctcaaacacagtaggacggngaaggtacacgctggggcacgacggcaaccctcatctgggatacaaccgaacggcttacccttatggattgcacctaattactcacca

SEQ ID NO: 2189 - DNA, 413 bp, Glycine max
  unsure at all n locations
agcttatcaaatatgattttgggcccaataatatctggtggcccaattacaaaaatacaacccaaaaacgaaataaaataaaactggacgacaaataaaattgtctgctctcttcaagtccaagccggttcagcccaattgcttgtaattctcctgaaattaaattaaaacacagaattagtcaagtaggcccaaatgataaaactgcataatttatttgacaattaaggctaatcagtaattaaaatggtgacagaaaggggtaagaaataggagaaaataatgacacatcagagagcaggcacaaagatttggttagtaacttaaacgagcgataactccctatccnctcatgtcttaaccaagttactatcgtttcccctcctttttactctttacaacaactctgtaca

SEQ ID NO: 2190 - DNA, 397 bp, Glycine max
tccttgagaagattccttgagaagattcctaaagaagctagagcttagctacatacacctctctaataggaaagctcaccttcttgagatgagaagctagagcttagctacaccccctataatagctaagctcacccctatcccaaaaatacatgaaaatacaaaaaaaaagtccctactacaaagactactcaaaatgccctgaaatacaaggctaaaactctatactactagaatggccaaaatacaaggcccgaaagaaggaaaaacctattctaatatgtacaaagataagcaggctcatacttagctcatgggctcgaaatctatcctaaggctaatgagaaccctagggccttcccttggatctctggcccaatctacttggagtcttcta

SEQ ID NO: 2191 - DNA, 425 bp, Glycine max
  unsure at all n locations
agctntgagccaaaatcctatctcaccatattaaagagaaggaaatttccaatcatagagaaagcaaaaaaaaaaaaaagagaaggaaaatttccaatcaaaggaaaaaggagaggaaaggaaattcccaatcaaagagtgggagaaagaaaaaaaaaagaaagaaaattcccaaccaaagaatgggagaaagtaaaaaaaaaagaaagctcctggtcaaagaaaccagaaaaaatgtgcagagaggtctttggaccagacaatatctgaacaatacagaattgtcaccaaatgaacaaaagaaagaaaaggaaaccataacctaaaagtggtcttctccctttgattaccagccaaaatcctgtgcgtcggtgacttgctcgcctcgcgtcaaacaaaaacagaaaaggaaaagctcaaacaca

SEQ ID NO: 2192 - DNA, 421 bp, Glycine max
  unsure at all n locations
ntgatattggtaagtaaatgcctcanaacttctattatatttcctgtttctgaagtacgttntttctcactaacatctctttttataacattaatctctttaatcctctcatttgtactaattactttatcttacatttttcttccttttcttctcatctccttttctattaaaaaagttgcccgattttgttatataaatgcaatttctcttttcattntaccaaactctatataaagatattttatttgtttcaccaggacatatttgctgctggaactgatacttcagcatcaacactagagtgggctatggcagaaatgatgagaaatccaagagtgagggagaaagcacaagctgaattgagacaagctcttcgagaaaaggaaataattcatgaaagtgatctagagcaacttac

SEQ ID NO: 2193 - DNA, 411 bp, Glycine max
  unsure at all n locations
agcttgangattatggngtacccatcatatgtggtactaggtggcggncgggcgatggtgcacaacaagttttccacatccacaaagcgcacataaacccaccatcccttgttgcccacctccaactgagctcacgtactcccacgtagcccataacctcgtttctctcaacaccgggtccccatcaatcctcccaagcttccccaacatcaaagtaatacaacattcaaacagcacaagctatcacagccaagcaaaacagggcaaaggcagaaaactctgcccaaaacaccaaccaaaatcacagcttttcacatacaaataccccagaaacatttccttcgttctcattcgttaaccgttggatcaactcgaaattttactggaagtctctagtacataattctacat

SEQ ID NO: 2194 - DNA, 437 bp, Glycine max
  unsure at all n locations
tcaacatcagaccacttccagggtgctggatctacttcacatggacttgatggggcctatgcaagttgaaagccttggaggaaaaaggtatgcctatgttgttgtggatgatttctccagatttacctgngtcaactttatcagagagaaatcggacacctttgaagtattcaaggagttgagtctaagacttcaaagagaaaaagactgtgtcatcaagagaatcangagtgaccatggcagagagtttgaaaactgcaagtttactgaattctgcacatctgaaggcatcactcatgagttctctgcagccattacaccacaacaaaatggcatagttgaaaggaaaaacaggactttgcaagaagctgctatggtcatgcttcatgccaaagaactttcctatgatctctgggctgaagccatgaacacagcat

SEQ ID NO: 2195 - DNA, 442 bp, Glycine max
  unsure at all n locations
agcttaggaacccaagctcttaacttcaatgcttggaagcatgacttatgcctaanaatctaagttttggttntgaaagtggaaaggcatgaaaattaggacatgcttgagagggttttttactaaaatttggctgccccatgagggatactttgcatctaggtagcatggaaaatacctttcaatgtgtcataccctaatttcgtccggngacctttgcttgatgacatgcgacctttctttggtccttgtgaggtgcttgacacccatcattaggcagtttgtgaaattccaggacatgtcggaaaatcaaaaaaatattgatgcacaatccgtaagtttccgtgacacaccggaaatcaaatggaagcatcgttgcataattaagtgaggttccgtaacattccgtaagtcaaaaaggggatggttatgtaatccgcaa

SEQ ID NO: 2196 - DNA, 385 bp, Glycine max
  unsure at all n locations
ggacccaagtgcactgtcactgganagagggttcatggtgtatgtatgcgatttccaataaagatctttataatgctgcttttgtatgtgagaagcaaaagtacgcgtgagtgtgaatatgattaccttgcgtgagaattcatcttaaggatacatgatagtagatataataagaatgaagatgaggaagcataattaaacgggattatagactcaaatgctgaagtgtgcttatcatttcaaattatcaatttcccttaatgtgtctaaaaggctgaggcaacaaatgaagcaattttgcgctctgagacagtctggtgtgtggntttctattggattatttctgccttttgtgtgcctgtttttcttctactggtgaaaatat

SEQ ID NO: 2197 - DNA, 371 bp, Glycine max
gctggaatcatttatcctatctccgaccgccgatgtgtgagtcccattctttagtcttgaagaataccggcctcgtagtgatgaacaatgagacggaggagctgattcctactctggtgcagaacagttggagagtctgcatcgactataggaagctgtaccacgttaccacaaaggaccatcttcccctatcattcattgaccacatgcttgaacgcctggcaggaaaatctcactactgtttccttgatggatgttctggtcatatgcagattactattgctactgaggatcacgataaaaccacattcacctgccccttcagtacttttgcctatatgaagatgcctttccgactgcgcaaaggccct

SEQ ID NO: 2198 - DNA, 459 bp, Glycine max
  unsure at all n locations
ctcgtacccggtatcctcagagtcacctgctgcatgcatgcttctgcattcaatttcgagcatctcaatatattacgggacttaatcggacatccgagttaaaagttattgttgtttgcatttgctacgagcttccgttttcaattacgagcgtctcgatatattacgggactcaatccaacctccgagttaaaagttattgtcatttgaatttgctacgagcttccgttntcaatttctagtgtattgatatattacgggacttgatcgaacattcgagttaaaagttattgtcatttgcatttactcacagctttcgttttcaatgacgagtgtttcgatatattacgggactcatccgagttgaaagttagtgtcatttgaatttgccacgagcttctgttttcaattntaagtttcttgatatatttcgggactcaatcggacatccgagttaaa

SEQ ID NO: 2199 - DNA, 452 bp, Glycine max
tcattgcctaacaagccaacttacaacagcaagccccaagagactcagcataaggatgcacagaccaaagttgcgtatgtaaaaaaattgtatgaccaagtgaaggtgcaaattgcaaagaagaatgaaagctatgccaagcaagcccaaaagaaaaggaaggaagtggtacttgaacccggtgatgatcttggacatttgaggacaaatgttttccaagaaggagggaatgatgagaatcatgaaacaggccaaatacagtctaaaggcccaagtggagaaggacgaaggcccaagtggagaaggacaaagcccccgagtggagaaggatgaaggcccaagtggagaaggatgaaggcccataggcagagacactatcaagactattaattgatgctgaaggccaagattaatttgaaggcccataataaatatgttctatctagttataa

SEQ ID NO: 2200 - DNA, 442 bp, Glycine max
  unsure at all n locations
agcttgcctcanagaggtccaggaaggacaagtcagccgaaggaactagttccgctccggagtatgatagtcaccgctttaggagtgctgtacaccagcagcgcttcgaggccatcaagggatggtcgtttcttcgggagcgacgcgtccagctcagggacgacgagtatactgatttccaggaggaaatatggcgccggcggtgggcaccactggttactcctatggccaagtttgatccagaaatagtccttgagttntatgccaatgcttggccaacagaggagggcgtgcgtgacatgagatcctgggtaaggggtcagtggatcccgtttgatgccgacgctatcaaccaactcctaggatatccgttggtgttggaagagggccaggaatgtgagtatggccagaggaggaaccggtctgatgggttcgatgagga

SEQ ID NO: 2201 - DNA, 395 bp, Glycine max
gctgtatgaagcgacactgacctaggtccgcttatgataactattagttggctgcggcattatcaatacaacactggcggccgtgtctgttaagacgaaagtgagccacttattcagatcatatagaggctgagacaatgattgcaccagcggatgaccacacggagtctaccatactgtatagcaatacaacactggcgggcgtatacctatgtggagtgacggatggcattctacaccacacagcggacattctgctttatattgaacttacccgagattatcctggagtgtattttggataggactgaagagggatgtgatgagacttgtacagaagtgtgatatatgccaacgacataaataccgtcccactgctcctgtgggtttactac

SEQ ID NO: 2202 - DNA, 405 bp, Glycine max
agcttggaaatgaacaacagaagctcacgagatactacaatggtcataacatgtcacacgaaagtccgattcaggtgcataatatatcgagacgctcgaaatagaacatcggaagctctcgagaaattccaatggtcataacttttcacacggaagtcctattcaggcgcataatatatcgagaagctggaaattgaacaacgaaagctctcgagagactcaaatggtcataacttgtcacacggacgtccgattcaggcgcataatatatcgagacgctcgaaattgaacaacgtatggtgtcgagatattcaaatggtcataacttgtcacacggaagttcgattcaggcgcataatatatcgagacgcttgaaatgaacaacggaagccttgagaaactcaa

SEQ ID NO: 2203 - DNA, 454 bp, Glycine max
  unsure at all n locations
tganattgaacaacggaagctctcgagaaattcaaatgatcataacttttcaaacgaaagtccgattcaggtgcataatatatcgggaagcttgaaattgaacaacggaagctcttgagaaattcaaatggtcataacttatcacacaaaagtccgattcaggcgcataatatatctagacactcgaaattgaacaacggaagctctcgagaaattcaaatggttataacttatcacaccgaagtccgattcaggcgcataatatatcgagacgctcgaaattgaacaacggaagctctcgagaaattcaaatggtcataacttatcacacggaggtccgattccggcgcatagtatatcgagacgctcataattgaacaacgaaagctctcgagaaattcaaatgctcataacttatcccacggaaggtcgattcatgcgcatgatatatcta

SEQ ID NO: 2204 - DNA, 374 bp, Glycine max
  unsure at all n locations
atactgtgtcactttntgtaccattatacatgtattttcttggcagaactcacgtttggacactagttttgtatttcaaaagcacaactcctcaattaagtgaaaagagtttaaaattgcacaattttatgaagatttcaagactctacacttgatcacgaacttggtacaattaccaaagctatggtaatcaacatgaccacacttagatgataacatccctcctagaacaatgtcaaagatttgacaatagtcgtggtatacttaccacgaccataatggtcaagagcttcaacatcatttctaaccagtcatggtggatttaccacaaccgtagtgcgctattcatgcaaatatctntagaaagctatata

SEQ ID NO: 2205 - DNA, 426 bp, Glycine max
  unsure at all n locations
agcttccatgtgcaggttacgccatattctcttatcttcaggtaacctaatgcctgttggtttgagtaggtcaactggggtttcatttttgaatcagcttcctagtgatccaagtatgacaacagacaacatatctggcaagtatgatgtgaagaagaaagaaaatataccaattacaattgcaggtgatattgatggtggaatgcttgatggccaccttaatgcccctgttggtgtttggcgcacattangagcttcaaaagttgtaaaaccttcaaattcacctaacatggaagntgttccttcctttcctcataattctttcaatgaagagggtatcctttcttatggtctaaggaaaccacttcaggagcttcttgatgggatagcattactcgtccaacaagctatttcctttgttgatct

SEQ ID NO: 2206 - DNA, 364 bp, Glycine max
  unsure at all n locations
tgtagaatgtganataaatatatggagtctctacggcttgtggaggagactacagatttgggatatgacagatattacaaggacctgtaactcaaacaatgggagaaaagatttcactggtttcctatttgttgcaccacttccccataacccatctgaaacaatatggggtggcgtagcatgcaggcataccatgtacctgtgcgtcgcctcatccactgtcgtaattgaaaggaacatagttccatttggattcaaattcattttgatcaatctatatgagaggagtagtactcaataatggcacttaattaattgagccaatgagagagtgtaattgaatatatatttgtcacgacacgta

SEQ ID NO: 2207 - DNA, 367 bp, Glycine max
  unsure at all n locations
agcttagggatggaacacttacttggtggtgatgaacaaaagtgcaaaacggaatcaaaaaatgcgnaaaaggatgaccctagggctgcaaactcgtcaatcccgtgggtatggcttttgaaaggggggaaaagatagttttgaatgtaaaaacgccccccctttcgtcattcttataatttggtgcaggggtggctcgcccagctcgcccaggcgagctaacctgcacacattnttttttttttttttgaggggaacattaaccatgtcccctcccttctcatggattagcatcttgcctaacttgaacttacttaggttagaattaggcgttgattacttattcttaccaatagtaaaagaaagc

SEQ ID NO: 2208 - DNA, 392 bp, Glycine max
  unsure at all n locations
ntcctctntatttcgttcattntcgatttcttttcttccgtctttaacgcgcttttaccgtttatttaagccgttttctcacctaataaatgataaaatgaatttcaaccgatcatttgtgttgtaatctcatttaatcacttttaaaatgaaatctaaccgatcgttcacgctataacctcggttaaacaaaaaaaagtaaaataataataaaataatcaaaatatcttgaaaaataataataaaatgaacaaaatatctttgaataaaataaaacaaaaaaatcaatcggacgttttttctttggaagtttccttgaatgaattgattaataaccaaagtgaaactaagactaanatagactcacaaatcaagttttgtccgaaaatcac

SEQ ID NO: 2209 - DNA, 423 bp, Glycine max
  unsure at all n locations
agctntntcatgtttagagatntctagagagagaaaggtccaagtttcaaagagtttcgagagtgtttactatgcaaagactggcagagaactgagagtgaagaggaagccatcctgagagcatgagatgagtctatgagtgattatgagtgattagaggtggaggagagatccccactacttgcatttcttcaatccttaatttttctcttctctttgttggaaaggaagcttcctagatatggagagctaaatcctctgttggttcttgcttgtaggtgcttgatgtaaatacatgtatatctatttaatgatggtttatgtgttctctgtgctatcagtatgtcattcaatattggaaactggtctgattcttaaatcttgataggacatgcgctagttatcgtattatcacgacggatc

SEQ ID NO: 2210 - DNA, 370 bp, Glycine max
tgaaggtgtgtagcccaccatcttttcatagtagaatactagtagtgtgtctactattattgtcatcatttttttctccgtcattgaggtgccacttgagctgccaggtctctccacctttgggcgtattcttttgaagaattcgtgccccctttttgcacatgttttgtagttgcatcctatccgaagccattataccgacactgcctaacgaaggcaaccattaggtcctcccaggaatggactcgtgaaggttccaagttagtgtaccaggtaacaactaccccagtaagactttcttggaaggaatgtatcaacaattcctcatcttttgcgtatgcccccatcttccgacaatacatctttagat

SEQ ID NO: 2211 - DNA, 372 bp, Glycine max
agcttattacttttttataatttataaattgattcagatatacattaatcaaggttccaataaactaattgcaaatgtcgaacagaatattgcaggcaatatggccaggtctcagaattttggtaatttatgtaggcaaagaaactaaaagtgtaaccataacctgtattttgactgaagcaccttgcattcctccaagtgaatttctttttggtaacaactaaattcttttgtagatataataatagactcaccctcccagtgagtatcttttcggtttatctggtttgctgcttcttggctgcttctagtaagggtaacaacgtctggatcatcataaaataatctaggctgtcaaactatattacaaca

SEQ ID NO: 2212 - DNA, 430 bp, Glycine max
ctacaatggattaggtatcccatttcaacaaaaaagatttacttaacagattaaattctgcaaaaatattttccaagtttgacatgaaatccggatttttgcaaatccaaatacaagaatcggataggtacaaattgcttttacaataccttttgggcaatatgagtggaatgttatgccattcagtctgaagaacgccccttcaacttttcagaaaattatgaatgatattttcaatccttattataatttatcattgtctacatgtggaagcaatgccttccaagattattttgatgatgccaaagaatcaagagtcatacaagtttcaagaatcaagatcaagattcaagattcaagattcaagaataatcatgatcaagattcaagattcaaataaagaatcaaaactcaagattcaagaatcaag

SEQ ID NO: 2213 - DNA, 412 bp, Glycine max
  unsure at all n locations
agcttcaccacgcttatgagccttggataataagcttggagaggatgcttcaatggaggagaagaaagagggagagcaagagagaggggggagcacgaaatttaaggaagataaagggagagaagttgaactttgagttgtgtctcacaagactctcattcatcaaagntacaacaagtgttacacatgcttctatntatagactaggtagcttccttgagaaaacttccttgagaaacttctttgagaaaacttccttcggaagctagagcttagctacacacacccctctcataactaagctcacctccttgagaagcctccttgagaagattcctaaagaagctagagcttagctacacacacctttctaatagctaagctcaccttcttgagatgagaagctagacct

SEQ ID NO: 2214 - DNA, 365 bp, Glycine max
  unsure at all n locations
ntacaaagtttacagtttgaggccacagacatatggttccatatcagacttatgtagtcatgacaagaaccgaaagcctatagatcgacatccctgttttctgcatctatgtactgtacaatcaccatctaacagactatcgctgatctaagattactcgaccattggttgtagcttgtcccgaagtccctctctaaacttcgaagccacgaccaaagtagaaaggatgcgtcgtccatgattttgttggcatcaaatgtgtcgttggagaagagtatcttattccgttgctgccaaatagaccatgtgagagccagccaccaccacctncacctgttgccccttacttcctgagcaactcaaaa

SEQ ID NO: 2215 - DNA, 318 bp, Glycine max
  unsure at all n locations
agcttcgtggcaagccagtggatggaggacatggctagatggtgaaattgattngtggcattcataatcatgaattggccaagtcattatttggacatccatatgtcgggcgattgactaaagctgaaaagatagttattgctgacatgacgaagtcaatggtcaaaccaagaaacattctgctgactctaaaagagcacaatgccaatagttgtacgacaattaaacaaatatacaatgcacaaagtgcatatcggtcttccataagaggagatgataccgaaatgcaacatctaatgaagcttcttggaacggatc

SEQ ID NO: 2216 - DNA, 293 bp, Glycine max
  unsure at all n locations
ggaaggtgcgtaccccaccattttttcatagtaaaacactgataatgtgtctactattattgtgataatctctttctctgtcattggaggtgccacttgagttgccaggtctctcctcctttgngtgtattctttgaaagatttgtgcccctatttgcacatattctatagttgcatcctatctggagtcatatcagaattgtactattactgcctaatgaaggcaaccattatgtcctttcaagaatggactcgagaaagttccaagttagtgtaccaagtaacagctaccc

SEQ ID NO: 2217 - DNA, 410 bp, Glycine max
  unsure at all n locations
gtctcacgattgaacatgctcatgcaacaattgttagtcgtggctatacgagacatcttgccaaacaaagttaggttagcgataactcgcctgtgattnttcttccatgctatatgtagcaaagtcattgatccagtcaagtttgatgagttggaaaatgaggccgcaattatactgtgccagttggagatgtattttccccccgctttctttaacatcatgattcacttgattgtgcatctggtcagagaaatcaaatactgtggtcctgtttatctacggtggatgtacccggttgagcgatacatgaagatcttaaaagggtatacaaagaatctatatcatccagaagcatttattgttgagaggtacattgttgaagaagccattgaattttgttcagaatactt

SEQ ID NO: 2218 - DNA, 393 bp, Glycine max
  unsure at all n locations
ttggtctctgccagtgaaaggatcgatgtgggtctgaaaaaaaagggcttatttgatcatcatactatgatgactgagaaaactggggcaaataatgagggtgagaaagagggagaaacccatgctatgactgccattcctatacggccaagtttcccaccaacccaacaatgtcattactcagccaataacaaaccttctccttacctaccacccagttatccacaaaggccatccctaaatctaccacaaagtctgtctaccgcacttacaatgacgaacaccaccttttgctcataccataaacaccaaccaagaagtgaattttgctgcgagaaagcctgtanaattcaccccaattgcagtgtgctatgctgactagcacccatatct

SEQ ID NO: 2219 - DNA, 409 bp, Glycine max
  unsure at all n locations
gcaagcttgttgaaattgccatgtttgggtgagttatacatacccattctgttttatggttntgtgatgatgtttgtcatgtttgtatgctgaaattgcccatggaaaactgttagagatgaaatatagagttaacctagggttggaaagtgagaatgtggtgttatgagtggaaaaagagtgaggctttgagagttggaaggctaagtctgaattctgtggtaaatggaggttaaagtgagttaatactagcttgaaatgtcatttangacttgggagaaagcttggactgtgctagagagaaaaacaaatgatcaaagtgaataaagagccatttctagggcaaaattgggtgttgaagagtcaaattttgattcggtggaattttaggtgtaaattcagtttgagc

SEQ ID NO: 2220 - DNA, 445 bp, Glycine max
  unsure at all n locations
gtgtaatcgattacactaatttggtaatcgattaccagtgtttgtttctgaatatatcaaaagatgtaactcttaaaaatgatttttgactctttcaaattggttttaagtttttctaaaagttataactcttctaaatggtcctcttggccaaacatgaagagtctataaaagcaaggctttgatttgcttttcaatacacttttacacttattcaatcaatcctttacaagccttgaatatctttgaacttcttcctcttctttgtaccaaaagctttctgaagtttttcggctttctaaaccttgaaaacttgtgctattcatcctcttcattctcttctctctttgccgaaaagaattcatcaaggactaaccgcctgaattctttntgtgtctctcttctcccttttccaaaagaacaaaggactaaacgcctaaattat

SEQ ID NO: 2221 - DNA, 408 bp, Glycine max
  unsure at all n locations
agttgctcatctcggtgttgaggggtggacaacatcctgcaacatggtggtgatgaatcctcttttgcacagaattaaggaggcaatgaagggtgaacctcaaatatatataaaacaaaatctatgtacacacacttanaaagaagtggaatttggtgtggtcacaaacgtgtatatgttcctcaacttgaaggtgactaaaaacaataatattgcatgcttaggaaattaaagccttaaaaaggattaatttttttctaaaaaagaaaacaaattaaagacatcaagaaggtgacataaaaagaaagtagtagagagagagaaagtgtgtatgctgtgttgtgttagctaagatgatggngtgtatgagggtgtcaaaaacagagaaagttagttatgtgcatatat

SEQ ID NO: 2222 - DNA, 435 bp, Glycine max
  unsure at all n locations
ntgatggtgttgagaagaaatcacatgtttgtcatcatcattaaggggaagaatgtgaatgtatgtatacatgattttgatgatgtcaaaagaagaatcaaacaaggctcgcttcaagattaatacaagattgtttcaacaaacaaagccttgattcaagatttcttcaagatcaagccttgcctcacaatgaaaggtttcaagtcattcaaggcacatgtaatcgattaccaatggcttgaaagtgtgtaatcgattacacatcatatgtaatcgattaccagagactctgaacgttgggaattcaaattttaaatgaagggtcacaactgttcaagagaaacaactgtgtaatcgattacactaattctgtaatcgattactagagaggattttcaagagatatcgccaacagtcacatcttatcatttggat

SEQ ID NO: 2223 - DNA, 270 bp, Glycine max
  unsure at all n locations
catgcaagcttataccaatcaagttgacccgtatgttgatattacacatatggatcttcttgatccgtataagctttacggatcaacttgatccatatggtttactcatgctcatccagctntatggatcaacatgatccgtatgactcatagggatcaacttgatccatatgactcattcggatcaacttgagtgaatggtatgtttgcccatttagttaaaatgatgagcgcaccaacaaaaacgctaggtgcacctacaatcaccct

SEQ ID NO: 2224 - DNA, 162 bp, Glycine max
  unsure at all n locations
gcttccatcacgtgtggtccgcggtgcggtgacggaccaatttatttggcctgtgtaatatagcggngtggactggcccggtccgctgccaatgcgggcttatgcaggcgggccttatgaaggacgggctggtccgtttgcccacccctagatatacttggg

SEQ ID NO: 2225 - DNA, 332 bp, Glycine max
  unsure at all n locations
cgtcatcactttcttccgaagctntaacctcattgtctctcacagtctttagattggggagccaatccaatccttgtgtccggactctcagccacttatgatagccgccgatgatcccattactgcttcccctaagctctctgtcctttcttcacgccgcatcccatgccttgcgaactccttggagtaccctagcattgtggtcactgaaacctcgtgcgatgaaaggcgtgatgctttcgtctgatggtactcctctcatgggacatccttcgcatgaagatagaatcctgattcttccttccttctagcgagggaaccatttaacagac

SEQ ID NO: 2226 - DNA, 413 bp, Glycine max
  unsure at all n locations
tgacattgcatttgggcacctattttgaatttcctatgctgtctctacatacataanacagtcccaccatcccaatcttgcaaaaccatattcatatatcattgnggcatttcaccgagcacttggtgggcgcaagtttggacataaattgcaagagaatgggggcaatgtggcatgccccattgcttcagaatacaacatatgcctaaggccttctcattcaaatcctcaactcaagaagtcaagcataaaaacaaaccaaaattgccccacanatataagcacgttctcacaatttatagcaccaaaagatgaagaaaatactccaatgggaagcaaaaaaaactcaaggattgaatacttgttggagtgagtagaaacaccaaaaatgaaagcaaaatgcaaccaaaagt

SEQ ID NO: 2227 - DNA, 356 bp, Glycine max
  unsure at all n locations
tttgatctcctgttggggctctatattgtgggagtgtgctcanatatatggggcaattttggtttgttttcttgcttgattaggttgaattaggggttggtatgggatggccctaggcctataatgcattntgaaacaatgggacatgccacattgtccccgttctcttgttattgacgcctaaacgcgcgcccaccaagtgttcggtgtaatgcctcaatggcattagcgcgtgacttttgtaaggaaacaacccgcggggcattttggtttgacatattttctattcttggaatatgtattcattcccgaaaaaggctatagatattgcccacatatattctaagcctagaaac

SEQ ID NO: 2228 - DNA, 319 bp, Glycine max
  unsure at all n locations
tgaaaacactntttattntaaatcacttggccaaacctttgctaattcttttatgaattccctccctaatattctagtgatcatcttgatgttgggactcgtaatcttgaagaatggacccgaattttaatcttgaaaagcccatttgcatcaattgcaacacatcatcatgatcatcatcaaaacatcaaagccaatggcatctacacatgtgtcctccaccttccagattggagctatgtctcacgattgcctaattgcggaccctaaacgcaaaacgacattctccccttttttttcagagacccatgaatgatat

SEQ ID NO: 2229 - DNA, 418 bp, Glycine max
agcttggggatacccaactttcttctatactctctcttttgtcacaaacagctcctagcacacttccttctcaaactaaaattaacccaaagaagaaacatgtcagggctataatgacaagaagcaagaaagctagagagaatatgaagcaaaatgggggatccacttcagatgccacaaaggaggtttttactaaagagaacctagtgccagaaaaaaaggtagaggaaagggagatactaacatctcccaaggtaagtattcctttccctcaaagggtaaaaaataagcaataagatgagcagtttaaaaagtttattgatgtaatgaagagactgcacatcaacatttctttaattgagattatttcacaaatgccaaaatatgtcaagtacttataagacatactttatagtaa

SEQ ID NO: 2230 - DNA, 433 bp, Glycine max
  unsure at all n locations
cgagatgaggaagtgttgaagggtgaaacttcctgcttttattgttgaccacagagtggtacctggagatatgtcgcggcggtcaggagaccttggggacgtcaggtggggtgctattgcccaaaaccaagcttgaccaatcccgacccaacccgggcatagtcggtcagtgagaacctgtgatgtacctaagcaggcgagctcctggcagtcaacagataaaaggaacaaagaccacaaagcaaggaggcttgtggtggctggccagctgtgaactttgattgatatgtgggttatggcctctggtaatcgattaccaagggtgggtaatcgattacaaggcttanaaatgaagacagggggctaagatggtctctggtaatcgattaccacgggatgtaatcgattaccaggcttgaaaacggagtcagga

SEQ ID NO: 2231 - DNA, 411 bp, Glycine max
  unsure at all n locations
agcttgcggtgaacaaatataaaaatcctttgtgcactnttttctttttctttcctttactttgctttgcacaaatttaaaaattgttttttgtccaaatcattaaatctatcatcttacccaaattaacaaaaaaaaccaaacattattttaccaaaagcttttattaagcaactatctttgaaacaaaagtcttaaattgcaaaagaattattctttcagaactgttgcattttcattatgagcaacttttcattatgaactcgcctatatgaattatcttcagaaacatttgttttaaaagaaacctataaaaagttttcaaaaaccaatttaaccccccttcttgtggtatttgtgtcacttcaagtaaaaggattgcctangaatttgtgaaaactgatcttcact

SEQ ID NO: 2232 - DNA, 414 bp, Glycine max
  unsure at all n locations
cctcgcttctacaatctcccnctttttgatgatgacaaacctataatcaagaatcgcatacaagctctatcttctaatcaatcactcacttaattccgcccctttgtttttgaatntaagcttcacttgaaattaagttagagttcttgatttaatcccaactttctctccccctttggtatcaacaaaaaggccaaagtgtgttgtgacataaaatcatacacaaatgtattcatgcaagagaaaaggagaaactgttagacatgtggtctcaataagttaagagggataagcttagaatgcagaagaagtagcaatcaatttaataatattctttaaacatgcaagacaaaatttgatgcaataaaatgaatgagataagggaagagagaatgcaaacacagtttttatact

SEQ ID NO: 2233 - DNA, 347 bp, Glycine max
  unsure at all n locations
agcttacccctcattgtaccaacaagtgtccttatgaggttctctttggctccaaacccgattgccataatctntgtgtttttgggagtctatgttatccatggctacgcccttactcaaataaaagcatgccatgtgtgtttctaggtccctctccccaacaccatgcatacgaatgctatcatattctaactcaaaaaatatacctctctagacatgttgtctttcatgaatcaatcttcccctcactacgcctcatttggtccctaccttcccaacctcaaaccatgatatgaccttacttatctcttgccatcctctcatactacaacaactccatacaaaca

SEQ ID NO: 2234 - DNA, 441 bp, Glycine max
  unsure at all n locations
ntcgtaggtgaaatcaggtgcagccatttcccttagagtcctctcacggngtggaggttgtgccatgttctcagaatgtgcaaaatcagaatgctcagaatcagaatgctcaaaattataatgctcaagatcaggatgttcaaaatcaccaataacagaatgcacagattcaccagtaatggaatgctcagaatgatcaaaaggtataaaatgatgcctaactaatctatgaaatgtcctatctatctcaggatcaaagggttgtaagtcagatggattgcctctagtcatacactacattcagaaagcacacaactagttgccttgtcatgtaaataaaggtgtaggtttgaactacagctaccctcaaatgatatccaaatgacttgaaattttgtgagcaaccttatataatgatgagaagatagcacanaaaatttc

SEQ ID NO: 2235 - DNA, 349 bp, Glycine max
agcttgagaatggagaattgcactaagcaatctctacgcatagctccaaactcgaaggtggaggacacatgaacgaaaacacaattcatggtgctccgaaaaaggggttgagaatggagaattacactaagcaatcactacgcatagctccaaacttgaaagtggaggacacatgaacgataacgctattcatggtgctccgacaagattgagaatggagaattgcactacgcaatcactacgcatagctccaaacgcgaaggtggaggacacatgaatgaaaacgctattcatggtgcttcgaaaagattgagaatggagaaatgcactaagcaatcactacgcatag

SEQ ID NO: 2236 - DNA, 346 bp, Glycine max
  unsure at all n locations
nnttggtcttaaataaaaggttttcctctttttctattattttattcaagctctaccacatgtccctatttgattggagcaaaaagggcccactttctctttttgactgtgacccatactcagtcacaaaagtgagaaaaatctgacctttgaaacgctaaaatcctgcctcggtttgcgtgccgtttctctggttccagtttctcgcgtttctctgcgtccgtcggggccagttttcgaaagcaagcaatatgtatatcaaaacgctcagaatgaaaccccgagcgtggtttagaggttggtttcgttaaattttaagtcgcacgcaaaacgatgatctttaact

SEQ ID NO: 2237 - DNA, 403 bp, Glycine max
  unsure at all n locations
ncaagcttgagcaaattcaaacgacaataacntttcactcggatgtctgattgagtcccgtaatatatcgagactctcaaaatggaatttcgaagctctgagcaaattcaaacgacaataactttttactcgtatgtctgattgagtcctgcattatatcgagaccctcgaaattgaataccgaagctctgatccaattcaaacgacaataactttttactcggatgtctgattgagtcccgtaatatatcgagaacgctcgaattgaatattgaagctctgaacaaattcaaattacaataactttttcctcggatgtctgattcagtctcgtaatatatcgagacgcttggactagattgccgaagctttgagcaaattcaaacgacaatatacttttact

SEQ ID NO: 2238 - DNA, 412 bp, Glycine max
tctattctgaatttcaagcgtctcgatatactatgggactttatcgaacatccgagtaaaaagttattatcgttggaatttgctaagaacatccgttttcaattacgagcgtctcgatatactacgggacataatcggatatctgagtaaaaagttattgtcgtttcaattttctaagagcatctatttcaattttgagtgtctcgatatattacgggaatcaatcggcatctgagttaaaagttattgtcatttgaatttgctacgagcatatgttctcagttacgagcgtctcgatataccacgggacacaatcaaagatccgagtaaaaagttattgtcgtttgaatttgcacagagcttctgttttcagtttcgagcatctcgatatattacaggactcaatcggaca

SEQ ID NO: 2239 - DNA, 302 bp, Glycine max
  unsure at all n locations
agagaaaatgtccgattgatttttgtgcttcattttactaaaagatatatttttttattattatattattattttacctctttntttttatttccaacgtggttatggcacgaccaaacggtgggaattcattttaacaaaaattaacgaatactacaattcaaatgatcggtggaaatttatttttttagattacgcgcgaaatgacttaaataaatgactgaagcacgtcaaaaggtggtacgaaaagaaaatgaaacgagaataaaagtacacaaaataaatggggaccaccacgggta

SEQ ID NO: 2240 - DNA, 447 bp, Glycine max
  unsure at all n locations
ntgaatgcactattcaatggagttgacaagaacatcttctgtctgatcaacacttgcacagtggctttagatgcatgggagatcctgaaaatcactcatgaaggaacctgcaaagtgaagatgtccagattgcaactcttggctacaaaattcgaatatctgaagatgaaggatgaagagtgtattcatgacttccacatgaacattcttgaaattgccaatgcttgcactgccttgggagagaggataacagatgaaaagctggtgagaaagatcctcagatccttgcctaagagatttgacatgacagtcactgcaatagaggaggcccaagacatttgcaacatgagagttgatgaactcattggttctcttcaaacctttgagctaagactctcngatagggctgaaaagaagagcaagaatctagctttcgtgtccaatgat

SEQ ID NO: 2241 - DNA, 424 bp, Glycine max
  unsure at all n locations
gcttgacttggcgaatatgatttagccttatgtttcactttagttattagtcaattcaattaagaatgagaaatcccaaagagaacatgtccgattgatttttgtgcttcattttactaaaagatatatttttttattattatattattattttacctctttttttttatttccaacgtggttatggcacgaccaaacggcgggaattcattntaacaaaaattaacgaatactacaattcaaatgatcggcggaaatttatttttttagattaggcgcgaaatgacttaaataaatgactgaagcacgtcaaaaggtggtacgaaaagaaaatgaaacgagaataaaagtacacaaaaaaaatggggaccaccacgggtacagagaatgaattgaaaaagcttgattcggaaacttacccgtt

SEQ ID NO: 2242 - DNA, 377 bp, Glycine max
tgcttgaatgcactattcaatggagttgacaagaacatcttcttattgatcaacacttgtttagtggccattgatgcatgggagatcctgaaaatcactcatgaaggaacctccaaagcgatgatgttcacattgcaactcttggctacaaaattcgaatatctgaacatgaaggaggaagagtgtattcatgacttccacatgaacattctatgaaattgccaatgcttgcactgccttgggagagaggataacagatgaaaagctggtgagaaagatcctcagatacttgcctaagagatctgacatgaaagacactgctatatatgaggcccaagacatttgcaacatgagagttatgaactcattggttctct

SEQ ID NO: 2243 - DNA, 431 bp, Glycine max
  unsure at all n locations
acgttcaatatctgctggtaatcgattactcatatatgtgtaatcgattacacagtgcaaatntttgaattcaaattttaatagctgttgtaaatcagttttggccactggtaatcgattaccagagagtaaatttattgtaaaagactttttaacttaaatttcttggccaaaccttttgctacttcaattgaaattcccttcctatttaatataccctttctaagattctagagactgtcttgatcatccatcttgaatatctttgatttctttgtcttgaataaagctttgtgaaacatgtaaccctttggcatcatcaaaacatcagcttgatcctttgtctacacagacgacgtcaagtcctatgaagcacatacaaggacattgagtcctataaaagacaaaagacattgaagtctttgaaatgt

SEQ ID NO: 2244 - DNA, 417 bp, Glycine max
gattgagtcatgaatcaagattgactcatgatgatgaatcgagattgatttttgtgatttgatgataacaaagatgatgacaataagcccaagagaatgacttctagattgagtcaagaacaattcaagaattaagaattaagtttcaagtttcaagtttcaagaatcaagaatcaagaataatcaagatcaagattcaagactcaagattcaagaatcaagaaaagactcaatcaagataagtactaaaaagtttttcagaacatggagtagcacatgaattcacaaaagcttttaccaaagagtttttactctttggtaatcgattaccagtttactgtaatcaattaccagtagcaaagtttggtttcaaaagctgtcagactgaatttacaacgttccaattaatttcaaaat

SEQ ID NO: 2245 - DNA, 436 bp, Glycine max
tgcaagctttaacatcaaggtgtttcccatgaagtacgaatcttcatctgagggtttgttgcaaatagtacctttcttggttccatacattttcacatttccaagaagagttttttggaggatggtgtattaagtgatgatgagaatatctgccatcaagcaagagcttagagtttctggatgaaatgccaacaactcagaatattgctgctgggaaggtgccacctgtggctatcatcatctctcatcagaatcttggaggtgatgtaagttcaattttcagtacaccttacaaggcaatcatatgccctctgggacagtcttacttgtaaggaaactgatctctatggacatgaaaataatgcactaccagagcaagatagttatagttatagagcttcgaaggctgagaaaactaagtcatgaaaatgtaatg

SEQ ID NO: 2246 - DNA, 444 bp, Glycine max
tgtgtaggctccatctatccatgttgtctctccctaatctcatgcatttgtattcaagtggccgtagaatgtagagagattgaaatccttaatgttcattcaaaatctttgtgacccaaaccatagtagaattctgagtctacactggaagagagggtctgggcacttcatgtttcttcttcatccgttgctcctctataacaattttttcctcctccttttgttgatgggcaggctttttggtttggacctttcccttatgctccctaaggatccttttaaccttcatagcaaggccaaaagtttccaaagccttgtctttattagcaatagccttggccagtttcttctgcctcttttgccgaatgtcatcctagttcactagaggaataagtatgttcctcttgatgtcaaccttcattaccttcaggtttacaacactga

SEQ ID NO: 2247 - DNA, 443 bp, Glycine max
  unsure at all n locations
catgcaagcttgcccaagaaacaaagatagcgtggattaagctcagagctgtatagtaacgttacacccgattgtaaaggcctttcttgaactatacagctgctatataaaaaacctccaccgccagtatctgacagagattatttatgtgtgctttaagaattattaataaatcttcttgttcttacgtttgctttcttgtgtgcatttgtttcattgtctacctttctttntttcctcttctggatgcagagtttcatactttgttttttaaaaagaaaatcgttcattatgctttattttacatctagcagtacacaaacagaaagagctaatgtgttttttaatgctacgtggttgtctcacctactgatactatatntgtcgcaggagtggtgttttgttgagagccacaacttgaagctcaacaaccttcgatcatg

SEQ ID NO: 2248 - DNA, 410 bp, Glycine max
  unsure at all n locations
catcacatgccattgcttcgttgatgaggttgctgtgatcgagatttgcggcattatagcgccacacgtcttcaccgtgagcctttgcaaatgaggggttgccattggccatgacgcgagcactcagactgtgccaaggtgccagcattacaggactactctccagcaagagaaaactagccatgctgtgttcgccgtttctcatcaatcgacgagacagagctgattgagaatagcccctgctgcacccgtcgcctttgaatatctttctttgcaccaagaacctcatgatgcgcttcagatgtgaagtatcacaccctaaacttgatgatatctccgatagtgtcatgggacttccatgcttctctatggcttcagctatgccaagctcaatcgcacattntatcact

SEQ ID NO: 2249 - DNA, 279 bp, Glycine max
  unsure at all n locations
agcttctccatattctgtaatccataagattatgtaattttctctcagctctccatttatgataaataagaattctctacattatatttggcattatatctggatcaactacaatgacagtacaaatgaggataaaagtcataaaacaaacaatgaggagcatactgagggacaagacaaacatattgtgcagaanagcaatctgatgttacctcctccaaacttctagaccagagtgatttttctttanatgcctaatttgcttcttttgaattttta

SEQ ID NO: 2250 - DNA, 295 bp, Glycine max
attgagcgaatgaaatcggtgattgaaattgcgacactcatttgcaaacatggctaagaccaaaggattatgtcgggccttatgtcacgatactggcagatgtaggggcataggagaacgggatgatttcgatgatgctctgcagcgttgaccgcctactgcattcgcacggaggcaacgagtacctgtgactgtggcgcacgatgaactattgaaccctacgccagatgtttatgatgacccgatggaggcaccaactggtgtaaggacattgtggcagacatttctgtggaca

SEQ ID NO: 2251 - DNA, 359 bp, Glycine max
agcttctttggaccttgaacaagcaattaacttctctttcagaaccatgctatgtgctcgtgactggtccatttcttcccttcgcaacttgagttcgctattgctaccccatagagctcggcgaaatttatcccggccatactcttccttgcgagccctcttggtctcttgttcaagggctcttgcggtaattgcattctcttcccgtaacccggcacactccttccaaaatgtgtgttgcggccaacttgaacttttcctcggctaatttcgcctttcctaactcgcttttgagaagctggacttcttcgtcctcttcccgtgcttcaaaactttcttcgctgacgacttttaacttg

SEQ ID NO: 2252 - DNA, 448 bp, Glycine max
  unsure at all n locations
tgtaggattatggngtacccatcacatgtggtactaggtgtcggtcgggctatggtgcacaacaagttttccacatccacaaagcacacataaacccaccatcccctgttgcccacctccaactgaggtcacgtactcccacgtagcccatatcctcttttctctcaacaccgggtccccatcaatcctcccaagcttccccaacatcaaagtaatacaacattcgcacagcacaagctatcacagccaagcaaaacagggcaaaggcagaaaactctgctcaaaacaccaaccaaaatcacagcttttcttacttaaagactccagtaacaattccttcgttccaattcgttaaccgttggatcgactcgaanattttactggaagtctctagtacttaagcctacattgtgaccgttgggatctactaagcaacatccagaacaca

SEQ ID NO: 2253 - DNA, 397 bp, Glycine max
agcttcaagattaagatggcctcagcaaattccttatttccggaagggaattctatcaatagacctccaatctttaatggagagggttaccactactggaaaacccgaatgcaaatttttatcgaggcaatagatctaaatatctgggaagccatagaaatagggccttatatacccaccacagtagaaagagtttcaatagatgatagttcatcaagtgaaagcataaccatagaaaaacctaaagatagatggtctgaagaggatagaaaaagagtacaatacaacttaaaagccaaaaacataataacatctgccctaggaatggatgaatatttcacggtttcaaattgtaagagtgctaaggaaatgtgggacactcttcgattaacacatg

SEQ ID NO: 2254 - DNA, 421 bp, Glycine max
  unsure at all n locations
tgaaccaaaaccggtgagagtgtgaccttaaactgtgagtgaacgactagctatgagtagtaatctttgcatgaatctctgaattttagaatgagatgcataaattaggatatgatgaaggccatgattgtacatacacacaagccttttgaccaaaaagcttaccttgaatgataattatatcctttgcacccattttgagctgaatgatattgtcaaaaatttgaaccctgaatttaaataaatatctctagataccttgcttagattctaggagagcatatcgttcaaggcaaatttaccccaaatttgggggagtggaactaattgggatgcaaagaanaagagaaagcgtcagcacatacaacaaataagttgtatgctaaaaagagagagaagaaaagaataaagtgtgctgatg

SEQ ID NO: 2255 - DNA, 340 bp, Glycine max
agcttcttagtttcagatgatactgctgagtttgtagctacctcatgcactcctctaatgactatagcatcatttatggcgctaaactgctgggagttggaagccatcttctcaattaaatttctggcttcagcaggagtcatgtctccaagggctccaccactggcagcatctatcatacttctctccatattactgagtccttcataaaaatattgaagaagaagctgctccgaaatctgatggtgggggcaactggcacatagttttttaaatcgctcccagtactcatacaggctctctccactgagttgtctaatacctgagatatctttcctga

SEQ ID NO: 2256 - DNA, 439 bp, Glycine max
  unsure at all n locations
tctcaaggaagctacctagtatatatataaaagcatgtgtaacactngctataactttgatgaatgagagtcttgtgagacacaactcaaagttcaacttctgtccctttatcttccttcaatttcatgctcccccctctctctttctctccctctttcttttcctccattgaagcatcctctccaagcttcttatccaaggctcatcttggtggtgaagctccttcttccatggcttattccctagtggatggcgcctcctctcacctcttctcctttgtcttccgctgcatctccatggtggaaaatcaccattaaaggacctcattgaagctcaaagatccagcctccatagaagccccataagcaagctttcatcaagtggtaatcagagcacaagagcttcaagaggtgctccttaaacctccattaatttttg

SEQ ID NO: 2257 - DNA, 400 bp, Glycine max
  unsure at all n locations
agcttattacttgttgatgattataacacatatatatgtatatgaatcttanaataaattaggaattaatagttcaaataataaaattaaattgaaggaaattattatattaagattcaatgataaatacttttaatttattttttagtttaattatttattaactctttgtaattaaaaataatatagttcgatttaatatatacatgttgtgtgccatgtaaatattaatactatgtcatgtgtatataattcatgagatgtgataacatgttgctttgggattataacattatgactaagattgggtgtatgtgataaattgagtatgtgttgaatggtaagatacgtgtattgagatngtatacgcattaagctatgaactgtacaatcacataac

SEQ ID NO: 2258 - DNA, 428 bp, Glycine max
  unsure at all n locations
tggagaggatgcttcaatggaggataagaaagagggagagttagagagaggggcgagcacgaaattgaaggaagataaagggagagaatttgaactttgagttgtgtctcacaagactctcattcatcaaagttaccacaagtgttacacatgcttctatttatagactaggtagcttccttgaaaagctttcttgagaaaacttccttaagaaaacttccttgagaagctagagcttaactacacacacccctctcataactaagctcacctccttgagaagcttccttaagaagattcctaaagaagctagagcttagctacacacacctctctaatagctaagctcaccttcttgagatgagaagctagagcttagctacacaccccctataatagctaagttcacccncatgacanaatacatg

SEQ ID NO: 2259 - DNA, 435 bp, Glycine max
  unsure at all n locations
atgacccttgggaccgtttgatcatgcaccctggacctttcgtccggaccttatcactgttctgcagcgggagctttgagtgactaactacataactgcggtggctgatgcccgctttcgtcgggaaactgccggccgactgattaatgatggctcacgcgaacacctggggcgccctcgctgtaaacaggctatgaagctatctgacatggaagaagacacacgatctctagtacaaatgtcaggacttattctcaagctaaacccctttttgagctttcctatattccacaaaccttgcaatgtcgacgtctgtgaaattgatccacatattacctgatagttcccaaactacgccttagaacttacatcgctacagataacacactgcgcatttgcatacttagacctgcccccctatgtaacaacatgccn

SEQ ID NO: 2260 - DNA, 499 bp, Glycine max
  unsure at all n locations
aggacaatgtgcnaatgataccctgcacnnatgaaacctttgatcccattgaacacncaatnaccantcggaacctatggggagcgagtgtataacgtgcagaacttataaactcttatccgctcaatgagccgacagcagactttggatggaaatactaccgtcagtgtggacgcatgcaagtgatgatacgtagtcccacggtgtccaactgattattatgtcaaaccggcatcatgttaatgtgtaatcatgaattttcgtctgtcggtccgatagatttattattgaacattgctacaaccccagatgaaaggcaaacgtacttgaaactgctatgacccctactcaagatgccgtgctttttaacaatgtgaggtggaacatgtcattgccatatgatttttgaccgttggatcgatacgaaaatatcctgaaagctttatacttaacccatgaccatagatgaagtgtaagatgcaacaaaacaagtgcgccg

SEQ ID NO: 2261 - DNA, 386 bp, Glycine max
gcttgagaaatatactaccccatgaagtttatcaattagttcatcaacagcgggaataggaaagttatctttgattgtgatggcattcaaggccctgtaatctgtgccaaatctccaagggccatccttctttttgacaagaatgattggaggtgaaaaatggcttctgctaggggcaataatcccttccttgagcatgtcagctatcattaattacttcaatctgatccttccggctgtgaggatacctatatggcttgacttttactggtccagcaccttcaaccaatgggattgaatgaatgtgagttcttctagggggtaatcctgatggcaccatcaagactgttctataagtgtaaagtaaacagttccgcaatggcatg

SEQ ID NO: 2262 - DNA, 348 bp, Glycine max
  unsure at all n locations
cggagatgcaatagtgctaaggtttctggttttagttactctatattgtggacaattaacttgnggtcctgtctttatgatatttaagtttaatgtgccaacctgttacaagttggtctttggcaaatgtgttaaaagatatgcatgttgattaataggaacgattcaacacctataggatatgaagagactctaattttggtgtattgctaaaatagtgatttctgaatctgatgcaaggctaactcgatgatatctactccaatatatatgatatacagtcctcgaacatagaggggttttggctataaaaatatcaaatattgaaatattatctcattaatatcc

SEQ ID NO: 2263 - DNA, 461 bp, Glycine max
  unsure at all n locations
agcttataagaacanaattgccttaatcatttccaaatatgcatgtgaattatgacgcatcaacaagaatcaagccaaggctattgtgcaagcaatcaatggggcaaaacacaccaaatgattataatgatggatggctcaaattctcacaaaggtaaaatcatcactttcaaattgagctttcaaaactatcatgacatgtaaagaagaatcaaggatttcaagtcacaaaatgtcaagaacttttattttcaaaacaattacccatttcttgaacatatcctataattcaaagaaaaacatgcaaagtcgtacgtgcacatgaaattgacccaaaatattaaactgaaaatccgacgaaactaacaacattaacaaattaacacaactaacaaattaacaaaaccaacaaaactagcaaaaccaaagaacactccccccccatacttaaacaacacatt

SEQ ID NO: 2264 - DNA, 430 bp, Glycine max
  unsure at all n locations
tccacttcaattcccattcgagtacctaacgggtgtgattttcaaacgttaaaaaccagaatacacaatacccttaagttaaccgacaagcaacttttggatgaaatttactaccggcagcgtttcacgtatgcaggtaatcaatttcagtttcaatgtatgcaactgaaagatgatgctgatgttaacataatgttaatgtgtaatcatgaattttcgtttgttggtccgattgagttattatgtagcattgctagaaccccatatgatattntaaacttacttgaaactactatgacccctactcatgatgccctgctatattacaatgtgaggtggaacatgtcatgccaaaatgagtttgttggttactcgttcacaggaaaaaatcccaaaaactatgacattcccacctgatgtaccatggatg

SEQ ID NO: 2265 - DNA, 433 bp, Glycine max
agcttgtaggattatgggatacccatcacatgtggtactaggtggcggtcgtgcgatggtgcacaacaagttttccacgtccacaaatcgcgcataaacccaccatcccctgttgcccacctccaactgagctcacgtactcccacgtagctcatatcctcgtttctctcaacaccgggtccccatcaatcctcccaagcttccccaacatccaagtaactcaacattcaaacagcaaaaattatcacagccaaacaaaacagggcaaaggcataaaactctgcccaaaacaccaaccaaaatcacagcttttctcatttaaagaccccagtaataattccttcgttccacttcgttaaccggtggatcgactcgaaaagtttactggaagtctctagtacttaagcctacattgtgaccgttgggatctact

SEQ ID NO: 2266 - DNA, 454 bp, Glycine max
  unsure at all n locations
gtatgcccgagtcattcatccctatgagatgttgatgtagtattggcgatcatattttccattccttggattatagggttgaaccaagctcatgcttttacaaaaaggttcatcaagtcaagttgaaatatggaagtaaccatcctgcataattggggcaaaagatgaattgagtcacatcactgcttcgtctactgccaaacatatntacgattgttgatgtccttgctacttccagtttcaccttgacaaagatgtcatggaccatgttgaaaatctaaattgattcaaccccatatcctgcgtaaaaattcgcaatcttcaactgtacatcattcgcatacatccatgcttttcattggttgcattgctcattgcattctttccttggaaaatataataaaataaaattaaatgaacttaataattgttatcaaaaaaaataaaaaaacat

SEQ ID NO: 2267 - DNA, 416 bp, Glycine max
  unsure at all n locations
agcttttgtgtagcgaatcttctattcctttataatacaagttggtcacaaggtgttcaattcaacaatgggaaggaattgtccattagctatttggccacgaaaagaacacaaagtacagtccatataaatataattgtacagcacaacagaaacaaagattgattagcatatgcatatacactagtttttttaattgatttgtagcatatatattagttgaatagtcaagtagtcgcaaaaaaaaaggggaaaagaaagaaaggataaacggaaagtggtggtggaaattatataactaaaccaaccccacatcctacaaaaataaaagcattttgataaactttggagttttttctgaaggtgtttcccatggtggtggngtacagaaatcttttacggcaatttttaaaaat

SEQ ID NO: 2268 - DNA, 454 bp, Glycine max
  unsure at all n locations
tccagagagtgggttgccgacgacgtcgttcagtttccaatgtgccacgaaggctctagttaccatgtccctctgggaggccacggagcaccagagacggcacacgcagctcgcacgtgcgagatcgatgattggaaggttctcgaagatgaggcggaggatgtcggtggaggatagcgcagagaaatgagaattcatcggtgagattacagtgcaggaagaagaggtggaggaggaagaagaggggaaattggaattcatgaggtgcctgaaaatgtcaccgtcgtcttcgtcgcaacaacaacccattggaagtggagttaagttacgggagaaaagtagatcttttagaggataaactttcattttggtcttacagaacgtgaggcaatgaanattttaactttagttttcanatatgtaaaaaactgtgaaaagttgataagtatatgag

SEQ ID NO: 2269 - DNA, 448 bp, Glycine max
  unsure at all n locations
agcttacccattatgttntagggtttttatgatgatgcttgtgatgtttgtgtgctgaaattgcttatggaaaactgttagagatgaagggtagagttaacctatgattagaaagtgagaatgtggtgttatgagtggaaaaagagtgaggctttgagagttggaaggctaaatctggattcagtggtaaatataggttaaaatgagttaatcctagttttaaatgtcatttaggacttatgagaaagcttgggctgtgcaagagagaaaaacaaatgaccaaagtgaaggcaagagccatttctagggtaaaattgggtgttgaggagtcaaattttgattcggtagagttttcgtcgtaaaaccagtttgagcaagtttagattgatgagatagacttgtttgaggtgagaagttgctccatatttaccccatgctcattttcact

SEQ ID NO: 2270 - DNA, 445 bp, Glycine max
  unsure at all n locations
tgactntggtttacacatgattgatacatgatatgggacttgtgtgatctgatttgtgcaagattggatgagaggaaatgtggttttcgaaatctgcactttatgcagaattttgttgtgaaattgtgtagcagaattttgcataagtgcagaaaaatgctatgcgtttgctggttgcggaaagagtagtgcagaatgagttctggatgtttgctagtagatcccaacggtaaaaatgtacgcttatgcactatagacttccagtaaaactttcgagtcgatccaacggttaacgagctggaacgaaggaattgttactggggtctttaagtgagaaaagctgtgattttggttggtgttttgggcagggttttctgcctttgcccggctttcttggctgtgatagtttgtgctgagtgaatgttggattacttggatgttgggg

SEQ ID NO: 2271 - DNA, 358 bp, Glycine max
  unsure at all n locations
agctagagagaaaagattttttgatacaatgaatganattatgtatgtcgaatcaatgctgaaagttgtatagatgggtatatatataatcagttacaacaataattaacttccaaccaactaaactaactttcaactaactaactaactaccactagttctaaccaactaaactaactagttaactaacaccaagaccacttgaaacaatgccttgtgctctctacatatatatccctctatcatgcacgaggaggaggctagataactttatcacgagggtagagaagaaagaacaatgcaagacagaggaatgctgatgaggaactttgagatatgtctcagctgttcttttata

SEQ ID NO: 2272 - DNA, 247 bp, Glycine max
  unsure at all n locations
tatcacctttaccagcgattgaaaaaaactnttagcgaatgtcaagaacatgaaagtgcaccgatactattaattggtcagcagattcttaagcgggttgaggacattaatacgatatttcgaaagacccaaaagaaaaaagtaaaacttgcatatggaataagaggtcgatattctatgatcttccatattggtctaatctagatgtcacacactgtattgatgttatgcatgtggagaaaaatgt

SEQ ID NO: 2273 - DNA, 377 bp, Glycine max
  unsure at all n locations
agcttggatgttgttcttgcattatttgcgaagatatgttactccgcaaccaaatttatgtattatatcagacaggggaaccagtttgctagcagctttacaatctgaacgtcttggttggaatgaaccagatgtttcgtctgtgtattgcattcgccacattgcatcaaatttcaacaaacagtttaaaaatgttgacttataaaaacaagtaatcaatatgggtatgtttcttcctatttcatgcatcatattcttgctttattacatgtttactatttattactcattnttctatcttttcgcacatggtatgagatgaggaaactacgatttgagctaagttgctcgctatgcgagcaaagtttccacaagca

SEQ ID NO: 2274 - DNA, 372 bp, Glycine max
ttgaatctcagctatagatgcccagcattcatacctatagatggagttgtagtattggcgatcataatttacattccttggattatatggctgaaccaagctcatgcttctacattaaggtacatgaagtgaggatgaaatatggacaggaccatcctgcataagtggggcatatgatgaattgagtcacatcactgcttggtctactgccgaacagtactaggattgttgatgtcctcgatacttccagtttcaccatgacataagatgtcatggaccatgtcgaaaatctaaattgattacgccccatatcctgcgtggaagtttgtattcttcaacagcacatcattcgcatacattcatgcttttgat

SEQ ID NO: 2275 - DNA, 438 bp, Glycine max
tgaactcgctaagctcatataacttagacaattttttttatttttgccttgcgctaagcgcctcacttttgcactaagcgttattcattgcggtttgtataaggctaagcgagacttgctcgctaagcccaatagcgtctagtagtcgagtcgcgctaagcgagcacctctcgctaagcgcatgtttaaaactgtttttccctgagctaagagagtgcctatctcgctaagccaattatgcagaaaagattttctgtcataactcgctaagcctatgagttatttctcataaggcacgctaagcgagcatgatctcgttgagcgcccactgtgtttttcagtttttaatgcatgctttcaatttaaataaaagttagctaatatagttttaatggttcttttgtcacaaatggcttcaagaaaaaggaaaagcactac

SEQ ID NO: 2276 - DNA, 436 bp, Glycine max
  unsure at all n locations
agctntggactattcaactcanaatctatgtatccaaaacccctcaatttaatggattctcaagggttgagaagtgaanatgagaatggggtaaatttggagcaaactctcacctcacacaagtctataacatcaatctaaacttgctcaaactggttntacgcctaanattctgccgaatcaaaatttgactcctcaacacccaattttaccctagaaatggctcttgccttcactttggtcatttgtttttctctcttgcacaagccaaactttctcataagtcctaaatgacatttcaaactaggaataactccctttaaccttcaaatacccactaattcagatttggcctttccactctcaagtctcactctttttcactcatacactacatctcacttttaaccctangtcactatacccttcatcccta

SEQ ID NO: 2277 - DNA, 427 bp, Glycine max
  unsure at all n locations
tctttgatgctgtaaggttgttatattgtatgcatgagatatatatgtattcatttgatgcacacaacaccaacaccctttttgcacacacggtgagttgaaaaggggccctatactcaggccatgggaacataacgagtggaagtgaatctatggtcatgctgggtctccgacttgcttgataacagtgaaccctcatctagagtttttctctttgataacatattgttgctggtagtccctactgtcgtaatatgtttgtcgaaggggatgatacctctagaaaccatcaagagagatatgaccaccttgggaattatcactaaaagccttttagttcctcctgtttaggtccctaanataggggcacaaagcgaacacgctgcgtgatatttacatactgccatgcatatanatgtcatgtaca

SEQ ID NO: 2278 - DNA, 420 bp, Glycine max
  unsure at all n locations
agcttgaaggactacgttacacggatgaaggatggtcagaaggacatttactacatcacaggagagagcangaaggcagtggagaactctcccttcttggagagactcaagaagaagggctatgaagttcttttcatggtggatgcaattgatgagtatgctgttggacaactcaaggagtacgatggcaagaaattggtttcagctacaaaggaagggttgaagctagatgatgagactgaggaagagaaaaagaagagagaggagaagaagaagtcatttgatgaactctgcaaggtcatcaaggacattctgggagacaaagtggagaaggttgttgtctctgacagaattggtgattccccttgctgtttggcgactggtgaatatggatggagcgcacacatggagaggatcatg

SEQ ID NO: 2279 - DNA, 427 bp, Glycine max
  unsure at all n locations
tgtgtttcttcatcgcaatctccattttcgatgccttttgtgattctgaattntttgtatctggcctttattgtgtcccgaatatcgaatttcctggctattgtggagtttttgcaatggtggtatcaacattggcatcagtttttgactctgtcagtntggtcgtgttcttctggtgttgcttcccacctatgtgtttattatacatgtccttgctattacattcacaaattacagttttatcataccttgcttttctttgcaggattactcgaatgaccagccccattattggatatccttaaagaacaatggtcaactttcctaccttaactcttttcttgcataacatgaggtgaaacaaaactcaacaggtgcaacttagccaaaagaaattattgaatatacaacaacttgagtggtctat

SEQ ID NO: 2280 - DNA, 332 bp, Glycine max
  unsure at all n locations
agcttgccacttatctcgcccaggcgagctcatttagcccaggcgagtatggttgcttcctccacacgcaacagccttctggaggaatcttctggaggccccaagtgggcctggttgctatttgcacccgcatttttactaaggacaccccccgtttctatttttttggaactctttttccgtaacgntacgaaactttacgaacttcgtaacgatacttaatttttcttccgcaaggttatgaacccttacgacttatgtatttactcttttttagctttcgaagaagttacggaaacttacggattgcgcaaaaacacctctttttgact

SEQ ID NO: 2281 - DNA, 399 bp, Glycine max
  unsure at all n locations
tgcctcanagaggtccaggaaggacaaggcggccgaaggaactagttccgctccggagtacgacagtcaccgctttatgagcgctgtacaccagcagcgcttcgaagccatcaagggatggtcgtttctccgggagcgacgcgtccagctcagggacgacgagtatactgattttcatgaggaaatagggcgccggcggtgggcaccactggttactcctatggccaagtttgatccagaaatagtccttgagttttatgccaatgcttggccaacagaggagggcgtgcgtgacatgaagtcctgtgttaggggtcagtggatcccgttcgatgccgacgctatcagccagctcctgtgatatccgatggtgttggaagagggccaggaatgcgagta

SEQ ID NO: 2282 - DNA, 482 bp, Glycine max
  unsure at all n locations
gctttgggttgaacctganatgaacnatgatacatgaatacggacctatgaaataaccttgtgttattttctctgatggttcattgctcttaacgaagttgagcgttaaattcgcttgtacagaagactatactgagctcacgtagaatgtgcaaatgcatgtacacgccttgagcgattgactcatctacttactagagccccacaagcttatatatagcatgtcccagccgatatcaaaggtacttttacacgatgacatgtgatgcacgagagcccactctactacatctgccttgacagtgtaccgcactgtgaatgaggaagaacacatttcctactagcactagaaagaaacatagatagaatctgtaagcgaaaatacctgaaagaacctccgcatgcttgctgacatatgtatggtagatcgcacatgtactccatggtacaccgtgaatgatgaccctcccatatgatcttct

SEQ ID NO: 2283 - DNA, 331 bp, Glycine max
  unsure at all n locations
agcttccctgcacatatntaattattaaatataaagaaccaatgcacaagtatgctagacaatccaaataattgccaccacttanacctcccaattattcttcaatttataattataaccaacatacagtataaatatgatgattaatacatttctatgtagtattttatgacttaaaaagataattttaatgagatattagaaaaagttctattgctaatttaaggtatttttaaagaactaaggagctaggaatcattagtagtggaccctaagctaagggtgtattagactaagtgtagtgggtataagcaagataatataatacatg

SEQ ID NO: 2284 - DNA, 220 bp, Glycine max
cctttgctttgaaagattgaagaaatctagatctagtattgttatgaacatttcaactcaacaacttaatcccagctggtttgaaataataataatacttgtcactcataaaaatattaatgcaagttgcatgacattcttgtctgtctcactatgaattaccttaatgacctctgcataagctggttgaaaaagatctgtaaacagatttgagttatat

SEQ ID NO: 2285 - DNA, 399 bp, Glycine max
agcttgtacttagttgaaataaacattttatagtcatgtatcgttttgaatatggcaattttgcattattttccccctcatattggttcctaggagtgtttttaagtggaacagaaatagtaggcaaattgtatattgacatggaaacttaactgtttttgtcgccgtttatctggtcctacaatgtctgaacccatttgtttggttagatcatagattaatgtttttgggtgtcatgcattactatatgttcagtttgtttgtttttttaaagtatattttcagtttgtgttagtgatgcaatgaaaaattaatgattgaataaaactaatgagaacaaaattgtatctcaatgactgtgggttgcggctacggaatagcctcgactccattagaaca

SEQ ID NO: 2286 - DNA, 405 bp, Glycine max
  unsure at all n locations
tgtgcccncctctctccaactcacttgagntttacttaagcatataccttgcttgttctcttcactcatattcttacttgagcgtcagagtcttctattttgcaccctctctccagctcacttgagttttacataagcatatacttgttttgttctcttcactcatattcttacttgagcgtcagagtcttctattttgcaggtcccccctcctatcaaaggtacctctccaagatgacatgtgaagttcgagaccccactcaactacgtctgccttgacgtgtcatggttttggattttggtaagaacacaaccctcacttgaacttgaaagaaagatagagaaaatagataaggaaaaatacctaaatgaacctttgcttgcttgcttagatgtgaatggaac

SEQ ID NO: 2287 - DNA, 450 bp, Glycine max
  unsure at all n locations
agcttgtccatggtttagacatgattgatacatgatttaggacttgtaggattcaatttgggaaaaattggatgagggcaaatgtgatttcgaaaatctgcactttatgcagaattttgctgtcaaatatgtgcagcagaattttggctttgtgcataaaatgttgtgtatttgctggttgtggaaagagtagtacagattgtgttctggatgttttctagcagatcccaacggtcacaatgtagacttatgtgctagagacttccagtaaaattttcgagtcgatccaatggttaacgaattggaacgaagagaatgttactggggtatttaagtgagaaaagttgtgatattggtttgtgttgggcagagttttctgcctctgccctattnttccttggtttgatatttcatgatgtttgggatgttgaattgctcggatgttgtgga

SEQ ID NO: 2288 - DNA, 407 bp, Glycine max
  unsure at all n locations
gaaatgacaataactntatacacggatgttctgttgagtcccgtttatatcgagacgctcaaaatttagatccgaagctctgaaaaaattgaattgacaataactttatacatggatgtccggctgagtcctgtaatatatcgagacgctgcaaattgaaaacggaagctcgtaggaaattcaaacgacaataactttttactcggatgttcgattgaatcgggtaatatatcgagacgctcaaaattgagactagaagctctgagcaaatttaaataacaataactttgtacacggatgtccggctgagtcccgtaatatatcgagaggctccacattgagaacggagactcttagaaaattcaaacgacactatacttttactcggatgcccgacagagtgtcgt

SEQ ID NO: 2289 - DNA, 407 bp, Glycine max
agcttcaggctgctcgattgctccaggttgctgcatggaagggcaaaggtctgtatggtggtcagcagaggagcacaaaccacaaacccttgcaacaggtacaaatttctgattcaaggccagctgggttaccaagttaaccaatgcatccagtttgccttcaagcttcttagtctcagatgatgcagctgagtttgtagctacctcatgcactcctctaatgactatggcatcatttctggcgctaaactgctgagagttggaagccattttctcaattaaatttctggcttcagcaggagtcatgtctccaagggctccaccactggcagcatatatcatacttctctccatattactgagtccttcataaaaatattggagaagaagctgctccgaaatctgat

SEQ ID NO: 2290 - DNA, 454 bp, Glycine max
tgcttgtggagcttctatggaggctggatctttgagcttcaatgaggtcctctaatggtgattttccaccatggagatgcagcggaagacaaaggagaagaggtaagaggtggcgccatccattagggaataagccatggaagaaggagcttcaccaccaagatgagcattggataagaagcttggagaggatgcttcaatggaggaaaagaaagagggagagaaagagagaggggggagcacgaaattgaaggaagaaaaagggagagaagttgaactttgagttgtgctcacaagactctcattcatcaaagttacaacaagtgttacacatgcttctatttatagactaggtagcttccttgagaagatttcttgagaaaacttccttgagaaacttctttgagaaaacttccttgagaagctagagcttagctacacacacccctctcat

SEQ ID NO: 2291 - DNA, 435 bp, Glycine max
  unsure at all n locations
agcttgagcttggtcaaccccgtaatccaatgaatggaaattctgattgccaatacttcaacaacatctcatagggatgaatgactcgggcatactttaagcttatgcacggaaaatgtaattatgaaattgagatgcccgaagaaacaccatttcctagttaaccatgcattaggtaccatgttcaattattttgttttggtgttgtgtgtgttttttttttagaaatgggtttatgatcccaacatggttggctcatggtgcctaacacatgcaactaagaatgtagtgtgaagtttcacgcttccccttttttgttttggtttgtagaggaaaacgcaaggatgagcaaacatganaacaaatggtatccaattntgcagatcaaaaagtttgttgaacgcatatgcatgatgatgccatgactcatgcaaa

SEQ ID NO: 2292 - DNA, 432 bp, Glycine max
tcaagtgaactagggagcagataagaagttctcacccggtatgtcgaaagctagaaagaggagcctaggcaaaagttagggaaataaaaaaggaaaaaaaaaataggggcgtgttatcaaaggttttgtccaaaatctaaattgtaaaagtctctagtcaatatttgaaatgacacatggtcatgcttcattatcccaaacactaatttatcccttgttaccccttctgagccaaagcatatttgttttcttttaaaacaacaacaacaacaacaaaaacccgtagtagcaaccaccgctgagccggcgggaagagcaaggcaaacatcatatgcatgaggtaagctctatgttgggcaacaatgatgttaaggaaaaaaagcagaaagcatatctgccaaaggcgagcaaagcaaaaagagacaaaagatc

SEQ ID NO: 2293 - DNA, 369 bp, Glycine max
  unsure at all n locations
agctttcanattaaagtaccaaagtacacaacataaactaatacctactaaatataaattagtcatatccaactacacatcctaataacaaaataaaacaagaaatgagtcttcacttttcttcatttttatactagatctttattagcagccttccttctagtgaaccttggtgttggcatgaaaagtaagggtgctgttggtgggccatccacaacaggtgcgtctactgttgaagtgtctgaaatgttcttttgtttgggtcttcttatgtttagcttataccttgctactggtggaacatcaacaataggtgtagggacctacatgcaaatgccaaacatgaataacacttgcaatatatataaa

SEQ ID NO: 2294 - DNA, 441 bp, Glycine max
tgtaatggtaagaaaagagcaacacacacaatcatctaatatgcagcaagtattaaaaaaaatagtaagtataaaataaaagtgtgtgctgccaattaagaaaaagaaaagctaagtgcggaaaagcaagtaatagagctggaataaaaagaaaaaggttgatctaaggatgaatgctctcctagaacctaagcttttgcatcctagaaaaaccatgaattgtttgcagcccagcctcgttacaagcctacaaaagtccttcgaattcagtttgtgtgttcttgactgtatggcatgagatgaattgcaaagattgagacttttgttagttgtggattgttgaataagcctaaacacttgtgcttgagggaaacaatgactgtgaggatttggttaacgatccttccttgatatctgtcatgcttaccagcttatttcagc

SEQ ID NO: 2295 - DNA, 267 bp, Glycine max
  unsure at all n locations
aaataggactaattaatttgggagacgctaacctataccaacatacatatcattaagcggcaactgtaaccataattgattgatgtaaccaccagttgcaattattgatggttattccaagtattgaccaataanatcacagtctataattgcgaataattcctcaatatttcccagcacatatgattgttaattggtacgtggcactaaattcttacttttccttcccttgcctactttgacttgtgcttgtgcaacaagtgatga

SEQ ID NO: 2296 - DNA, 431 bp, Glycine max
tgaaggattataactgtttcagtattatgatggacaacatgcttcaagtatcatagcttacaacattttctttttctggatgcagcgtgaactttaagcaatgtatactcgtaccataaaaaaaaaagttggactgtcttcggaaaatgaggcacaaaaccttgaggcactgtttgagtccataatcagattcagatgcctccctggaccaattattgacgaagataaagcactacaaatgtctgttaatgttgtttgttatatcacttttcttgatattgcttatttcagtgttctgatggatgggtttttttacattcccaattttctgtatagtgctatcatgccaactcattagccatgtaacaattagtatcatgtactagtactaaagctagttcttattaccatggacatgctcaaatgaaatc

SEQ ID NO: 2297 - DNA, 386 bp, Glycine max
tgaaggtttgtacatgaccaaatctttagttaatcttctttacctaaagcagtctttgtattcatttaaaatgcatgaagatagatcagtaggagaacaattggatttgtttaataagttgattctagatcttgaaaatatcaatgtcaccattgatgatgaggatcaagctttgctattgttgtgctctttgcctaagagttactctcatttcaaagagactctactgtttggaagagacttcatttctcttgatgaagtgcaagctactctgaattcaaagcaattgaatgaaagaaaggaaaagaagtcctctacaagtggtgaagggctgacagcaagaggcaagaccttcaagaaagatattatatctgataagaagaagc

SEQ ID NO: 2298 - DNA, 341 bp, Glycine max
  unsure at all n locations
agcttgtagtttattcaaacgacaataactttatacaaggatgtccgattgagtgccgtaatatatcgagacgctccanattgaaaatggaaactcgtagcaaattcgaacgacaataactttttactcggatgtccgattgagccccgtaatatatcgacatggtccaaattgaaaacggaagctcgtacaaaattcaaacgactataacttttcactcagatgtccgattgagtcccgtaatatatcgagatgctccaaattgagaacgggagctcatagcaaattcaaacgaccataactttttacttggatgtccgatggagtcccgtaatatatcg

SEQ ID NO: 2299 - DNA, 401 bp, Glycine max
cttgagcaaattgaaatgacaataactttatacacggatgttcggttgagtcccgtaatacatcgagacgctccaaattgaaaacggaaactcttataaaattcaaacaacaataactttttactcggatgcccgacagattgtcgtaatttatcgagagatgctccaaattgaaaacagaagctcgtatcaaattcaaacgacaataactttttactagtatgtctgattgagtcccgtaatatatcgagacgctcaaaattatgatccgaagttctgagaaaattgaattgacaataactttatacatggatgaccggttgagtccctgtatatattgagacgctcgcaactgataatggaagctcgtatgaaatgtaaacgacaataactttttactt

SEQ ID NO: 2300 - DNA, 168 bp, Glycine max
tgcgtttatacgatgcgtgcgccttcttgccccgagacggagccacaacaccttttattcatgccgactgctcaggccatgcctacggtgacgtccatgccagctccgttacacaccccgcacccgtgcaaccaagatccgaattactaccggatccactgcccatgc

SEQ ID NO: 2301 - DNA, 296 bp, Glycine max
gctttgaatatataaataaataatgacctgtaacatcaacaaagacatcatcactttttcgccagtgctttcgatggtgtcgatacgtaaagatagccccaagacacagaatgcaaatgcccacacttgctaacgacattttgcaatttgatttgtgggctgaagctgcaagaagaggcaaactttaaagagctacctagctaatcgtttttattttcattttatttctagatcttattcttcaagttaaattacacattctttaatatgtaccataacataattacaccctcctt

SEQ ID NO: 2302 - DNA, 314 bp, Glycine max
  unsure at all n locations
taactgtaatgaattataacttcatactacgagtgcgagtttattattcccatattttctctactatgatgttctatattcagctagtacatatttcaatgttcttcaagtgcatttatccctaattgtgggatcattcattattggaaaatttggaatactgaaaaaagtttgctacttacaggaaaaccaccattcatgtataacatgggacggcttgctgaatactgcagtgtgccaacctatggagtgtctgtattaccagactcattgccatatacagagtctgcaattctaagatgtgctgtgnttac

SEQ ID NO: 2303 - DNA, 503 bp, Glycine max
  unsure at all n locations
attgaaccccttgagaccccgngatcctcagagtcacctgtggctgcagctncatggaatcaactagatgccctacttctaaaaatggctaatccgatnaccaaccaacaatacccatctttttccttcgtgcaagcaccatcggccgcttcggtttctagggtgggtgcgccttctttgcccgtgccggtgcaacaacaccaattatccatgccgacttcttttgccatgcctacttttgccgccatgccaactccgtttccacaccccgcacccttgcaaccaagtcccgcatcattaccggctccacttcccatgccagctctgcatcttcccgctctcgatcacgtttgtgctgctattcccattttcgacaacctcttcagtactgtccttcgttatggccatacaacagctcctcatgccaagcatggagaaaatatagacatcgtgctggttgagctgggacctggatntttgggactatatggctcatgcaagcg

SEQ ID NO: 2304 - DNA, 462 bp, Glycine max
  unsure at all n locations
actcagctgcttctacaatctcccnctttntgatgatgacaacttctgttatcacgaagcactttcacacacacacacactnttcctagtcgatcactctcataaatttccattctccccctttgtttttgaatttatgcttctcttaaaattaagttgattactcatgtgacttcttgatttaatccctatttctctccccctttggcatcaacaaaaagccaaagtgcgtaacaaatttgaagcatgcaaatacaactaagcatccacacaacattcatgaaaaatataaaccaaatcatgaagcaagaactatgaggcaagaaccacgaatataaaatccacgtagtcaaataacataattaatatttgttcaaacatactatgcaaataaagaaatagtaaattgttcaaatatcatcataatatagattatttggataagtcactgacatctattag

SEQ ID NO: 2305 - DNA, 417 bp, Glycine max
  unsure at all n locations
catgcaagctttataggtgaaatcaggtgcagccattttccttagagtgtaacagtgtangtttgaactacagctacccttanatgatatccaaatgacttgaaattttgtgagcaacaccctaaaaccatgaaaagatagcacaaaattttcagacaaaaattcaaagtctaactatggaaactacctaaggaaagtttagaaaaataaaacaataaaacttgaaaaaaaaaactggtaaacaggtgattttggctagctagagacctcagccaaactttggctggctgcagcagtatgggaaatttttttctaccccaaatacatatataataatagtcattctgatacccggagcaaaagttatggccgtttgaagttntggtaaacacaagttctcaaatttttttgaatctc

SEQ ID NO: 2306 - DNA, 426 bp, Glycine max
  unsure at all n locations
tcntatttaaatttcgaacgtcttgatatattacgggactctataagacatccgagttaaaagttaatgtcctttgaattttctcggagcttttgttttcaatttggagtgtctcgatatattacgggactcaatcggacatccgagtaaaatgttattgtcgtttgaatttgctcagagtttcttttttaaatttcgagcgtctcgatatattatgggactcaattggacatcggagtaaaaagttattgtcgtttgaatttgctcagagcttctgttttaaatttcgagcgtctcgatatataacgagactcaataagacatccgaggaaaaagttaatgtcatttgaatttcttcgaagcttctgttttcaattttgagcgtctcgatattttacaggactcaatcggacatccgagtaaaat

SEQ ID NO: 2307 - DNA, 364 bp, Glycine max
  unsure at all n locations
ctcggatggatctcatgctatgatttatcgnattggtgattcaaagtcagtctcataccattggtggttcgaactcaaatcgtggtactccaggttcgtctaacggcattccggttactttgattatgacagtttctgcaattcgagacatttctttgggttttccgcattttgatggcaatacaccggtcttggagtggatcttcaaagcagagaagttcttcaattatcataacactccagatctggatcgagttgatattgcttctattcattttgagaaggatgtgattccttagtttcagatgttgcaacggatgcaagttgtgagcatttgggctgagttaacacgtgctttggaaac

SEQ ID NO: 2308 - DNA, 456 bp, Glycine max
gcttatcccctaatgcacctattccattcctcccatggtcatcatcaccataaacagcaataacctctctccagccaaagtagttaacaaagtctgctattgcagtcatttcataaatgtcactaaaagcagttctaataaagaatgggaattgaagtgaagaaagagtagggtcagtggctgtaaatgatagtagaggaacttggagctcgttcgctatatgagatatgacatgagctgttgtagacgtctggggaccgattatagccacagtttgtgttgccatgagctgcaaggctattacacacaatttatgtaaaccaagagtaataatctgccaaactttgaagtaacttgtctaatagaaaaaaagatgcttttaaagttttaacacataaaaaagatgggaatattgtgaaggacgtaccctcggcaatgctcagaaaacctctgtat

SEQ ID NO: 2309 - DNA, 398 bp, Glycine max
ttcttaatcaaaactcaatagtcattattaaaataatatctatctagttgatccgtcattgtgttttgtggttgaacttgttcttcttgtattcaaggatctgttgtgcaataagatccaactcattctggggatggccattgttaacatttctatattcatccatttgataagatgaactatgtaagttgaactactgcatatgttgtggttgtgcatttcatgtggctgcactacaaaatttggaggaggaggtaaaacccaattatgttgattaatgtagggagtaacaatcatgtcaatgtcttttaaggttgtgtcatggatgcttcttcttttcctctttttctttgaggcattcttgccgttaaaagtacttttgagcatgacttgtaact

SEQ ID NO: 2310 - DNA, 449 bp, Glycine max
  unsure at all n locations
tctgcaagctggaaccatttatcctatctccgacagccaatgggtgagtcccgtctctgtagtcccgaagaaaaccggcctcaccgtgataaaaaatgagaaggaggagttgattcctactcgggggcagaacagttggagagtctgcatcgactataggaggctgaaccaggttaccaaaaaggaccattttcccctaccattcattgaccaaatgctcgaatgcctggcaggtaaatctcactactgtttccttgatggtttttctggttatatgcaaatcactattgctcctgaggatctggaaaagaccacattcacctgccccttcggcacttttgcctataggaggatgcctttcggcctgtggaatgcccctggtaccttccagcggtgcatgatcaatatttttagtgattttttacaanattgcatagaggtgtttatgg

SEQ ID NO: 2311 - DNA, 142 bp, Glycine max
  unsure at all n locations
gctgcanaatcccttnttgttggtgtgtgtttttttttggtttgtgctaaaggtggtcttcgtcattggaagtgcggtagacaggctttgtggttgatttagggatggcctttgtggataactgggtggtgggtaaggagga

SEQ ID NO: 2312 - DNA, 448 bp, Glycine max
tagagttaagtctcgtatcggtttaatcgattatcgatatctcataattgattacactgctgtttgagacaatgattgatttagtcaggagtctccactttaatcgattaccaagtggattaatcgattacttctctctcgttcatgtgttcagaggtgaaaaagaacactttaatcgattacataggtcatctactcgattatattgtccttgagttgttttctagatgttggatgaacactttaattcattacttagataatctaatcgattactttgttaaaataatcgattaccttatagatttaatcgattactgacaattataattgttttctctataaataaccttatgttagaccttgtggcctcaataatcttaagagggatagacttagaatgctgaagaagcagcaacaatcaatttaataatgttctttaaacatg

SEQ ID NO: 2313 - DNA, 361 bp, Glycine max
agcttgccactgtagcagttaagggaacaaatgaagtgttattaactaataagatttcctgcatgttattaactaataagatttcgttactgctttcagccctttgatgatgattatcgtagccatcatgggtgccttcatcctttcagaaaaaatatatcttggagggtaagtactcaatactcatattcactcccaatgaacatatcttgttttaggcacaaagaaagaagcttaaacgttttaattgactcactcttgtagcataaactaaaagtttggtgtttcttacataaaagttgaaacatgacaatcttaaaaagctatagtcattagagcatgttaggaactgggctgattt

SEQ ID NO: 2314 - DNA, 413 bp, Glycine max
  unsure at all n locations
tgacatgctattgaacaagcagttatatactctgcttcacttgtagagagtgcaacaacatcctgtttcttagagcaccaggagatgggagcacctccaaacaataaaacatgccccattatgctttttctgtcaagaacatctccaccacagtctgagtctgaataagccacaagttgtggctcaaccttctctttctaatgtggaaatagaacaccaaagtctagtgtgctctcaagtatctcagtatccttttagctaccatcatatgtgaatgtcttggatcactcataaacctactgataactcccacattgaaagtgatttctggtctggaatgacaaatgaatctgagactcccaacaatntgcctatacaaggtacaatccactacaggttcagctttacattta

SEQ ID NO: 2315 - DNA, 361 bp, Glycine max
  unsure at all n locations
agcttgcttgtggagcttctatggaggctggatctttgagctntaatgaggtccttcaatggtgattttccaccatggagattcagtggaagacaaaggagaagaggtgagaggaggcaccatccactagggaataagccatggaagaaggagcttcaccaccaagatgagccttggataagaagcttagagaggatgcttcaatggaggaaaagaaagagagagagagagaaagagagaggggggagcacgaaattgaaggaggaaaagggggagagaagttgaactttgagttgtgtctcacaagactctcattcatcaaagttacaaaaagtgttacacatgcttctatttatagact

SEQ ID NO: 2316 - DNA, 399 bp, Glycine max
  unsure at all n locations
tgtgtgcattgtatacgctagaatatgttctgttnttggatgctacatttctaattgcaactgctatgaaatcaatgatgttgacaacaacaacaacaattgttgttgcctcttggaacaccgcgagttgtacaagaaaaattattgtctttatgaagaatcacttcagaagcgtgtcacaagatcaggtcctattcccaaggctagtaataacaacaaaaccggtgtgatacggttcttgaaccgtgacggtgaagttgataggccaaagagtagcgttaataatagggttttgaggctggcgccgccatcgacggtgggcggngcggngctggcggtgaagtatgcggaggtgattttgtccgcagagcagtggttgcacgctccggcaacggtggg

SEQ ID NO: 2317 - DNA, 330 bp, Glycine max
  unsure at all n locations
agccaaaaactttaacaatgaccanagcaagacatctacattcaacttcagtacttgagtgtgcaacaacaaattgcttcttagaccactaacagatgagattggggctgaagaagacacaagcgtcgaaggtggaccatctgtaatctgggtcagacgcctagtcagcatcacagaaagtcacaatagaaaaaaggtgcagaagcaagcttgaaatgcgagccccacgagatggttcccttgagataccgcggtatccccttatggtatcatagtgtaacgccctgaaatttcgctaactggaaatcgattttaatgtatttctcatct

SEQ ID NO: 2318 - DNA, 426 bp, Glycine max
  unsure at all n locations
acattntagcttcaatgcgagaagacatactcatggctaggaatccaaaatttggttttagagttagaaaagcatgaaaattaggacttgcttgtgagagtttttactcgaatttgggctgccccatgatcgatactttgcacctaagtgacgtgggaaatgcttttcaatggtatgtggatatatgtggggcatgaaattccttgccaagtgtgaatgattattttcctaaatgaatgtatgatagcacgtaattcccttttgaatgcaagtgtgtgcataatgtaaatagcttgccaatatgaataaatgtgagtgaaacaataaaatttgtatgatatatatttcanatatatgtangtagttggtaatagcaaatgtttaggatataaattaggtgtgaattttgacgcaatgccttgagcg

SEQ ID NO: 2319 - DNA, 226 bp, Glycine max
aaaacccagccgaggcgcttcccgaacgtttctggtacgtttccgggagtaattacgcgaagattctcgaccgttcttcaacattcatcgttcggtcttcgttttcttcagcttcaacgggtaagtacctctaaccgagcttttctattattttatgtacccgtgggggccacaatttgttcatgtattttattctcgagtcattcgttttattccccctttgacg

SEQ ID NO: 2320 - DNA, 420 bp, Glycine max
tctagaaccctagcttgttccaaaaatcaaaccacatgttgattaagttatataaaatattttttatttaactacatgtctttaaatttaaatcttaaatatataatcatattaaatatttagagaaagaattttaccgtgtataataactctatcgtctatgattttaattcacaaaagatttcaatcctaagagcaacttaatagaaatacactacactacccaaatatacatggtggtatctagctcgacagatatttatcaaaataataataatacatgtcgtcttaatcttagattattattgattatgtaggctctagcttctcttaatatttttcctatcatgcatgtttcctttgttgggtgtgttggtggtgttattattattattattaatattattatcatagaatatg

SEQ ID NO: 2321 - DNA, 372 bp, Glycine max
  unsure at all n locations
agctatgcatctcatatctcttccgcaggccttctctcttgccgagctacatgaggataagttggaggaccattgccgcccttaccgacctcgtcacacacccatcaccaccactgcgctaccagagcgagctatcttaccttcaccacccaacctggcctgcaccccttcccattccagaccccaagttaaacatctaaccccatgagaaagggcccgcgaacgcgaacaaggcctatgctataactgtgacgacaaataagggcccaaccatcgntgtcgcgctcatttctttntggtgattgccgacaatcctagcaccactatcccactcgaaacctatgttaccanaccacctatcccaccttcttt

SEQ ID NO: 2322 - DNA, 403 bp, Glycine max
tcaagtaagaaccttgaacgaaaatgaggaagatataagacgaaaaaagaggtttaagggcttcttaccaaggctttgagagaacaagtctcaaaacactaagatagagctcgcattacgacgaaaatggtggcctttccctccttgagtatctcgtgaaaatggaacagaatgacagtccaagttgtgatttttggaaagaaaatggtgagaaacgatggaaaatgatgcaaggctattgatgtattagattgacaagcttaaatgaccatagtataggccatcttggacatgtcaatgctagccataagtaagtagtttaggttttgaatttttagccaacaatggtaaaaaattggttttaatgaaatagataaatcatatcttaaatgtctagaataac

SEQ ID NO: 2323 - DNA, 298 bp, Glycine max
  unsure at all n locations
agcttcanaggactaaccgcctgagatatcttttgtttccccttcacaaagtttcaaaggactaaccgcctgagaactttgtcgtaacacattggagggtacatcctttgtggtacaagtagagggtacatctactgggttgttgtgactgagaacaagagagggtacatctcttgtggattagttcaagtggagggtacatccacttggttgttcaaagagaacaagggaggggacatcccttgtggatcttttgcttgaaaggatattaccaggttgaaaagaaatctcaatgact

SEQ ID NO: 2324 - DNA, 248 bp, Glycine max
tctaaggaggtgagcttagttatgagaggtgtgtatgtatctaagctctagcttctcaaagaagtattctctaagaagctactcaaggaatgtttctcaagatagcttctcaaggaagctacctagtctataaatagaagcatgtgtaacacttgttgtaactttgatgaatgaaagccttatgagatacacttcacagttccacttctttccctcttttattccttcaatatcgtgctccccccttc

SEQ ID NO: 2325 - DNA, 357 bp, Glycine max
ctttagctatgtgtgctgatgttggctacacagatagagcatctgaaattttttatgaaatgaaaagttctgggacttgccagcctgacagttggacattttcatccatgattaccatgtattcccgcagtggtaaagtttcagaggcagaagggatgttgaatgaaatgatccaatctggatttcaacctactatttttgttatgacatcactcatctgctgctatggaaaagcaaagcgaactgatgatgttgtgaagatatttaaacagctcctggatgtgggcattgttccaaatgatcacttctgctgttctcttctaaatgttctgactcaaacaccaaaagaagagcttg

SEQ ID NO: 2326 - DNA, 459 bp, Glycine max
  unsure at all n locations
agctngcagctattagaagagaaagaacatgtgattagaaatatgacagaatatgttagttagtttgtcagatggattgtgaaggaatgcattaaccacatcccgatgagagtgtgatccttaaattntgagagcaacaactattatttagtactgatttttgcatgaatctttgaagtatagactgaatgcatgaattgaggatgatgaaggccatgttttgattgtgatagctacttagccaaaaagatgaccttgtgcttgaatgaattatcccttatttgagttgaatgaattattgattggttgaaccttgagcctatacagtgttatctcctactaccttgtcttaggttgtaggagagcatcatcaacaaaaagcttggttcaaagaanatttgtcccanatttggnggaaaatactgggtaagaattgaaatggtccaagtaaatagcatg

SEQ ID NO: 2327 - DNA, 456 bp, Glycine max
  unsure at all n locations
ataacgctttcatctcttccaccaatgtagagaacactcttgctgtatgtatgtgtgtatattntgttnttctttntaaaaatttatatatatatatatatatatatatatatatatatatatatatatatatatatatatatatatatataaatctatgaaaaattgtacaatccacaggtttatcggcttgaacggtggaaaagctgaaccgctctataataaaaaaaatattaaaaaagtcaaagcaagatattggattcaaatgtggtgtacatacacgacaaattttcaactgcacttcgctcttttaatgacacttttctatgtgtctgttacccgcaaattaagcgcgaaaatgacatagagcgtgtgaatataaattattttgttttgctttatacaacattgaaaagaccaacataggttatcatgtatgtatctttgagatataag

SEQ ID NO: 2328 - DNA, 430 bp, Glycine max
tgatttctatacaaaagtgattcatgtaaagcgactaacatactcccccaaatttacaattttacttgtcctcaatcaaagaaagaacagttcacttgtcctcaagtgacaaagacaatggccaatcaaaagaaaatggtgtttgattcatcaaggacgtcaaccatatgaactgaataccatggaatgcttaaatcaattacttctcacaagcatgcagttttttcaaagataagagcacaagtattagagtcacagctgaaataagctagtaagcatgagaaatcaaggaaggatcatcaaccaaaacctcacagtcattgtttcactcaaactcttttttggcttattccatcataaacaaccagcacgagttccaaccttttgcattaatctcctatcatacagtaatgaacacacaaaaatgaat

SEQ ID NO: 2329 - DNA, 445 bp, Glycine max
tgaaggtaaactagatgccttggttaacctggtaacccaactggccatgaatcaaatatctgcacctgtcaccagactctgtggtttatgctcctctgccgaccaccacacagacctttgtccttctgtgcaacaatctgaagcaattgaacagcctgaagcttatgctgcaaacatctacaatagacctcctcaacctcaacaggaaaatcagtcacaacagaacaattatgacctctccagcaacaggtacaatcccgggtggaggaatgatcccaaccttagatggttgaatccttcacaacaacagcaacaacaaccttattttcagaatgctgctagcccaagcagaccatatgttcctccaccaatccagcatcaacaacaataacaacaacaaccccagaaacagcaaacaattgaggctcttccgcaatcttccctt

SEQ ID NO: 2330 - DNA, 474 bp, Glycine max
  unsure at all n locations
acccgctgcatgcctgctntgtccgcanatccctcatttaagactacacccaatttagacaaccctcttaggtttagactaacttaaactgagttntgtccgcagatccctcatgtaagactagactcagctcaggtagcttactaaagtttagcctaagctgtgttcgcagatccctcatgtaagactaggcttaaactaaacagcataattggaacaacataattaanaccaaaacttaacacgcagatccctcatgtaaggctaagtttcaatactacttcaatcaagttctaaagcaacagtacactttccaatgctaaagtcacctaactgtgcacacaaatgggtgatcagaccaaaagcatacaaacattaagcattgaacaaagaagacataatanattagatattaggtatttacatcattnggtcattagaaatccctaactatgggggttagctagccattac

SEQ ID NO: 2331 - DNA, 447 bp, Glycine max
gactcaaggagagacttagaatggctttatagtagagtttaaaaaaactataaaaaaaaagactcaacaaacctctagctttggcccttgtttttcacactaattttcaatttaaatttaggaactaagattggtataaaataggaaccaattatagaataaattgtgagccaaaacaacaagcacacttccctttcactttttttttcatggatactgatttttctgctaaattgtgtgatttttagtattttttccttttattcaaatcacttggttcttttattatgactttttttcggatgtctagaaaattcagtaaaactttcagctccaaattcaaagtaaccaattctcagtaatttttacaagtttgtatgtcccagttgccagcacgagtgattttttttttaagcatggtatattgattgccttgggcttactttc

SEQ ID NO: 2332 - DNA, 400 bp, Glycine max
  unsure at all n locations
catgcaagctntntcacagtcaactgtgaagaccatgcaaggattgcttctggatntagcttcagctataacctcattagcaatcaacacaccatgaagaatatgccttcctttcagaacagcagtttgcctttcatcaatgaggtgagggaaaacaagagccagcctattagccagaattttggacactattntataaacacaccctataagagagatgggtctataatcattaagagattgagggttaatgatcttggggataagggctatgaaggaagcattgcttcctttggggtataagccattgatgaagaactcatccaagaaccgaataaagtcaggttttagaatctcccanaacttcttgataaaattaaagttcaagccatccgagcca

SEQ ID NO: 2333 - DNA, 453 bp, Glycine max
tcctagcggtttctaattatatgggccattagatctatcatatgttgacaatagccgagaagtccatggatctcctcgggggcggagtaggtgtccgccattgctttggccttggctagcaatcggggaagttcttgactcccgttcaaggtaagagcaaatcggtccatccatatcgttgcctcttgatgtaacgagtcgatcacccttcctctagcctccttttccgcgtacacttgggcgtactcgtccgccactctatgctcatgggctggggctagatttagttcttcttggtacttggtgatgatagctaacatgttggtctctgtttcgcataaccgctgagacaagtttcttttggaccttgagcaaaccttcaactcatctttcaagatcaaactgtctactcgtgattggtccctttcctctctccggagcttaagctcgctg

SEQ ID NO: 2334 - DNA, 270 bp, Glycine max
  unsure at all n locations
agcttgngcatatcanatcactcctacatctcatctctagcatgcattntctttctttacccactcctcacgtttggttttttaggggaaaaacaccataactaaacgcgccgcaagggatccctatcgaaccagatccaaatctagaacgatgggtgatcaagaggagacacaggaacagatgaaagccgacatgtcggctctgaaagaacaaatggcctccatgatggaggccatgttaggtatgaagcagatcatggagaagaacgc

SEQ ID NO: 2335 - DNA, 427 bp, Glycine max
  unsure at all n locations
ntcataggtgaaatcaggtgcaaccatttcccttagagtcctctcacgaggtggaggttgtgccatgttctcagaatgtgcaaaatcagaatgctcagaatcagaatgctcaaaattataatgctcaagatcaggatgttcaaaatcaccaataacagaatgcacagattcaccagttatggaatgctcagaatgatcaaaaggtataaaatgatgcctaactaatctatgaaatgtcctatctatctcaggatcaaagggttgtaagtcagatggattgcctctagtcatacactacattcagcatgcacacaactagttgctttgtcatgtaaataaaggtgtaggtttgaactacagctaccctcaaatgatatccaaatgactttgaaatttgtgagcaaccttataaaatgatgagaagata

SEQ ID NO: 2336 - DNA, 422 bp, Glycine max
  unsure at all n locations
agctngacctttgcccatgctacccatgtctaaagccaatggtgcaactccaactggngcatcaaaggtagtctgtaaaagtataaaaaggacgtgactttaactgcatctcaaaagggtccctttttcttgcatttataccaacttatcaatatatggtaaccatttcttagtacaatctcatcaattatttttttcttctagctcatatttgtctaatagtaaaaataagtttcatgaagtacggatgaccccagaatgaatggaaagaagaaaaagtattttgcggaagtagtcaagatttaattcgtaaaagggtagcaaaaatatggagggttgacaaatgaaaagaaaataggggtagtttaatctccacaatgaaaactttacatttctaccgctagtatatatgaatagaaatt

SEQ ID NO: 2337 - DNA, 443 bp, Glycine max
  unsure at all n locations
nttcaaagttntctggttntctaaaccttgaaaacttgtgttattcatcttttcattctcttctccctttgccaaaaagaattcgccaaggactaaccgcctgaattctttttgtgtctctcttctcccttttccaaaagaacaaaggactaaccgcctaaattcttttgtgtctcccttctcccttgtcaaagaattcaaaacgacacagtctgagaattcttttgattcttccctttccctaatacaaaagtgttcaaaggactaaccgcctgagaattcttttgtatccccattcacaaagtatcaaaggtttaatagcttgagatctttgtcttaacacattggagggtgcatcctttgtggtacaagtagagggtacatctacttgtatttgactgagaacaagaaagggtacatctcttgtgaatcagttctagtgg

SEQ ID NO: 2338 - DNA, 295 bp, Glycine max
  unsure at all n locations
agcttcaagattaggccaaactccacttctatatctgatntcaagcttacataggcgtctttgttcgcgctcgagtgcttagcgcacttctgaaccgcttagcgcgtgtcataccctaatttcgttcggggaccattgtttgatggcatgcaacctttgcttgaccgcttcgaggtacttggcacccattggtgcacaatacgtgaagttccataacgtgcccgaagtcaaaagaaagcattgttgcacgatccgtgaagttccgtaacatgccgaaaatcaaaaggaagcattg

SEQ ID NO: 2339 - DNA, 435 bp, Glycine max
tcatcctcagatccctcttgttggactaggctcaacttatgtagcccttgtaggtttagactaatttaaacaaagcttcatccgcagatccctcatttaagactaggctcagcttaaccagcttacgtaagcttagactaatttaacctaagcttcgtccgcagatccctcttgttgtactaggcttaaattaaatagcattatcatcacagcatattaagaaagctaaaacttaatcctcaaatcccttttgttgttctaaggtaacagtacatttcccaatgctaaagtcacctaactggacatacaaatgggtgatcagaccaagagcatgcagaaattaagcattgaaagaagcattgaacacaggaaacacaatcaattagatattaaagtaattacatcagttgttccttagaaattcctaacaagagt

SEQ ID NO: 2340 - DNA, 249 bp, Glycine max
  unsure at all n locations
agcttgagatgaagaagtgttgaagggtgaaacttcctgcttttattgttgaccacagagtggtacctggagatatgtcgcggnggtcaggagaccttgnggacgtcaggtggggtgctattgcccaaaaccaagcttgaccaatcccgacccaacccgggcatagtcggtcagtgagaacctgtgatgtacctaaacaggagagctcctggcagtcaacggataaaaggaacaaagaccacaaagcaa

SEQ ID NO: 2341 - DNA, 443 bp, Glycine max
tcaagaaaaatggcctcagcaaacttcttatttccagaatgaaattcaatcaatagacctccaatctttaatggagagggttaccactaccggaaaacccaaatgcaaatttttattgaggcaatagacttaaatatttgggaagccatagaaatagggccttatatacccaccacagtagaaagaattgcaatagatggaagcacatcaagtgaaagcataacaatagaaaaacctagagatagatggtctgaagaggatagaagacgagtacaatacaattgaaaagccaaaaacataataacatctgccctgtgaatggatgaatatttcagggtttcaaattgtaatagtgctaaggaaatgtgggacactctacaattaacacatgaaggaactacagatgttaaaagatctatgataaacacattaactcatgaata

SEQ ID NO: 2342 - DNA, 294 bp, Glycine max
  unsure at all n locations
naagcttgatgatatggtcttcgccggcaaattgatcgaagtgggtctgaaaagaggcaaatctgatcatcttgctttgataaatgcaaaaaaaaaaaaaaaaaaaaagctggggcaaataaagagggtgaggatgaaggagaagcccgtgctgtgactgccattcctatacagcccagtttcccaccaacccaacaatgtcattaactcagccataaccaacctttttcttacccaccgcccagttatccacaaaggccatccctataacaaccacaaagtctgtctaccgca

SEQ ID NO: 2343 - DNA, 403 bp, Glycine max
  unsure at all n locations
tctcaaggaggtgagcttagttatgagaggtgtgtgtgtatctaagctctancttctcaaggaagttttctcacagaagcttctcatggaagttttctcaagaaagcttctcaaggaagctacctagtctataaatagaagcatgtgtaacacttgttgtaactttgatgaatgagagtcttgtgagacacaactcaaagttcaacttctctacctttatttcttccttcaatatcgtgctcccccctctctctttctctccctctttcttttcctccattgaagcatccttgcaagcttcttatccaaggctcatcttggtggagaagctccttcttccatggcttattccctagtggatggcgcctgctctccgctcgtctcctttgtcttccgctgcatc

SEQ ID NO: 2344 - DNA, 389 bp, Glycine max
  unsure at all n locations
atcatccccatctacaccaatgtccatctcatcagcaatcaaagattttgaactctggccaacaatattgtgtttaaatttttctacactcaaaccacccttgttcagaaattcgttatcatgttcttttgcaagaacagaacccaagcaagcttgttcaggacaatcctgcaccttggtgcaaaggcttgccatctggcacgacccatcattgattgccatagatnttgaatcttcactgtaatcaactgaagaaacattggttntcttcaattttccctccaacttaattgaaaaattctcaccttcactacaaggtgcgggtggtactgagaatgcatcttgagtaacaggcacggcgtcttttatagtacttttaggtgcatcaa

SEQ ID NO: 2345 - DNA, 315 bp, Glycine max
  unsure at all n locations
tatcaagtanactggcttgacacactatgcatcagcaacatcacagtntatacaaagccaaacattatttggcaaaaggtacgcaagttaaaaataaaaacattagtgttacaataaccaaaccaaatatctattcctgtgaataatcgcaccatattttatcaaggcatttacattcacaagttgcaagttataaaaaaggatactggttatcacaaagtcctcatctaatagtaatttcaataacaagttgctttgtgcgggtatttaaaatttcaagcacttctggcaaggggataaaacacgatataaaaa

SEQ ID NO: 2346 - DNA, 264 bp, Glycine max
agcttgcctcatatagatctatgaaggacgcttcggccgcaaggactaatgtcgcttccgagtttgatagccatcgtttcaggagcactgaacaccagcagcgtttcgaagtcatcaagggatggtccttccactgagagagacacatccagctcagggacgacgagtacacgaatttccaggaggagatagctcgccggcgttggacatcgctggtcactcccatggccaagttcgatccagatgtagtcctcgagttttatg

SEQ ID NO: 2347 - DNA, 266 bp, Glycine max
tgtctcagcgtatatgcgagacggagaccaacatgctagctatgatcgccaagtaccaagaagagttagggctatccactgcccacgagcatatgatacgggacgagtatgctcaagtatacgcggaacaagaggctagaggaaggatgatcgactctttacaccaagaggcaaccatgtggatggatcggcttgctcttaccttgaacgggaggtaagaactgtccctcttgttagccaaagccaacgcgatggcagacacctac

SEQ ID NO: 2348 - DNA, 339 bp, Glycine max
  unsure at all n locations
ttggggacctcattgaaactcanagatccagcctccatagaagtttcacaagtaagcttccatcatatcctcttaggcaacaacactgtggcagtagggactaccagcgacaatgcatcaccaaaagaagaaaactctagatgaggcttcactgtcatcaagtgagttagagacccagcatgaccacagatcgacctccactccttatggctcacatagacccgggtataaggcctaatatctcaacatgtgtgcgaggtttaagtgccatgtgtgcgtanaaaaaatatttctaactatgaatgtantcgataaacaaacacacaccaaacacgacaa

SEQ ID NO: 2349 - DNA, 141 bp, Glycine max
tcacacgtctgatatccacaatggagtgggaaaagtttttgtctcgttacaagaggagaaggatgccatatatgaatattccgaagccactttaatatataagcatttgatctaagtattagtgaagactgcttaatcagg

SEQ ID NO: 2350 - DNA, 437 bp, Glycine max
  unsure at all n locations
agctntctcccttatttgctataaataggggtagaagtgaagaagaaaatgtttaaccccttaggcacttctctctctttcgaatttgcttggaaaaattgtttccgtgaagaaaatctaagccgaggcgcttccgaaacgtttccgtaaggaatttcgcgaaggtttcgactgttcttcaacgttcttcattcgttcttcatcgntcttcgatcttcaacgggtaagtacctcgaaccaagcttttcaattcactctatgtacccgtggtggtccacatttcgtttcatgtatttttattctcgtttccatttactttttatacccttttttgacgtgcttaagccatttatttaagtcatttcttgcttaatgtaaaaataanataaatttccaccgatcgtttgaattgtatcatcccgtaattttggttaaat

SEQ ID NO: 2351 - DNA, 431 bp, Glycine max
tgagccaaaatcctgactcaccataaaccttgacccattgtgagaatgtcaatccttaccctcagaagcaaaaaaagggagagggaaaatttccaatcaaagagaaagcaaataatgaaagaaagaaaatttccaatcaaaagagaaaagagaggaaaggaaattcccaatcaaagaatgggagaaagcaaaaagaaaagatagaaaattcccaatcaaagaatgggagaaagaaaaaagagaaggagaagaatgaaagaaagctcctgatcaaggatcgaaagaaaacagaagaaatgtgcagagaggtctctggaccaaacaatatctgaacaaatacggaattgtcaccaaatgaacaaaagaaagaataggaaaccctaacctaaaagtggtcttctccctttgattaccaaccaaaatcctgtgcg

SEQ ID NO: 2352 - DNA, 362 bp, Glycine max
cctctgagtcacctgctgcatgcatgctaggaccgtgcccaagttgagcctccaatatatccaccgttgggaaatattagactttgagaactttagctactattatatcttggttggtcatattctctagccttgcttccctaccacgacaagggtaaaagcatgcagttgtctaaaccacataccttcatgttcctttttcattatcatcttgacccacataagccaattgattccttgtctttgtggattagagtcccaccaaaaagaattcatcatctgctacaattcatcttcaagagtggaaggaaacatatacacactcatgtaataagtgggtatagatcgagcaacagatttta

SEQ ID NO: 2353 - DNA, 456 bp, Glycine max
  unsure at all n locations
ntagtatagattactttaatttaatgcatgattnttgtagttggccgacattgtacgtgttaatttggttaccataaacttagccacatgatatgtttctttttgtagaaacctcataagactttttttttttatttaaaaaattatcgtcaaacaactcttttttttgtctttttttgtttaattaattatccgcctgatatgtacattgtcaggaaaaatgttgaggatcttgtctttcttggtactttatattctacttctaggctttgcaaaattgttttttaattagatgttgcaaatgatgaagtattagacaagtaatctgctttcaattttcaaattgcatggtatttgtgtggttgctaaaatatatatttccattttcctgatctgttctgtaatctgagtaaatgacaatatacatgcatatcttctcacctatcgaaaataaaa

SEQ ID NO: 2354 - DNA, 432 bp, Glycine max
  unsure at all n locations
catgcaagcttccacaatatccaagcaattcaatntccaatctcaagaactaccctttaccaaganaacagggcagaggcagaaaactctgcccaaaacacattcacatattacagcttcccttactcaaataccccagtaacattctcttcgttccgattcgttaaccgttggatcgacttgaaaattttactggaggttccaagtacatgagtttacantttgaccgttgggatctgctagaaaatgtccagaacccaatatgtactacctttcccaaaaccagcaatgcacaagcatttttctgcacatttgatcaaattggctgcacaatttgacagctnnttgctgcacaatttggcagattagaaatccatctacccacatcaatttgctcaatcggatctacaagtctaaatatgataaatcata

SEQ ID NO: 2355 - DNA, 435 bp, Glycine max
  unsure at all n locations
tccatcaagtggtaatcagagcacaagagcttcaagtaggtgctccttaaacctccattaattntttgctttaccttctcttccattgttgtttcttcattttttctccaagtatctcctcaaatgtcttgtgataaatgttttaaacatgattctttagagtttccaccgattaaacttgctatagaagctagatttgattttctatggttcanatttcttgttcttgttcttgaaccatgaattgtgttgagtttacgttcctttgagttttgtcttgttattttttgtggctgaaacctaaaccataaaattcttacaaaaatattaaagtagtagaaaacctcaaaaatctagagtgacttgttcacctattgtagttttgtcatagaagtcatgtctagtcaagaaacttgtcacataagatttcttatg

SEQ ID NO: 2356 - DNA, 386 bp, Glycine max
ttgtttgcaagcttgccacccatctcgcccagatgagctttgttgcttcctccagaaggcaccacaatgatgcttgttttgcacaacaatgctctttttgacttccagaatgttgcgaaactttacggattgcgcaacaatgcttgttaaacatttcagaatgttacggaactttatggattgcacaacaattcttgctaaacattttgaggcggtcaagagaaggtcgtatgccaacacataatgtccccttgacgaaattagggtatgacagtcgtccctctttacttatcttttattggagataaaagtgaagtatagataagacactaatttcgttcgagtggaacatgatttgcgcgatcaatatccctacccgcggacct

SEQ ID NO: 2357 - DNA, 430 bp, Glycine max
cgcttggaaaatgatttctatacaaaagttagtcgtataaagcgactaacaaatcttcagtaatatcccgccaaacccagaaaactcctaatctcacacacagacttaagactctcccacttaagtacaacttctatcttagaaggatctatatctatactgccttaggatatcacatgtcctagaaaactaactttatctaaccagaactcacacttggacaacttagcataaagttgtcggttcctaagggtgtgcaacacaatcctcaagtgctcttcatgctcctttctagtctttgagtataccaaaatatcatctatgaaaactaccacagaactatcaagatatgggtgaaagatcctattcatgtaaactataaacacaccaggggcattagtcacaccaatgggcatgacatactcatagt

SEQ ID NO: 2358 - DNA, 445 bp, Glycine max
  unsure at all n locations
agctntntatttttagtagatgaagatgaattcgtggccacctcatggactcctctaagaacaatagcatcatttcttgaactgaattgttgggagttagaagccatcttctcaatcaaattcctagcttcagtaggggtcatatcaccaagagctccaccactggtagcatcaatcatactcctctccatgttgctaagtccctcatagaaatattgaagaaggagttgctcagaaatctggtggtgaaggcagcttgcacacaatttcttgaatctttcctagtactcatacaagctctctccactaagttgcctgatgcctgaaatgtcttttttgatggcagtggtccaagatgaagggaagaatttctccaagaacaccctcttaaggtcatcccagctgaanatggacctgagagcaaggtagtatagccaatcttttg

SEQ ID NO: 2359 - DNA, 429 bp, Glycine max
  unsure at all n locations
tgtaggattatggngtacccatcacatgtggtactaggtgttggtcgggcgatggtgcacaacaagttgtccacatccacaatgcgcgcataaacccaccatcccctgttgcccacctccaactgagctcacgtactcccacgtagcccatatcctcgtttctctcaacaccgggtccccatcaatcctcccaagcttccacaacatccaagcaaaacaacattcacacagcacaagctatcacagccaagcaaaacaaagcaaaggcagaaaactctgccaaaacaccaaccaaaaatcacagcttttcccactcaaagaccccagtaacaattccttcgatccaatttgttaaccgttggatcgaactccaaaatttactggaagtccatagtgcataagcctacantttgaccgttgggatctact

SEQ ID NO: 2360 - DNA, 197 bp, Glycine max
tagagagaggaagactaaagatttggatccagtacagtgcgctaaggatgaagaaggcaaagtcttattgcctgaaaaagatatcaaggaaaggtggaaggcgtatttccacaacttacttaatgatggatatggatatgactctagcagtctagacacaagagaagaggaccggaactataagtactattgtcgga

SEQ ID NO: 2361 - DNA, 429 bp, Glycine max
tcaattccttctacgtctcattgatgtttgggaactctattggagtagtcggaggaaaaactggaggaatctcagggaatcgctagagatgccgctatcgctgtcagaagacatgtgagtccgcttagaggtaagggatgagttattcacaattgggggttagtattgagaacatgtgtagggatccttagaggattaaattggggttttattttgggatgtttattaaattgcaatttttcctttatgatcataaataaaatattgatgttacgatgagaatttcttgataaattgtgctcttgatatttgtatattttgacctatgattttgatataattgtgtaatattatttgagaggttttagtccccaggttgtgatagtcttttgtataaactgttatattgaggatataaaattatgattc

SEQ ID NO: 2362 - DNA, 339 bp, Glycine max
  unsure at all n locations
agctngcatacattattctccttgcctgcatcttanaaccttctggttgggtcatatagatgtcttcctctaaatccccatgcaagaatgtagttttaacatctaactgctccaagtgaagattctctgcagctactatgctcagaataactctgatggtagtcatctttacaactggagagaagatctctgtgaaatcaattccttgtttctgctgaaaccctttcaccacaagtctcgccttgtatcttcttctaccgtcagattcttcctttagcctatagacccacctattctgtaatgccttctttccttctggcaatttaattaaagaccacg

SEQ ID NO: 2363 - DNA, 433 bp, Glycine max
tctccgtctattccctataaatatgtgtcatagggaagattatagacgttcaaccttcctggtatctgaggatcacttgaaattagtgaaaaaaaatcgtttccgtgaagaaaatccaagccgaggcgcttccgtaacgcgtctgaaacgtttccgtgggtgattccgtgaagattttccgccatctatcgttcgttcttcatagatcttgttcgtgctgcggacttaaaccgataagtacccgaaatcgaacttttcaattcattctatgtacccttggggggttccacttgtttcgcgtactttaattttcatttcatttactttctgtatccccttttgacgagcgttagtcatttatttaagtcattttctcccctaatcaagaaataaaataaacttgcaccgatcatttaaattggtacagttgata

SEQ ID NO: 2364 - DNA, 365 bp, Glycine max
agcttgtgtgatgaagataaacgaactagatacaacccccagatgtttgactttcttctttcgtggatcaagatgacaccaccatattacggtcttgctaggcctgtcgagattatcaagttgttgtccaattttgatgtcaagccggaggattttaaggagactttacctgctgccaagtcacctaagaccgtgctcacggtaactcgcactttcccattagggactagatgtcctctagtgctagagattgctgtgaaacagggtacatcgtctgaagtagggattcgagcttattagttgaaggaccataaggatccatagctgatggaggaggacacagaggagactcctaacggcgatct

SEQ ID NO: 2365 - DNA, 444 bp, Glycine max
  unsure at all n locations
gtcaacagatgtcttcacaaataatcatcacacagcagatatctaacaaaactacccctcatatctcccagaaccccatacccacgaaaatcaagagggaaagaagtccacccaaacctgaaatttcgaagtcccactcgtagccacgcacttcacgactccaaaaatgctctcctttcacgatttggggcagaaatggtggccaaaggttgaagctatgcttgaagcttcaatggagaatgaagaagaagacagctacgtgagagagggagagaaaaggcttctgaatttctgctttggctgagtgaggagagagaacagctntttggtttaaaaataaaaaggggtttccctttttccattattatattcaagctttgccacatgtcccctattgattggagcaaaagggcccactttctctttttgactgtgatccatact

SEQ ID NO: 2366 - DNA, 414 bp, Glycine max
gcttgatgattatggtgcacccatcacatgtggtactaggtggcggccgggcgatggtgcacaacaagttttccacatccacaaagcgcgcataaacccaccattccctgttgcccacctccatctgagctcacgtactcccacgtagcccatatcctcgtttctctcaacaccgggtccccatcaattcttccaagcttccacaacatccaagcgaaacaacattcaaacagcacagctatcacagccaagcaaaacaaagcaaaggccgataactctgccacaacaccaaccaaaatcacagcttttctcatttataagccccagtaacaattccttcgatccaattcgttaaccggtggatcgactccacaatttactggaagctatagaacactagcctacattgtgacc

SEQ ID NO: 2367 - DNA, 328 bp, Glycine max
  unsure at all n locations
tccatcaagtggttatcagagcataagagcttcaagtatgtgctccttaaacctccattaattttttgctttaccttctcttccattgctgtttcttcattttttctccatgtatctcctcacatgtcttgtcttaaattttgttaacatgattatttagagtttccaccgattaaacttgctatataagctagatttgattctctatggttcaaatttcttcttgttgttcttgaaccatgaaatgtgttgagtcttgggtcctttgagatattgtcttgatatttattgtggctgaaaccctaaccatnaaacttcttaaaaaata

SEQ ID NO: 2368 - DNA, 417 bp, Glycine max
  unsure at all n locations
gatgtttatgaattaattngacattatgttatatntattgatgatcaacttgatagtaaattaaaaaaatgtgaactcaattggcataagctatacaatagaataaaattatgcactttntacacatcactgactaaataaaaaaaatgttgtaacataaactaatttatcatcactttacatttctcaagaacaaaagtgtttatttacaccttcttttatctaatgaaattcatgtcaaattcattagttaaggaataaaactcattaaataattaataagtgatactacataatttactgaattttacgtgattgtaatttaataataaaaatgttaataatatattaatatatatttatgaaccttnttcattgcccaataaaaataaaaaagttaaataattattgtaatcc

SEQ ID NO: 2369 - DNA, 410 bp, Glycine max
  unsure at all n locations
cctgtntattccttaacaagggtcaaaatatgacacaaactnttttctattgtgtgaattntaaaattgattgaaatatctataaaagataattaagtttaattttatgaaaagaaaattaattaatatttatgtttattatttagtgtaaatttcaatagaaaattctactattatcgagactgtgttgcatgctgatagtgttagaatacattgtataagagaacaaaccatcgataaaaaaaataaaggatttaattataaatagtctctaatgattataattagattcctgttaaaaaataaataaaatattcataaaatctattattaaatatgtagtaatctaaaaataataataacaacaattaggcaacaaaatagcttacatacaaacaataaccaataat

SEQ ID NO: 2370 - DNA, 268 bp, Glycine max
  unsure at all n locations
agcttcccagattcgatcatggaaggacttgtcaactgctttcattaggcaataccagtacaatacggatatggctcccgatcggaaccagcttcagagtatgactaagcgggagcatgagtccattaaggaatatgcccaaagatggagagatctcgcggcccaagtcgtaccgcccatgacggagagggagatgatcacaattatggtagatacgttacccacgttctactatgaanagctgataggctacatgccagctaacttt

SEQ ID NO: 2371 - DNA, 375 bp, Glycine max
ggtgcacatggtaatgtttctcctgattataaatccagctgctcgcatcacataaaccttttcatttataaatccattcagaaacacactctgtagaatagaaagagagtggtccaaaattaccatgaatgtatgccaaagggaattgttcgtcagttaatggctctctaggagctgcccttttgaacttataaaggtgttatggaaatggacgtggatgcggtcgtggagtttgtgcacacttgcacagtggtgtgtgaggagagtcatcaatggattcatcttcaaatgaggaaaaagctagatctatcttggttctggtgaaggaaatacccattctttgtcctaatttttggttggccttgagcccttgtc

SEQ ID NO: 2372 - DNA, 367 bp, Glycine max
  unsure at all n locations
agcttgtggcagataatgctagggtggattcctggcatgttagatggttgtcaagcaaataggtctgtgttcctatgtaagacatcaactatgcgtctgtgctcatggctggtgaggtccctgttgagctacatgcactacccgagtttgggtccgagttgtagcttgacgagttcttcagtaggctttgggcctctatcagaagtgtcgntgcacgaatctacattgaatatgttgtctaggctttcttggtagactgtcagggctcagactggagacccttcgtccacactcatgatttgagtggtaccatctgctgtggngtaaagcttggcaggctccctggtgggaggatagagtgccactt

SEQ ID NO: 2373 - DNA, 445 bp, Glycine max
  unsure at all n locations
atcccacatggttgaagcattctcgcanaacaacatgtccctaactggtctccctataattntacctagtgaaagtgacttgacttaccactgtgtggtttgtcttgtcatgtactcctaggcgctcaactaaattntttactaatatggtaccacattgtatataagattgaatcttagtgtacctgttgcataatatttgtgtaatgatcattgcgagttattacatgatggtgggtaataaattgtgtgagtgttagatgctatgttgtacttgagatgtgttgttttaaacatgtgattaatgtgaaggtgtggaatgtgattctgtgaataataccttgagacaagtgatgttacaaacatgagtagtaaatgatgcgaattgtgatactaagttgagcttggtatacttatatatgngcttnntattatctctaccctg

SEQ ID NO: 2374 - DNA, 418 bp, Glycine max
  unsure at all n locations
agcttattggttntgataatatcactagagaaaatacagcattaaaagtaatttanacgtaaaataatcatcaatctttatactatgtctctttcttgtcagatctcattcctggtgattttattcatgttattggggatgctcatatttaccgcaatcacgtgaggcctttgcaggagcagctccataaccagccaaagccttttccagtatgtgtaatgtttagcacttctttaagtttatcttttgactctcttacttngttaccccctaatgtacttcattgcagactttgaagataaatccaaagaagaaagatatagattcttttgtggctgctgatttcaagctcataggctatgatcctcaccagaagaatgatatgaagctgtctgtctaanatctggggattctcact

SEQ ID NO: 2375 - DNA, 477 bp, Glycine max
  unsure at all n locations
tcaccacgganagcgtaaactaactgataaaataattatttcagttagtttaattntcatatatnttgggtgtaaatattcttatattaattttaaatttaattaactattaaaataattacttcctttattctttaggaccaaaccggctattaaatggaatggataattttttatgattataatttttataaagtagttaattttgttattatttatctaagtaattagtattcttttatttccaacactgtaaaatgttttttcactttaatattttcacatcactcgataccaagttaataattattaataagaataaatcttggacaatagtaataagtattcttaactaaaatgaaaatctagataacttaaatctaagtggaaataataaataaatataaaaaacatagatctatattgaaaaataatttgtaatctaacacttaaaaatattatataaaaagaatatag

SEQ ID NO: 2376 - DNA, 389 bp, Glycine max
  unsure at all n locations
agcttcttagtttcagatgatgcagatgggtttgtagctacctcatgcgctcctctaatgactatggcatcatttctggcgctaaactgctgggagttggaggccatcttctcaattaaatttctggcttcagcaggagtcatgtctccaagggctccaccactggcagcatctatcatacttctctccatattactgagtccttcataaaaatattggagaagaagttgttctgaaatctgatggtggnggcaactggcacatagtttcttaaatctctcccagtactcatacaggctctctccactgagttgtctaatacctgagatatccttcctgatggctgtggtcctggaagcagggaannatntttctaagaatactctctt

SEQ ID NO: 2377 - DNA, 489 bp, Glycine max
  unsure at all n locations
tcttcatgtctctcctcgtatctctaacatctaggactcatgtgtttatcatagtaaggtggaagatggttcccacatctatctactactttacacggatgacatgcttatagcatcccaaaatttgttgccaattttgaggatgaagttactactctataatgaatttgatatgaaggacatgggagttgctgaaaagattctgggcaaggagaataagatggatgaagtccagaagatgatcttctgtgtcagaaggaatacattcaaaaattgctaaattgttttgggatggcatccgcaaaaatagtatgtactcccctaataacgtccattcgtttatctatactcaatactactcagtcaaatntagagaaggaatacatgtcgtgtgttccttatgcaagtgttgtagctagtctcatgtatgctacaccanaccanacctaacacaagaagtaatggtgtgagtaagtatattggtattct

SEQ ID NO: 2378 - DNA, 472 bp, Glycine max
  unsure at all n locations
tcttactgtttattgcaggcctatagagctctacaacataattaagagtcgtactaaaaaaaaggtaaaatctattaagagagtcttactgtttatgtcataatttataacttttattaggaattgggatatatatatatatatatatatatatatatatatatatatatatatatatatatatatatatatattttgcgtgagacataacctcataggggctgattntattattggtattattattgtatattattgtgaaaattgtctctttctctacctgttgttttaggagaatatcttatactatttacttctctttagtaagacttatcgcttccttttttattttagctcttgataatatcatcgcgtgtcgttctaataatatacatgtctgtcttatagccactataccttcggagatgtatggactaccatataaacgctaagcgcaagaagaagtataccg

SEQ ID NO: 2379 - DNA, 504 bp, Glycine max
cgaatcgtttcagttggaaaaaatcccttgtgcatgaagatcaaaggatatgaacacacaaagatacatcaccaaagaaataaaataatgaaagatataaatttaaagcagatatcttttatctacattcacacaaacatctaaacaatattcactatctcaaattttaatttgacaatgaattacatttatcctctatttaataatgtcaaaataacaataaattgatatcttgacagaactataattataataagagtttaaaataattgtacattatcatctactcatcaatcattgttgttatgatttttaaaataatttttatcaaagtcaacaaacttatatcatagatgatgattgaatgataatgtaatcttacattatataatactttttctcttataataacctatagcaaggataaatgcacacattgatccgatgcacagattattaggatcattatatagtatggattcattgggatgatcgatgatgctg

SEQ ID NO: 2380 - DNA, 138 bp, Glycine max
taactccggagcactttaatagtgacattacattccgacgaatacaggcaaaggtatggattacaggagcctttttctactcgcgcatttaagaatccccatttggctgctggggcgatatcgaatatgtatcatcgt

SEQ ID NO: 2381 - DNA, 351 bp, Glycine max
  unsure at all n locations
agctntatagcgcaacaacacagaatctaggcgtccaacacccctcaattcaatgggttttctaggtttgaaaagtgaaattgagaatgaggtaaacttgaagcaaactctcacctcacacaagtccataacatcaatctaaacttgctcaaactgaatttacacctaaaattccaccgaatcanaatttgactcctcaacacccaattntgccctagaaatagctgcttgntcattttgatcatattgtcttctctctagcacagtccaagctttctcccaagtcctaaatgacatttcaagctagtattaactcactttaacctccatttaccacagaattcagactta

SEQ ID NO: 2382 - DNA, 378 bp, Glycine max
  unsure at all n locations
tcttatccaggcacattcttggtggtgaagctccttcttccatggcttattcccttgtggatggtgcctcccctctcctcttctcctttgccttccgctgcatctccatggtggaaaaccaccattgaagctcaaagatccagcctccatagaagcttcacaagcaagctaccatcaagtggtaatcagagcacaagagcttcaagtaggtgctccttaaaccaccattaattttttttctttaccttctctttcattcttgtttcttcatttttctccgcgtatctcctcacatctcttgtgctaaatgttgttaaaatgaatctntagagtttcaaccgattaaacttgctatagaagctagatttgaatttctat

SEQ ID NO: 2383 - DNA, 343 bp, Glycine max
agcttgcacatgcatgatgttcttttcctgtacattgaactacttatatttccctaatcagctcattcaatgaaatggaggtgttattgataccaatgcacaagttattttgttttctcaagcgagattagttctatcttggttcgttcaatttcccttctttgtgatagtgaagaaaaacttgatggtgaatctagttaccactaacaacttaggcaaaattatatgtagaaatgagttagcctataatataaaccagaaaccaaaagacagcatcagaaaacattcagactgctattcaaactcatacatttaaatgtaccttgtaaagcgttaatgaaca

SEQ ID NO: 2384 - DNA, 292 bp, Glycine max
  unsure at all n locations
ctgcatggttngttattnttcaatcataatagtagcaggtntgatatctcttcatcatttgaaaaattgtaaccagagattatgggggcagagaagtaggataactatctttccaaagtcttggaaggcaaataagcctttggtctggattttatgtcatgatcctgacatgtaagtgtatcgagtttgagctccaattataagctcaacaagctttgcttgtacatacattggaaaaacagatcagatgcttaaagcagtctatcaagctgaaatgatgatgaccagaaag

SEQ ID NO: 2385 - DNA, 305 bp, Glycine max
agcttgtaggattatggtgtacccatcacatgtggtactatgaggaggacgggcgaaggtgcacaacaattctccacatccacaaatcacgtataaaaccaccatcccctgttgcccacctccaactgagctcacgtactgccacgtagccctcatgctcatttctctcaacgccgggtccccatgaatcctcccaagctttcacaacatacaagaaatttcacatcccatcatgatagactaacagaaccaagcataacagagcataggcagataactctgtccaaaacacaaaccaaaatcac

SEQ ID NO: 2386 - DNA, 479 bp, Glycine max
  unsure at all n locations
ntcatgttactagttattcttgcaatttcaacaattgtctgaaactgattttagtgctccctaatatctccctaaggtttttctacgttctaaaaccagttnttagcttaaaattactaagataagtcgtctcctatctaaaattaagctgctgtttangttttcaaagattccctcctaaacttaatttcgattttctaagtgttccgggaattggtttttcataaattttacatgctacactatattttcacacctaanaactcanttttgaagtcaaatatttaagaanaacagttcatacaaccataacaacctatggtaagttccaaaaccctagtcttggtaggactaattaggctctgataccactaaatgtaacatcctaatttctaagactggaattatatctntgttatttcatttatatattttataaatctcattaatccatttgatttcacaatcatctaacacag

SEQ ID NO: 2387 - DNA, 397 bp, Glycine max
  unsure at all n locations
agctntataagcgcgggtctgggagacaaaggtcaagtggtcgcgatatgcgaagaggatgttccgagtacattggatttggtacgaccatgccctcctgatttccagctgggaaattggcgagtggaggaacgccccggcatttacgcaacgagcaaatgtaaacctttacggttttaaaagctctatagttgggcctaggctttagagntttttccttttgttaaggcgtttgtgtctttcgtttttgaatttataatacgaggacctttcttcatctgttcctacgtctctacccattctcattcatttgcatgttcacttctttttctgaaacggcagatccgatgacgagtccccccgaggtactaatacctgggacccgctatcgacttcg

SEQ ID NO: 2388 - DNA, 416 bp, Glycine max
  unsure at all n locations
ctangagagaccataagaactaaggtagttcctaaacaaaaatcaattgaggaaacttcgccaagaatccccattgaaaaacctttattcaaacctttcaaagttagtgagaaggctaaaagaaaaattagggaacttagaaaaactaaatccttaattgaaggcgtaggtgacaaccatagtgaattactaaacaagattggtagtttacttaaagtcattccagataccccccaagcctctgaaaatacttccaaaatggtaacaagaagtacctccaaattaatcaatgttattaatgaagatagtgaccaaaactcagataacacaactgagataggatcagtgtcagagaagaatataaatccaattaattccaaacactggaagacacccttcaaattatattatcaacg

SEQ ID NO: 2389 - DNA, 552 bp, Glycine max
  unsure at all n locations
ctggattagaaacccttggtagnaaccgttagtatacctagctattacctgacactatagcatactctagcttaagagagtgcatcttttatgatacacaaagtactcatgagagattacaacttcattgtagatcactctctgagtcttgttgagaatctctaactctatatcaaacttatggtcgtgaaagccacgagaggctttataaccaaacaatacttgtgtgttttagatacaggggagtttaaaggttgtgctagctatgaccttgagaatacttatccaccaaaagtggtagaaaagaactcttgctataatcaaggctgattaatggaacactgatttggtaaggaaaactacacgctactcaggttgagtgaattcattataacgaagcactttattactcttcttatttaccttaccagaatatttagagtctattattgatacattttgctcacctggtttcattgggaatataaattttatcatcattggatgacaatccttntaatcactggacgaggccttataaacatattattn

SEQ ID NO: 2390 - DNA, 184 bp, Glycine max
  unsure at all n locations
tctttctcattctctcaaccacaggtgaaagaaagaagagagtgagagaagagaaggtgctcctcatctcaccgctctgtagttcttcttccttcaaaactcgaatgacccatttctatgtttntcgcactcttgccacttctgaagtaaagatacaagctttgctcttttctcactggatcgg

SEQ ID NO: 2391 - DNA, 446 bp, Glycine max
  unsure at all n locations
ntccacttggcttctaactnttcgactcttaacttataacttataagcttttaattaagtttataagctaattgtactaaatataatcttaatagttaatttggtttgataaatttatcttaaatttacattttattttaaaagagtaataacattttaacaccctttttttctctccatctctttcttcttattaaatcatattacctatcttagatatactgtatactnttctttcttctctctcttctttactcgaagtgttccataaaacatgaatctctctntattntttattctntataaaaatgtcattattattaatattcttttctcttatgagtctcaatataacctcttttgtcatttaattaggagtattttatttaacaataattaatataattaaatatgagagacattcgccacttttaattttatcttat

SEQ ID NO: 2392 - DNA, 60 bp, Glycine max
ctttggatttgaggtcatattcatttcaaggaggagggaatgatgcaatcctacctctta

SEQ ID NO: 2393 - DNA, 190 bp, Glycine max
  unsure at all n locations
taatttctactccanattgcaaaaggaagccattctcggagtcgtgaagcgcacctctacgttgtgggacttcgaatttcaggtttgggtggacttcttctcacattaatttcgtgggtattgggtttttgggagatatgatgggcacttttactaggttaatgccttatggtagttatttgtgaaggaa

SEQ ID NO: 2394 - DNA, 368 bp, Glycine max
  unsure at all n locations
agctttgcggntggtaccgtgacttgtgtccctcacattaactctgtcccgctttttgttgcttagcatttatcgtagttaagcataacctaactcgtgaatatgcttggtatacaaacatataatttctacattatattttcctatctctttattatttttttgtcacattatttatcttatttcttattttctttcttctctcngtttcttttctttctatcgcgtacataaagattacagatatagcatttaattaaaaatatctgttgtaagattttgaanagattatagacgggtaagaatcctccattattaattaacaatgtcagtacacattcccagacaaacaatgctgatcatttaac

SEQ ID NO: 2395 - DNA, 417 bp, Glycine max
  unsure at all n locations
ntaatgagtaganaanataaaagagaagataataagaaggaagcacatgcataatttatttctaaccaagtaaccatggtcatggtcatggtcattagtctcattcaacagtctcatttgtatgtacatcacatcattcatctagcagaagttcaagagaaagctcanagcagtgcaattataacctagcgatgctaacttatacatgtggttgattattatctattatctcacatactatntaaatttaaataataaaaaaaagcacgactgattactatgcaaaaatgaagtagggggaggaacatagctgcaagcctcacagaagttttctctcttttccggttaatgcatgattgtgcatcatattggaatccatatcctcatatgacacctgttcattctttagcgctaatc

SEQ ID NO: 2396 - DNA, 387 bp, Glycine max
  unsure at all n locations
agcttcatgttgccttttcgaaagatgttctggctaagaacgttgtcatcgtagcagttccaggcgtcctcagaggtgaatctgtcagtgtcatagtgaggctagggcctggaagctgtggctttccttttcctagaagccatctgcacaaaagaaacatataaaccaagttaacacaggttgtatttgaaatgacangctaanaaataaaactgaaattcagattgggcgcttatagtgacaaatgcgcgccttattaaaaattactcaagcacttagcgtgatagccacacacttagcgagttgacacaaatcagaattatcagcagaaaccaaattgcgcttagcacagctagacacgcttagcgcgacaatagtaatggacat

SEQ ID NO: 2397 - DNA, 485 bp, Glycine max
  unsure at all n locations
ggttctctnttctattattntatcttaagctatgccacatgtctccatttgagtggagcaaaagggcccactttttctcttgatgtgactcatgctcagccacatgaagagaaaaatctgaccttttgaaatgccaaaatcttgcctcggtttgcatgccgttcctctggttccagtccctcgcgtttctctgcgcccgtcagggccagttttcgaaagtaggcaatatatatataaaaatgctcagaatgaaaccccgagcgtggttcagaggttggttttgttaaattctaagttgcacacaaaacgatgatttttagactaattaattaagaattaacctataaccttccagttatggatttctcttccataattagcctaacccgcgtatcttgcccncactattcctacttctaccaggaacatatatgcatatacactaaataatacttataaatatatataatcattcanaatacacc

SEQ ID NO: 2398 - DNA, 312 bp, Glycine max
agcttgttggccgcgaatgacaaatggtgcggaagacgacgctagtctctgcatgctatcatgcgttgagtcttagagatagcaaaagaatgtttatagggataactacttgggaatttccgcctgccccctaactttatgggttagttcttgacaaaggtagtctgcgcggaacacgacataaatctactcatgtcaacggtcttgttggccgcgattgacaaaggatgcaaaagacgacgttagtctctgcatactatcatgcgttgagtcttataggtagcaaaggaatgtttatgcggataacaactt

SEQ ID NO: 2399 - DNA, 489 bp, Glycine max
  unsure at all n locations
tgtaggattatggggtacccatcacatgtggtcctaggtggcggtcgggcgatggtgcagaacaagttttccatatccacaaagcgcgcataaacccaccatcccctgttgcccacctccatctgagctcacgtactcccacgtagcccatatcctcgtttctctcaacaccgggtccccatcaatcctcccaagcttccaaaacatccaaacaaaacgacattcaaaccgcacaagctatcacagccaagcaaaacagagcataggcagaaaactctgccaaaacaccaaccaaatcacagcttttctcacttaaagaccccagtaacaattccttcgttccggttcattaaccattggatcgactcgaaaattntactggaaatctctaatacttaagcctacantttgaccgttgggatctactagcaaacatccagaactcattctgcactaccctttccacagccaaccacgacacaagcattt

SEQ ID NO: 2400 - DNA, 474 bp, Glycine max
  unsure at all n locations
gcttactccaggtttcacttgacgtcttctttctatgcaatgacgttctctaacgtgaacactnntctttttatttattttaattntttatgattttatctaatgttatggaatgtcttaatttgttaatatttattattaaatttcttattatatttaagtgaagaaattaatgatatatgtaaagtgataattatatttgatttagaattaattntacataagccaaatgagtgcaacttgtgcatagtgcatacccctaatttcttagttntaataattaattatttntgtcgacaatcgattgtcttatgtaaaaaaatcaattttataacataatcgttgattatcaaattgattgtaaaaaaattatttatcatctcctttnttctttntttcaaacgtactatatttctcacttgttgttattcattggattctatttttttttcttaatttcatctaacttgttct

SEQ ID NO: 2401 - DNA, 499 bp, Glycine max
  unsure at all n locations
cgcatcttttactaaggcagttntataaaatcgtccttgttttagtgtcatataatctcacttttggagtagtgccaattgcaatctatgtttctattgaagatccttggccctttgaaatattttcttggcttagaaatagctaaatccaatagaggtatctcactctcccaaagaaaatacactatatctcttttagaagatacaagtttcttggcatgcaaaccttccaatcttccaatggatccaaacttgaagctcaatcttcatgatggagacttactccttgatcccttagtgtataaaacgttaattggtagattaatttatctaaccatatcacgtcccgatataacatttggtgtaaatcacttgagtcaatatatgaaagaacatagagtntgtcacctaaatgttgtccatcatcttctgcagtatctcacatctactccaggacaaggtttattttccctgctcataactctctcaaattcactgc

SEQ ID NO: 2402 - DNA, 412 bp, Glycine max
  unsure at all n locations
agctatgagtccaataataaaaaaatatttgtttttaattcttataaagtaaaaaaaatcaaatttattagaacaatatttcatatattaataaaaagtccaacacataatcctcttatttaaaataaaaagtatttctcttaaaatttacattaaaatttacttattcaatcagaccttattaaaaataaatatattatgtgtaagataaaactctctcaacacccacatcattttacttgtacttgacacacctacctagagaggaatgaggttaaactttaccatanaagaaaaagaattatggggatatacttggggtgccaattatggtgtttctaagttaattctttttaaacaaaaggctaaaagttttagtggtttttttatgttataatgtgaagatattact

SEQ ID NO: 2403 - DNA, 427 bp, Glycine max
tctatccatggcgttctatggtggtgagcttattcttgactcatcttctttatgaagtggcgtctgcaatcacctttccactttctccattccgctgccattgatcttcaagaagtaaaggactccattgatgaagaagatccaaggcctaaaagctcaacatggagctacatcactagtagtacttgttctttcctcctccctaagcctaactctcaaaaggagtagttctatttgttgcctatactcttcaacactcatactcccttttctaagcctttggagcttggccataagctccctttcatagtaggaggggatgcacctcttcctaagggtagctttcaagtcattccaatactctactagaggatcccatgaatccttcttttcctaacaagtgaagtccacccatagagggcatacc

SEQ ID NO: 2404 - DNA, 271 bp, Glycine max
  unsure at all n locations
agcttccagattagtgtaccanatgaccgcggctccagccaagctatcttggaaaaagtgcattaacaacttttcatccctagaatgcgcccccatctcgcgacaatacatcttgagatggtttttaggacatgtcgtccctttgtacttgtcaaaatcaggtaccttgaattttgggggatgacgacatccgataccaagcaaagatctgccatgtctgcgaacggatagttgccaaagccttcaacagctctcaatctctcttcgatga

SEQ ID NO: 2405 - DNA, 468 bp, Glycine max
  unsure at all n locations
tcatggtgaatcanaggtgattcanaggttntntgatgataacaatgatgataacaaaagatgatgacaaaggagatgacaaanagctcanagatcaatcaaagaacaactcaagtgaatcaagaacaattcaagagttcaagataagaatcaagaagaattcaagactcaagaagaaagtttagagtcaagaatcaagattcaaggttcaagatctcaagaatcaagatcaagattcaagactcaagattcaagaatcaagagaaggcttaatcaagataagtatgaaaagtttttctcanaaatggagtagcacatgattnttctcanaatatgtttactaaagagtntttactctctggtaatcgattaccagattgctgtaatcgattaccagtagcaaaattggtttgaaaagttntcanattgatttacacgttctattaatnntcaaagtgaatcgataca

SEQ ID NO: 2406 - DNA, 322 bp, Glycine max
  unsure at all n locations
agcttccgttcccgagagcatctcttatttaagcatttcagcctttgctttcgtgtagcttaagaaaaacgtcatttcttcttctttctttcttccaaggccatttctaaagttccaagaactttctccatcacccacagccaccattagccaccacaaaccattggtgttctccacaccgagaggaacccttcaaccgaagcggaatcttccaacttggcttggcggttcggtagagaatgaaaccctaatctgacctttcgttntctttcgagggaaccatggttctacgcttggttcttggtagtttcatcttatcttt

SEQ ID NO: 2407 - DNA, 454 bp, Glycine max
gggttcgaggtacttacccgttgaagatcgaagaacgatgaagaacgaatgaagaacgtcgaagaacggttgaaacctttgcgagattcctcacggaaaacgttacggaaacgtttcggaagcgcctcggcttagattttcttcacggaaacaatttttccaagcaaattcgaaagagagagaagtgcctaaggggctggacccctttcttcttcacttcctcccctatttatagcaaaataggggaggtggttgccgcccagctcgcccaggcgagctcagctcgcccaggcgagcagggttgcttcctccagaagcaaccgccttctggaggaatcttctggagggcccaaatgggcctgggtgctatttgcaccccccattttactaagtacaccccccctctgctggtttttggagatcttttttcgtaatgtacggaaacttacgaatt

SEQ ID NO: 2408 - DNA, 453 bp, Glycine max
  unsure at all n locations
tctctctttcacacactataggtngtgatatttctgacaagcggtaaatgttatgaaagaagatatattttctaaggaacactcacgcactctagggacctgtgttgaattaccaaaggggtgttagagagctggttgntagtgggatttgattactatactggactcttattgtatccttgaacagtgcaatgctagacttgttgctaatgtacttacttagaaagatggcattgattatatagagacggtatnactgatcttacgaaatgattgtttcaagaattatgttgacattatgttgtccatttatgacttcggagttacatcactctggatggtgactactctcctatcttaactgtgatattagaggagaattgtcgtattgacctaccgatggtgttctctagttgatggataggacatctcggtgcgatactaataaaatcg

SEQ ID NO: 2409 - DNA, 442 bp, Glycine max
ggcactaccatgtttattaattagatttccgattaccaacatttaatcgatgcactctataatttaaagttttttagaattaattgtctcccacaatatttctatcttgctccattatttttcatctgagttatgggtttaactagaaaatcttgttagttctattgctcctaatctgaagtacattgttaaatttagattttcgtttatcgataaatattaatttttgttatgaatgtcagttaaaaaaaaatgaaccactaatctcttccttctgcttcctccctttactttttctcaacaactcacctattcttatacctccaaattcttagaaattaaacttaagcaccatggacataagtgctcgacgatggaatatataatcacacatctcatgctatatttatatgtgatcaattaagctttacgaacatgatat

SEQ ID NO: 2410 - DNA, 434 bp, Glycine max
  unsure at all n locations
agctagaagaagttttggcttttacttgcccaactcctttgagtgacatttgtattggttgttatcttgattgatgcatcttantacatttgttatctgctttgcatcctgcatcatcatggttagtatcaagaaaagtttctaagttaaaaaaatttcttcagaggtaaaaactctctattttaatcgattacagagttgtcgtaatcgattacaacaagctgtttgaagcttacagaagtaagtctcatatcggtttaatcgattacaatagtattttaattgatttcactggtgttagaccatgactgatctttttcaggagtctcaactctaatcaattaccaagtggattaatcgattacttctctctcgttcaagtgttcaaaggagaactagaacactctaatcgattatattggtcttgagttatt

SEQ ID NO: 2411 - DNA, 408 bp, Glycine max
  unsure at all n locations
tggcccttctccttttatgtttcacaaagtgttgctagaacatgttaactatgaaaaggttattgaaaaacgttggagccattaattagttggttgtcctatgtttgtcttaatatgcaagctgaaagtcataattatgaatctaaataaatctctctttggtgatattcatgataaagttaattcttgttataaacctattgaagttatccaatatgaaattagncatgttgcattttgtgatgctcggaaggacaatgaggctaaagccctattagatcttgatcaagctctctcttgcatgagactttatggaaggaaaatgctttgcgaaatggaattgccattgtaatacattctattgtcacatgactcaagtgcatcaaacatcaaaacggtttatatact

SEQ ID NO: 2412 - DNA, 253 bp, Glycine max
agcttccttgataagctagagcttaactacacacacccctctgataactaagctcaccttcttgagaaactttcttgaaaagcttccttgagaagattcctagagaagctagagcttagctacacacacgctcttaataactaagcgtcaccttcttgaaatgagaaggtagagcttagctttttgtatcaagtgacgccagaatagttaagaggagggggctgaattaattactcgctaacctttactaatt

SEQ ID NO: 2413 - DNA, 380 bp, Glycine max
tgtgacatttgtcagcatcagatgtatagcgctatctcacctgtaggattgctgcaacctcttgctattccggaacaggtctgggaggatgtatctattgattttatcacagggttgccttgttccagaggctatgaagctattctggttgttgcggacaggctgaccaaatatagccattctgttccattgaaacacccttatactgccaaaggaattgttgagattttctctgggaagtactgatgctacatggagttccacaatctctcgcgagtgatagagatcctttatttatgagtttgtcttggaacgaactatttaatttacacgcgacaatgctcaagatgagtacaacttaccttccgcagactgatgga

SEQ ID NO: 2414 - DNA, 423 bp, Glycine max
  unsure at all n locations
agcttctatagaagggttcttcctaatttctcaacaattgcctcacctctcaatgagctggtgaagaagaaggtggcatttacttggggtgaaagacaagagtaagcctttgctttgctcaaagaaaagcttactaaggcacctattctagctcttcctgactnttctaaaacttttgagctagaatgtgatgcctatggagtgggagttagagctgtattgttacaaggtgggcactctattgcttattttagtgaanaacttcatggtgccaccctcaactaccccacctatgataaaaagctntatgccttaataagagccctccaaacttgggaacattaccttggtgtcaagggaatttgcattcatagtgatcatgaatcacttaagtacattagagggcaaagcaagttaaacaaa

SEQ ID NO: 2415 - DNA, 480 bp, Glycine max
taacataaggcatgtgaagtgggtggaattcctagagcaattcccttatgttatcaaacataaaaagggaaaaggtaatattgtagccgatgctctttctcggcgtcatgcattactttctatgcttgaaacataattgattggtcttgaatgtttgaaaagcatgtatgaaaatgatgaaacttttggagaaatctttaaaaattgtgaaaatttttcagaaaatggttactttagacatgaaggctttcttttcaaagaaaacaaattgtgtgtgcctaaatgttctacaagaaatttgtcttgttgtgaagcacatgaatgaggtttaatggggcattttggggtccaaaagactctagaaacattacaagaacattcttataggcctcatatgaaaaaggatgtgcataaattttgtgaacattgcattgtatgtaaaaaggcaaagtctaaggtaaagcctcatggactgatact

SEQ ID NO: 2416 - DNA, 257 bp, Glycine max
agagagaggtgaggtgagcatactaatgattgaggaaaagagagagagaagctgaactctgaaatgtgtctcacaagactctcattcttcaaagatacaacaagcgtcacacatgcttggatatatagactaggtagctttcgtgagaagcttctactataagctcccttgagaggctacagcttagctacacacacccctctactagctaagcttacctccttgagaagcttccttgagaagcttacgtaagaaac

SEQ ID NO: 2417 - DNA, 502 bp, Glycine max
  unsure at all n locations
tcanaccacagcaacacagaatctaggtgtccaaaacccctcatatcaatgggttttctaggtttgaaaagtgaaatttagaatgaggtaaanttgaagcaaactctcacctcacacaagtccataacatcaatctaaacttgcccaaactggatttacacctaaaattccaccaaatcaaaatttgactcttcaacacccaattttgccctagaaatggctcttggttcactttggtcatttgtttttctctctagctcagcctaacctttctcacatgttctaaatgaaatttcaagctagtattaactcactctaacctccatttaccacagaattcagacttagccttccaactctcaaagtctcactctttttccactcataacatcacattctcactttctaaccttgggttagttctacccttcatctctaacagatgttcatcagcaatttcagcatataaacatcacanacatcattacataaaccctaaaca

SEQ ID NO: 2418 - DNA, 404 bp, Glycine max
  unsure at all n locations
agcttctatgttcaatttcgagcgtttcaatatattatgtgcctgaatcggacattcgtgtgaaaagttacgaccatttgaatttcttgagaacttctattnttcaagttcaagtgcctttatatatcatgggcctcaatcgtatatccatctcaaaagttatggtcgtctgaattggacaagagctttcgtgttgaatttcgagcgtctcgatatattgtggacctgaatcggacatccgagtaaaactttatgaccatttgaatttccctataacttccagtattaaatatggagccgtttgatatatcatgggacttaatcgtacattcatgttaatagttatggccgtctgaattggactaaagcttctgcgttcaattttgagcgtcctgatatattat

SEQ ID NO: 2419 - DNA, 422 bp, Glycine max
  unsure at all n locations
tcatggagaatcaaaggtgattcanaggtggtttgatgataacataagatgatgacaaaggtgatgacaaaaagctcanagatcaatcaaagaacaactcaagtgaatcaagaacaattcaagagttcaagataagaatcaagaagaattcaagactcaagaagaaagtttagaatcaagaatcaagattcaaggttcaagatctcaagaatcaagatcaagattcaagactcaagattcaagaatcaagagaaggcttaatcaagataagtatgaaaaggtttttctcacaaattgaatagcacatggtttttctcaagacatgtttaccaaagagtttttactctctggtaatcgattaccatattgttgtaatcgattaccagtagcacaatggagttgaaaagttttaaattgaatta

SEQ ID NO: 2420 - DNA, 325 bp, Glycine max
gatctactttagggctagggttagggttattggccgatacgtcttgttcgtctcttcgatacgatctaagttattctatcatccacaacattccggcaccgtcatacacatctaggagtatgaatttaactattagtatttatttatttcgtgataaacgatttgctcgatagacaaccttcgtgaagaggcatcctactggtgaattctataagaaatatgaacgtgagactctttctctataactttattattactaactttttaatttggtatatcttattcttttgtagactatgcttactccgaaccagcgaccattggt

SEQ ID NO: 2421 - DNA, 495 bp, Glycine max
  unsure at all n locations
tatacatactcaagctcgcacaggagtgtgaggtgatactgagtattcttttcaacaatgactggccttcaattagtggggattctgaggaagatgaatatggctccacgactggaaatgaaagcaaagcgacgctgatgcatgttccaaaagaacttgctgaaattgacaacatggagaacacgttcaccaaactaactctatcagcactgcgtagcttggaagaaattatgggtagaagctcaactgttagcattttctcattgcctactttgcataactaggctttgcaactgcaagaggattggaaaataaaatgactgcactagcgactgcaaccaaataggtcctcaggataacatagatcttctcgtgtttatcttcacatctatcttaatgtttattagaanagaaatagacacagaatttagacatgagtngccatttatacaagaggatccatctccctgtttaatggtagatttcatatgaaac

SEQ ID NO: 2422 - DNA, 399 bp, Glycine max
  unsure at all n locations
agcttcttatccaagacactctcctggnggtgaaacttctcatttcatggcttattctctaatggatggcgtctcatcgcaccttttctcctttatcttccgctgctactccatggctgaaaagcaccattgaaggaccttattgaagctcaaagattcagcctccatagaagcttctcaagcaagcttccatcaacacatttgcatgtaggaggaatagtgaattgtgaagatgacatttcaggacctcgcattcttgctctctctctctcccacgtaagtttctcctctctctctttattttattttatcaaaatggttgggattaggtggaaaatcccattttcgtaggcccacatngtgttttctaatgggagttgataatggtccctactaaaa

SEQ ID NO: 2423 - DNA, 491 bp, Glycine max
  unsure at all n locations
nggattgattcagtctaactagggatcgaggtttagtaatttaggctacaacgtagtacacagaatcatgattgattagagaaacatctctatatacatcagctggtttgttagaaagacccaacacctttacctactgctgtcaatcttacttacttgcatttttactatttttagccaagacttagtttaattctgttctaaatcatcaattatcaatgtttctttcaacaatgccttatttctgaatttaaccctgtctaatactagttccctgagttcgatactcgaattcatccgttttaattttaaatacttgacaatccggtgcactttccggcaaaccggatttcccttgaacatatttgtataaagaaaaaatggaccaaaaagtaactacagggtaaatccaacaaagtatttatggcgctcgtgctggcgatctagattcattagaagagtttatgttcagtttacgacattgctttata

SEQ ID NO: 2424 - DNA, 357 bp, Glycine max
  unsure at all n locations
actcattttatatatagcttaaggtgtgtttggtttgtattttcattttttgttttcatttcctgttntcagnttctgacactactaggaaataaggtttttacatcaattatttaagactttcaacatcggttattaaccgatgttgaaagtcccgatgttgaaagtaatatcgttaacatctgtttttcaaaatcgatggtaactaataaatacaacatttggtatttaaatagccaatgttacatgataagaattttgaanaaagaaatttataaatttacatatcaacatcgcgttatttaaaaaccgatgttaactagcactaaaagtcaatgttaactgtcactaacaaca

SEQ ID NO: 2425 - DNA, 415 bp, Glycine max
atacactactcaagcttcttatccaaggcaactcttggtggtgaagctccttcttccttgtcttattccctagtggatggtgcctcccctatactcttctcctttgccttccgctgcatctccatggtgaaaaatcaccattgaaggacctcattgaagctcaaagatccagcctccatagaagctccacaagcaagcttccatcacattcctcacaaatccctccttagtggatgtagtggtggaggagacctccttacttcaccctacttctcttccgccatgacttagggagatatctttcttttgtcttcttctttacttttatgtgacttgtccaaatatattgattgctttgattgttcatgatcttatgattgtgctacattgaggacaatgtgttgtttaagtgtga

SEQ ID NO: 2426 - DNA, 267 bp, Glycine max
gtgactcgcgggatgcgtgttccacgaaaggaatacgcgcggagtcgccaccaacgtttatttgacgaaaacgtcggatagaccggaagagacgcgatctacgaactttttaagtgaaaggttcgggagttgtatttacgcacgtagaaggtattagcactccgcatgcccgtcccatgggactggtagcctttcaatcgaatgtgcaaacatgactttgatttttatgttcccttttatgttcttatatccttgatacccttttta

SEQ ID NO: 2427 - DNA, 364 bp, Glycine max
  unsure at all n locations
tgtaatcgattacacaagtcttgtaatcgattaccagagtatattttcagaanataatttccaagagtcacatctattcaaatggtttatgaatggccatcaaaggtctatttatatgtgacttggaaacacgaattatgagagagatttcattgcccaaaaagttttatcctctcataagattaagagagtttttctgaattgaaatgtcttatcctctcaaaaagataccttggtcaaacacttgcatattcgataaggaattttgattgatcttcattgtataatctatctctttcaagggagatatcttcttctcttcttcttatttctggaaaaaagggattaagagaccgacggtctc

SEQ ID NO: 2428 - DNA, 317 bp, Glycine max
tggatgatacgactgattgtattagggtctctctctccacgaaagagacgtgtctttgtttccactttgctagctttctctcacatttggtgataataggatcccacaactcacaccgcctatggtttgtccaattggatacccaaaaaatgaatggtaggacaacaactgcagttatgtatgttgcaacttcttcttcagagatcggttcccaatgcccaaacaactcttcgagaatttatttgaggcttgatacaagtcaagctcctcaaatggctttggtgcctaacattttcattggtgctcaccgaaaatat

SEQ ID NO: 2429 - DNA, 325 bp, Glycine max
  unsure at all n locations
nggcatctgcaatgggagctntgttcttgccttgtttgtagcatgctagaaacaactgaaaaaggatgataggctaataggttattagaaacagtgatatggtggtgtataatactcaatccaacacataacaatggaaacaaaaatttatgtgttctctctctagactctgctatcaaatgtcgntgttatgaaacttatttttctgcttctttgtctcgatgccgactaaaacaaaataatcaaatcgtgagatttgtttctattggttaatttgcaaattgactttgtttcaaaattcaatctgatattatatttctttatc

SEQ ID NO: 2430 - DNA, 411 bp, Glycine max
  unsure at all n locations
agcttctttccggcaaggtgtttagcaatgtgtgcgagcgcaagcatcttcttcttctccttctctgcctcgctgtcactccccatctctctctgcgatcttaattggagaagaagaaagaagcttcagagctttaaaccctctcctctagctagggtttaatttaggattcacacgctatggcgccgcgcgtgacttatcaaatgtttattactcgccccactccatgattngatcacacccagcctcatatcggccttaaaacttgggcctatctaatggaccagaaagcgctatgcgattccaacccaatattttgctatattcacattatatnttgtgttatttctgtttctgaaaatacccccacctttccgttatacaatatacacaaagtggttccgttgtata

SEQ ID NO: 2431 - DNA, 481 bp, Glycine max
  unsure at all n locations
tagccaactagatggattaccatnttcttcatatnntcctntttgttagtctatgccactatgttctctagagttggagaattatatccaatgatagtgtgttcctttgggtatattagttcaagtatagaaaaatatgtgctctgggtggctcatttattcatgtatgaaattaaatttgaagagtttatatttgccaacaatctctttggtctttcagatgatggcgatgggggatatgatgatgatntggaagaactgatggataattcggtaagcatgaaataatctgtactagctatggtgtgtgtatacatatttgaggagggatcaagttattccaagagtaactttaaggtgggcacttgatagatgggaaatttttactatcccaganatcttaaagtggaaaactatgattctcatgtttggtatgcacataataaagaagactgtcaagaaactatgatttccgtgaatc

SEQ ID NO: 2432 - DNA, 311 bp, Glycine max
  unsure at all n locations
catgcaagcttgaatcattctatgcacccttaggcgttcattcttgctttgtatgttatcatcttcatctcgtctactttcagtattctttttttacgttttaaacgagtctcgaccgatcgtttaagccgtatcctcacttaactaatgataacacgaatctccatcgatcgtttgtgttgtaaagttgtgtaatcaccttttaaatgaatatcaaccaatcatttgcgttgtaatcccgtttaattcatcntgagataccttaatttcgtccggggatcattgcttgttggtatgagactatcgcttga

SEQ ID NO: 2433 - DNA, 442 bp, Glycine max
  unsure at all n locations
ntntattgtaatcttgagattcaggacagcactctgatttctgaaatatttgggataaaaatggtcattgaccagtcccttttccatgacttaaccaaattacccagtgacggtgtaccatttgaaggtacactgaatgacgactgaaaatttgatttctctgcccatgatgcccgccagttggtttgcaccaacaatgcggatatgaccggacgtcttcttgccgggtcattggcttttgaaagccgcatccttcactatttaattgtgcgtattttgcttccacggtcttccaaccttgcccaggtttctgaggaagatctaattatcatgtgggcctttcatacagggtgtcaacttgactgggcacacttagtcagatatcgcatgcataaggcattgcgaataaatgctccattaccatatccacagcttgtcactc

SEQ ID NO: 2434 - DNA, 558 bp, Glycine max
  unsure at all n locations
gggttgaaccattgagatcaaggccctttcgaagccgggatactgtatagtgacctgcatgcatgtcagcttggaaggtagtcatacctcacaanatatatatatatatatatatatatatatatatatatatatatatacatatatatatatatatatgcgtgccgaggtagccagataccttggatatgcatgtatatagcacaaatacctcacaaaatatatatatgtatgtgtaggtagcataatacctcgtgagaaataaacgatcaaaaaacatggtgagagcataaaatatctctgtcgtgtgataagccaacactgcttcgtagagagataactcttagctcttctttgaaagatgaatcatctgatcatagccatgtctttttgaaanactatatgtgtatacaccctgaaggtgtgaatgcgtgtggacattctttccgaacacccacagatggacttggatgaatgcatgatttgatataagaacatattctataaacactgggtcgcttaaataaggacaaagaatcctgaccctcacgttcatcg

SEQ ID NO: 2435 - DNA, 417 bp, Glycine max
taacatcatatgaagccatggataagagcttgtatgaggagatgatgaggggaaggagaacgagagaatgagcacgaaattttgtgcctcacatgaggtctgaactttgaagcgttattcccaaatgatcaaagttaaaaaaatgcacacgcatgacctctatttatagcctaagtgtcacacaaaattggagggaaatttgaaattctattcaaaatttacttgaatttgaaattgaatttgtggagcaaaattttggagccaaaatttcactaattatgattaggggaatttagctatggttcagcccactaatacaagatcaagtccaagattctccactaagtgtgtttaggtgtcatgagacatgtaaagcatgaaggacatgcgcaaagtgtgactatatgatatgacaat

SEQ ID NO: 2436 - DNA, 416 bp, Glycine max
tagcttgaactatatgagatttgaatctaattttacttggatcaacaatataatatatatttaatttatagttgaaaatacggaaaaacaagaattttgatctattgataacatcatatttacctccatcgcaatgttataatacgttctagaacatgctcatattggtttcgtaatagttgatattgatttactcatagagctgaatataagaacaattgtcggttttaaagtacgtgatattctttataaaataaaacggtggttatagttaatggaaataataaaattaagaaatgtactttattaagctcgcgaatcaatagctgtatttaaaacaatatgtctattacttgttgcataacttgccacgtctgtcttctaactgtacttgaatatctaatgacggatatagt

SEQ ID NO: 2437 - DNA, 612 bp, Glycine max
  unsure at all n locations
cactgtgtcacantcaaacactatcgttcttactatatancntatattanannccgggccccaggatttgaacctgtagtagccttgtatcgatactaagctgtggacaatagactctgccgctagtataactatgacaggcatcttgtattcctatacaagagagtataaactctgatgaagaatatgacagtgctatgcttgaatgtattagcaacatgcttttcagtactcccgtagagaagtctgatcgatctccttctattggaggatcactcaagacatctacatgttgacatcgtgaaagcataggttctctttattatcgcaccggtgtggacacgaatgttgaaatcaatcacttgcgagtaatgttatctctttctgtgccagtgcaacaactagtgatcatcttgcttccacatcttgaatgtggcgcctacatagatataatatcaccaggtttcagcctgggttatgaagaatagccttgatttatggtaagatatttatgatgatcgtgatcggataaccgctccttcaaacatcgaccatataccgctgacagattaggtaattactgtgcccacagttctgttcatcactccttcn

SEQ ID NO: 2438 - DNA, 446 bp, Glycine max
  unsure at all n locations
agcttctgtcttgtaacctatagaattgcttttgaaaatctttnttttttttatggcagacattatttaactatactttgcttcattcacatgatgctgcttcttttgtcaattaaatgaaaagggtgggtagcatttgatccttatgattccagatctagttgaaagttgtgccagaatttttctaaaaatattttaactgataacattcaaatgaagtagcttcatttgacaattaaatgaaacgagtgggcagcacttgatccttatgatttcagatttaattgtacgtgttgcttgaagtttttataaaaagtatattttgtctttttaactgatatgtcattcacatggtggtacttcactttgtcagtaaatgaaagggggtggtagcatttgatttgattattccagatctagttgatagtggtaccctaaagtttcta

SEQ ID NO: 2439 - DNA, 484 bp, Glycine max
  unsure at all n locations
tctttnggaccttgaacaggcaactaactcctctttcanaaccatgctatgtgctcgcgaatggtccctctcttcccttcgcagcttgagttcattgttgctaccccacagagctccacgaaatttattccggccatactcttccttgcgagccctcttggtctcttgttcaagggctcttgcagtagttgcattctcttcccgtaacccggcacactccttccgaatgtgtgtagcgtccaacttgaacttctccttggcaagtttcgcctttcctaactcgcttttgagagcttggacttcttcgtcctcttccggtgcttcaaaactttcttcgctgacgacttttaacttggtgagccaatctaaacctcgtacatgaacttttaaccattcatggtacccaccaatgatgccattacgaatgcccctaagttcttgatcttttcttaacgggggttcccatgccttatggattctttgg

SEQ ID NO: 2440 - DNA, 368 bp, Glycine max
  unsure at all n locations
agcttccttgagaagcaaggaaggtagcatccttgagaagctacaggggggctactcacacctctccattagcaaagctcgcccccatgccaaaatacatgaaaatacaatggtaagcttccttgagaagcaaggaaggtagctttctttggaagcaaggaagaaagcttccttgagaagctagaggggggctactcacacccctccaatagctaagctcacccccatgccaaaatacatgaanatacaaaaaaagtctttactacaaagactactcataatgccctgaaatacaaggctagaaccctatactactagggtacccctaacttgtacccttaatctgtagagtaccctacatacctaaa

SEQ ID NO: 2441 - DNA, 434 bp, Glycine max
  unsure at all n locations
ntngaaaacanactntgccattggtaatcgattacaggaatctggtaatcaattacaagagagtaaaaactctgatgaanaataaaattgtgctatgtttgttttttttgaaaaatcttttcaatacttcccttgtgaagtcttcttgatttcttctcttgaaagatcttgaattcatcttctcttgaatcttgaaatcaaatttctcttgattcttgaattgttcttgactcaatcttgaaatcattctcttgggatttttgtcatcacctttgttatcatcaaaacaacttgaatcaatcttgattcaacatcatgaagcttgcttctacagaaattagttatgagttggttttatcttggnttatgtgtattaacctttaatcttttttaaagataactcgcggcactaatgatcggttaaaacctacttt

SEQ ID NO: 2442 - DNA, 421 bp, Glycine max
  unsure at all n locations
agcttagcatattgcaattggatgcttcccgccaccagtgatcaagcctctttgatagccttaaacatctttctttcatcaatgtgcacactataatgttctctgaaatgttcatgtggctccacatgatttaggtttggatgaaacctaagcttatcagccacccttttttccatccatttcattgtagcttgtttatttttgaagacccttccatatatgtgctcctccaaaaaagtgttgatttgaaagcttcttgtaacttcgaaccatgaacaataaatntcccatgaacatccaacttggttacaacgcgctctagcttgaatgttgtcaacttttacccatttcagatctctgccatggaaaatagttaagtctctaacaacttcaataaacattttgatgctatcaaactcca

SEQ ID NO: 2443 - DNA, 470 bp, Glycine max
  unsure at all n locations
tcatgatgaatcaagattgattaaaagagtnttgatgataacatagatgatgacaaatagctcanaagtcaagaacacttcatgttaacaaagatgatgacttcaagaatcaaagaatgagttcaagattgaatcaagaacacttcaaggatcaaaaggaaatttgatttcaagaatcaagaatcaagtttcaagattcaagttccaagaatcaagatcaagattcaagactcaagattcaagaatcaagagaagattcaatcacgataagtattaaaaagattnttcaaaaactgagtagcacatgaatttttctcacaaaccttttaccacagagtttttactctctggtaatcgattaccagattggttgtatcgattaccagtagcacaatgcttttcaaaaagctttcaactgaattacaatgttcaattgatttaaaatctgtatcgatatatgatttgtaatc

SEQ ID NO: 2444 - DNA, 468 bp, Glycine max
agctcttagatgcatgtgcgcaccatatttactatactccgatcaactaatgcaatctattgattgaaaagataatccatactactcttctaatgtagtctacaattaaaaaattaatctcacagaaaatagtgcttaagccattcaaatcaagtcaacatgacggtggcaacacaacagcaaagtgggatcgacagagagagggagaaggaagcttcctagaacaaaaaatggaaatgtagaaatgaggtgaggttgctctacatgcagttggaatggaaacacataaatcagctgaggttgtaatgaaaacgcaaaaatgatatttggttggtgttgcttgttgacgtgcagaagcttccttgtccaatgacatgacctcataggtattgaggtgcagaagtacctcggacagaggaagaaaaccgtatatgtgatttttgaaatgtaaaatttacaaaagccccg

SEQ ID NO: 2445 - DNA, 484 bp, Glycine max
  unsure at all n locations
cgctataatccatntgtactaaacctttctcaattttaatacaagcctaattttcagctntatactcttttctctcaattctcacttttgaaccataaattctaacatgctataaaagtactaccacccacctgaaattttttgcaactcctttaattttcttttcttttcttaatcgttttctttccattttattttcgagaaaatccaagccctcaccgttcaagtttttcttttcactcttttctttagttctttttcagtttcaagttcttgagttaacctatttcaatttcaatttttaaatatttcaaactatattcttgagacaacctanatcaacaattaattcctataattgttttatataanaataattaatttataaacaccaatagagataataagtaatttaagtttaattaataatattatacattttttaaaaaaaataaagtttttatagtatttaagtagtaattat

SEQ ID NO: 2446 - DNA, 427 bp, Glycine max
  unsure at all n locations
agcttctatataagctgaaccattttatcagtaaacacaagttgagttttattcagaaaattagagtttatctcttttatcttagtgagagtgattctcctaaattcttgagtgattcaagaacaccctggctgtatcaaaggactttcacaacctttgtgtgttgccctcgctggaaagagtgattctttccttcctttcatcttcacccttgttctttcaaaccacaattccagaaaatccacctctgcccagaattatctcgtggccataactcccattttatgcactcaaantaagtgattcttgagcctaaattgactttcanaacgagacctttcacctcgttttggaatcacctcatttggagccctgtagcnttcagtattgccatttctatatttctgtccagccaccacttaaccta

SEQ ID NO: 2447 - DNA, 443 bp, Glycine max
agatggcctcaggatattccttatatccagactggaatacgatcaatagacctcctatctttaatggagagggttgccgctactggaacacccgaatgcaggtttttatcgcggcaatagatctaaatatctgggaagccattgaaatagggccttatatacccaccacagtacaaagagacacaatatgaaggagctgatcaagtgaaagcatagccatagataaacctagagatagatgggctgaagaggatagaagacgagtacaatacagcctaaaagccaaaaacataatagcatctgccctacgaatggatgaatatagcacagctccacattgcaagagtgctagcgaaatgtgggacactgttcgagtaacacactgaaggaactacagatgttcatagatctaggataaatgcactaactcatgagtatgaatt

SEQ ID NO: 2448 - DNA, 318 bp, Glycine max
gtttttgcccaaatggagacactggatgtctgcctgtctcaagtcagctagcatttctattcttatcaatggcagtcctacaaaggatattgctcctactagaggtttgaggcaaggggatcctttagcccccttactctttaatatagttggagaaggcatcacaggattgatgagggaagcagttcagaagaacttatatataagctatatggctggaaagaaaaaggaacccattaatattttgcagtatgcggatgacacagtttttgtgggtgaggctgagtgggagaatgttattgttttgaggctatgctc

SEQ ID NO: 2449 - DNA, 374 bp, Glycine max
  unsure at all n locations
tctcccctattatgctataaatatggggagaagtgaagaagaaaagggttcagccccttagacacttctctctctttcgaatttgctgaggaaaattagttctgtgaagaanattcgagccgaggcgcttccgtaacgtttccgtgagtagttacgtgaagattctcgaccgttcttcanagattcatcgttcgttcttcgttttcttcagtcttcaacgggtaagtacctcaaaccaagcttttcaattcactctatgtacccgtggtggtccacattntggttcatgtatttttattctcggtttcatttactttttatacccccttttgacgtgcttaagccatttatttaagtcatttctcgcttaatct

SEQ ID NO: 2450 - DNA, 419 bp, Glycine max
ctaagtagcactcaaaccaggtgtatgtaccttcaaggcctacactccgaagagtccgtcaagatctctccctcctgatttatgaccaacccctacaataatatttgcatgcagacaccgctcatgaattatacaatactcacgacctcccacctgttgtttacacacgttcaacataattgcactataatttaacactggttcctaaattaaaaacctacatttttcctttaacattgcgcataataaattttctcaagataaacactggtcaggctattgtacaattcacaactcacgacacaagtaatgttacatcaagtattaaccacacacttattcataactaaaactcatgttcacaatttcacatctcttaatatcacaatccaccatcacatgtttacatgtatatcaca

SEQ ID NO: 2451 - DNA, 492 bp, Glycine max
gggaaggtagtcatacctcacaaaatatatgtatggtgtgttaagtagcgaacataccttggatatgcatgtatgtaatttaggtggcaaaaaaaatacctcaaaatatatatgtgtgtgtgtgtgtgtgtgtgtgtgtgtgtgtgtgtatgtttaagtactaagataccttggatatgcatgtgtatagcacaaatacctcacaaaacatatatatgtatgtttatgtagcaagataccttggatacacatgtatatagcaataataccctccataaatattctcatgtgtatgtagctaaatacctcatcgatgaaaataacacaggcgaccatgaagcataaatatatctttcggctgaagagacagcacacttttgagtgagataacttccagctttttcttgaacagattcaccgactattacaccccttttgtcaaaaattgtgttgcaccctgagggtgagccattatttgttaataacatttcg

SEQ ID NO: 2452 - DNA, 384 bp, Glycine max
gcaagcttcgaagatagtgatgaggtacaagccctataggcagagcttgaaagagtccgagtagtcgaagagaagttcaagtccatagccatcaaaagtctgaaaagagtatgatgaactaagggacgtcaatatggccaccgctgaagccttggaacgagaaaccaagaaggcccgataggaagaacacgaccaaagcaaagttttgagggggcttatagggcagcaatagtgagctcacgctccaaagaggtgaaaggaatcatcacgggtcataggcatgatctggaaggacgagctataggtttgccttatgtcgaaaagaaaattgtcccaacagttaaaccgagactgaatggaatatgtgggccatcatcgataagt

SEQ ID NO: 2453 - DNA, 486 bp, Glycine max
  unsure at all n locations
tatgcgcatatttccttacaaacgttctcttgcacaagaacattctattaaccgaaaaaatgcacccatatacaatcaaggcagcttcgttacctagattatttacacgtacttccaaggtgtatttgttacttacatcacacacctccttggctaaattcacatacatgcatactcaaagcattttggggtaccaaaaattgcacatgtgcacatcttggtatttctaatacctatacatacacaaacttcatgatgaatcttgactatctacacaataaggtgctacattntatgctcttttcaagtttttgctacctaaagccgcatccaaattcaagtatattttcctttgctgaactaaaatgtattcaaattaaaaggtatacattntttggtaatgtatcttctttacataacatgcaacatatttatgtatattnttttgtgagacattntgactaccaaaaattatatgtacataca

SEQ ID NO: 2454 - DNA, 433 bp, Glycine max
  unsure at all n locations
agcattgcaataatttcaatagttctatcgaacatatcaatagacacgtcgttttttcaaatattttgtgtaggtaactgttacacgtcaattcttgtccccaaagattatggattagagattttaatttaggattcctataaataatattataaagttagaaacattaaaacaattgatttcagaaattaatgtgaaagagattatgccaaaattttgttctggaacctggataagattgctatattttaaagtaaattatattgtaaaataatatcatataaaggtaattttttatttggtaacatgaaaactntatatgcaagtcaaaatccaaatttaaacatcttgtttctcaaataataataaactatattccaattttattaaggggatacccttctgggatatatatatatatatatatatatat

SEQ ID NO: 2455 - DNA, 432 bp, Glycine max
  unsure at all n locations
ggctctanatntacattgatgtttgtatttattggaggaggttgtatgccatttttgttttaagggtagcatttcttggtaaaaactaactttccaaatgtttgccttcgcaggaatggccccgaggaagcttgcctcaaagaggtccaggaaggacaaggcggccgaaggaactagttccgctccggagtacgacagtcaccgctttatgagcgctgtacaccagcagcgcttcgaggccatcaagggatggtcgtttctccgggagcgacgcgtccagctcagggacgacgagtatactgatttccaggaggaaatagggcgccggcggtgggcatcactggttactcccatggccaagttcgatccagaaatagtccttgagttttatgccaatgcttgcgcaacagaggagggcgtgcgtgacatgag

SEQ ID NO: 2456 - DNA, 416 bp, Glycine max
  unsure at all n locations
tactcaagccccgactggggacattggtgagggacgaaagatggngatggatgtggagccatgttaganaaatgctcacacatggcatcaactatgctggccagctcggagtgtttctcggcgagggtggagatggcttcttcgagtctatccgtggtggtacaacgggttccgtgttctgccatggtagcaagtcggaccagctgttaagagctgatgagagagagagagagagagattactacactaagctaatactaggaaatgatttctttgctttattcatgagtgagctgtccttctatacacaggtcttacattgctatggcttacaatggcaccaactaccttgcaataacagaataaccaccctattgtaactaactaacggtatccctaactaactggtatccatg

SEQ ID NO: 2457 - DNA, 225 bp, Glycine max
agcttttcactcggatgtccgattccggagcataatatatcgagacgctcgaaattgagcaacggaagctcttgagaaattcaaatggtcataactttccacatggatgtctgattaagacgcataatatatcaagatgttcgaaattgaacaacgaaagctctcgagaaattcaaatagtcataacttttcactcggagggtccgatcatgcgcataatatatc

SEQ ID NO: 2458 - DNA, 362 bp, Glycine max
ctgcctttgccctgatatatcttgaggactcatggtcactatgaatgacaaagtccttgggataaaggtagtgttgccatcgtttcaaagcccgtactaacgcatacaacttcttatcataaggtgaatagttaacggtatgaccacttaacatttcactaaaataagcaatcggatggccttcttgcatcaacacaggcccaattcccacatttgaagcatcacactcaatctccaaagattcttgaaagtttggcaacgcaagtatggcggcattagttagctcttgcttaagaacattgaaagcttcttcttggttctctccccatttgaaaccaacaattttcttgaacacttcattg

SEQ ID NO: 2459 - DNA, 378 bp, Glycine max
  unsure at all n locations
agcttcacaccatgtgcatttctgttctttagacagtctcagcatagttgcggttgagacacaatgcaactttgtatcacaaacaaaccttcctttgcagttatatttaactgcgcagattctgctgctgtccatatatntattaatttgtacttgattnttaagcttaaactgaaacgaggccctagagaacaaaagacatcttctctgtacaatggcagagaataaatataattatatataattgttgggggaatttcggtacctccctatgcggtagacacgcgacactattcagcgatctctcgcaaacaacgaaatttccaaagacctatactgacattccaatatccaagtcaataaatatgtgagatgagt

SEQ ID NO: 2460 - DNA, 484 bp, Glycine max
  unsure at all n locations
ngctataatattagttaaaaaatagtttatgaaatttatcacatattatttttataaaataatcatacaaacattcatgtcataagataaaatacttacaaataaatctcaaacatatataattttgtctttataattaataatttatgctattgatttatgaaagtttgtgtatatgtaacctaacttaatcttaaattcatcaattacaactatatttgataagacatttcagttaatttttaatttttttcactagctaaaaaatttgtttgactatttagaaaacaagttttttttaatagtttctaacattttttcaaactatttgaagtaacattntttaaaaccttagatttgaaattctaactttntatattttttttcattgttatacttaatatatttatccaattntctagttaccattttttaagagatcataattgtattattngtcaatcattttatctttttcaactac

SEQ ID NO: 2461 - DNA, 462 bp, Glycine max
  unsure at all n locations
gcatgcaagctcgctgcattggaagggtccaacaatctattgttaaagatgactagacgagtaaaattctgcataagaataatgcgatgggtggtagtggttcttcctattcttctagttcagacaaagacaacctggaggagtgtcagatgctgttagagtcaaattgttgatgtttgatggagtcggtccaagggcctctatttcactttcaggtgtggcgaaaggttttgttctctttagagaagcaaatttcaggtgacaggttatgtagatgtgatactatgaaaaanaaactggctatggattgaagacaagctaggaagaaatatgttttggacaattacagtataaatatctcactaacaattattatctttcttctttttctaatacattatattatacatttatactctctatttatttctcaattctttgctctctaagggcactatacta

SEQ ID NO: 2462 - DNA, 318 bp, Glycine max
  unsure at all n locations
cactataactacaaagntcttgattatcctcagcgtcaccaaatttttaccacatcacagcaggataaaaaaaaaaagcctttccagggaacctatcagacgttgacacatggcagtcaacatctgaggctaatggtcaatatccaattgggacgtcccggaccaacattgcagggatttaaaaaatgggggactaaatttgtgaattaaattataggggggccaaacgcgaaactggagcaaaagtgggggaccaaatgtgcaattttgtctcgttaatacaatcttaacagcacagaacttggtgcttataccaat

SEQ ID NO: 2463 - DNA, 486 bp, Glycine max
actcgcggcatgcaagctcgagagagcccgggtagtcgaagagaagttcaagtccatagccatcaaagtttgaaaagagtatgatgaactaagggatgtcaatatggccaccgatgaagccttggaatgagaaaccaagaaggcccgaaaggaagaacacgaccaaagccaagttttgaggggctttatagggcagcaatagtgagctcaagctccgaagaggtgaaaggaatcatcacgggtcataggcatgatcttgaaggacgagctaaaggcttgccttatgtcgaaaagaaatttgtcccaacagttaagcgagactgaagggaatatgtgggccatcatcgatgagtgcaaagagaagctaaatctagcggcgactcacgagcacaggctagaggatgagtacgccaagatatcagcagatagcgaagcaagggagagggtaattgatttcatggcaccagaggcaacaatgtggacgga

SEQ ID NO: 2464 - DNA, 453 bp, Glycine max
atacacactcaagccctaacctcattgtctctcacagtctgtagatttgggagccaatccaatccttgtgtccggactctcagccacttatgatagccgccgatgatcccattactgcttcctctaagctctctgtcctttcttcacgccgtatcccatgccttgcgaactacttggagaaccctcgcgttgtggacactgaaaccccgtgcgatgaaaggcgtgatgcttccgtctgatggcactcctctcatgggacatccttcgcatgaagatagaatcctgattcttccttccttctagcgagggaaccaattaacagacgcccctccatgctagccaagagttggtcccaattcgcctttccttattcgacgcacgagcggtgaccttgcagcggatagacgggcctaccttcttggagataagggtgtgagaccagccacacatata

SEQ ID NO: 2465 - DNA, 477 bp, Glycine max
  unsure at all n locations
agcttgtanaaggtggtacggaaggtaaatgatatgaaaataaaagtacgcaaaacatatggggaccaccaagggtacatagaatgaattgaaaagtttgatttcgggaacttaccggttgaagaccgaagaacaacgaagaacgaacgaaggatggcggaaaatcttcacgatatcacccacggaaacgtctcgaacgagttacggaagcgcctcggcttggattttcttcacggaaacgaattttctcactaatttcaagtgatcctcagataccaagagggttgaatgcttttgttcttccctcctccccctatttatatggaaaagagggaaaagcttgccacccagctcgcccaggcgagctggtgcctactggaggagcttccttaaaggcccaagtgggcctggttgctatttgcacccctgttactaaatacacccctggctttttttgtgattctttttcgtaacgta

SEQ ID NO: 2466 - DNA, 466 bp, Glycine max
ggcttcctttagatttctgagacgtctcaggacttcatttattgtgcaacaaaggacgccaagtatctcacagcggctaaccaaaggttgcatgtcatcaagtaataatccccgaacgaaatcagggtatgacactttgtatttcctatgtgttatatgtatggtagttttatttcttaatcttatggcgatggatttagagatgcaccttaatctcattgtttatgctattttagttagaccatctacaattacttgatggttaccataatgtcgtttaacttatttgcttaagaagcctttatgtttgttgcaggtgatttacgaagcaatcttgtaatgtaatgatttcaaaaccattcagcatttgataaacaaatggtctgataatatgatttaattggacatttatacaaatggtttactagcttgacaagaatgacacttcttattacttacacataat

SEQ ID NO: 2467 - DNA, 471 bp, Glycine max
  unsure at all n locations
gtatggctcgaaacatgcaccgaggcagaggtacaagaagtttaatgagtttatgagcaactcaggattcaaaagatgtgacatggaccattgctgctatgttaaaaaatatactaatagttatgttatccttgctgtgtatgttgatgacatgttgattgcaggatctagtatggcagaaattaacaggttgaagcagcagttggcagataactttgaaatgaaggatcttggtccagctaaacaaatccttggtatgagaattcttagaaacagatcagaaggaattntgaagctgtctcaggagaaatatatacacaagttgcttgacaggttttaccttggagattctaagaccaggaatacccctttgggatctcatttgaaagtttcaaagaagcaatcttttgagacagatgaagaanaatggtacatgtcaagagtaccatatgcatcagcaagtgggagttt

SEQ ID NO: 2468 - DNA, 448 bp, Glycine max
  unsure at all n locations
tcaagctctgcggatntggccttcgccggcgaaatgatcgaagtgggtctaaaaagaggcaaatctgatcatcttgttttgataaatgcaaaaaaaaaaaaaaaaaactggggcaagtgaaaaggatgagaaggagggagaaacctatgttgtgactgccattcttatacgaccaagtttcccaccaacccaacaatgtcattactcagccaataacaacccttctcattacccaccacccagtcatccacaaaggccatccctaaaatcaaccacaaagcctacctaccgcacttccaatgacaaacaccacctttagcataaaccaaaacaccaaccaagaaatggaatttgcagtgaanaagcctgtagaattcaccccaattccattgtcctatgctaacttgctcccatatctacttgataattcaatggtagccataacccc

SEQ ID NO: 2469 - DNA, 480 bp, Glycine max
  unsure at all n locations
cggatggacatgagttcgcgcgtgttagaccgngcgtcttaagacaccgcggctgcaagctttcattattatatgtacccggatggtccgcgtttgatggggtatnttattctggatgggagactatgatacacaatcttgcgagcttaagccacggtactctgagggtgtgtcgcttgcgttaaaaatgaaagagattaccgccaatcgatggaattgatgagtcgtaatttcagtagaaaaagtgcgagcgttcggcgtgccgaaccatgtggcggagacaaggaggtaaagtatataataaaaataaggctttggctagaaaagggaagacaatcggagcgttggtctttggattctcattttaatcgaatgaataattctaaggtgcaccaagcctaaataacttaccaggcagctccccataaagaggattcgagggggtattgcattctcatcagaagaggggattttaacgcc

SEQ ID NO: 2470 - DNA, 486 bp, Glycine max
  unsure at all n locations
tgaatcttgattgtttgaacgaagagagagaatntggctattattaaaaaaagactttctctttcctttntctaaaagcaattgccacatgtctcattttgagtggagcaaaaggggcccacctcttccccttgatgtgacatcatacacagccacaatgagagaaaaatttgaccttttgaatgctaaaatcctgcctcggtttgcatgtcgcctctatggttccagttcctcatgtttctctacacccgtcgaggctccgcttcgaaagtatacaatatatatatatatatatatatatatatatatatatatcaaaacgctcagaatgagaccctgagcgtggctcacaggttggttttgctaaaatttaatttgcatgcaaaacgataatctttagactaattaattgaggattaatctataactggccagttatggattactcttcgctattagtctacncgcgatctgtcccaatgtcan

SEQ ID NO: 2471 - DNA, 421 bp, Glycine max
  unsure at all n locations
agcttgcacctcttcactctcctcaggcatttcagcctcttccncgctcagactctatagctttgggagccaagttattccttacgttctcgacttcaaccatttgtgatagccgcctatgacaccatggctacttcccctaagctctttatcttttctttcctctttattcaatgccttacggatcctctgaagtgtctgtgcattagcttcattgaaacctcacgcgatgaaagatgcaatggtctcctctgatggcgcacctctcatagggtaacctagttgtcttatgggcaacaggattataattaatacaacccatcatccccatcaaagagaccattggaaattcttcacatgagcataacactcatgcccctccttctttcaccgtgggaccaactattgacgccctatcatg

SEQ ID NO: 2472 - DNA, 363 bp, Glycine max
  unsure at all n locations
ngctaacccgtggaagctcctaatatctcccacaccttttggtgtgggccattcttggatggccttgattttcttagggtccacttggactccatttctaccaactacaaaccctaagagaactatattatctacacaaaaggtacctgaaagaacctgcctgagatgtcctaagtgatcatctagactcctactatacaccacaatatcatcaaaataaataactacaaatctaccaatgaaatcccttaagacatgatgcataagcctcatanaggtgcttggtgcattactgtgcccaanaggcatcactagtcattcatacaaaccaaacttggtcttgaaagcgggtttccactcatc

SEQ ID NO: 2473 - DNA, 407 bp, Glycine max
  unsure at all n locations
agcttcatgatgatgaaccaagcaattntgatgatgccaaaagcccaagtgatttattcaagattgattcaagacttcaagatcaagcatcaagaatccaatccaagaatcaagattcaagagaagaaatcaagaagcaacaagtcaagactgcatataggataagtattaaaagaattnttcaaaaaccaaataacacagttttgttntataaaagaattttctcaaattttctaagttaccagagtgattactctctggtaatcgattaccagttggcagtaatcgattaccagtggccagattggttttcaaaatgttttcaaatgatttgtaacgttccacaatgattttcanatagtgtaatcaattacactatattagtaatcgattacaagtgaatctga

SEQ ID NO: 2474 - DNA, 551 bp, Glycine max
  unsure at all n locations
tgacattggaaccctgttagtaccgtcgcatatacngacacttcgaatactcaagcttgtagactaagtgctcaccaacactagataagaatccctcaggttgtttcatgtaaacctcttcttctagatcaccattcaggaacaccattttcacatccatttgatgcaactcaagatcaaaatgagctactaatgccaaaattactcgaagagagtctctcttagatacaggggaaaggtctctctgtaattgattccttctcttttagtgaatcctttagcaacaagttttgccttatgtctctcaatgttgccttctaagtctttctttgttttgaagacccatctacatccgatggcttttacaccaacaggcaactcaacgagatcccaaacttggttagatgccatagaatccatctcatccctcatagcattataccacaaatttgattccttagaactcatggcttgtgaaaacatctcaggatcatnttcggctccaatggtgtagttggattcttgtangtacactacataatcactacgan

SEQ ID NO: 2475 - DNA, 330 bp, Glycine max
gacatgctattactatatattgcacttcttatctaaccttggaaaggcttcacaaagagaaagccactattacaaatatgtttatttctgatgaatggatcctaaaccagttatctaaggagcctaaggggaaagaagttgctaaggtagtgctcatgccttctttttggaatagtgtggctcaccctcttatagacatggctccacttgtcaaagtgattcttcttgtggatggtgaaaggaaaccagccatgggctatatttatgaagcaatggacaaggaataagaaacaattatcaagtgtttcaacgacaatgaaagccagtaca

SEQ ID NO: 2476 - DNA, 483 bp, Glycine max
  unsure at all n locations
ntagaggtttctaaatgtcacattatcatttgtattttcatgttgctatgtcagggttgggtgtaaagtttctcactcttatttcattgattttgccggcttaaattgatgctttggttttattgccctacacattaaatttcataattttttctctctcctctttgcaatttttctttaactaaagctctatctcattgaattttattatcttttgccctcattntctttatttgaacctcatttcatcgtcttttgcttcatcttctcgatattttttatctgaacctccatctcatttatctaacaaaaaataacttattttggttctttatgcctcctctctcagtaagtttttttaatctaaatctgcatcctattaattatcttacctatatttgttttgttgtgcaaatatacatctaaatttagaaaaaatgattcctaagtagtgaatgaatttgagcaatcaatcttatctct

SEQ ID NO: 2477 - DNA, 373 bp, Glycine max
  unsure at all n locations
agcttcttaaaatataagatatgagatactttgtttataaagataaagagatattaaattattttaaatataatatttcattttttctttgaaaaactaatcaaatccatatctctttaacattatacataaaaacatctacttgaggcaaggtacacaaacataaactaaaaaaatagttcaagtctaattntagatttagaaaagaaaaagatgatttgctctttctggttttactcatcaaagagttgataggtagtctcagtgtaaatacacaaagttttcacacggatacattttcgtccattcacttaaaatgttgggtgcactcgtaataatgttgagtgcacctaacatcacccttttctttatc

SEQ ID NO: 2478 - DNA, 445 bp, Glycine max
  unsure at all n locations
ttcaaaacatgtttgcttctggtgatcgattatagcctctgataattgattaccagagagaaatatatattttccaaagatgtacaaccacttaaaaaactttataagagatttgaaaatttaagtcttttaaggccaaaccattgcaattttttaagagattcttttaacaaataatggactattgtgaatcgcttctattaatctcttaatcttgacttgaatcaactatgaatagcttcaatcttttggcatcatcaaaatcttcatacagcatatgcattcacatctacaagtgagtttccgttcttgtagattntacataaaaaaattggttttgggtttgggcctttaattatctatttgtcttctggagtgagtttggaaataatggaattactagagacaaaatctcaattggattgattggaaatggatgtaactc

SEQ ID NO: 2479 - DNA, 233 bp, Glycine max
  unsure at all n locations
agcttagattttttagtcaaactgttggtagaacaaaaatagctaatatgatgacaaanaattgttcattattaaaatcagtcccaccaactctcatgtgaatgtctcagaacaatgatgagagattattaccgattaatattatatacttataagaatcaatagaacaaaagaatatgtataaagcaattgcaaaggcatataaaactcaagcacttacaaaaaagtccatg

SEQ ID NO: 2480 - DNA, 341 bp, Glycine max
  unsure at all n locations
taaggaatctccgganattgtattaattgtttgtgtttctgataggattaacatgataaatagttatattgcgatcatgaaattatgtataagtgataaattaaatatgtgatgaattgtgggataacatgttgctttgaaattataatattgttattgagattgagtataagtgcaaaattaanaatgcattaatttgtgagatacacgtaaacatgtgatggtgaattgtgatattatgagatgtaaaattgtgaacatgaaatttagttgtacataaatgtgtgggtaatacttaatggtgaaatactcgtgttgtgagttgtgaattatacaataat

SEQ ID NO: 2481 - DNA, 361 bp, Glycine max
  unsure at all n locations
agctntgngctgctcaattgctccaggttgctgcatggaaaggcaaaggtctgtatggtggtcagcagaggaacacaaaccgcagacccttgcgacaggtacagatttttggttcaaggccagttgggttaccaagttaaccaatgcatccagttttccttcaagcttcttagtttcagatgatgcagctgagtttgtagctacctcatgcactcctctaatgactatagcataatttctggcgctaaactgctgagagttggaagccatcttctcaattgaatttctggcttcaacaggagtcatgtctccaagggctccaccactggcagcatctatcatacttctctccatattactg

SEQ ID NO: 2482 - DNA, 433 bp, Glycine max
  unsure at all n locations
tcctcggggccattcctgcanaggcaaacattgggaaagttagttttaccagtgggacgttactcttaaagcacaaatggcatataacctcctcccataaatacaaacatcaatgtaaatttagagtaagcttatgcgcatatttccttacaaatgttctcttgcacaagacattctattaaccgaaaaaatgcacccatatacaatcaaggcagctccgttacctagattatttacacgtatttccaaggtgtatttgttacttacatcacacacatctccttggctaaattcacatacatgcatacccaaagcattttggggtaccaaaaattgcacatgtacacctcttggtatttctaatacctatacatacacaaactctatgatgaatcttgactatctacacaataaagtgctacatttcatgctc

SEQ ID NO: 2483 - DNA, 433 bp, Glycine max
agctcgtagtatgagggaggactttatgatggttccgcatccacctacttttttgagtagtttccttttagcagatgcttcaggagttgtaactccgagtttggttcatttgtaattttgttgcttcaggttgttaagccccttatattaccaaaaaaaagaaatatcatagtatacaatattatacaaattctcttttttctttattctttccctgtattccaaaacacaaaaatttctcatatttgagttgaaggagcactctgccctagaggagtactctacatttgagccaaaggagcactttgcttatttataactaagtgttcctttatatgcttcactaactatctataaataaagttaacatttggtcaagggcattgcattggagattctacatctactagtgataagggcctgaaacatgtaa

SEQ ID NO: 2484 - DNA, 443 bp, Glycine max
  unsure at all n locations
tctcggctcatgctgngaacgcctctagttcaacacccgtgcagtctaaggcacccacccagagggaagctccccaagttccaactccgaacacggctcgaccggccggtaattccaacacgacaaggaacttccctccgaggccattgccggaattcaccccgctcccaatgacgtacgaagatcttctaccatccctcatcgccaatcatttggctgtggtaactcccggaagggtcctcgaaccccctttcccgaagtggtatgaccctaacgcaacttgcaagtaccatgggggtgtcccggggcattccgtcgagaaatgcttggcccttaaatacaaggtccaacatttaatggatgtcggatggctgactttccaagaagatcggctcaatgtgagaaccaacccgctcgccaatcatnggagggggagcggtaat

SEQ ID NO: 2485 - DNA, 423 bp, Glycine max
  unsure at all n locations
tcaatcatttccaaatatgcatgtgaattaggacgcatcaacaagaatcaagccaaggctattgtgcaagcaatcaatggggcaaaacacaccaaatgattatgatgatggatggctcanattctcacaaaggtaaactcatcactttcaaattgagctttcaaaactatcatgacatgtagaggagaatcaaggatttcaagtcacaaaatgtcaaaaacttttattccaaaacaattacccatttcttgaacatatcctataattcaaagaanaacatgcaaagttgtacatgcacacaaaattgacccaaaatattaaactaacaatccgaagaaaactacaacattaacanattaacaaaaccaacaaaactagcaaaccaaagaacactccccccccccccccatacttaaacaacac

SEQ ID NO: 2486 - DNA, 437 bp, Glycine max
  unsure at all n locations
cgtgatntatcatgagttgaccaagtgtgtatgtcagatgagatagaacaagaaagtatgctcacaattagaaatgttagtcagtagacaggttgattgtgaatgaaaagcttgatcataaattggtgagagtgtgatcttaaattgtgagtgaacgactagcatagggtaataatttttgcatcaatctctaaaatttatcacatttggtgggggtgccataagcgttgagaaaaattgaacaaaacacttgactggctattttgctaaatgaatgttaaatacaaacatgcatgtgatctcatcttatcatcttcaaaagttttgcaaaaattgagagtcgtttgtgtcgcaacctaccctatgacgggcgtgcgggtganaagacaaaggagcgttctccanaaaggaaaacacacgggagtcacccgcaacat

SEQ ID NO: 2487 - DNA, 444 bp, Glycine max
  unsure at all n locations
agcttctcatggaagtttctcaagaaaacttctcaaggaagtttctcaaggaagctacctaggctataaatagaagcatgtgtaacacttgttgtaactttgatgaatgagagtcttgtgagacacaactcaaagttcaacttttctcccccttttcctccttcaatttcgtgctccaccctctctctttctctctctctttcttttcctccattgaagcatcctctccaagcttcttatccaaggcacattcttggtggtgaagctccttcttccatggcttattccctagtggatggcgcctcctctcacctcttctcctttgtcttctgctgcatctccatggtggaaaataaccattgaaggacctcattgatgctcanagatcncagcctcacagaagctncacanagcaagcttcattangtggcttagccaggagtc

SEQ ID NO: 2488 - DNA, 490 bp, Glycine max
  unsure at all n locations
ccgatgatcacgatcaacctacttaggacaaatntataatgctttgaatntattggggtggtgtaataatgaaataatgtaaaactgaaatctcaccaattaaagtttataacataaacaaactttaagactaatttgtttcgaaagttttattatttattgctcccttcaactttttacagttttactattgtacaactcaaattaatggcgaaaaggaaacaaacctttttgcttgtatttccatttgtgtgaaagttaatttgatttataatttcactattgtttcaaaacttaattcactgttcttacccaatcagaagtaaacacacacaggaacataagttgcataacccttttgcttggagaaggaaaaaatataaatttccatctacaaaacatacctaanacacaaactcactttccccatcaccctaatgtttggtacaacaattatagcatgcaattatntaaaaataaataacatgat

SEQ ID NO: 2489 - DNA, 441 bp, Glycine max
  unsure at all n locations
agcttatgtctccacaagaccttccatcatcttcaaaagcttcattactaaatgaaagtaaagttgattcccatcttgtgagcatgaaaggtctttctcatctacagaagtttcctctggttaagtggaaaaggtttcattctctaccagagcttccaccattcttggaagaattgtcactaagtgaaagcaatattgagtgcatacctaanagcatataatatctttctcatctgagaaaactagccataaaaaagtgcacagggcttcgatatttaccagagcttccaccatatttgaaagatttgtttgtacgtggatgcgatattgaaagcttgccaataagcatcaaagatcttggtcatttgcgaaagatcaccttaattgagtgcaagaagctccaggttctaccagagctcccaccatgctctgcaatcattt

SEQ ID NO: 2490 - DNA, 422 bp, Glycine max
ctgacttgagtcatcaagagattataaatatgtggccatggcatgagtttcaatcgtcaatcatcaatcatctttgaatcatctatctttcaatctttacaacatcatctctcaacatctttcaatatctttctacagaattttctgattcatttctcttcatctttctaaaagttttttatcaacactttctcttccaagaaaaggtctttattcaaaaacttgtgttattcatctttttcattctcttctccctttgccaaaagaacgaaggactaatcgcttgaattcttttgtgtctctcttctcccttacaaaagattcaaaggactaaccgcctgagaattcttttgattattcccttccccttaagcaaaagatttcaaaggactaaccgcctgagatatcttttgtttcccctt

SEQ ID NO: 2491 - DNA, 453 bp, Glycine max
  unsure at all n locations
agcttcatggaacatttatgatactgatgtaaattcaggtcttcatggttntacaaaaatcatagttgttgtttaggcggttatcgttatcaaaattctagaatgctttgtaaagatgttcatcaagtccaagtctgtgcctatgcattgtagtcgaaatgaattcaagatagtcaattgacccatttccgtcaacatcagcctgaggaaaaaatatacatgtcttgcaaattgaaacaattaggaacaaagcanaaatgcatgacaacaaaaaatagtataaagatataggaaatatcatagtttaatcacaacattaaaaaaggctntagctagagcctacataataataattataataataataataataacaacgaagcanacatgcattacaacanaacaaaattaagaaataataaatatcagtgttaactcctattgtcacaacat

SEQ ID NO: 2492 - DNA, 374 bp, Glycine max
  unsure at all n locations
ntcagagcgcagctgcgagccctccaatctccaacacagagcgcgaccctggaacctagctgtgacccgcagcacacagcaaccagcaatgacgacccacggcgtgaacggcggcaacgagcacgacaacgacgacccacggcgcgaacgtcgacgacgacccacacgcagaacatcgcgatccaactctagtgggcatcttgaagctttattatttttttttgggtttggcttttctgtttgacacccattttttccctttttctatttgacaccctctttttactttcgatagtcccattnttattnttttttctatttgacaccacaattattttgttcagtcctcttttatagtggaaccatcatctgat

SEQ ID NO: 2493 - DNA, 309 bp, Glycine max
  unsure at all n locations
agctntataagcgcgggtctgggagacaaaggtcaagtggtcgcgatatgcgaggatgatgttccgagtacattggatttggtacgaccatgccctcctgatttccagctgggaaattggcgagtggaggaacgccccggcatttacgcaacgagcataatgtaaacctttacggtttaaaagctctatagttaggcctaggctttagaagtcttccttttgttaagagctctgtgtcctttgctattgaacttataatacaaggatctttctttatctgttcctacgtgtctacccattctcattcat

SEQ ID NO: 2494 - DNA, 457 bp, Glycine max
  unsure at all n locations
tgagggtttagttcagtggtaaggaaccctctttttttcccttctataaagactaatatgacaataagagggttgaattgtaatttttacaaattctcaaaactttttctaaacacaacaatgttacgtctgaagatgaatatgtaagaaaacatatatcatattttcgcagagcaatttagacaatgacttcggatcttgtaagacaaacaatgattttcaaatacaaaaatcaaattcgaaccataagtcaatttataacacataagagaaaataaacaagataagacacatggaattatattggttcatctaaaccactgagactacattcagttcttgacaaaccactaagtactactaacttcaactacttataagtatttatgactctcactnttagttccttaactcaagctctataccaaacttgttccaatcaatattttttttttat

SEQ ID NO: 2495 - DNA, 279 bp, Glycine max
agcttcctttcaacaaagagaagagaataatgaaggattgaagaaatacaagtagtggggatgtcttctccacctctagaacctcacaatcactcatagactcatctcatgctcttaggatggattcctcttcactctcagttctctaccagtcttcgcataacaaacgctctcaaaactctctagaacttggacctttctctctctagaaatctctaaacatgcaaaagcttcgagaactgcccaaactccccctccatttctgatttcaggcttaaa

SEQ ID NO: 2496 - DNA, 400 bp, Glycine max
  unsure at all n locations
ntgccgatttagtggtgaaagtgagttatcaataacaggagtcatttgacttaatatgtcaattgaaaatcttttaaatatttctcgtccttgaaaattcattntcgagaacctgcacagtttcttttattgctacaaggtcatgacaaaagacaacaatagatacctcagagccctacattggggcaatgaaaggcaccatgcaagagccttaagtgaacctaggggtagataagaagttctcacccggaaggtcgaaaacccgaaagggtggcctaggcaaaaattagggttaataaaaaataaaaaaaggagaaaacaatcatgagcgtggttatcagggattggtcttgaaatccaaacttgcaaaggatccaagtcaagatttgaaatgacacat

SEQ ID NO: 2497 - DNA, 434 bp, Glycine max
  unsure at all n locations
agcttacatcatatgttccaagagaatatcatatgagacatatagaagaagagagaataagaagagctaatgagagagatgaaaggttatgttggaggaccaaacaaaagagggaaggtatctctactagtgcaaaactcactacatctattcatcctactagaagtatggaacttgaatgtctcatgtgttcaagaaaagggcatatgacctcccaatgcccaagatggaagacattgacaaatgagctaaaagaaaaaagatgaaagagaatgagttaagaanaaatgagttgagggaaaaagaaaatgaaatgagagaaaaagatattcaagaaaaagaaatgaaagaaaaagagattagagaaagagaaataatttaaatagacagtgataaagaatgagcacaggatgaagagaagtatgactactctt

SEQ ID NO: 2498 - DNA, 274 bp, Glycine max
  unsure at all n locations
tccctgatatggagagctaaagcctcagatggttcttnctatggcgtacttgatgtagaacatacatatttatctaataatgatntgggtgtcactgagctatcaagacttaattctagtgtgccgttaccatgatcacggaactacatgcttagttagggtgactcaacattcggaaatggggtgtaccttacaacctgataggacagggctggactatcgcattggcatgatacatcatggcacgataacctatgttttgttatgttatgtc

SEQ ID NO: 2499 - DNA, 409 bp, Glycine max
tgagcatgcaagctcttcaaacaacctgctaagcttattgcaatactccaaggcattatatgcggtgggcaaatgttgcccgaagagtatatcgtgaatatgaatcactatttcaagatgctgcgatcttgacctgaactttatcttctcttccttttccgttcaccgctacatcatcattggcgatataatgctatgcactcttactgttgaaaggcctgttatacaaaaaaatctggccatgtactgcatgatgcgagttatgcatctcttccaaactaaagatatattgcaggattacatgaacaattttgattaaaagatgtattatcttaacgacaattgacttatattatgttaatcaagtcctactttatttacaatatataacagcattaacatgaattaa

SEQ ID NO: 2500 - DNA, 385 bp, Glycine max
  unsure at all n locations
tgtcctcggtgacgaanacaatagaataagcctcttcgagcttttcacaggcgtcaacgattcgaagaatgaagggtctgtgtttggaggtggcgatgaggtggaggacaacctcggtgtcataggtggtgttgaagatggagccgttgtcttcgaggttggttcggagggtcttatagttgacgaggttgccgttgtgggccacgccgactgagccgaagcggtaaccggcgacaaagggctggacgtttttgagcatggataggacggcggtggagtatcggacgtggccgatggagatgctgccggggagctggtcgagttttgattggttgaagacttcggagacgaggccaacgccggtgatggattggaggacgttgtt

SEQ ID NO: 2501 - DNA, 560 bp, Glycine max
  unsure at all n locations
tacacttctantgcctctggcncgcttttntttaacannaacanaaggggacgtgtttgaaactagtgaagcatgtaacactccaactnntatccaagaccatcttgggggagcgcttctcatggcgatcttatgaaggtgcttccactcatccctgggaggacagtacatccacatggtggaaaatcaacatagaatgacctgatatgaagctcacagatccatcctccatcaaagctccacacgcaagctaccatcacaaatatatgacgactactaatgagtgcaaacgaatactaatgggtggttaagactacgatccgctacacatgagactaaacgcattctggagggacgaacgtatatgtgtaggatacagagattggttatggagctcacctcttctcattgcgactgattatgacaggcgacttgcttcgctcgtagaaaccgtgaggcaagaactcgaggggacgatcgtatcagagcaccatcgctgggcctcgccctgaaccagtcagtactttccaaaccatttcggtgtcaaacagaggcaatcg

SEQ ID NO: 2502 - DNA, 376 bp, Glycine max
  unsure at all n locations
atctttactacctagaggtcttactaagcttattatattcagatcgagttgcgcttgatgttatcatgaggtcatagaagttaaacaattacatatctttatatctccaactcagtgatttgaacatgcaagttttgaagttttgagcatattttggaccttttccttttcttcatgaagaacttggaaaatctgagctttgtctacacatgtgaagactaccggtgaatttgatggtgtaggtgaaaataaaattgaactggtcaatgtgaggaattttaggagatctttgatgcttaaccttcctttatatattaacgtgacaaaattctacatttattttatggttaacacttctccaccccttgtgctgaan

SEQ ID NO: 2503 - DNA, 415 bp, Glycine max
  unsure at all n locations
ngtgtcaatcccacatggttggagcattcttgctaaacagggtgatcctgactagtctccctatgattntacttagtaggagtgatgaggacatgacaaggactaatggcaaggaacctttagaaggacttggaggacctatgtcaagggctagaacaaagaagaccaaggaagctcttcaacaagtgttaaccatgctatctgaatataggcccaagatacaagtggataagattcagattgtcaattgtaccatgttccaagaagagtagagggtgccacctttgttgagtggctntattagtattttgctagttgaaataaaggctcanacttgtgttaaagtgactgtcaattatatttggatttgcaccacctatnggacttgtttaatntgaagaaattaagatttaat

SEQ ID NO: 2504 - DNA, 296 bp, Glycine max
agcttgaggagcttgctttagcccatatagagctttattgagtctaaaaacacgatgtggaagagtgttactctcaaaccctgcggggtgctctacatagactctctcttgcattagtccattgaggaattcacttttacatccatttgaagagtctcatatgtatgagcagcaatgacctatagtgtatgcctccggtgacaacaagagtgaagttatgtatatcatacctcctttataaaacctttggaacaaccttgcctgttgtacatactaacttcctataaagctatgtc

SEQ ID NO: 2505 - DNA, 368 bp, Glycine max
  unsure at all n locations
gttgntgcggaggtgcccaaaccataactctgatgacactgcatagctgtgtatcttctatagtggtgtgaaacctcagaccaagatgatccttgatacctcagctggaggcactatgatgtccaagatactgaaggaagctattgtaattattgactccatatcatgcaatgattatcaaagtcatcatggaacaaccttcacttatagaacatgtatcatggagctggacactccaagtgtaattctaactcataacacactcttggtgcaacaaatagaggccttaagcaaacagataggccaacttcctcaataatatcacccaagtggaccacagaatacacacacaactcatcgagttcaaa

SEQ ID NO: 2506 - DNA, 396 bp, Glycine max
atgcaagcctttgtacaaagaagaagaagaagttcttagagattcaaggcttgtaaaggattgattggaaaagtaaagaatgaaggaatgaattaattgaaaatgcaaaacatagccttacttttatagactcttcatgtctggtcaagaagactattagaagagttataacttttagaaaaacttaaaaccaatttgaataagtcaaaaacctttttaagagttacatagtttgatttattcagaaacaaacactggtaatcgattaccaaattagtgttatcgattacacatagcttttgtgtgaaaggatgtgacgtcttacatttgaatttgaatttcaatgttcaaatgcactggtcattgattacctaaacattgtaatcgactacagct

SEQ ID NO: 2507 - DNA, 452 bp, Glycine max
  unsure at all n locations
gactctatacatactcagctctttgatgttgatctaggtctcagtagttgctcttgaatcanaatctaagaaagatcctagagattcattgaggtgcattcttgcatttctaccttcacaagaaacttggaaccctgngaaggttgattaggtaagggaagctctaaattttattttgattgtgtgactaatgcttggaatgatgatgtttttggtgtttattgatatttataagtttgggtgagtctttgcagaaggttgggatgagtaggtataccattattggccatgtagtttgcaattcgcaacttcattttcatttcggcccaaccgaagttntgttntgactgaccaaagcatgacaaagtggagcattaagctccatagaggtttcagcccaacaagagcttngttcggctatgcatgagtgagatagagtggagctttaagct

SEQ ID NO: 2508 - DNA, 470 bp, Glycine max
  unsure at all n locations
agctatagggtagaatttagatccatggactaagtatgagtctgcttatctttgtacatattaaattgagattntattatttttttgggccttatattcagggattcacagtgtagggagggtatcctagtaatataggatttttcagcctttgtattttagggcacctagactagtttttgtattatgggtagttttataatttcacatgcattaagtgtattatttgatgtgtgtgttgngagagaaatttaattgaattgcaagaagctcaatccaattaaattttagaccagcctaagggggaagtgagcatttgtttgttacacctcattatcacatcatatagtcacactttgtgtttgtccttcatgctttacatgtctcatggcacctaagcacacttagtggagaatcttggatttgatcttagattagtgcgctgaatcatagctgaactcactaatcat

SEQ ID NO: 2509 - DNA, 134 bp, Glycine max
aaatgttgccttattttgttctgaatttgttatgttggtttggtctgtgcgttggtggcttggttggtgatggtgttgttcgatggtggtttgggtcgcgggtggctcgtggcttggttggtgatggtgatctt

SEQ ID NO: 2510 - DNA, 461 bp, Glycine max
  unsure at all n locations
agcttcgggctgctcaattgctccaggttgctgcatggaagggcaaaggtctgtatgatggtcagcataggagcacaaaccacagacccttgcaacaggtacagatttctggtttaaggctagctgggttaccaagttaaccaatgcatccagtttgccttcaagcttcttagtttcagatgatgcagctgagtttgtagctacctcatgcactcctctaatgactataacatcatttctggcgctaaactgctgggagttggaagccatcttctcaattaaatttctggcttcagcaggagtcatgtctccaagggctccaccactggcagcatctatcatacttctctccatattactgagtccttcataanaatattggagaagcaactgctctgaaatctgatggtgagggaaactgacacatagttttttaaatctctcccagtattcatacagga

SEQ ID NO: 2511 - DNA, 455 bp, Glycine max
  unsure at all n locations
tcattctacancctgaaaagaggatgagatagttgcacgaaagagaaagcttcctaactaaaattttcatgcaagtggaccttcttctagtaattctgacttaccgcagccttttatccctcttcaattcccacctagagcaattccaaacaaaaaaaatggaagaagcagaaaaggagatcttggagaccttcagaaaagtagaggtgaacatacctctgctagatgccatcaagcagattccaagatatgccaagtttctaaaggagctgtgcacccacaaaaggaagctcanaggcaatgaaaggattagcatgggcagaaatgtgtcagcattgataggtaaatttgttcctcacattcctgagaaatgtaaggacccaggtactttntgtataccttgcattattgngaacaataaatttgagaatgacatgctagatctaggagcatca

SEQ ID NO: 2512 - DNA, 455 bp, Glycine max
  unsure at all n locations
agctntanaccaagctcggatggatctcatgctatgatttatcgatttgttgattcaaagtcagtctcataccattggtggttcgaactcaaatcgtggtactccaggttcgtctaacggcattccggttactttgattatgacagtttctgcaattcgagacatttctttgggttttccgcattntgatggcaatacaccggtcttggagtggatcttcaaagcagagaagttcttcaattatcataacactccagatctggatcgagttgatattgcttctattcattntgagaaggatgtgattccttagtttcagatgttgcaacggatgcaagttgtgagcatttgggctgagttaacacgtgctntggaaacacnaattggtccttcactgttcgattgccgatggcnaattattcnacttcaacattttgatagttgctatatatttg

SEQ ID NO: 2513 - DNA, 439 bp, Glycine max
  unsure at all n locations
tatcccctaatgcacctattccattcctcccatggtcatcatcaccataaacagctataacctctctccagccaaagtagttaacaaagtctgctattgcagtcatttcataaatgtcactaaaagcagttctaataaagaatgggaattgaagtgaagaaagagtagggtcagtggctgtaaatgatagtagaggaacttggagctcgttcgctatatgagatatgacatgagctgttgtagacgtctggngaccgattatagccacagtttgtgttgccatgagctgcaaggctattacacacaatttatgtaaaccaagagtaataatctgccaaactntgaagtaacttgtctaataganaaaaagatgcttttaaagttttaacacataaaaaagatgggaatattgtgaaggacgtaccctctgcaatgctca

SEQ ID NO: 2514 - DNA, 382 bp, Glycine max
gcttcgctaagtgagacaccagctgctagccttcacaagtttcatctttttttacctaaaattgaagttgaaacacattatattcacaatgttgggcatttctactgaacaaaattaaactaaacctatgtacaaacctacaaaaagaaccataaattgtggaaaagacaaacattttataaaacttttctataaaaaagttagttgtaaatgagactaacattggttccgccctgcctgccgaggattatgatgagaggagaccgcatgcatgctgatggacctctaacaaggcacttgctgttttcacatatccgcaagtgtctagacagactaacccttgatgtggtgtgccgaattctgtatggtgaccaccattcat

SEQ ID NO: 2515 - DNA, 415 bp, Glycine max
tcttatccaagacacattcttggtggtgaagctccttcttccatggcttattttctagtggatggtgcctcccctctcctcttctcattttccttccgttgcatctccatggtggaaaatcaccattgaaggacctcattgaagctcaaagatccagcctccatagaagctccacaagcaagcttccatcacaaatattgaatgactactaatgagtggtaatgactattaatgggtggtaatgactactaattggtggtaatgactactaaatgcattcttgatggtagaatgtctatatatagcatatgtgtttggttcttgagctcacatctttcattttcgtctgatattgacatgtgttttgttttggtggttgtaacctcacatgtttgatacttgagtcttacatttg

SEQ ID NO: 2516 - DNA, 292 bp, Glycine max
agcttcttatccaaggcacattcttggtggcaaagctccttcttccgtggcttattccctagtggatagcacctcctctcacctcttctcctttgtcttccgctgcatctccatggtggaaaatcaccattgaaggacctcattgaagctcaaaggtccagcctccataaaagctccacaagcaagcttccatcacatttactcttcctccaacttccaaaggtacttttgtccaccataatgactttttttctgtcttcttttctggaggtgggaccatgtcattgtctac

SEQ ID NO: 2517 - DNA, 460 bp, Glycine max
  unsure at all n locations
tgtgtaacacttgtngtaactntgatgaatgagagtcttgtgagacacaactcanagttcaacttctctccctttttcttccttcaatttcgtgctcccccctctctctttctctccctctttcttttcctccattgaagcatcctctccaagcttcttatccaaggctcatcttggtggtgaagcttcttcttgcatggcttattcccaggggatggcgccgcctcttacctcttctcctttgtcttccactgcatctccatggtggaaaatcaccattaaaggacctcattgaagctcacagatccagcctccatagaagctccacaagcaagctttcatcacatgtgcaattgatagaaatataatttacaatggcctaactaatgagattaccctcacccatccttgngcactaaattgtgttgcatcctcaaacaccttcataggtcaaggatag

SEQ ID NO: 2518 - DNA, 291 bp, Glycine max
  unsure at all n locations
agcttccatgtgcaggttacgccatattctcttatcttcaggtaacctaatgcctgttggtttgagtaggtcaactggtgtttcattnttgaatcagcttcctagtgatccaagtatgacaacagacaacatatctggcaagtatgatgtgaagaagaaagaaaatataccaattagaattgcaggtgatattgatggtggaatgcttgatggccaccttaatgcccctggtggtgtttggcgcacattaggagcttcaaaagttgtaaaaccttcaaattcacctaacat

SEQ ID NO: 2519 - DNA, 477 bp, Glycine max
  unsure at all n locations
ngtagaatgtgaaatanatatagggagtctctagggcttgaggaggagacgacagatttgggatatgacaaatattacaaggacctgtaactcanacaatgggagaaaagatttcactggtttcctatttgttgcaccacttccccataacccatctgaaacaatatggggtggcgtagcatgcaggcataccatgtacctgtgcgtcgcctcatccactgtcgtaattgaaaggaacatagttccatttggattcaaattcattttgatcaatctatatgagaggagtagtactcaataatggcacttaattaattgagccaatgagagagtgtaattgaatatatatttgtcacgacacgtacgggcttgctagctcgctgctttttgcttcggtgcaactgatacttaattttgtaaagtttggctgctgtgtangaaatagtagcaattgcaatctcataattaagtaattag

SEQ ID NO: 2520 - DNA, 354 bp, Glycine max
  unsure at all n locations
agcttatcaatggcgttcttgaatntacatatggaacaacctgaaccaagcattcatggcttggattgcatcacatttatcactaccgctgccgataattatcaactaacatgggcaatgtgacaccctttaccccaaaagatttatctaaataatagttgtggaaaatgatataaaatgcacatgtgaaaataacaaattttcaaaatatactccacaatttttcataaaaaaaaataattaaatagttttttctattataaaaacaattaatagaacctgatttgagttttgggacaatgtanaanagggagttcagctggaattgatagtcattatattcaatgcaaaaaa

SEQ ID NO: 2521 - DNA, 493 bp, Glycine max
  unsure at all n locations
tccatgaatntcttggtaccagacctagcaattgtacccaagttgctcaccatatctgaaaaaaaaaacataacaaaaatgaattagagactaaccaggtaaacaaaaaaattggtccacaaatatctcaataaaagaacatctcaacctaccagctttggtcatgccaataccattgtcaacaatggttagcatattgttagtcttgtcaggaataatatgaatgaacaactatggctaagtatcgagcttgctcttgtccgtcaaactctcaaatctagtcttgtccaaagcctanaattttacatacaaccacataattaattaatctttcaaaacaaatcaactcaagaagaagaccaatattaacacaaccacacatcacactaaaaaaattcagtggcagggtacaacatttcaatcataattcatctcccaacgtaaccaattcactcctacaaaataaattagatgtcactaattcactattcac

SEQ ID NO: 2522 - DNA, 378 bp, Glycine max
  unsure at all n locations
acaggtgaatgaccattttatatgggataatgatccaagtatgtgtgaccttgaatgtganttagaagaagaataacaagaagaagaagaagaagaagaatccgacaaaagaaactagagatacagacctccatctgttctagctcaaaggataaatctagatgaatgagcatgggtcgaaataagaaaagatcaacattagccgctctagatctataaaaaagctctagagatcctcagagaagagggagctttttcctcgacttaatcaccaactgatgtatctctggtttcttgtgctcccactgataccactacacaatgcagacatcttgataccctttcactttctcaacctataccttgcatgatggtctc

SEQ ID NO: 2523 - DNA, 488 bp, Glycine max
  unsure at all n locations
tccattgtcaatctgtccgcaacagcattacactctcaacgaatgtgacgaagagaaaatccagcaaggcaattgagccattctaataatgttctgaaccgtggattaacaaggatagtggactgctcaaaactttgtgaccaactccattgtgggcctctttcgaataagcttaagcttagaactaaaaagtacttatattagtatcatgctgggaagaggaagagatcgaagaattggtgtggtacaaacgataattattagtatttttattttaagcttaaataattttttggtacctacaaaataagattatggttttggtatttagcctttttttaactttaatatctgaatttttttattttaaaaaaactacctattgtgataatganttgactaccaaatcaataatttntaaatggtttggacttaatgtaacactcctccataagtcaccttattagttaaagaagatttctaacaac

SEQ ID NO: 2524 - DNA, 329 bp, Glycine max
  unsure at all n locations
tgaagatttggaagaagaaggaaatattaataatgaagatgcggnttttataaccaatgaaccggtaagaagccttgtcatattcgcttggttggtgcaaaccaaccggcgggcatcatgcacagaataatcaaatttccaatcgtcaatcagtgcaccttcaagtggtacaccttcgcttggcaatttggtaaatcatagaatanggactggtcaatgaccatcttaattccataaacctcagacattagggtgccttctttgatttctaaagttgaatagaaggcttttacaagatcataataaataggtaatttagagacatgaat

SEQ ID NO: 2525 - DNA, 426 bp, Glycine max
  unsure at all n locations
ttcataggtganatcacgtgcagccatttcccttatagtcctctcacgaggtggaggttgtgccatgttctcagaatgtgcaaaatcacaatgctcagaatcagaatgctcaaaattataatgctcaagatcaagatgttcaaaatcaccaataacagaatgcacagattcaccagttatggaatgctcagaatgatcaaaaggtataaaatgatgcctaactaatctatgaaatgtcctatctatctcaggatcaaagggttgtaagtcagatggattgcctctagtcatacactacattcagcatgcacacaactagttgccttgtcatgtaaataatagtgtaggtttgaactacagctaccctcaaatgatatccacatgacttgaaattctgtgagcaaccttatcaaatgatgagaagat

SEQ ID NO: 2526 - DNA, 394 bp, Glycine max
cggacactataatactcaagcttgtcaaggaagaaggacctcctatgcttttggagggcttcccacagtgctatattatgagagagctctgcgagggcaacaccacagacaaacatgattggaatgcaagaatatatgacatagcaaatatataatctattgcctactttcggttcggctaatgcattagatatctcatgattaaactagaacatattttctctctctcttgtcagaagcggtcgcgagagacagcatgaaattatgagaactcataacttgtgagcagatgacctttacgtacagtgttgagcatatattatgattttgatatcttgtatataattattatagaatgggtgagcacactcttgtgaatctcgcacatataatc

SEQ ID NO: 2527 - DNA, 352 bp, Glycine max
  unsure at all n locations
agcttctcaaggaagctacatgaagctgtctcggtaaaaacgctgcccagccatcgttaaccgttggatcttctcaaaatttgggctggagctttacagaacacttgcacgacgttttcgtttccgagagcattagtcacttgtgcattntgagccttgtagtccaagtagctttggaaaaatgccatttcttcttcttccttcatccaaaaccatttccaacgtgccaagctatttctccatcacccacagccaccagtagccaccacanaccgccattgttctccattgaaaccccacaccgagaggaaaccttcaccaaagcgaatctttaacttgcctcatggttggt

SEQ ID NO: 2528 - DNA, 345 bp, Glycine max
  unsure at all n locations
ngtgcttgttntatttanattcctaggatcatgaacaactaggtgtgtcctactatgacttgagaaacacaggtgatcaaataacaagcaaagatttaaaaggtactaggttgcctcctagtagcgcttctttaacgtcttgagtcggacgcgtgatgacttgtcggtcatggacctagtacctttgctttcctttggctttggacttggtcgcctgctggtcgaccacgggtcgtaggcaacgctccagcctttgtatatgagccgaggggctctggaggtggcggcagtgcgtctattgcccgctactggccatccccaggctaatgttgatgcaatcctacc

SEQ ID NO: 2529 - DNA, 203 bp, Glycine max
agctacttagagtggatatttcgagactcacattattgattacagatagagaataatatgcactacatagatcaagtgacagtaactcggacaactgtgcaaactgatgtgggatttcaccagaaaaactagctacagaaaggcttagatatcttaactgtgaaagctcaccaatgctcgatgggatttgagattgattgaag

SEQ ID NO: 2530 - DNA, 442 bp, Glycine max
  unsure at all n locations
ctgtaaaacttaatgctcgatctggtgtcataatgtggaggacctagatgttgccagataacaacaataggagaggagaatatgcaggagctgctatttgnggaagcagcccttccattgatgttaaaagaaaccatgtctatattggaacagggaacctctattctgccccattacacatacgtcagtgtcgagagagacaaaataatcgaactgaacctactcaaccagatgagtgtattgagccagacaaccactccaattcgatattagcccttgatttggattcggggaagatcagatggtaccgccagtgtggaggcttcgatatanttttcttagcatgtataaatgcttcagctcctaattgtccaccccgaggtctttggcaagatgctgattatggggaggcaccaatgatgtngaccatatatataaatcg

SEQ ID NO: 2531 - DNA, 393 bp, Glycine max
  unsure at all n locations
agctagtcatcgggagacatcanaggctagtattntaataaatctgggtatgataaattcaccaaattgatagagaagaatctaaaatcatacatcttagttaaataaggcatgctaccccccaacattattgcattttgattccatctttggacattcaaattgttgtttatttttcctgttatcttttcctttgccttagtctaaatttcgaacttacaattcggtatctctttcttcttttgtttctcctcatttcttaataattggatttgcatcacttaagtacaaccagagtccctttggattcaacagttgaacttcaatttcaatctttactacttgtgattaaattaggacacttgtcaatctattaacaaagttttggcactg

SEQ ID NO: 2532 - DNA, 482 bp, Glycine max
  unsure at all n locations
tagactatattgtagaatcttgagccttagttctcaatgattaagtcggtcttatcatagagggagtctttatgctttctttcaatatcgagaatccattntgtaagtacaatgtttttcctaatgatatgatcgaggcttcacaccagtaatgtggacttatcatttactaaaagaattaggattccagacaaggagaaattaccaccatatacatcttgtgtaacacccaatttttgcgtaatataaattaaaaaagattctatttaaaaataaatagagttttaggaaaataatgagattttcgtaattaaataaataagagaaaataattttattaattaaaataatgattttaagggtaataacataattatatgttcttataaaataaaatgaatatttaatttattcattcgattgggagtaaaatataggttatctttatgaaataatataatanagaacaatagagtatataa

SEQ ID NO: 2533 - DNA, 453 bp, Glycine max
  unsure at all n locations
agctcgtcggagtgatgacttcccctctttgatgatagtatcgggttgtcaatccttcttctttatgtactgctatctctttgatgtcttgggtttgattctccccatgaaatcttttcaatgttctctgcttgagaacttaaatgtagtccccttttagcttcatcccaatagttggactatggtcagggccttcgaggtcttgtgccttttcttcaacataagacccagtgtgtcggtatttttgtatttttttttcatatgaaatngacatgcaagattggttgggtctccctgaacaacgtgtccaagaagttgctcgagtttgacttgaacgtgtttcatcacttcaaggactgtttttacaaagtcctcgcaactgacgtcatggctgatgaattgccactgatcttcaatcgagatgaggaaaccccacttctgttctactacaat

SEQ ID NO: 2534 - DNA, 497 bp, Glycine max
  unsure at all n locations
cgtagtgagattngactactaacaattcattggttnttctaggattcanaagtttagattctaagagagcacaagtcctagactaatcccaatgatcttttcttgttttgtacaaatagccttcccactattcccttttcttaagttgttttcgacctttttgtaacagcacaacttattttctttttcttttttttaaacatacaacttatttgatgtttgtgctgatgcttaacctttttgttttcattctaattgacttttcacccccaaatttagagtaaatttgccttgaaccatatgctctcctagaatctaaacaaggtattaggagataatcatttanagttcagggttcaattcatgacaaatcaataagctntatacaagggagcaacagatacaaatatcattcaaggtaagctatttggtcaaaagagcttgtgtctatacaattcatggccttcatcatgttctgagttatacaaatcattcta

SEQ ID NO: 2535 - DNA, 425 bp, Glycine max
  unsure at all n locations
ncaagcttctaccttttccttcctttctaccacatagatggagttattccacatacataaaaggccaccagcagcttgcacagatggaacaaaatcccaatgaccagtggagtctccccaaatggcctggcaaatacttttattaaagttctccctcttggtttcttggaggcagacaagatccactntgtgctttacaatgagccttctaacagcagcccacttgactcccctccncaaacctctagaattataggagagaattatcataattgctgagatntaattcccttctctgctgccatcaaatcatctttattctccatatccagtagcagccctttaaccttgctatcttcttcctcataagacaagcccatttccttcaagatgtcacattgcagctgtatagggtcctcgtataa

SEQ ID NO: 2536 - DNA, 497 bp, Glycine max
  unsure at all n locations
tcaatntgtagcctcanatcagccactaccattgtttctcttgagacagaagacgaattagaaagttggttttcttcttcaacccattgaaaaaattgacagttatttgggtctgtttggggtaatgcacaagtatagaataaccttcctgggttcctccttgttcttgtagttcgaatagctgcatgtcttccatggtggcattgctgaatgaaactaccagaaaatgcacaacaactgccacttgcagacatggagaaatcaagtgaacaagcagcagcgactaagcctcaatagaagaagaagaagcgactcagcgtgggaaaccagcagcttcgtaaatcctaatttatttggggaagaagaagaatcaaccttgcgtgagagagaatttatagatgcatacctcagtgccacattggacagtctacgtggcactgaattgccacctatacacctcactaacgccgtcacctgagaattaacgacatggacta

SEQ ID NO: 2537 - DNA, 430 bp, Glycine max
  unsure at all n locations
aaccacccgatatgttgtagctaagcancctatatatataagtctttgatggtttanaatggataggaaactgccacaaataaaaatgtcgcatgtggactaatggaatgagtaatcggtgaagaagacaaaatacatatgtaaaagtttatgcactgggttcgagtgcgttgggtaaactgttaacaagtacttttgtgtgttgaatatactttatgagaggataattcatgttctaacattgtatgatatcattgataagattgtttgcccattgagatattgttcgaaaatcttatctttcaaaacacataacattaagtatctttggaaatgcggtggcgaacataagttattttcaattattttataactttattcaatctactcatctgttgtttatcataacagtatacaagtgattattgcg

SEQ ID NO: 2538 - DNA, 258 bp, Glycine max
  unsure at all n locations
agcttcaagagtatgattgtcgtggngactatagccatcataatttttcattctttcagagagcttgtccttctgtgtgacgtgtcacgaaggggtagaataagaaacacaaaatagtacttccttcttctcaacattgctcatgtagnctctactacttgtaccaaaatgagtntgaaagaatatgttgatttgcttaaccagccttataacaatacacttganttcaaatgatgagatagtttgacaaggagagag

SEQ ID NO: 2539 - DNA, 436 bp, Glycine max
gtaacctctaagatcatatcatccacaaagaagaggtgggaaacttaggcatctcctcccttcccaaatgagaaaggtttccatcaactattgtgaatagaatccaaaatcagatgagcaagtctctgcatgtagagcacaaaaaggagaggaaataaggggtctccatgacaaaggccgctggacaatttgaaggaatcgataagagatctattccagctgatggagatgtttgtccaattgatgcaacgagagattagggagaacatccgagaaggaagaccaaggttttggagggtatcgatggtgaaatcccattcaatatgatcaaaagccttttgaaggtcgagcttcaagatcatgtagcaaggcttactagtattatgctctagagaatgaacaagctattggatgataacataattgtccataacac

SEQ ID NO: 2540 - DNA, 294 bp, Glycine max
  unsure at all n locations
agctttgtcctcgagagatcttattcgtgcataaccttcttctcaatctgcttctgttcatcgctgtcgaagttgaagatcattccctccaaggtttgaacacatgcaatgactccctcaaatccccttagttttatgtttctcttccactttgtgtaaccctcatggaattttttcttctgttcacagttttgaccctacaagtcatcgtacccttactttgtcactcgagctttaactgggccatgtgtctcttcaaggtttgtgaagcaacgccagagcagntcatctacc

SEQ ID NO: 2541 - DNA, 399 bp, Glycine max
  unsure at all n locations
ctgagagggtctgatatccaaagggacacccgtgctgnttccagattcattgataagagaagcacaaatataaaaaccatggctaagacaaccttcttcaattaagccatcaaaaaatatttggtcacttgtatgtcaattgcttctacttgtgcagctccgatccagatttcacgtcactagctggatatctgaacctccacactgtatatgcagcagcattgacatcgcacaaaacgttggctnttctcttaatttatttttctctgatttgaaaaacatccttgtattcgacaacctccacaccgtaaatgcagcagcattgacccatagggttaaatcaacccagtgtaactccagatcatataggaacatatttcaattttgcgagaaagaaag

SEQ ID NO: 2542 - DNA, 414 bp, Glycine max
  unsure at all n locations
tgtgagactcactaagggcagaccttatgttatgcgagcctttggagaatcgactaggaaattttctgtcttgggttgtagagagactcaccaacggcggaccttgagtttgatgagcctatgagactcagcaagggtggacctttggttntatgagcctttggagattcgaccagtgacgtgtccgacctggattntggtgagattcaccaagggcagatgttagtcgtcttatacgactaacttttgtataaaaaacttttacaaaatgtatataaatccccaatttatagttcttttgtaggattgtaaataaattntgctctgttttgatctatgttcattaaaagcctctttatatggaattaatgttaaattctcttcaatttcaggcaaaaatgagcacaattgaag

SEQ ID NO: 2543 - DNA, 328 bp, Glycine max
tgagaacctgcgacgtacctaaacaggcgagctcctggcagtctaccaataatagaacacagtccacgaatcacggaggcttgtgtggcggctggccaactatttgtcttggtgctatctgaaaataccctctggaatcgataccatcgtgagaatcgatacagggtttaaaatgggacaggatgttagtagctttagtaatcgataccattgtgtgaatcgaaaccaattgtgtgaatcgattacacagatgatagggcactagtaattgattaccagttgtgtgtaatcgattacatatcgctactctgctatgggaatcaattac

SEQ ID NO: 2544 - DNA, 486 bp, Glycine max
tcttagtctcagctgatgaagatgaattcttggctacttcatgcactcctctaatgacaatagcatcacttctggcactaaattgttgggagtttgaacccatcttctcaattaaatttctggcttcagcaagggtcatgtctccaagggctccaccactggtagcatctatcatacttctctccatgttactgagtccttcataaaaatattcgaggagaagctgctcataaatctggtggtaagggcaactggcacatagtttgttaaatatctcccagtattcatataagctctctccactgagttgtctaatgcctgaaatatcttttctgatggtcgtggtcctggaagcacggaaatatttttctaagaatactctcttgaggtcatcccaacacgtgatggaccttggagcaaggtaatatagccagtcctctgccactccctctaaagaatgacgaaaggccttcagaaatatgtgat

SEQ ID NO: 2545 - DNA, 156 bp, Glycine max
ggagtacgacagtcaccgctttaagagcgttgtacaccagcagcgcttctaagccatcaagggatggtcgtttctccgggagcgacgcgctcagctcagggacgacgagtatactgattttcaggaggaaatagggcgccagcggtgggcaccact

SEQ ID NO: 2546 - DNA, 457 bp, Glycine max
ctacagcacatgccactattcttcaagttcttaaaggatatgttaacaaggaaacacaagtatattcatcacgaaaacattgtcgtggaatgaaattgtatcgttgtgattcaaaagatccttccacctaagcataaagaccttgggagtgtaaccattccttgttcaattggagaagtcactatgggaaaggctcttattgatttgggagccagtattaatttaatgccactctccatgtgcataaggttgggagagttggagatcatgcccactaagatgactttacaacttgctgaccgctccattaccagaccatatggagtaattgaagatgtgctggtcagagtaaaacaatttatcttcttgatagactctgtggtaatggatatctgtgaagatattgacattcctgtaatattggaaggccattcatcgtaaactgtgagttgatagt

SEQ ID NO: 2547 - DNA, 201 bp, Glycine max
  unsure at all n locations
agcttctccgaatgcatggttatttccagtttcctgaagatatctganaatctttccagatgacgatcttcttccttnttggaaggtaccacaggatatggtacttccacaccttcatccataattttttcacttctactcttctttgcattcctattatttttttcttcttttcattatctatttcgttttctttttctt

SEQ ID NO: 2548 - DNA, 430 bp, Glycine max
  unsure at all n locations
nttcacttcaagtgctgggtgcaccaacaaanatgctgggtgcacctagcaacagtcgcaattaaaaccattttgcttgttatgaagccaagtccaagatcgaaactaaacatcatcaatcaaagattttttatccaatgaaacatattaaaaatattgttgttcctcgtattccaaatgccaaaaatcgttgaacaccatatcacctgccatatctcactctctacgcgtccatcaattgcgagaagaagcgttctaagtttccatggaacgttgttggaagattagaagaaaaccaagagctacattctaacgaaatctactaggctaccttgcatganatgaaaatatgataaatngactcaatttgagagtgatagaagcaacaatgtgaactgtccaccaatatatttcgtcttttgcaaatcac

SEQ ID NO: 2549 - DNA, 351 bp, Glycine max
  unsure at all n locations
agctagcttgtggngcttctatggaggctggatctttgagcttcaatggngtcctttaatggtgattttccaccatggagatgcagcggaagacaaaggaaaataagtgagaggaggcgccatccattaaggaataagccatggatgaaggagcttcatcaccaagatgagccttggataaaaagcttggagaggatgcttcaatggaggaaaagaaagagggagagaaagagagaggngggagcacgaaattgaaggaataaaagaggtagagaagtggaacttgaagtatgtctcacaagactctcattcatcanagttacaacaagtgttacacatgcttctatttat

SEQ ID NO: 2550 - DNA, 485 bp, Glycine max
  unsure at all n locations
cgcaagtctccacccatcatcatgttcgaactgaacagaaagtacccacaaacatgcactaaattgcctataaactcaaaacgtgtttaattgaatttattttaaactctgtcatatgtgtttcattacaattatgaggcatctcactgctaaatttggttcagcttggtccttctgtccttgctgccaatggcctgcataatgatagtttagtgcagtgtcgattctcttctagggtcaatctctagtaggactttaaggtttttattttttatttatgacataaaggttgattggattaagatatttgaaaactggaacttcaaaagagtcaaattactcttcatgccttattctggaataggacagtttccttgaatttttatataacctacaaaataaatgtagatggagttggcttcattcagtcatatggnttggactntaatcttagntaatgtccttagcatcattttcttaaataa

SEQ ID NO: 2551 - DNA, 326 bp, Glycine max
ttgggggggcactaaaatgttataaagaaacatttttaattctctctaaaacattaaggatgaacatatatttactatagaaactcctcatggtattaacagggaaccgataagcagggaagatgacgaaaaagatggaaatctttacgggtagggtatgaattatgattaacgttaacttgatatcaatataaaaaatttgttttcatatgttataccacataaattggaggctgttgctgcttgtatttctattaacgagaaaaaccgagagggagaaatcctcggtagtgtgttaaaaaaataacataaaacgcttttgaatg

SEQ ID NO: 2552 - DNA, 923 bp, Glycine max
  unsure at all n locations
ggtaaataagggaatagaaaaatatcncacgaaccaaaacattattgaatacaatttaataatatgacaacncacaggaaggatgagtcgttgannnccnncnnttnnanaaaacccgaggggaggnaaatgaaaanatagagaacggagaggtttaaatttacaacgaggtaagataaaagggggagattgtactaaaaaaggaggaaataaaagaaaagaatggttaaaaaaaacgcaaagatgaagaatgaaagagaagaaaaatagatataaagaggactgtagaggccatgaaagaataagtgcggagcaaaaaagttaggananaaaaannnaaanaaaggtaaaaaaagaagaaaaggagaaaaaaaaataagaaggagaagaagaggaggaagaaanggagaaaagagggaaagagaaagaaaaaaaagaataaggaaaaagaaaggaaaaatagggaagaagaagaagagagaaaagaaagaggaaaaagaaagatgaaagaagaaacgtaagagagaagagatgagagagaggaaggtgagatgaggaaagaagaaaagaaaataagaataaagagaaagaaaaggaaaaggaatgataaaaacgggaagatagagatagaagaaaagatagatatagagaaagaaaaaaagagaaagagaatagtaaaaaggtagggcggaaggaaataagtgaagaaaaggagaaagatgaagaagtaaaagagatggatgaagaagaaaaaagtcaaaatattaggcaaaaaagaagaggcagagtggaagatatagagaataaagagaagaaattagtatgagaggtaaatatcaatgataaaaaatgtaggggaaattagctagacaagtggatgagataagataaaagcataaaaagaaaaagaagaaaaatagagg

SEQ ID NO: 2553 - DNA, 1089 bp, Glycine max
  unsure at all n locations
actgatcgagtcagactgacaacgcnacaacatcactgaactccaaccatccactagtangcttctctctcaatataaactcaatcgaancctccccccccacccnnccggggtttgatgacatcgtgttcacccgcagngccatactatagaactgcctgcatgcaagcttgcttctaacaaagaacacgattggaatatttaagaggaacccgacactatcatgaaggaaaagcagagggacgagaaaaagagtgcttcatatgataactatgttacatagcccttggcatctttttcgaaaaggaactgcaccacactcgatacaaattttggccctttgacaatgtaatgcaataacatttctataccgtcgcaacaatctagacctaaaccaaaaatacctaagttaacctaaattgttatccaccacctatattataacctccaataaaagaaagattcaccctattgaccaaaacttaaaaacacattttctaaaaaaccttgatgagacgaatgtatccccttatattaaaaaaaacccgcctaaattggaacgccgtagaaaaataaaaccctaatctccacgcgcactactcttttctcctcaactcaatgcttaaaaaacgagaaaaccggcgtgtccaataggaaacgctataacaaatcgaatggttgacaagcctcaaaccgaattcttcatccaacactaaaacccttgcaacgaaaagaagttcccgaaaagggggctcttaattctttcatcccacccacacctatactcacaatactaatcttcttatataacaaagctacccacagagaaatatccccacccccacaactacactaatgntatcccgtggctctataaacccccttgggntagaagacacctacaaaccaacnctcttacaaacctaagagtgggcgcactcttacacacaacaaaaccttcgcacataatacctagtaactcttacaaaacaataatattcgcgggcgcgcgacgccagcgcttccccttggtttattaataaaccaaaacatatagacgcgcgcggccacaacatacacacacctccc

SEQ ID NO: 2554 - DNA, 200 bp, Glycine max
tcagtgctttcacacacaagggtctactaatttggttgctattccgttggagggtattacgggggttgctgatcttgatgagagaaagttagttgcatattttgacagcaagattgttcctgtgcccaaggctgagggaactgagtacgtagcttcaaagcaaaagcctccatttggaccaacgttcattggagcagctt

SEQ ID NO: 2555 - DNA, 490 bp, Glycine max
agcttgaatttaggtctcatgggtatgcttttctggggtattccacaactcaataagggttacaaatgtctttctcctattggaaaacttttcatctctaaggatgttgttttcaatgaagtcaaatttccttattcagaactgcttttgccttcctccaagtctgatttaccccctattaaccccatctctttcattccctccatacctattgttcctcaatcaatttcttctctttccctctatagcaattctgttgctactcctacttctgctgatcctacagctgattcaaattccaattatagtccttctgtcaatgcggattctactcctgctattgcatctgagattcctagtcctatctttgaagctggatccacttctgggcaagaaaattctgctcagtcctcagaattggctccctctgaagtactcacaacgcaacaatggaacatgttcctacagttaattcccatcctatgccaac

SEQ ID NO: 2556 - DNA, 210 bp, Glycine max
ctgtaccttaactagttacaaggattccttctcaaatccccttattcagctaaatatgtaccttcaaaacttgaactttcaacccgagtgcacatacttgatctaaaagatactgtcataccctaatttcgtccggggattattatttgatgatatacaacctttgattggccgcttcaagatactaggcacccttttttgcacaatatg

SEQ ID NO: 2557 - DNA, 345 bp, Glycine max
agcttccatcagcgtgacaccctctaccccaacatatatataaataaatcgaatatatacaaatatcggtaaccaaattcacacgggtaaaagggtcacattcacttcactattatcaattaaaacttattaaaacatatttggcacaaaataaggccgacaaaaattataaaaaaattttgataaattagtgaaataacatataatacaagcttacttttcaataatcaaccacacttttttactcctcaatcacattacacaagaatcacacattttcatccagacataataacacatcaatttcataataaacaatcagcaacgcatatgccaacgttatgc

SEQ ID NO: 2558 - DNA, 87 bp, Glycine max
gctcctgtatcaacctggaatgatcagatcgccggacaacttagtccgcttgcgcacaactcaggacggggaccttgccctgcaaaa

SEQ ID NO: 2559 - DNA, 494 bp, Glycine max
agcttgtaggattatggggtacccatcacatgtggtactatgtggcggtcgggcgatggtgcacaacaagttttccacatccacaatgcgcgcataaacccaccatcccctgttgcccacctccaactgagctcacgtactcccacgtagcccatatcctcgtttttctcaacaccgggtccccatcaatcctcccaagcttccacaacatccaagcaaaacaacattcacacagcacaagctatcacagccaagcaaaacaaaagaaaggcagaaaactctgccaaaacaccaaccaaaaatcacagcttttcccactcaaagaccccagtaacaattccttcgatccaatttggtaaccgttggatcgactccaaaattttactggaagtctatagtacataagcctacattttgaccgttgggatctactaacaaacatccagaactcattttacattactctctccacaacccgcaaaaacatggatttt

SEQ ID NO: 2560 - DNA, 181 bp, Glycine max
ttggtcgtatgcaaaatcttgaaaattggattcttcaaaattttgcatgtgtggtggtatgtagtatggtggtatggttgtgattggtgaaacaagctcaacttcttccttatcatcttcctcctggaattgattgtgtagaactttgtcttcatcctcactataagggctgagtcccttt

SEQ ID NO: 2561 - DNA, 417 bp, Glycine max
ccaggctttaataataaaatatgttgaggcaagttttacatttggaaacaagacacacttgattaacttcttctttggattcatgaatatttttgtgtgtggaactaaatgttataaagaaacatttttaattctctctagaacattaagtatgaacatatatttactaaaagaaattcatcaatggtattaagcagggaaccgataagcagggaagatgacgaaaagatggaaatcttaacggtcagggtatgaattatgattaagtttaacttgatatcaatataaataatttgtttccatatgttataccacataaattgtaggctgttgctgcttgtatttctattaacgagaaaaaccgagagggagaatcctcggtaaagtgttcaataagtaaacataaaacgcttttga

SEQ ID NO: 2562 - DNA, 201 bp, Glycine max
gttggtcgtatgcaaaatcttgaaaattggatgcttttttaatttgcatgtgtggcggtatgtactaaggcggtatggatgtgattggtgaaacacgctcaacttcttccttatcatcttcctcctggagttgattgtgtaaaactttgtcttcatcctcactatacgggctgagtcctttgttatgtaagccacggtcta

SEQ ID NO: 2563 - DNA, 455 bp, Glycine max
agctttgagccaattcaaacgacaataactttttactcggatgtctgattgagtcccgtaatatatcgagaccgtcgaaattgaatattgaagctctaagccaagtaaaacgacaataacgttttactcggatgtctgattgagtcccgtcatataccgagacgctcgaaattgaatgttgaatctccgagccaattcaaacgacaataactttttacttggatgtctgattgagtcccgcaatatatccagaccctcgaaattgaatgttgaagctctgagccaattcaaacgacaataacctttttactcggatgtctgattgaatccccgtatataacgagacgctcgaaattgaatggtgaagctcttgaccaattcaaacgacaataactttttactcggatgtttgattgagtccccgcatatatcgagaccctcgaaattgaatggtg

SEQ ID NO: 2564 - DNA, 200 bp, Glycine max
tctcaataccaactcaatacagagagggtaaattattgagttttttggtgcgcgcatgtgcaagctcctatttggggtgcacatatacattgcacatactcaaagtccctctttagttatcaacataataagaaagaaagtgctatttataccaccacattaacatattatcactctctaagtgagaacacagaaggaaa

SEQ ID NO: 2565 - DNA, 442 bp, Glycine max
agcttctccgaagggcatggatatttccagtttcctgacaaaatccaaaaatctcgccaaatgacggtccttctctttcttggaaggcaccacaagatatggtacttccttaccttcgtttacagctttatcacttctactcttctcttcattttcatttttttcatctttctcaatttttgtaatctctttttctttttctacttcttttttctttttcttgggcattaaattctttttttcttgaccattatttgtttctctttttcttgattgctttcacctctcacatcatttttcttgccctcagtgcctttctttttagcagctttcttcttatgcacaacactctcctcatcctcggcctgcacaaatcttttactccttgtcatcacagctttgcatttcttcttgggattcttttctgtaattgccaccaaat

SEQ ID NO: 2566 - DNA, 201 bp, Glycine max
tcaacattcaatttcgagcgtctcgatatatggcggtactcattcagacatccgagtaaaaagttattgtcgtttgaattggctcaaaggttcaacattcaatttcgagcgtctcgttatattacgggactcaatcagacattcgagtaaaaagttattgtcgtttgaattggcttagagcttcaacattcaatttcgagg

SEQ ID NO: 2567 - DNA, 430 bp, Glycine max
agcttgtaagtctccagacgacgagagtaaaaacctgcaaaatttttgaaaataatcagaatcggacgaccaacatcatccagataccgtcgaatttgttcacctcgattgatgaaaggagcggatgatcataaggtatctctgcctgccacctaacttgctgtccctggatgacaaaaggtgcggaagacgatgttattctctgtatgtcaacgggctcgtttgcccctggttaacgaaaggtgcggataaccatacagtatcccccgcatgtcacctgacttcatgggtcaggatgacaaaaggtgcagaacacgatgttagtctctgcgcgtcaacgagctcgtttgcccctggttgacgaaaggtgtggataaccatgcggtaccccccgcatgtaattggacttggcatctctagatgacataag

SEQ ID NO: 2568 - DNA, 125 bp, Glycine max
tctaaactttgtacaagaatgaagctctgataccactttttatacaagtggcctcagatatcttaagaaggggggggggggttgaataatattcttcatactgtcctccctatttttttaccctc

SEQ ID NO: 2569 - DNA, 275 bp, Glycine max
acaaacaatgtggaaaacaaactaagatcgtgtgatcagatagaggtggggagaactatggccgatacaccgaggatggacacgcaccaggctcatttgcgaaatctcttcaagaacatgagattgttgcccaatacactgtgcctggttcttcggatcataatgatggggcagaaccaacaaatcacacccttattaaacatggtgacaagcatgacgaagacagaaagcttcctcaattttcgggattgatgctcttaatacggctgtgtata

SEQ ID NO: 2570 - DNA, 195 bp, Glycine max
tgttcatcttgagataataagtggtcatcctcatttgaagttgttggtgcaacatatttctttggcctaacatgaactccaatatttttacagcttctaatgttatgattggtttggccacaccttccacatgtaaactcagccaatttcctctttaacttatgtcctgtgacattgtcctcatctacagatctt

SEQ ID NO: 2571 - DNA, 378 bp, Glycine max
cataattcttcattccaattgacgacatgttacatacataaaaattggtacagaaactttgtcatactatccttagctccaaataaagaaaaaaaaaaaaagaagctttctgtcatatatggttcttaatttgcggaaacaaaacattgctctagtgcatcttttttccagaagtttacttgcactgggaaaaatataaccaaaagagtcagctctaaaacatgatggtaaaattatgcaattatagcgcttggcgtttatgtgaaagccatttccagaatatttattgatcagacatcccaataagattggaaaaaaaagcttacaaaatcaccagcgctacctgaatttattattcacatatagatatcataacca

SEQ ID NO: 2572 - DNA, 197 bp, Glycine max
tattccaaactttctacgcggtttcaacaacagttcaaaacttttaaatctggatttgcaaaatcgtagtctcacggatggaagtattcgtatgtcatcttctttcattattaggtctacattttctcttgagtcccttgatctcttctcaaatctgttgaaatcatccactatattttactggctctttaactcca

SEQ ID NO: 2573 - DNA, 412 bp, Glycine max
ttaaaaaactttggcttttacatgccccactcccttgagtgggcattgaattgggaggtatcttgggtggtccatcatagtacatttgaaattttgattggttcatgcatcatcctggtttgggtgaaaaaagattataatggtagaaaaatttctttagaagacaaaaattctctatttttaatcgattaccttgtagaaagccacatgacctttgggtggttctgatgaatgatccatgatgaatttgatggcaacatgattgccaattgggcgttttcaaaggttaaaattcaagacttatgattcctgaataccagccccatcatttagatgatcactattacttttacgaagggaatttttaattgatataccaaaagggttggcccaataatgcatgttaaaaagt

SEQ ID NO: 2574 - DNA, 200 bp, Glycine max
ttataagtgcgggtttaagacgcgaaggccaagttgccgcgatatgcgaggatgactccccgaggagattggatttgatacggccatgttctcccggtttccgacaaggaaattggtgagtggaggaacgcccagacgtttatgcgacaagcataatgtaaccttttgtagctttaaaactctacgattgggcctatgct

SEQ ID NO: 2575 - DNA, 366 bp, Glycine max
agcttattcgaagccccttgaattgaatgtcgttcatgcattctcaaccattgaataccgcgccccatgaattgattggctaacgctgctcatgcatcctccatcatcaaatcttattcggagccccatgaattgattgtcgttcatgcctcctccaccctttaagacaaagccttccgaaatgactgccaagctctgttcgtgaaacctctatcattaaatcttattcggagccccattatttgattgccattcctgcatactaaacatggttttccgagccctacttatgattgtctactggtggtcgtgcatcctccaccatcttatttcgagccccctgaattgattgcggtcatgcatcct

SEQ ID NO: 2576 - DNA, 207 bp, Glycine max
ttttggagtagaaacatgggataaactcattttattcaaaaagttataactagtcaagatctgagcgacaatacaaacttcctagcggtttctaatcatatggtccattaagtctatcatatgttgacaatagctgagaagtctgtggatcttcttgggggcggagtaggtgtccgccattgctttggccttggctagcaatcgggg

SEQ ID NO: 2577 - DNA, 442 bp, Glycine max
agctttaacctcatcggctctcacagactttatattttggagccaatccagtccttgtggtcggactctcagccacttatgatagccgccgatgatcccattactgcttcccctaagctctctggcctttcttcacgccgcatcccatgccttgcgaactccttggagtaccctcgcggtggggtcactgaaacctcatgcgatgaaaggcgtgatgctttcgtctgatggcactcctctcatgggacattcttcgcatgaaaatagaatcctgaatcttccttccttctagcgagggaaccatttaacagacgcccctccatgctagccaagagttggtgcacaaaaaacaattcttgcgccgctcttttcacatccccggtcgaacgtgttatacatggcccaaatggcgacgaccgggctttcctttgcatgaagaaag

SEQ ID NO: 2578 - DNA, 208 bp, Glycine max
tctcggctcatgctgggaacgcctctagttcaacacccgtgctgcctaaggcacccacccagagggaagctccccaagttccaactccgaacgcgactcgaccggccggtaattccaacacgacaaggaacttccctccgaggccattgccggaattcaccccgctcccaatgacgtacgaagatcttctaccatccctcatcgccaa

SEQ ID NO: 2579 - DNA, 372 bp, Glycine max
acctggagatatgtcacgggggtcaggaaaccttggggacgtcaggtggggtgctattgcccaaaaccaagcttcaccaatcgcgacccaacccgggcattgattacacagtgtaagttgcaggtttccatgttctgaagctgtgtaactcgagtttggcctctggtaatcgattaccaatgctgtgtaatcgattaccagagaagaaaacccttgaggcataccttttaactacatgtagcggttatgggacgcattgtgttgttaccccgaagtagatttctcgtgaaagagactacccccttttctcttatttcttgagatcgtgaaggcagcgcaattaatccatgatcgagtggagatggagtgcct

SEQ ID NO: 2580 - DNA, 206 bp, Glycine max
tatcccccaattttctataaatagggggagaagtgaagtgaatataggttcaccaccttaggcacttctctctctttcgaatttgcttggaaaaattgtttccgtgaagaaaatccaagccgaggtgcttccgaaacgtttccgtaacgtttccatgaggaatttcgcgaaggtttcgaccgttcttcgacgttcttcattcgttc

SEQ ID NO: 2581 - DNA, 565 bp, Glycine max
  unsure at all n locations
ttgacaaaacgaagttcatgtgaagtgaagtgaagtcactaactaactaacactaatatatagagggttagtaactaactaactcactaactacctaattaaactaattacacaacatagaagcccaaactcgcaacctaattctttaagtgcagaggttctagcttccaagctcaatttgaccctcgagatggcaaaaatggccatttggagttctcacacgtttcttagctttccatggactactcacacgttccatttggagttctgtagtgtcgtctaggccctgcacaaggcaaataggtcaagtaagccaaaatctaaaatttagctacaattctcaattaagctcaatcatttgccttagaccaaaactgatttaaggtgagaaaataatggtcaaagagattntcattgagctaagaagactaaaaaaaatattaaactttcaaatgctcaatcgaattcccccacactttatcttttgcacttagggcaaaactaanagaaagattaaaaaaaatcaaactacaaaataaccacaacctaaaagaaaggtatgaat

SEQ ID NO: 2582 - DNA, 741 bp, Glycine max
  unsure at all n locations
cctactccaatcaagttattggtcgggatcgtgaaactattgttgtttggtcataaggataatagttcttatctgattaggtcaggggcggccggcccgggggttacccgtgattggtaatggcataaccagaaagaggagtaggggagacaagcttatgcgctgtgtagcgcagcccatctatttcgggtacagggacgannnnnnnntnnnnnnnntnnngnnnntnnntntnttntttttttttntttgttttttnttttttttttttttttttatttttttttgttttttttngtttttttttttttttgttttgttttttgttttgattgggttggttatattgtttttatgtgtttattgtataatgtttggttttttttttgatattgtatgaatttatattgtattatattgaattatttttattgatgttttatgattttatgttatgtatatataatgttatattttgtaatgagttaattattagtattgttatgatttattgtttattttgatgattatattattattgttgttattattttttgttttttgattattataattattttttttttattttgagttaatgtttttgtaagtgttgtttgtggaattatatgttgtagttttattttaattagtaattaattatatttgtgattttattaangatgatggatatgaattgcttatatagcttgattgattgatcaatgttgttattcgttt

SEQ ID NO: 2583 - DNA, 406 bp, Glycine max
agcttgctctaaattacattgatgtttgtatttatgggaggaggatgtatgtcatttttgttttaagagtagtgtcccactggtaaaactaactttccaaatgtttgccttttcaagaaatggccccgaggaagcttgcctcaaagaagttcaggaaggacaaggcagccgaaggaactaattccgctccggagtatgaaaatcaccgctttaggagtgctgtacaccagcagcgctttgaggccatcaagggatggtcgtttctccgggagcgacgcgtccagctcatggacgacgagtatactgatttccaagaggaaatacggcgccggcggtgggcatcactggttactcccatggccaagtttgatccagaaatagtcccttgagtttatgccaatgcttg

SEQ ID NO: 2584 - DNA, 229 bp, Glycine max
acaccatacactactcaagcttgaaattgaacaacggaagctctcgagaaattcaaatggtcataacttttcacacggatgtccggctcaggcttataatatatcgagacgctcgaaattaaacatcgaaaactctcgcgaaattcaaatggtcataaattttcatacggatgtccgattcgggcgcatcatatgtcgagaagcttgaaattgaacaaccgaaactctt

SEQ ID NO: 2585 - DNA, 631 bp, Glycine max
  unsure at all n locations
agcttgcattgcgttggagtatacatccaccttttaagtatttgacgaagagaaatattgtgaaatagaaacaaacttatacaaataatcagttcccagatttctaaagattggacaaaaaaggattaaaaataaaaaaaataaaacaaaaaacattggttagatttttttaacgcgtacattattttatatatcatttgggtaaaaaaattatatttgtattatttgggtaattttttttgtattaaataggcactattagaaaatatgctgttcacatctgttatttatgacgttctacattggttattaaccgatgttgaaagattatagttaacaccggctttttaaaaccggtggtaatgtaaaattgacacatcggtatttaacaaccgatgtatataataagattacaccaaaaacatatgaatgtgatagttacatcggtnttatacaaaatgatgtaactttacataaaagaggttttataaaataatgtaacgatacgtaacatggtttgataaaccgaggtacttcaaagtacattatttataaaaaccgaatggataggattttttaaaaactttttttttacaaaaaaccaaataacccggatttaaaccaccccccc

SEQ ID NO: 2586 - DNA, 1212 bp, Glycine max
  unsure at all n locations
ggctagaatcgatttcgtaatactacctgtatacctcattgcagagctctatcacttctccgtacaaccaggattacatgtcttcnatatnctcnnccnncgnnnnccgagtttgaatgcatggcaatcacagacactatannnaatactcaagacttctatgcgatgaatagctgcgagagacgtgcaaactgcattcgaacaatcaggatatattgttctaatagtctatctccacacacacgagaggcaacgagacttccgagactgttctcatatcctcgtngtagactgacgactactggaaaggtgcacacgacacagttgaaactactcctgcgtaaggcaaccaaaccggtcccagaagctcatttgatcacgagattggaccggcaccgctcctcagcagaccattacggaaggatactgtgctagacagatccgaccaaaccgtccggggnnnnnnagtnannannaanngnnannanagaaaaaagggagaaaaaaaaaannaaaaaaagaaaaaaanaaanaaaaaaaaaaaggaagaagtagaagaggaggtagtatagaaagagaaagggaagtgagaaagataggagaaggaataaagagaaaagaagaggataagaaagaaagatagtaaatatagataaaaagagatagtggatgtgtataaagataaggggtaggtatgttaaatgaagtgtgatagaatgattgaaagagaagatatgagggaagtatgaagaggagattaaatatgagaattaagttgattgatgggtgtaatgataattgaaggaagaattatgggtatatataaggtaatgaatagataaatgatatgagtatgagtgataatgagaatggagatatgtatagaagtagttgatagaagaataatagtaataataatggttaagngtagtatagaataggagtaatagatnaatgtaatagagaaattaaggtatagtagagttaagtgtaaataatggaaattatgagaagatgaaataagtagaagagttatgatgaggagtagagagaataagtgtagtggtagatatntggaganagatangaactttgtatcganagttaatgtatataggaagggaaggngtaatatgagagttgaaaattatggtataaagaggtgnggatagaaagatattggatgtggaagatgaagtaatangaatagga

SEQ ID NO: 2587 - DNA, 1060 bp, Glycine max
  unsure at all n locations
cggtaagcactcaaacgtgtacacgaccgtgctggtaacaagctagtgcattactcttaccaaaccgtaccatcctcgacgctcttgcacgtaaacatccatatcccacnncccnncacccccgcnccccggtcncnnngttagactttcgtacgtcacttnccganngcacccnnagaaagaactgacaccggcagggcanaggcatatacacacctcatatcgtccttcttgacgagaggcgagtaatatattgtggtataccaagttccaaaaactctcgaggcgaaggagggcctacactcaaattttggaagacccccgaccccatccctaggaccataccaacccttaaatcgccttaacagacaaaagaaggacgcgcaagaaacaactcactttgtggaagaaccgtgtggggcaaaccctctcgaaagatagccaatcgataaagagccgaaggaggaaatgatgggttgcaattacagaacgacataaaaggactcgccacggaaatagccaaggcggttccgaactcccaaaagcattaaccggacacgcttgaactaaacaaaatggcgggcccaccaccacgaacaataaaaaatagtggttaaatacccccaccggaaaaaaaaaaaaattggtgaccccccttataattgaaagacctcgagacgaacatcactaacaaaaagaatgtagaggctctacagacggactactcaaaaaataacaaacgaaagcagcgggatgaagccaaagtgtcctctatgagaaaaaaaaatctctccctatgaaaaaaaagaaaaacgttcagaataagcgaatcaaggagagacagaagtaattacgccccgcctgcttatacaaaagggcgtaacaccttacaaaggagattgaaagtccacaaaaaacaatactgggtgccctataggggaaaacatattggggagaaaaaaaacaacatcccaagaaatttccggggggaggacacacgcaaaagaaaagagaaggcaattcgccccggtggaggacataaatactcaacaagtaaccn

SEQ ID NO: 2588 - DNA, 786 bp, Glycine max
  unsure at all n locations
acgggatgaaatcattgacctagcagacaccatacactattgaatactcatgcttaccacaagcgccaatcagtggacttggcgagtggctatttttttttaccctcctagaggaaagatcctttatcccctcattaaaaccaactgcttattgctggcaaaaaaaagccataatcatagttctgatgcggtcaatggcaaaatactcattggggccaaggaccttctaaggataaaaaggctttatatccaaagacnnngtatgtctaatataagacgacatagtatgtagtatattttagttctatgtataatgtttacgttatctgaacttattatctctatttaaattacattatacgtgtgacttttagatatcgaatatattgtagcatctgattagttttactgatatattttaatcatacttatcagctgagatgtttcatttagagatttggtattccatgtaattttacatactctcaatatgctatataattaacgctttacgatttctataataatatatttatatttatggtatatatttttaatatggattattgaattaattttcataataatatttcatttttgcattacttaattctttatcgacgatgtctcattagtagattaactcaaatagcatataaatattgatcgagaatagtaaaatctgaacttctattttcgagtttttgaggcatgatatagtgttgatatcttctaatctatattgactgttgattataattcataagtgattttttctattgcctt

SEQ ID NO: 2589 - DNA, 412 bp, Glycine max
agcttgtaggattatgaggtacccatcacatgtggtactaggtggcagtcgggcgatggtgcacaacaagttttccacatccacaatgcgcgcataaacccaccatcccctgttgcccacctccatctgagctcacgtattcccacgtaacccatatcctcgtttctctcaacaccgggtccccatcaatcctcccaagcttccacaacatccaatcaaaacaacattcaaacagcacaagctatcacagccaagcaaaacagggcaaaagcaaaaaactctgctcaacacaccaaccaaaatcacagcttttctcactcaaagaccccagtaacaattccttcgatccaattcgttaaccattggatcaactccaaaattttactggcagtctatagtgcataaacctaca

SEQ ID NO: 2590 - DNA, 911 bp, Glycine max
  unsure at all n locations
gcatctataacacacaatctccatcaccttcagacaataaactgcacaccctctgatcataacccctataccnccncnnnncgggggatgatgctgcatgcaaaccanaacaaanaagctggacgncaccactcaaaagctgggggcaggaacggattttatttttcccacgatctacagacaacacatcagccctgaatgagtcaaggacgcacccgcccgaggggaaccccgagaggcaatggcataaccagaaagaacagtctgggaaagaaacttatgcacgtgggaccacaccccatcaatatccggggcgaggtcgtcnnnngaannaaannaanaaaaaaaaaaaaaaaagagaaaaaaaannaaaaaagaaaaaaaaaanaagaanaagagaagaaaaaaagaaaagaggaggggaaagagaggaagaagagaaaaaagagaagagaagaagagagaagaagggagagaaaggagangggaagagaaagaaagagggagaagagaggagaagagaaggagagggaaagggaaagaagaagaaaaagaaaagaggaagaagatgaaaaagaaggaaaaagagagganggaaaagaaaaaaaaaaaagagaaggagaagaagagaagaaagagaaaagaaaaagaaaaggagaaggaagaaagagagaaaaaaaaaagaggaaggaagagggagaagagaaagaagagaaaggagagaaaagaagaaaaaagaagagganaaggaagagaaaggaagagagntgaataaaaatgaagaaacgaagagaggagtgagagngaagnnngaataaagatggagtatataagagggaaatggaggagggtattatgagtgataaatgaatggaggaaggagataatgatgaacagaatgaaaatagaag

SEQ ID NO: 2591 - DNA, 133 bp, Glycine max
  unsure at all n locations
agctttgagcacattcaaacgacaataaatttttactctgatgtctgaatgagcnccggaatatatcgagacgcttgaaatggaatactgaagatctgagcaaattccaacgacaataaattttttactccga

SEQ ID NO: 2592 - DNA, 201 bp, Glycine max
tcggtattctatttcgagcgttccgataaattatgggactcaatttgacatccgagtaagaagttattgtcgtttgaatttgctcagagctttggcattccatttcgagcttctcgatgtattacgagactcaatcggacatccgagtgaaaacttattgtcgttcgaatttgctcaaagcttctacattcaattttgagc

SEQ ID NO: 2593 - DNA, 521 bp, Glycine max
agcttgccaatgctctctggaatgccttcaactgcatcaaaactattggctactaatccaaataacgtgaattcttgggacccttcaccccatttgaggccagcacttactttgcctcaaatgccagtttttgcagcttggacagatgcatagttcatagctcaatagtccttttaattttttgttctctcaagtgaaatttcaatcctttttattgtctttttttgcatgcatgaacaacacaagaggaaggggttgtagctagtcaaatggagggtctaaatattatatcatcacatcactgtcagcaagtttaatttaaactttcaaatcattacattttagcattttactagttaagaattcctgaattttcattttcattttcaatatatccttgtggccagattttgtcaattcattcattgatagaaacggacgaaaaaggatataaaaggttatgattgagagggggaaatattaaaggcatatggggggagacaccattcaatattcatcat

SEQ ID NO: 2594 - DNA, 323 bp, Glycine max
  unsure at all n locations
tcaagaaaaagatggcctcagcaaattccttatttcctgaagggaattctatcaatagacctccaatctttaatggagagggttaccactactggaaaacccgaatgcaaatttttatcgaggcaatagatctaaatatctgggaagccatagaaatagggccttatatacccaccacagtagaaagagtttcaatagatggtagtnnnnnttnntntntttttttgttntttttttgttatttttttttttttgttatatatttttataatgttattttattaatattatatttttaaatttattataatatttaattatat

SEQ ID NO: 2595 - DNA, 973 bp, Glycine max
  unsure at all n locations
tcgaacagaccacaatatatccactgcacacaccgacttattacaccactgacatcaccccgccacactaacaattctcctccctcaancagccnccggcnttgtgacttggacacacccgcgaaccccggaaaccaaaaaaagcaccgcaggaagaacactgggctttccaccccgaattttttttcccgggcaacacaaatttcaccccacggggttaataaaacatatcataccaaaaactctttgaaacaaataagaaaaaacctctcaccagcaaaagaggaacgctggggaaaaaaaaaattcaaaacctgggggcgaaaacccccaccacgggggcaacaaaaaaaaaaaaaccaaaccaagccaatgagagaaaaaacaaggttccccacctcattcttaggctcccgccaaaaatcttacagcccacccgcaaattaagaacttgggggcgcacaccccaaaagaaaccatgtgggatacaacaaacggcgaaaaaaaaaattggaaccccctagaaatttaagacacccaagaaagcctgtctttacccaaagaaaatggaagcttgcctgctccccccaaaacattaaaattgaacgaggggggcgcaagctctgggagaaataggagcccgaaaattttttttctaagaaaaaagacccaccaccgccggcctatgggcgctaaaacacccaggcagaaaaaccccgtcgcccatcttttataaaaataaaacaaaaacggggcaataccacgagggcaagtggaaaaaacacaaacctggacacaaaaaagcacttttctgggcgccaaaaatcttggaacaaaattggatatggcaaggattctcacaaacaaaccatcgcacccaattatcacgcatactccaacgaaggggggtttcaaacaaaaaagcgcaacaaaaattccaaaaaaataatagccgctccgaaagagagaaacc

SEQ ID NO: 2596 - DNA, 198 bp, Glycine max
tcaatccagaaggtcttctaatcctactgtctatgaggtcaatcatttccaagatgacaatatagatctctcaaccgtttttcttatatatacaagaaacatgccatattgaaactatctcacataactaactcactaatgtaactaactactggataactaacctattataactattaatgacagttacctaatcac

SEQ ID NO: 2597 - DNA, 1466 bp, Glycine max
  unsure at all n locations
gtgggacacgacagncgtcggtngcgtacntcccacacgcgagagaacatatagaggaagtagacgagcggaagcgctantggagacgcacgcgcgncgcatatctaacgcgcacgatcgantgngagcacggagagaaacacacacagcacacacaccaaacacagacagccgaatnagagatttgtactanagcanatcggcgagagnanancccnacccncanannnnanngngnnanancgngnanagcaaaccgacacggggcgacgggacgancanaaacgacancagagaagaacgacacangacngcgcgncgagaacgcgcgcgcgagcatgntntgatacacagcgagcgcangacggaaaacgacnggcgaacgggcccgacagggagcngcgngtgaccgaaaagacacgaacacagacgcagcgcgcacgcgaatggccgcgacggacaggagacgatgcggcagcgggagccggcaatgtacgcacacggcggaccagatgataccgcgcacggcgccacgaaaagcgaaggcgacgcgaaaggagcgcgaagaaacgcgaaagcaacggacacaggaaaccacggacgcggaagagtaaacgggngagcgcgagacgaacgaatcgaacgaacgcacgaagccgcgcgaggcggacggaatggaccgctacagacggatgcagcgtgcgacacgaggagagcggatagggcacgggaggacgcgacgaaaaggtacgagacggacgagacggagcggaaacggcgagaacggacggaaagcagataacacagcacgggacgcagacgcggagcaacagacggtgaacggagagaggagcgcgggcaggacgagatcgcacccgcaacaaagccacgccgggcgaactacgaanggacacggacgatagngacgaccaacagacaggaagcgcgcgacgcggagacgacacagagacgaacgtacgcgactcagaaccgaacgcggacggacaggatcaggatgaaggagtagagacgcacgtcggagacggatcgagcaacgcgcgagatcgaatcgcacgcagcgacatagcaagagagaaacgcacggacgccaaaggcagcggcagatgaacacatcggaactcgcacgagcggaatcgagaccgaacggacggggtggcgacggcacggngcccaccgcacggggacgggagcgaacggagcacaggagacagaaacgagacgacaacgaagacaaagcgacggagacgagaggatgacggacgagacgcggacaggacgggagagggcgagaccggaatcgcaaaggagacatgcgccgcgaccgaaacgatggggcacagacgcagacggacggcaagcgcgtgcgccgaccgacaagcgaaggcgacgacaccacacggacggaacctgaacacggacgacagggtcggagcgacaacgcgacc

SEQ ID NO: 2598 - DNA, 761 bp, Glycine max
  unsure at all n locations
tttttccgcattcagagagaattgagaaactattatttactctgacctagaatatgcagccaagtcaatttccatggccagacttgaagatctctggaaagagtatcataagatcttttcttcaatacaggttataactagtgcatttcgtagcattgaacctgaattaacagtttatacgtgcttaaaaaaaatagaagcgnnnngtaatcatcatcaatacgcagacgtttaacgtcttttcatatgttatgagttgtcagtcattacgtttctacatcttttctattgcttcgtttttagatttattccgtctttattttgaggattaattatataccttgtgtgtactacatgttaatgtatcaggtgactgtcatccttaacgtgttttgtagtttgttataattttgtgtcattgttcccatgtgttttaggattctacaattgcgattcgatggtcttatgacaagagtctacgttttatgatctttttaatgtgatctcatgttcagtatacctaagatcttgatgctatttcgagcttctcgttcgcattcatgaccagaactgtagtggatatcaggagtgatatagtgtatactatcggaggctcgagtttataccctagtttgaatcattcttgtaattgtgtctctcattatttaatgaagtnnatctcccacccatcgttcgttttcgtgntacgtcgacaattttgtctttaaacattatactcatttgtcagatcagtacgttgg

SEQ ID NO: 2599 - DNA, 344 bp, Glycine max
  unsure at all n locations
acatcctcaccacttgtatttttgcaatcttccatcttgttcttctatttgntgataagaaggcttcctggtattgaaagttaaatcctctgttggatcttccctgtaggtacctgatataaatatatttatatctatttaatgatgttttatgtgttctctgtgctatctgcttttcattccaatatgcctttaccttgatcacgtaaatgcatgctttgttagggtcattcaacaatggaaactggtctgactctaaagtccttgatagtgcaacgcttaagttgcgtgctttcacgaggaatccgggtgtgataagttaagtgagtatgtgtgtcttaatg

SEQ ID NO: 2600 - DNA, 205 bp, Glycine max
ttaaacttctgcagatattttggttcctttggacaactatatttcaaggggaactgctcatttccttacttgcaaagaacccgactatcaacagagtttatggaacatgatttcatctgtgagttacttttacattattactcgagtcgccacctgtttggttggcctgatggttgataatgattattattattttttctgttat

SEQ ID NO: 2601 - DNA, 443 bp, Glycine max
  unsure at all n locations
gcctggtcttgaattttcctcaagttcttaactagctttgaaccataaacttgggcctcatttaacttgttttgggcttggcagccacgctcaacaaagtactttcgacacctactgtacgttgatttcaccaatgcttgtatgggaatgttgcgacaatcctttaaaaccttattgatacattctgagaggttcgttgtcatgtggccatattgacgtccttctctatcgtaagccatcgtccatttttcctttgagatgcgatcaatccatgttgctatggctggactcagttcacgaaatttttctaaattttgaaaaaaatgtgcttgcacggagtgtacgctgcataaaaatagttatgaataacaattttaagtataaatgaaagtaaaatanacgtgaccatcanatatgaaatcttacccaatttcttcaaacat

SEQ ID NO: 2602 - DNA, 206 bp, Glycine max
tctccgtgtgctacatcttctccatcgatgcgtgtttggtttgaagagtagtaatagttagcacacaactcgtgcctcgacgtgtcttgaccgtgaattgggattgtgaaactatttggaatttacatactgtgtgacggaggccctcacttccaatcagctaagccgattcattaggggtggggtggataaagtgtaattcgagc

SEQ ID NO: 2603 - DNA, 504 bp, Glycine max
cagcttggagaattgctatagaaattctctaaatgttctctgaagggaacttcatggccaagtaggggggtggacactatggcacctaaagtatttagagacgggcgaccgagaagtattttgtcggagatgtgggcatgcactatcacatatcaaattttcaaacctttctattgtatagtcatacgcatcccttggttcccactctttcttcggtgaagccgaatagtgggccatcatggggaaggagctctaactccaatatacccaactgcttaaaagtgttttaggataggatgtcagttgaactcccttggtcaataagtgtctttctcactatacaattggggatttctatgcttatcacaaccgagtctattgctttgaagtcagccaaagtaaaggtggtgtgggaaaattatgtttactaaccaaacctaccatgggtggctttttcagtctgaggtcattgcccttttgttagttgatgaatacaactaactt

SEQ ID NO: 2604 - DNA, 208 bp, Glycine max
tcacaagatatgcactctatctctcaagtgtctaggctattgtttactctcagagcacccatgaaaacaaacaccacatagacttagcaagactctaaaattgacaaccacataacaagcacatgcacatgaggatcaaaaggtcttttaaggttgtaatggggccaaggacaaggtagatgaaagtatgggatggtagctaaaaccc

SEQ ID NO: 2605 - DNA, 478 bp, Glycine max
  unsure at all n locations
agcttgtaggattatggggtacccatcacatgttgtactaagtggcggtcgggcgatggtgcacaacaagttttccacatccacaaagcgcgcataaacccaccatcccctgttgcccacctccaactgagctcacgtactcccacgtaacccatatcctcgtttctcttaacaccgggtccccatcaatcctcccaagcttccccaacatcaaagtaatacaacattcaaacagcacaagctatcacagccaagcaaaacagggcaaaagcagaaaactctgcccaaaacaccaaccaaaatcatagcttttcacatacaaataccccagaaacatttccttcgntcccatttttaaccggtggatcaactcgaaatttttactggaagtctctagtacataagcctacattttgaccgttgggatctactagcaaacatccagaactcattctgcactactcttttcacaaccagc

SEQ ID NO: 2606 - DNA, 207 bp, Glycine max
taacaaaaggcatgcgaagtgggtggaattcctagagcaatttccttatgttatcaaacataaaaagggaaaaggtaatattgtagccgatgctctttctcggcttcatgcattactttctatgcttgaaacaaaattgattggtcttgaatgtttgaaaagcatgtatgaaaatgatgaaacttttagagaaatttttaaaaattg

SEQ ID NO: 2607 - DNA, 440 bp, Glycine max
atcatgaactatcaaaacccaagaaaacagagcaggggcagagaactttgcccaaaacacaaaccaataccacagcttttcttacttcaataccccagtaacattctcttcgttccaattccttcaccggtggatcgacttgaaaattttactggaggtccctggtacataattatacattttgaccggtgggatctgctagaaaacgtccagaacccaatatgtacaaccctttccacaaccagccatgcataagcattttctgcacaaacacaaaattctgctgcacacttgaataacaaaattctgcttagaagtgcagattttcgaaatcactcttgccctcatccaaaatcgcccacattggatcctacaagtcctaaatcaaggatatatcatatctaaaccaaagacaagcttcaagccaagcaactcaaaat

SEQ ID NO: 2608 - DNA, 229 bp, Glycine max
acactatacacatactaagcttgcttgtggagcttctatggaggctggatctttgagcttcaatgtggtccttcaatggtgatttttcaccatggagatgcagcggaaggcaaaggagaaaaagaaaagggaagcaccatccactaaggaataagccaaggaagaaggagcttcaccaccaagaattgccttggataagaagcttgaagatgatgctttaatggaggaa

SEQ ID NO: 2609 - DNA, 348 bp, Glycine max
agcttgaagaacagcttgaagaattttgtgttttacatgcgcaactaacttgaatggaatttgcattgattggtgtattatgtgttgcatcttagtctttgtcattttatatatgtatcatgcatgatcatgtaggagtaagaagaaagtttctgaagctagaaaatttcttttaatggtaaaacttttctattttaatctattaccgccttactataatccattacacaagttggcttaagctggtatagaagtgcatcggataaatttaatcgattaccagcttggagaaattgattacttattttttttttgagacaatgaatggcttattcatgaatctctgct

SEQ ID NO: 2610 - DNA, 200 bp, Glycine max
tgcttgtggagcttctattgaggctggatctttgtttcttaatgaagtccttcaatggtgatttttcaccatggagatgcatcggaaggcaaaggagaagaggagaggggaggcaccatccactatggaataagccaaggaagaatgagcttcaccaccaacaattgccttggataagaagcttgaagatgatgctttaa

SEQ ID NO: 2611 - DNA, 132 bp, Glycine max
agctttagttgaacagaataatccaaaaatgtttaataattgggtgttgaaaaagcataacaagactttctgtgattggtttaaagatacaatctttgcacaagagaatgccttcaaaacattaagaaaact

SEQ ID NO: 2612 - DNA, 201 bp, Glycine max
tgaaggcaaactggatgcattggttaacttggtaacccagatgtgtcttgaatcaaaaatctgtacctgtcgcaagggtttgtggtttgtgctcctctgctgaccaccatacagacctttgccctttcatgcagcaacctgtagcaattgagcagccttaagcttatgctgcaaatatttacaatagacctcctcaacctc

SEQ ID NO: 2613 - DNA, 511 bp, Glycine max
  unsure at all n locations
agctttaactgatcgtttaagtcgttttctcgcctaataaaaaaaataaaataaatttccaccgatcatttgaattgtaatatccattaatttctgttaaaatgaaatccgaccgttcggtcatgccgtaaccacgttggaaaccaaaaagagggtaaataataatataataaaaaaatatattttagtaaaataaaccaaaaaaagcaatcggacgtttctctttgggatttctctttcttaattgaattgactaataactaaagtgaaactaaggctaaaatcaacccgcaaagtcaagctcgtccacaaaaatcactaaaaaaggattttaagattcaatacctcagtttttcttacaaagtaaaaaggatgattcttaaggtccaacgccttanaatgatcacctttccagtaaaaagaaatcgttgattcacccataagaaaaaactacataggtcttatttcctcttcgatggagggtacgtacgaacaaaagcccccgcttttg

SEQ ID NO: 2614 - DNA, 203 bp, Glycine max
tctttgagaaaacttccttgagaagcttctttgagttaacttgcttgagaagcttctttgagaaaacttccttgagaagctagagcttatttacacatacccctctcataactaagctcacctccttgagaagcttccataagaagattcctaaagaagctagagcttagctacacacacctctctaatagctaagttcacct

SEQ ID NO: 2615 - DNA, 477 bp, Glycine max
agcttgaaggtgtgtagcccaccatctttttatattagaatactgggaatgtgtctactatcattggcatcattttttctctggcattgaggagccacttgagctgccaagtctctccacctttgggcgtattcttttgaaagatttgtgccccctttttgcacatgttctatagttgctcctatccgaagacattatactgacactggctaacgaaagcaaccactaagtccttccaagaatggactcgggaaggttccaagttagtgtaccaagtaatagctaccccagtaagactttcttggaaggaatgtattagcaattcctcatcttttgcggatgcccccgtcttccgataatacatctttagatgggtcttggggcaaggtagccccttgtacttgtcacagtccacaccctgaacttgggaggggtgatgatattgtgtactaggaacaactcttctaagttagcaaa

SEQ ID NO: 2616 - DNA, 203 bp, Glycine max
ttagttggtgaaatcaggtgtagccatttcccttatattcctctcacggggtggaggttgtgccatgttctcagaatgttcaaaatcaaaatgttcaaaacaataatgctcaaaatcaccaataacaaaatgctcaggattctcaaaaggtactaaatgatgtctaactaatctatgaaatatcctatctatctcaggattaa

SEQ ID NO: 2617 - DNA, 465 bp, Glycine max
  unsure at all n locations
agcttgtttgaacagtgaattgattgaaaatgatatgcagnggattgttttgcatgaaatgagagtttgagaatgatttgaatgagcaattgtatgattataatggattggaatgattagataattgttttgatcaagcttgcaatcattagaagagaataagcatgtgattggaagtatgactgaaaatgttagtcagtttgtcagattgattgtgaaggaatgcattaaccctatcccggtgagagtgtgatccttaaattttgagagaaatgactatcatttagtattgatttttgtgagaatctctgaagtatggactgaatgcatgaaattgaggatcatgaaggccatgtttgattgtgatacccacttagccaaaaagatgaccacgtgcttgaatgatttatcccttgcacccagtttgagctaaatgaattattgattgattgaaccctgagccta

SEQ ID NO: 2618 - DNA, 201 bp, Glycine max
tcaaagacggatgaaacttaatttacctcatatcatttttagacacaataaagagatacttaatttgctgaccatacatactagcacaaatacattatagttggggaccaaccaagcaagacctcataactttgcccaggctttaaattctgctaagcaaaattaaatacaatattgtccacttttgtttggtattagaat

SEQ ID NO: 2619 - DNA, 247 bp, Glycine max
ttgaagggaacctcctctatctatgaacttatcatcagatcaaatgcttttgaaatttttaaagaagaaatcactgtactgggctagagataaaaactcctccaattcaagttatttataagaaccctaatggcggattgtgaaatctttgtgaacaccatgacttgaattggtttataatttgatttgatgcgaatagaaaatccaacatcagaaatttctacaagccaaagattaacctttggtt

SEQ ID NO: 2620 - DNA, 190 bp, Glycine max
tttaggactacttaatttattaatcgatgtaaccctaaaatttaggaagggggatattttcaagaaacaattgctagaggataagaatttcatttgatgcatgtcactttttaatagtatgaatttgttcaatggggtgataagtaacaagcataagcacaggttccttcggccaatgaaatggatttcc

SEQ ID NO: 2621 - DNA, 206 bp, Glycine max
agcttgataatggaagacacatgaacagctcttgcaataacattcatggggctccgaaaaatggtgagaatggaggattgcctttgagggcctcacttatgcaatcatgaaacacaactcccaactcgaaagtggaggacacatgaccagccctaagcaataacattcatgtggctcccaaaaaaggtgaaaatggaggattgcct

SEQ ID NO: 2622 - DNA, 199 bp, Glycine max
  unsure at all n locations
ttggggctgaaaaaaactatataacagcaccaaggttctagtttagggagccccctctctccctcgcgggagactctctctctctctcctctctctcttctattcttcgtttttagttttagtctctcttctctttctcttttattttcgnttttttttcaattccagttcagacttttagttttatcaataaaatttc

SEQ ID NO: 2623 - DNA, 428 bp, Glycine max
gcttttcaaatgggtaaaaggctcacattcacttttttctacatcatagtcaaacttgtccaaataaataataaagtcatctcgactcaaagaaagtcatataagtctcatacaattaatatagaacctatatcctaatgtcacatcctatcagagcggggtgttcccgtgtcctctagcatgaggttcttcataggcattcacctattcatctgctcccccgaacacaagttcaagatcatcacaggatccaaacacaacaacacacagggagtgagttatcacattcctagctaatagagaaacaagacaattaaatatacgtattatataaatgagataccacttgcttaaacatagctcacgtaacttcaccacttcggtattcaaaattcacttttcaattatcaatcacattacccaagaat

SEQ ID NO: 2624 - DNA, 211 bp, Glycine max
tgcttctacagagtgaaataggaataaagatgaaggaaaacagtgaaaaagaaaaacaaaaagaaaaagagaaggttgatgaggagaaaaagaagagcaagagtgaggttttaagagagaaaaagaacgagattacttcagctgaaggaaaggaagtaccatatccattggtaccttccaagaaggataaagagcgacacttatccagatt

SEQ ID NO: 2625 - DNA, 260 bp, Glycine max
aaactcactctttttccactcataacaccatattctcactttctaaccctaagttaactctacccttcatccctagcaagtttccataagccatttcagcacaccaacaacaaaagtatcatcataaaaccataaactgaagggtagctaactactcaacaaacaagtcagcatgctttcgtaaatctcttcacaataactatcacaaagcattaaccaaacaaactacccatcatatctccaaagcccataccccaaat

SEQ ID NO: 2626 - DNA, 206 bp, Glycine max
ttcgaatttaagaacttatctaactattttatcaacaatgattttaaagtagcaaacgtgacgtagatttattggtcgttatttgattttaaatttggagtttgatttcatgataaggatcaccttgtaatttgaaaatttatcctaataatgccaaaagataaattaaaaaaattgattgtttctcttatagcatttgatcatgc

SEQ ID NO: 2627 - DNA, 248 bp, Glycine max
aacattttaaaacccacttgaaccatcataaattcaattctaggatctaaaaaaggcacacttgagcatatgaattggattacattgtatgttacctgcaaaaatcaaaataataataacttcattatttgtaaaccttaacataattaccattcaattaaattgaatgtattacatacttccctatatctatgaaggtgttgtttccaaagaaaaggaccacctttagattccatgattaaggtttt

SEQ ID NO: 2628 - DNA, 209 bp, Glycine max
ctttaaacttcatacaagaatcctgctctgataccacttgttgtaccttgtggcctcaataatcttaagagggataggcttagaatgcagaagaagcaacaacaatcaatttaacaatgttcttttggaatctctctcgttgtctgttgagaggataagacattttggaccaaaaacactctctcttcaattttgtcccaagtcacaca

SEQ ID NO: 2629 - DNA, 87 bp, Glycine max
  unsure at all n locations
tatgtggtagattnatcaaaactaattgttccattttgtnttgctggtgcaaatttacatgtttgcttttatatttttgtataggga

SEQ ID NO: 2630 - DNA, 942 bp, Glycine max
  unsure at all n locations
cctcccttcttttagaggtcctnctcctctccctccctccctttctttnnttctgtccttctctctttcgtcccccccctacccacacctggtatacttgaaacttgtggccgcgtgaaccccgagatctcctcgagggactcaagcgcgggttattcttttttataaacaacagatatagttctgtatttttctcgagaaaaaaaagcctctgagccctggcaccccactgaaaaacgacggagtgggttgccaacgataacacaccctgacagtatgtgcgagattttttcactaagacatcgggggtcgaaccaacttagatatttcaacatgggcccatgacaacatttggccacggtggaagctagaagtaacacaggacgtctcactgcccgttcaagggggtgggcagacacacaacaccaaccgatgggacgcctcgtctaatcttctcgcccgaacgttatttggtaggacagggactcatcattactaacacacagggactagatgcaccatttttggaatgaacaagagacgtgtgttgtaccgcatcaaccccacggatggggacttttgatcgccgactacttcacccaccctttcctacaaatgacaagacccgcgcctaatgtttgccatgcacgtggacaaggcaattatgcaaaatagaatgccccgaggaaagattattttctcgataaacactcacatggggacaacgcaccacaaactttggtcgcggggggttcttgttgggaaaaaagacatcgacgccacgatgggggggtcaggtgacctacccagcccccagaaaggcgcggggtgatcccgcctcgctctttcacctgcttccaacaaaacggacgcggcaccgcgcgatactgcaccgatgggtcgcgataacccgcgatcgaagcgcgggagaaaagatcactc

SEQ ID NO: 2631 - DNA, 145 bp, Glycine max
tgttgcaaaaagcgcttagcacaccctgctgcgctaagccccagatgcttacgggattttacaacttcaagttgggcttaacgcgaggctatgctaaacgcttggtttttaaactcaaacttcatgttggcacgctaagctcagt

SEQ ID NO: 2632 - DNA, 449 bp, Glycine max
aagcttgccaaccatggaagccctaaatcttcccactttttggggggggccattcttggatggccttgattttctcagggtccacttggatcccatttctaccaactacaaaccctaagaaaactatattatttacacaaaaagtacacttctgtatatttgcatagagggtgttttttctaaggactgaaaaaacttgcctgagatgtcctaagcgatcatctaggctcctactgtacactaaaatatcatcaaaataaacaactacaaatctacctatgaaatcccttaagacatgatgcataagcctcataaaggtgcttggggcaatagtgagccccaaaagcatcactaacccttcatacaaaccagacttggtcttgaaagcgggtttccactcatcaccctttttcatctgatttggcgatcccccttttaagatcaatttt

SEQ ID NO: 2633 - DNA, 197 bp, Glycine max
tgatattatgctaagcctcacatcttatgctaagcgcatattggtgaaatatttcttgtgttgcaaaaagcgctaagcacaccctgctgcgctaagccccagatgcttacgggattttacaacttcaagatgggcttagcgcgaggctaggctaagcgcttggtttttaaactcagacttcatgttggcacgctaag

SEQ ID NO: 2634 - DNA, 240 bp, Glycine max
gggatcttaagtgaccgcggctgcagcttttaacattaaatggtataacttttactcggaggccggaattaggcgcataatatatcgagacgctcggaattgaacaatggaagctcttgagcaattcaaatgggcataactttttactcggatgtccgaatcaagcgcataatatatcgagacgctcgaaattgaacaatggaggcacccaagaaattaaatgggcaaaaacgttttact

SEQ ID NO: 2635 - DNA, 193 bp, Glycine max
ctgatgataacatgacaaactccaagtgcttcattttggtgacaacgtcatttatataccgatcgttattttgcatgaaaaggggagaaatgggaaaagattaagatccccgagaaataacttaacaaaaaactatatgtcccctaacctcgattattatagtccaaagattctcccaaattattataacgtg

SEQ ID NO: 2636 - DNA, 232 bp, Glycine max
agcttgcttgagaagcttctatggaggctatatctttgagctttaataaggtccttcaatggggattttcagccatggagttgccatgaaagataaaggaaaaaaggggagaggaggcgttatccacaagaaaataagccatggaaagagaaacttctccaccaagaaagtggcttggattagaagcttcaagaagaaaagaatgagagaaaaagagggggcataagaattg

SEQ ID NO: 2637 - DNA, 205 bp, Glycine max
ctttgatgtaacatttggagaggttaatgaaacaacgtattatgatgcgctccatgagaggttggatcaaatggagaatagagaccatatgaattgctcaagagcttccattgttcaatttcgagcgtctagatatataatgcgcctcaatcggacctccgagttaaaagttatgaccatttgaaatgctcaagagcttccattg

SEQ ID NO: 2638 - DNA, 368 bp, Glycine max
caagctttatgaagttttttggttttctaaaccttgaaaacttgcgctattcatcttttcattctcttctctctttgccaaaaagaattcaccaaggactaaccgcctgaattctttttgggtctctcttcttccttttccaaaagaacaaaggactaaccgcctgaattctttcgtgtctcccttctcccttgtcaaagaattcaacatgacacagtctgagaattcttttgattcttcccattccctaatacaaaagcattcaaaggtttaaccgcctgagaattcttttgtatccccattcacaaagtattcaaggtttaaccgcctaagatctttgtcttaacacattggaagggacatccttt

SEQ ID NO: 2639 - DNA, 217 bp, Glycine max
  unsure at all n locations
tttattgcatagataaaagttaagagtgcagaatattgttgttggtacacattgggtaccttgagtttacatggagatgggacttatttaaagaaatggctcaccaaatgtgaaccttgggtttgttgagccttagaacacactggcgtgttagccttgagttttatcaagcctatggagttgcgtcaacgcttaccaaggacnnnttttttttttt

SEQ ID NO: 2640 - DNA, 497 bp, Glycine max
  unsure at all n locations
agctttttaaaaagaatttaacgnggntcgacacctcctgcctatgtccacgagaccgtcttaaaaagtatttcactatcacaaaaatgattacaagattgtaacccaccccaaatactgtatcactctacaaacccgagtactccactcaatggttataagaaatgataacactctcacacaaagacacttttctctcaacaaagtgactttgtttcacaatctctcttctcacacacactctcttcatgggttgggtttctcccctaaatctcttctctatttatagtgaagattgccaccaactattataaataatttctcttggaagttgaaacaaaaacaatttttcaatgcatccattaagctaaagctcatctagtaaaatgcaatctttcactttccattaaagccacctaaaccttagtgatgaaaatccaattcccatatgcatgcacttatcttgggttgaaactctacacttaactattattttt

SEQ ID NO: 2641 - DNA, 204 bp, Glycine max
tgctaagatttttagtatgacaatttcaaaatataagaataacataatcatttattgttagggtttttttcacgtctttctaaattcaaaatccaagtattatttgatacaagttactttaaccttcactctcctttatagaaagaaagaaaagaagcaactatcacttaaagtaatataagacaatatgagataatttcttta

SEQ ID NO: 2642 - DNA, 355 bp, Glycine max
agcttcacaagatgatgccgatcgaacttttcctaactgatatcatgcaaatttcgttcacggattgaattgaaaactcaatagccgacatcggcctcgaaatagccccgattgatatttttcagccgacattgagcaattttttttaaaaactctcgctggcagataatggtttttttacggtagaggaagttttcttgttttggtgttgcataaaatatttacaatttaagtcggctaggattttttgtgcgagctcaaccgaacttttgtttgggccaaaactggcttgttcccatttattcggccagcaaaacattagcccattccggcaaaaaaaatattattcaccgat

SEQ ID NO: 2643 - DNA, 198 bp, Glycine max
tcaccggatgacgccgatcgaacatttcctaaccgacgtcatgcaaatttcgttcagggattgaattgaaaactcgttaggcgacatctgtcgtgaagtagcgaccgatatttttcagccgacattgcacaattctttttagaaaagctcgctggtcgataatggcctttttacggcagagtaagttttcttgttttg

SEQ ID NO: 2644 - DNA, 142 bp, Glycine max
tgcaagcttcaaattcaacttcgagcgttttgttatattatacgactcaattatacatccgagtaaaaagttattggcgcgtgaattggctgagaacatcaacctctaatttttgagcgggccgatatatgacgggactcaa

SEQ ID NO: 2645 - DNA, 200 bp, Glycine max
ttgagcaaattcaaacgacaataactttttactcggatgtctgattgagtcccgtaatatatcaacacgctcgaaattgaatgttgaagctctgagcaaattcaaacgacaatatatttttaatcggatgtctaattgagtcctataatataacgagacgctagaagttgaatgttgaagctttgagcaaattcaaacga

SEQ ID NO: 2646 - DNA, 876 bp, Glycine max
  unsure at all n locations
gcacggccgaagactacgacgacaggcgtctggagggacaccctggattcgcaagagcggcatcactactaaaaaaacccctacnaaccccccaaggtcatgagactgagacctcacccaccagggaaatacccccgggggtggagggtcgacgccaagaaaggggcatggtttatgttcatacgaagggcaggccttcctggggggggggagggggggcacacaccataacaaacaaggagggtgaaaaaggaaacgaaagggaatagaggggacgagaagaaaaaaaagggggggacaaactcgtaggcggcgaactggggcgacaacacgagagggggggcgaacgcgtcgggagggaaaagctgggtcaaaacaagcggacgagacaaaacgttggggccggagacaaactagacgttgatgtggggatgagcgggtgaagcccaaaacctcggtggggaagacgggatggaaaaaacgcgaggccgagggaccaaccacgaggcaggaaaaacaaggaaatcgaggatggcgacgggacaagcggaggagtggacgagactgcagatagcacaagggggagcgataaacgcgcgagacaagaagagcaacgggaaacggatgagaggcgacgaaggacagaacagacgccggggaaggggggaagaaaacatcggggcgatagagaacgtagctggtgccagatagttaccaaacgacgggaatccggctcgatgacgcgtgaaagcggacgggagagcacaccgcaggccggcgacgagcaatatctaaccgaaggaaaaggatgatgcaagggaaacgcagagggtcgccggacacacctgaaggggatagacgcttggagaaggaaag

SEQ ID NO: 2647 - DNA, 207 bp, Glycine max
ttgagccaaaatcctgactcaccataaaccttgacccagggtgagaatgtttatccttactctcggaaacaaaaaagaaggaaaggaaatttccaatcaaagaaagaaaaaaggagaggaaaggaaatttccaatcaaagagaaagaaaagaagaggaaaggaaattcccaatcaaagagtgggagaaagaaaaaagaaaagaatga

SEQ ID NO: 2648 - DNA, 400 bp, Glycine max
aaacaacaaccttttggaggaatcttctggagggcccaagtgggtctggttgctatttgcacccccatttttactaaatacaccccctgcctttttttggggattcttttttcgtaaagctacggaaacttaataaattttctaaccgatacttggtttctttccgtaatgttaccgaaccttgcggattacataatcatcccttttttgacttacggaatgttacgaaacctcactaattgtgcaacgatgcttccttttgatttccggggtgtcacggaaccttacggattgtgcatcaatattttcttttgattttcggcacgttacggaatttcacaaattgtctactgatgggtgccaagcaccttaataatgaccaaacacaagttgcatgcca

SEQ ID NO: 2649 - DNA, 208 bp, Glycine max
ttgagccaaaatcctgactcaccataaaccttgacccagggtgtgaatgttaatccttaccctcggaagcaaaaaaagaatagaggggaaatttccaatcaaagaaaaagagaaggaaaatttccaatgaaagcaaaaaaagaaaagaaggaaaattccccaatcaaagagtgggagaaagcaaaaaaagaaaagaaggaaaattccc

SEQ ID NO: 2650 - DNA, 449 bp, Glycine max
ttggtggccctttctctcccttccaatttagttggggggaccaacccttatcgaagtaagttccctctcccttttgacctttgtgatttgctacttattccattgtttttcaaactttaaattttgctagtgtcacataacaccacttgcatttgtttaacagtaatctatttagtttgttcattttccaattgcagcataactcacttctttagctatgttgtgtggcacatgctttgatgttgaaatctcccaacttgaagattctgaatattttgatattttttttatgcttgtacgggagacggtgatatagttcatacccttgcttggcttgccattttggaagtgcaaagctttcatgacttttttttggtgaagacaaccgatttagcttgatcttctataaattattgcgggcttggatgcaaattgttgttttacctagt

SEQ ID NO: 2651 - DNA, 206 bp, Glycine max
ctaacaaacttagaaatcaagtgatcatgtattccgcaatatatggggagaaaaacggatgcacattttatctatatacaattgtttgttgcttgcttgaatcttgatttcaggtattgtattgtcatcatcaaaaagggggagattgtagatgcaattggctttgatgttttgatgatgatcatgatgatgtgttgcaattgatg

SEQ ID NO: 2652 - DNA, 407 bp, Glycine max
ggcatgagttttaatcgagttttataatcatatatcatctatcatctatccttcaatctatctttcaatatcttctttcatctctttctacagaactttctaattcatttatcctcatctttctaacagtttttgttcaacactttctctttcaagaaaagttctttgataaaaaaacttggggtattcatctttttcattctcttcctcctttgccaaaagaacgaaggactaaccgcctgaattcttttgcgtttctcttctcccttaccaaagattcaaaggacttagccgcctggaaatcttttgattcttcccttccccttaagccaaagatttcataggactaactaccacagaaatcttctgtttcccctttccaagattcagttgactaaccgcctaag

SEQ ID NO: 2653 - DNA, 202 bp, Glycine max
taccttttcattggtgtattttgatctccttttggtgctctaaattgtgggaatgtgcttaaatatgtggggcaattttggtttgttttcttgcttgattaggttgaattgggggtttgtatgggatggccctaggcctataatgcattttgaaacaatgggacatgccacattgtccccgttctcttgctattgatgccta

SEQ ID NO: 2654 - DNA, 373 bp, Glycine max
ggcttgtacacaacaacaccaacaaagtccattaattcctccataacaatgatgctcaataccaacaccctcttttccaccttctctctgactctcaagtatatttgcacttcatgcatattgaaatgctcatatgcaaaaactactttcaaattttattcttgcatatggtgttcgtttattatatgcataatttgtcaatcttccttaaaactttattttaatattaatggtataggaagcactgacacagaagtgctgaatttatcggcagctgaaaatgttgaacggagaaaagatacttgagcaattccaagcttctacatcttttgaaccggtggcttctataactcacgaaacagaaagtgaaaat

SEQ ID NO: 2655 - DNA, 485 bp, Glycine max
  unsure at all n locations
agctntgaaatccaaagatctaatccaaggtatatgtttcataaaggggattcccttacttgtgctattcgagtgcaacctattcttttatatcctattcgtgtgtagggaaacttaagctttttgtgtcttctttaaataaagatatggtgggagaaaccccaactagcggttttgtggtaatttctaatggggggttgaattggcctgtggaaatttctggtagaacattaatgattgatctaatttgttggcctttgagccaaattgatggtattctgggtatggactgggtatcttccaaccatgtcttgttaagctgctttgataaaactatggcggttgatggctctagagtgagtaaggatatatatggagaagccagcttcatgatgaatcaagattgattcaaagaagttctgatgatgacaaaggtgatgacaaaaagctcaacgaccagaacaattaatgatacaaagatgatg

SEQ ID NO: 2656 - DNA, 188 bp, Glycine max
tcaagtaatgagtatctttcccttcactctagtgctttacattatataaatttgccatattctcgataaattttgcagcttcatcatttaggcaaagcactgtcaaatctatggaatcttatggacacatcatacagtgagcggcaatctttttcccatgtaatcaatatgttgccactctcatctgc

SEQ ID NO: 2657 - DNA, 434 bp, Glycine max
agcttgcttgataagcttctatggaggctatatctttgagctttaataaggtccttcaatggtgattttcagccatggagttgccatgaaagataaaggagaaaaggtgagaggaggcgtcatccacaatagaataagccatggaaggagaagcttcgccaccaatagagtgccttggataagaagctcaaagaggaatataatgagagatagagagggggcataggaattgaaggagagaagttgaactttgaagtgagtctcacaagtttctcattcatcaaagctatgaaaagtggtacacatgtttctatttatagcctagcacatgggaagcttccttgggattctataggcagaaagcttccttgagaagctagaaaggggctactcatacccctccaatagctaagctcacccctatgtatgataca

SEQ ID NO: 2658 - DNA, 200 bp, Glycine max
cgtaaggatggcacaaatcaacgaaggattatcaactacaatctttcagtcatcgcttcactcaagctcaagtgttgaggctcattccatcgtaaacaactaacacaaggtccaacctttgcgtttcatctcatgtcatacagcgatgatcacacaatatgaatctgaatgacttcctagtcttgtaatgggggtaggct

SEQ ID NO: 2659 - DNA, 537 bp, Glycine max
agcttctatataagctgaaccattttatcaatttacacaagttgagttttattcagaaaattagagtttatctcttttatcttagtgagagtgattctcctaagttcttgagtgattcaagaacaccctggctgtatcaaaggactttcacaacctttgtgtgttgccctcgccagaaagagcgattttttccttcctttcatcttcaaccttggtctttcaaaccacaattccagaaaatccacttctgcccagaattatctcgtggccataactccagttttacgcactcaaattaagtgattcttgagcctaaattgaatttcataacgagacatttcacctcattttggaatcacctcatttggagcccggtagcttgagctattggcatttctatattatgtccagccctcacttaacctacgttttttttcatctcattatttcattttatgccaagaaccaacttattaagacccacgaaataaacaccttatttttactctttctttatcaatttcgcatttccatcca

SEQ ID NO: 2660 - DNA, 203 bp, Glycine max
tgtagccattagaagagaatgagcacgtgattagaagtatgactgaaaatgttagtcagtttgtcagattgattgtgaaggaatgcattaaccgtatcccggtaagagtgtgatccttaaattttgagagaaacgactatcatttagtactaatttttgcgtgaatctttgaagtatggactgaatgcatgaaattgaggatg

SEQ ID NO: 2661 - DNA, 534 bp, Glycine max
  unsure at all n locations
cantcgcggcatgcaagcttttaattagaggcgaattattttgaaggtcatgatgcttttatctataccaccatgcaaattaatgctttgattgacaaatgctttaattccacaagttgtagcttttttttaagaaaaaaatgtatttgtgtaataaatttatataacttttaacgatgaagagagaaataaaataaaaagagataaaatagatattttttgtgtgtgataatcaaggcttaaatattaaattttggagaaactagctatctcaatctcaccactagatggaccctagtaaggtataaaatataattgatatgatgaagagtgattgaacaagtatttatctataaatatttatatgagaagaaaataaaattaattaaagtttttctatttattaaaattaacttacaccactgtatttttacatatataaactctctcggttattaacatattggcgggccgagtgacaattgatttaattttttaaataagggtgtatgtttaagttttgtaattgaaaaa

SEQ ID NO: 2662 - DNA, 200 bp, Glycine max
tgtattgtgtgagcttgttgtagcatgttatgtttgctgttattttttaattctttgaccctttgaatggccaaactggattttgatgtcttcatgagagttgtagagaattctatccttgacatttaggtactggtcttatgtcatttggaccaataacacataataaatcttcaaagcattgcacttacgttatattg

SEQ ID NO: 2663 - DNA, 489 bp, Glycine max
agcttatagagttaagtctcatataggtttaatcaattacaattgtttcataatcgattacattgctgtttgagacaatgactaatttattcaaaagtctctgctttaattgattaccaagtggattaatcaattacttctctctcatttagttgttcaaaggagaacaagaatactttaatcgattagttaaagcatctaatcgattacattgttcttgagttctttccagatgttgggaagaacacttcaattgattacttaaataatcttatcaattactttgttgaattaatcaattactttgtagatttaatcaattactggcggttatatcagttttctctataaataaccagcttgtgttcacaactacacatcaagagatcaatagagattactcaacacatctcgaaaataactcattaacctctgaatgagaatgatctcatgttattcataatgaataagagaagaaaagaaaagagc

SEQ ID NO: 2664 - DNA, 204 bp, Glycine max
tttcgcaaagcttatggtaaaatctgggacttagccatggtagaagtctccacagaagccattgcctccctcgcccagtattatgatcagccgatgaggtgcttcacctttagggacttccagctatcacctatggtagaagaatttgaagaaatcctacgatggcctctaaggtgaaggaaaccctatctcttctcagggttc

SEQ ID NO: 2665 - DNA, 958 bp, Glycine max
  unsure at all n locations
gactgatacgtattgggtgtcagacgtgtntatgctataccgtgttgtaaagcgtagattgtggtagttagtgtaacgatatattatcntcctcctccactcacagccnnctttttgactctgagcgacatcgaggcacccggagaaaatccccaaggaaaccccccgggattggaagtttttggaagtgggaaaatttttttcttatattttgatagacacaggggggagtgacggtacagagagttcctgtaaagacacacatccttcagaggggtataaaaaagggagaagggggggggccggattttcttcaatggggaggggaaaaacggtgggagaaagctggggtatgactatataggagggtggggagacgggatgacaaagaagggggattttttctcccgggcgatagaatagagccacaagagttggaacgggtcgggaggggataactcccacaagtgggtgtcgtggagggggttttgtgggtaataagcaaaacgaataatgggtcggaggggacgggaaaagacagaatttagctggcgcctttggggattttgataaaagaaggaggtttttaagacggtggaaagggccttgttacatatcaggggggggaggaaaattattttaggtggatttatagaaaagagagcaaaagggggtatgggcgagtctcccgaaaagaggatcctatgtttaggggtgggagggaaaagattggagaaaatgtggagataagagaggggaagaaaaaatgtgtgttaattttgaagaaaaggagttttggggtggggacggaagaggatattgggcgtataatttcgaaaagggggtagggaggaagagggtcgaagaatgtgtttaatgttgggggaaatccttaggggagggaagggaggttttttttggttaggaaagtgctaagagcaccaaaatgggggaatcg

SEQ ID NO: 2666 - DNA, 198 bp, Glycine max
tcttaggatctttgtgatttgatttgtgatttgatcttaggtactatatgacttcccttgtgattttagatcatttgtgatgacaatgaatctactaaacatctcctcaatatattctgcttcttccatattgaacaggtcatattggagtgtcaagatgtttatcgtggactcatttacttagttagtcccatcata

SEQ ID NO: 2667 - DNA, 199 bp, Glycine max
tattgtattgacccaccccaagtggctgagcttgtgcagcaataaggtctacaatcaacccatcaaatgtctcttaagtattttctttttatgctttatgtcacttaagtcttaaaccttatattgcattaaaaaaaatcttgaccttataatgagtcattattaatgacatcacataagactcatataaagcccagtt

SEQ ID NO: 2668 - DNA, 424 bp, Glycine max
agcttcttcgggtatccttgctcaatcctgaatttcttctacaaggtctaactcaattcttattaaattgtttttagtagccttatgaaattgttgtcattgaaacaagagttcttcaacatcaataggaatcattgcatcgctaccataggctagccaaaaaagtgtttctttagttgttcattgaggtatacaacggtatgcccacaaaactcccaacagcttcgacccatgcttcttttgcttatccaagttatttttcaactcatcgaggataaccttattaaatgctttggcttgtccattggattgaaggtggtcaattgagctgacttgatccatttggggaagtaatcgaccacaactattatgaacttgcattgcccttttttcaacggaaaggctacatggatattcattccct

SEQ ID NO: 2669 - DNA, 202 bp, Glycine max
tctcagattctttttgaacaacttgtcttatttcttctccaagtttcctttttctttgagctataagtttggctttagaggagatagaaagtttgtgacaaatgaaattatgattgacgcctgacaagttaactgcactttatgcgaacaaatcaacattttattttaacaggtgctctatttttcttcgaagatctacatc

SEQ ID NO: 2670 - DNA, 437 bp, Glycine max
attctggtttatgagaaattttcttaaaaagaaacacaccactaaattctatgtgcccttactggtattgggcgtataaatagggcttggctcttatgcactttataggataatataaagtaccatattaattaaaaaaaatcaatggttaagattgtaggtaacttaatttagattttataatatttatatttgattttattacaatcccaatcgttaatgttctaattatcaatggtgagtgcactttattctctaaaatgcaaccatcattttagtttaaaggaaccaaattctataaaatgatacaagtatctgaatttgctttaatttcggtggttaacaggttttaaggcaacccacaacaggctgggaggttcaacttcactacacaatttccttactataaagaaagaaacttacatgccagaatttta

SEQ ID NO: 2671 - DNA, 1089 bp, Glycine max
  unsure at all n locations
cattttcaaagtaattantctataatagtgaacttctattacagtgatgataagtatataataagatagtagaataatattatattcaatatncntcccncaaccaggttggaatgaatacataggaaaacagaaaaataaaatgagactaggacaaatggggctgatgtagggattatttttttttggaatactactctataaaaagggatcaggatttgtaagagaggaaaagttaaattgagatagagagggggatttaaaataagaaactggaaaaacttgggaaaggaagaaaatttggataaaaagaaaagggtgctagggcnnaaagaaanangagnaaaangaaagagaaagaagggaagaagaaganaagaanaaaagagaaaaaaaaagaggaaagaaggaaaangagagagaaggaaaagaagagtaaagagggagaaagagagaaataaggaatgatagaaggaaggaatgagaaaaagaggaaaaaagatagagagagaaagaagaaattaggaaagaaaaaaatataagttaataggataaagagagaagaatataagtataaagagataaatgaatgagagatgaagtggaaatatgaatgaatgtaaagaattataatagtgaagattgtaggatatagaaggaagtaatgaatgatatgagagaataaatgaatagaatagaataatgagatagaaagatataagaatatgtaagaganatatgagattataaagtatgatgaagtgagataagtagaagggttgtaaatgagaaaatnagtaagatagatagatgtaatagaataaataagaggtgattatagatatttatgaatggaagaaatggaaagatatagagtatatgataaggaagatgtatagaatataatagaaggatatataaagagataagtagaaaaggtatgaatatgaagtgaataatattgtagggaaatgaatataagattataatnatatatatgtaagaatnttataggaatgtaaagatggtatggataagagaaagaataagtggaatgagtatatgagaagatgagtataaataggagan

SEQ ID NO: 2672 - DNA, 424 bp, Glycine max
tatttcactcaagccagccccatagaactttggcataagagacttggccattgtcatattcaaagaatgttgaacatgaagaagaaagacatgaccagaagtctaatggggttttctcgccaaattgcaatgcttggcagtttggtaaacaaaatagaatgccatttcccaaatcaacttggagagcctctcaaaagatgcaactaattcacactaatgtggcagaacctcaaagaacaccatcactacaagggagttcatactttattcttttcatagatgattttacaagaatgtgttggatttttttcttaaaattcaggcatgaagtggctagagtatttataaaggttaaagaagatggtggaaactccaagtggctgcaagattcaagttctaagaaccgataatgggaaggaatata

SEQ ID NO: 2673 - DNA, 207 bp, Glycine max
tatggattatagtagttcagctgtatctttgtttaaagagtttttgggtgttgagcatttggctcaaagattacagatagaggttcatagggtcattggttttgctggagagaatgataatgtgatgctcactggtgaaagctcaagacatagtactcatcagctttactctcagaagaggctgataaaagtgtcccttaaggccct

SEQ ID NO: 2674 - DNA, 433 bp, Glycine max
cgctgcaagcttgaacaccatataagtgaaggcaaaacccttattcctaagccttaaggttttggattaaagcgtgggttcatgttcacttatggtgttgcttgaggcttgttggtgcaaatctccctaatggttacccctctcgattgcaccaaattgggatcagagctttgattcttgaaattaaatgttatctatcctttgggctttctttttattgagcgggttctcatttggttgctctttcccttttggttaactttatattattatttcatcctcctttgctttatttccttgagactatctttctttttctgaactctatctagcatcaatatcttttttacctttttttaataaatactaccaacaaatttgcgcaaaaaaagaaagaagcgaaaaaaatatataattttcaaaatttgaagcc

SEQ ID NO: 2675 - DNA, 208 bp, Glycine max
tggtgtttcacctatggagattttgaattaagggggtgtgttatttataattcagaatattagttgtaaagtttggtagtttgtttagttagttgagtgtgataagacagtgattgaggctgaacttgagttgtataaatagcctctgtgtaatttagttcataatgcaattcatctcattttagtatatgctttttcctggctttct

SEQ ID NO: 2676 - DNA, 449 bp, Glycine max
agcttgcttggtagatagtcaaggcttggacacctactgtgggttggggcctggtacgctccctaatggggggatacggtgtcgtcacacaaatctacatcaaatatgttgtcgccttcaagctttcagcataacattgctgttcctacttttaatcttccttgacaaccatgatatctcccatcaaggtggggactttcatcttgaaatgtatggagatgatgactcctagctcgtttggtgttttcctgccaatcaaagcaaagtaagaggtatttgcaccaacaattaaatacctaattgtgaagctccttgagagatggccttgatcgaaggttgtcattatgtcaacgtagccttttgtctctactctttcttcgacaaagctgaggagtgatccacagtgtggctggattggatcaagtgagactccagcctttgaaatgttt

SEQ ID NO: 2677 - DNA, 501 bp, Glycine max
gcatgcaagcttgcatttggaattgcgaaagccccactccatcattaagattagtacctgacatctcaaacaaacaaatcaaacgtaacaagacaattatagttgctgtttgaatacctcacccactcaagggtatcacacaattatggcttttctctaatgaaacactcttgccttttaccactctaattccccttgagttcttaggcaattcaagagattatggccacaacaaagaacaattcaccaatatgtgtaaggtaaggctagacaaagaaaaggttaaccaagaaaaaggctaacaatgtttttaggcaccaatgaaggaaacaaaattcagaattcatgaattcaagaaacaatccttcatgcaaccaaaatattaccttaaaagagttttttttttaagtttttcagccatgaaccattcagctccaattttttttttttttaaattttgcttatcgaaaaacctgcttcttttttttttttaaaaccaaa

SEQ ID NO: 2678 - DNA, 201 bp, Glycine max
tgcagtgaactttcttgttacgggttttttggcatggaaatatggaagacactaggactcacaggcaagtgggacaaagtttgtttgtgcgagttgacaagcttcagttaggtactctccttatttcttactttaatatgaaaatccatcattattttttggtaacaataaatagtccatgattgttattactcgtttgag

SEQ ID NO: 2679 - DNA, 950 bp, Glycine max
  unsure at all n locations
gaaagatgtggtgaggnagggatagactagatagaatggaatgtcagatggaatatgtgattgaatgaattatgactcacacaaagaccaacggggnttgtgacttgtgaagtaccgggattttgaaaaagacccgagcgatgcaagctatagnttnttttattaatggatagaatattatggtggaagatagaaccatggaaggcggatccacataaagggaaaatgggtgtgttgtaagaattcagttttttcagatatcgtaagctaaatgtttgggtgtatattagttaaatattccaattataattggcttgatgaaagaattattttatattggggaacacgatatagaaaataagataataagaacgtttgggtaatagtttaatttattttgggatcgaatatgtgagattaggagggaattatttttgttaaaggaattggggggtttgtgaaaaacaaagtataggtagggtgctgttgtaataacaatttattagaaggagtaaaattataggggcgataattaaaatgtaaataattattaattattgggttgaaaaaaaaggatggaatattttggaaagggctggtggaagggtacagggtgggagaggttggataaattacaataagaatatgagttttggttatatatttgatgtttggtgagggagggcggaaattaaattttagttaatttttgttgagaaagaagtgatagaggtatatgattgggggggacgaattgtattttatttattatgacagatgttttggaggggaaaagtattgactaattgagaattaataaaagcatggtgctggagggtgttggaattataggacaaaaataaatgagatggaaattgggtgagagggattatgtagggaaaatttatggagtgattgaagagagaatagggatgaggatgtgtagatgn

SEQ ID NO: 2680 - DNA, 195 bp, Glycine max
  unsure at all n locations
gcttagngaccccaacttgagcttaatgcagggaacatgcttttatttggttttagaggtagaaaaacatgaaaattaggattttcttgtgagagtttttgctcgaattttggttgccccatgtttgatactttacatagagggagcatgggaaacaccttgcaatagtgtggatacataggtgaatataagaag

SEQ ID NO: 2681 - DNA, 493 bp, Glycine max
agcttgtaggattatggggtacccatcacatgttgtactatgtggcggtcgggcgatggtgcacaacaagtttttccaaattcacaatgcgcgcataaacccaccatcccctgttgcccacctccaactgagctcacgtactcccacgtagcccatatccttgtttctctcaacaccggggtcccatcaatcctcccaagcttccacaatatccaaacaaaacaacattcacacagcacaagctatcacagccaagcaaaacagagcaaaggcagaaaactctgccaaaacaccaaccaaaaatcacagctttttccactcaaagacgccagtaacaattccttctatccaattcgtaaaccgttggatcgactccacaaatatactggaagtctatagggcataacctacattttgaccgttgggaactactagcaaacatccagaactcattctacattactctttcccaacccagcaaaacatggatttt

SEQ ID NO: 2682 - DNA, 194 bp, Glycine max
  unsure at all n locations
tttaattgatacttcatatttcttataggatgagtaatcnggtttatgttcaattaacaactttattattaatgcggcatattatacagggggaaatacaagatcccacgagtcttcgccttacatgtcccttcttcgccttaagcatacaacaccacacttataatcttcacgtctttcttaggagctataac

SEQ ID NO: 2683 - DNA, 399 bp, Glycine max
gctttcacaacatccaagcaaaacaactatttttacagcacaaactaccacagccaagaaaacagagcacaggcagaatcacagcttttctcacttataaaccccagtaacaattctcttcgttccaattcggtaacccgatggaatcgactccgaaaattttacctggaaggcctctaaaacctcaagcctacattttgaccggtgggatctactagcaaacatccagaaatcattctggactactctttccacagccaaatacacacaagcatttttctgcacaaaagcaaaaacctgctgcaccctattttgacagcaaaatactggataagcgcagaacttgaaaaatacaccttcccctatccagatcttgccaaatcaaaacctacaagcccc

SEQ ID NO: 2684 - DNA, 184 bp, Glycine max
aactaaattgtttggacaatattatttttaactaacttaaactaatatttaaagttactactcataaggaagtatgggccttgattaggctcatctaatcttcctaattaaactaattacacaaagcaaagtccaaattcacaacccaattattcatcaagtgcagaggttctgacttccaagc

SEQ ID NO: 2685 - DNA, 449 bp, Glycine max
agctttttgttgcgttaaatttcttaaattttatcacaaattcaaaaccttaagccaccgggtcaacaatagaatctttttattgctttttttctaaagttggcacaaaaaaacagatgttcaattatgtgggtagataattccaccaacaaaattatttgttaaatgtaactcaatctctcacagtagcgtaagatcatattatatttatatgtggaaaaacaatttatttaataaaagaaattatatttaacttttatcgcatgtaaaactttattaaattaacgacgaatatgccattgcaacggaattaatctatgaccaaatgatttgaaagatatctatgatttctgatttaggttaattaaaaaaggaaccaattcatatttttaattatttataacttatattaactaagggaataaaaatttcaattctattctcatttg

SEQ ID NO: 2686 - DNA, 177 bp, Glycine max
tgagactttgagaaaggagtatgacagatatgagcctgagacttttaggaaagaacagagtagagatctgctacaagaaaagcatttaaattctggagatgaccgttgtcattcctctttatcccattggccagcatatacaagagaatctccttcagcagattgtttagctaaatg

SEQ ID NO: 2687 - DNA, 304 bp, Glycine max
  unsure at all n locations
atgcaagcttttttgagggtgccttattgtgtgctattttaccttcctgaaacaacggttaccttaaccctcccccaaattaggggcatatcatgactaaaatccttatgctctcttaaaccctaaaanaaggtacgagattattaaagttcgcttatggagtttacaaaaaaacatgactattatttttggctcaaataacgtgcgaaggatataaattatcattcagggctgggtttttggccaagtggctgaaaataagaagaaacaaagccttgatcattttcacctcatgtaatttatc

SEQ ID NO: 2688 - DNA, 198 bp, Glycine max
  unsure at all n locations
cttctttggtatgatatgatgataaaattgggntggtaacttactaattttcaagaaaaatatggacttcttgtggatacaagatcataaatgttctgaaagttgcaagttgaaacatttcttgttgtgtcccctgaacataacctcaacttctacattaaatgttgcacaaacaggtcgatggtcagagaacttaaa

SEQ ID NO: 2689 - DNA, 1042 bp, Glycine max
  unsure at all n locations
gtggggttgatagatattagatgataaggaatgtatggtatattgatgtaggattatgtaaataagtgtatcnaaataaatgaaagagnacnttgtggctttgagaaccttgggagaaaccgcgcatnttntagagaaaaaacccgccgaatggtagaattgatagaaaaatgggtataagtatatatattatattgggtaagtntgtggagggggggagtgagaaaaatattatagtgtaaatgcgatgagatttatgtttaatgtgaagaaaatttgtgttaaataaaagtaaaaagatgtgaaataatggagaatttttaattaatgttaggtggaagatgatatttaaataagtatgttaattatagagtgtagggtgtggaaggagattaaagtatggggattatggaggtgagtgaagattttaagatagatgtgttgggaatttgtggagtttataatgttaggatgtagagaaaagaattatgaaagtattgtattaggaggagtggatagattattgtgtttgggtaggttagaaaatttaaaataagaatagagtgagaaatataggtattagttgggagatagatgatagtgatgtggtggataaatttgataagatgttggatgatggatgaatgataggtggcgagtgaataagtaaatatttttgtagagtgaagagagtttgatgattgaagtagagaagtatagttagatgaatgtatataaggtagttgagtgagaatgagtgatggaaatatatatgagaattgtagattgaattatgtgaagtttaaatggtggatatagaatttatgtgattgatatattgatgatttatattgatagtgttgttgtgngggttattgaaagatggattgagtatagggtatattgtattattagtagtgtgatacgtatggtggttatgtgaagaggataaagagatgggaagactaagtgaaaagttgtgaaaaatgttagggatgtgatgtatttattgtggatgaagttatggatgtagtgagataag

SEQ ID NO: 2690 - DNA, 164 bp, Glycine max
  unsure at all n locations
aaanaaatagtaatgatttatagttagnttagttataatgaaggaagttanaagtttgtttggatatagaaaaactagtgaaatgaaatgatattaaaagagnagataatgaaaggtaagataantttagttttaatgaaantgatagttanttttnattagta

SEQ ID NO: 2691 - DNA, 925 bp, Glycine max
  unsure at all n locations
nnttgacacccnnatttaagtcctcgaacnnntttgtnttggaagtgcgaaaaccancccncnnattagtnnnnnnnnnnnngtatnnanngttagtatttttttattttaaagngaattaatataggtgtgggggtgatgtttatagttggatgaaatggaagaatgataagaagaatgataaataaggggagggggaagaggtatgataaagaaatgaggaangttaatggtagaaaatggagggtggatgtatataggagaagtagggtggggaatatgtgaataaaaataggagaaaaagagattagggggatgtgtaaaaggagaatgagtgtggaggaaaatgtattttatatggaataatatgataatttgnattggaatgtagtgttatatggttagatattatgaggattaaaataagttaagtagagtggtaggaagaggtagtaataatgtaattgatatagttgttgtatgtgtatgtaggggattgaagatgttttgaatgtattggttagatgaagtgtatggttgtatggatatattgagttattgatatatggattgatgaatgattgtatagtgttagaagatggtatgaagagtaggaataaggggaagatgtgttgagagaagaatgatggataataaataagtggaagtgaatgtaaatagagtgaattaggtggattgtggataaggaatattttgatggtaagtttgagttaggattggtgatgtaatatgtaaatatgtgatgattataattagagttatgtatagtttatgaatgtgagagaattaaattaattaggatgtggtggtataaggtagggattgtatatagttggtatgtataaagtttattggataaaaataggtggagtttaggtatggaattaggaaagtaagtggaatg

SEQ ID NO: 2692 - DNA, 781 bp, Glycine max
  unsure at all n locations
nttgaacactgatngcacgcgatgntgagntacatgtctatntnattgaaatatgtattggtaaanntntttgtttgatgtggggaaattggaggggggggatatttggggtggataggaggatactataattttttgaagagatgggggtggataatgagnagagtgggtatagggaaagaaatgttggattatttaagtatagatgagaaagtagtttaaaaaaatttgaacgatatttatgatattaatgaaattttaaaatttgattgttgtgaggggttggaaaagagaaatattcttgaatatggtaaagagtttttgatattgaaatattatagagatgaaaataaaggggttaagattagaaataatgataatagttgtattattaatgtaaaagagggaaggttatttgtagatgaaggggttaggataaaaaggagattatgatatttggatggagaaaaaaagagatgaatatagaaaataaaggagatgatgagatgtaaaagatggtaagtatgttttataaagatgtgtgagggaataatgttaaaatatatatataatggaaaaaatgtaaattgatggagataatataataaattattttagggagaaagagggggtgaattgtatgtagaaggaaaaattgttgtgtatgtattttatagattgagtgtaattagatataaaagtaaagaattatatatataggttgatattatattgattataaggaattataaatgagaattgaaataagagtagatgtaag

SEQ ID NO: 2693 - DNA, 146 bp, Glycine max
ttatttaaatgaatttggggttgggggtaaatcttaacatagttttttcgatagataatgtaatgtgatttgtataaagatgttatgggaatgttgtaacaatgctttaaaaacttattgatatattctgagaggttggatgtaat

SEQ ID NO: 2694 - DNA, 186 bp, Glycine max
ttgtaataccaatatcaataattttaattatattagagataattgcacttaacgtgacagggcacgctaaacgcacaaaaaacaccataaattttctaatttgtctatgaaaacaacatatacttcgtctttagacgtaacataccgcaacttatacgaaggtcataatgcatattgaacttttac

SEQ ID NO: 2695 - DNA, 171 bp, Glycine max
  unsure at all n locations
gaacgaaggggaaaaagagactatgtatgtttacttgcgccgaatttattcttcagcaacgaaagtccccccatagactatggatnatggactgattggcgcttgaagggacatatgtgatctgttggatatataatgacgagaaaatggttgaaagaatgcaaagaaagg

SEQ ID NO: 2696 - DNA, 408 bp, Glycine max
agcttgagtaaatatcttgaggaggccaaactggtctaacaatatacttaaaatcaatttgaagtcatataacatttgtgattcaaatacatgttatacaaattggttttataagtattggcattacaaaagtaagtaccaaatgaaacacaaatattacatctatttaaactattgcttttcattcttggaagaagtcacccaaaataatcaattcagagctaaaaaatttaactatttcttttttaatataaaatctaactaatcattttgcccaaaaaaagagggaaaaccccacccaaagtataagtatttatgaacaacaagaatttcaataaatatttttttttaatttgagaaattttaaaaaattaattcgaaacttgtaaaaagaaaattttttcccac

SEQ ID NO: 2697 - DNA, 204 bp, Glycine max
cttggaaaatatgctgaggagtgcgttatctgcgataattgatgaaatgtattcaactttcataaaggacagacatatccttaatggaattctgatccttaatgaagtggttgaggaaactttgaagagaaagaagccagttatggttttcaaagcggatttctaaaaggcctatgattctgtatcttggtcttttttggatta

SEQ ID NO: 2698 - DNA, 212 bp, Glycine max
tcaagcttttggaatataagctgaggagagtgttatctgcgataattgatgaaaggtcttcaactttcataaaggacagacatatccttaatggaattctgatccttaatgaggtggttgaggaaactttgaagagaaagaagcctgttctggttttcaaagtggatttccaaaaggcctatgattctgtatcttggtcttttttggattac

SEQ ID NO: 2699 - DNA, 481 bp, Glycine max
attgaaaagatttctgcttgattgagtgcatttggcatgccatgggtattttggatcgaccggaaggagaccaagtttctttaaagagagcgtactgccaagcaaaagctggcttatctggatccaaggttgctatcttaggtgctgctgcgctgggcctgggagaattggacaaccccttacgttgctaatcaactagattctgttcttcttctttatctttatgatgctgtgaactcccttggtacttgtcaactatgttatccatattacacttttttgcagatgccccgaaaggtggcttttatttaagaggtatttcttctcttgtatattcaacgaaaaaatatggtagtacttgaagtatagtgttacagatttacaaatataaaacaaattacctgggcaaagagatttcattcccccactatgaattacctttaaaggttcacacttctcacagtatatttacctttaaccg

SEQ ID NO: 2700 - DNA, 194 bp, Glycine max
  unsure at all n locations
agngcgtggaccgtgccatgcatgatttattttttanggagcggntaaataattagggtaatgcatacttcttttaattattttaatataagaaataagaattttttatttttttaaatataagtaaattttaattatttctgttttatttaatgaaattctctacaaaacttcttttatttaataaaaataaa

SEQ ID NO: 2701 - DNA, 405 bp, Glycine max
ttcattaagtgggattagagcacacagagctttaagtagtgctaaatggtgtttcttcattaatgataaaattaatgaagaatttaagtagcacaagaactccttaaacctccattaattttcagctttaccttccctttcattggtggttcttcatttttctccctgtatctcctcacatgtctaaggcttaatgtttttaacatgatcttttagaatttccactgattaaacttgctatacaagctagattttattttttatgggtcaaatttcttgttcttgaaccataaattggggtgagttaaggtcctttgagctttggattgctattttttgtggctgaaacctgaatgataaaattcttataaaacctttaagtagaagaaaaccctcaaaaatcta

SEQ ID NO: 2702 - DNA, 1030 bp, Glycine max
  unsure at all n locations
gatgtgggagagggangatgaggtgtaagaagaagtatgattgaaagtgtgcatatgtggagaagtattatannccctccaggaggggtgagtctgtancactgccnnnttgggaaaaaagcccggccngngagngggaggggnanngaggggggaagaaaggattaagagttttttatgaaganaggagggttggggggggggggggtgggaatagtagtgataatgtggggggggaattgggtgggaggggtaaggtgtgatgggtggtttggtgggggggtgagaataaggataagggggatgaagtgggggagaggggtatgagggagtggggaagttgtgagacttatgannnnnngngngnggngggagngggaggaggaggaggggagggaggggggaagagggggggggagaagggggggaggaggagagggaagaggaggaggaagagggaggggggaaaagggaagagagggtgggaggaggaagggggagaggggggagggagaggggggagngagaaaggaagagaggggaaaagggaaggagaaaggggggggaggggggggggaagagagaggagggagggggggaggnggggagggagagggggatggangagagggagaaggggatgaggaaggagagaaagggaaagaaggaggnaggtggggnagnagaggagagaggagggagaagganagggtaggagaatgtggtagagggtgtgaagaggaatggattgtgatgtggagaagatgtgattgtggtgatagattgggaagagtgggtagaaggagttgggagtggaatagggtggggagagaaggatggggaagaggggtgagagaggtatggagtgagtggtgtggtgagaggatgtgtggtagagatgagggggagatgaggtggtatatgtgatgtagagaatgggtgtgggatggagtgnangagagatagaattgtgatgaggagtgggggtagtggtgagtgtgaagtgatttgagttgatgagggagaaggg

SEQ ID NO: 2703 - DNA, 488 bp, Glycine max
agcttgcgccacgggagaagttggtccccagcgaatcaagatatggactcagataagggagtccaaaactctgtgctgaaatttcaaggttatgaaacaaaataagaattcaaatccttcatcaggcaataatatgcataataaaattgcttcacgtgacaagtcattcgatcatgtatagacttaattattaattttggtctaacatgaaaaagtgaatgaatatattatcatgtatcatagcttgacaatgattaaaatgttcatggacgtacgaaatttattttacttatcgctaaataatatctacccttcataatttaagcctacatttttatatctggtagctcctttcctaaaggcggttttaacttacaagttatatatatcgatgtcatcgtttgaccaaaaaaaatttgtggtgaaaaggcggaggacaagaaagaatgaaaagaaaacggatctgataccatgatagccacacatct

SEQ ID NO: 2704 - DNA, 206 bp, Glycine max
  unsure at all n locations
ttcccgcgagtanaaacatgggaccaactcattttatttcaaatatagaagtcgtatccagtcaaggtctgagagaccatacaagtttcctaacgatttctaattatgtgggccattaagtctatcatatgctgacaatagccgagaagcccatgaatctcttccggggtggagtaggtgtctgccatcgtcttggccttggctaa

SEQ ID NO: 2705 - DNA, 346 bp, Glycine max
agcttatgcgcatacttgtttacgaacgttttcttgctcaagacatttttataactaagaaaaatgcgcccatattcaagtcaggcaccttcgctacctagattatttatatgtacttccaaggtggagttggtacctacatttcatgcactttcttgggtaaatttacatacaatgccgacttcaagcatttgggggaccaaaaaatgcacatgcgcacattccggtatttttaaaacttatgcatatacaaactttgggaggaaacttggctatctacacagtaaggtgaaacatttcatggtttaatcaagtgtttcaggaacctaaagcccactgtcatttc

SEQ ID NO: 2706 - DNA, 202 bp, Glycine max
ctgagccaaaatcttgactcaccgtaaaccttgactcttggtgtttaatgtcaatccttaccctcggaagcaaataatagaagagaaggaaaatttccaatctaaggaaaaaagagaggaaaggaaattcccaatcaaagagtgggagaaagcataaagaaaagaaagaaaattcctaatcaaagaatgggagaaagaaaaa

SEQ ID NO: 2707 - DNA, 510 bp, Glycine max
agctttataaccacaaacaaaaaattatttgttattagctttttttaaaacaaaaaatatgacatatgttaataaaaaccatttcatacactctgcaaaaccatttcatacagtatttgtagtgtactctcaatggaaatacacttatgagataacctctaatctttttttatcagtgaaaaactctataaaaaaaggtaaaaccaaaagatagaaactccaaggaccttataagtccaatcagctgagcccactgagcatcaacagtactccattgatccccctcaataaccaaaacaatatgaaatacggcatgtgagaatagggtcaaagaggataacattagcatagaccatgatatcaaagatggttgacagacgcgaaatcttgttgcaatacagaaaaagattcctacataaataaagaataactagtatatagcatctacaaactagaaaaagaaaggccagtgatgaatgataaaaagaataataaatctttatgtccaac

SEQ ID NO: 2708 - DNA, 198 bp, Glycine max
tgaggatagagacttcccaagctatttatcttctctctcagagaggctctctaactttctagctttcttactctaagaagtggattcactcttgtcttggatcgactcactctacggtggctcactcaagcttgaggatagagacttcccaaactatttatctcaaaaatcctcccaactacttcaaaaatttccttt

SEQ ID NO: 2709 - DNA, 497 bp, Glycine max
agcttgtaggattatggggtacccatcacatgtggtactaagtggcggtcgggcgatggtgcacaaaaagtttttcacatccacaaagcgcgcataaacccaccatcccctgttgcccacctccaactgagctcacgtactcccacgtagcccatatcctcggttctctcaacaccgggtccccatcaatcctcccaagcttccccaacaatcaagtaattcaacaataaaacaacacaaactatcacagccaagaaaacagggcaaaggcagaaaactctgcccaaaacaccaaccaaaatcacagcttttctcacttaaagaccctaggaacaaattcttcgttccaattcgttaaccggtggatcgactcgaaaatcttactgcacgtctctggaccataagcttacattttgaccgttgggatctactagaaaacattcataactaattctgcactactctttccacagccattcacacacaagcatttttct

SEQ ID NO: 2710 - DNA, 197 bp, Glycine max
tttgtatggggcttaatgcttgatattaccaacaaaattcaatctcagcaacagaaacattcctttggctgaggaggatacgcggtgcccattgtaatgcaactgaggagagtgaaaatcacaagttttttgcttgctggttctcatcacaaatctggaataaatgttataagtgattgagagtatagatggtacaa

SEQ ID NO: 2711 - DNA, 318 bp, Glycine max
agcctgaattgacggatctttttgtgagtaaataaataataagaagtccactttgactggtgcatttttgcaaaatgtcttaatggagtaacctcaaactatatgttttgggcttaaatcaactaacctttactttttcaagaaaccaaaatcttcaaaatcacgatcaagacctaactttgaaatgaaagacgctcctccaaagaagcaaaagcagtggcaatgaaaacactctaaatgcttaaagctgtaagcaaaactctctttctctctctttctgtggatgaattgtcaacctgagagtttacttaaactagt

SEQ ID NO: 2712 - DNA, 204 bp, Glycine max
tcctgtggatgaggggataagatgggacgaatgtgttaaatagaaaatatagaagaaagtttacgatgaaaatcattttctttggtagtacataaaaccgaattgaaggataacaatttctttttttactgtgtcttccttgccttttttttatagaaaaatgttgtttgcaatatttgtgaagtatcctgttacaaattacaa

SEQ ID NO: 2713 - DNA, 340 bp, Glycine max
agcctgctctaaatttacattgatgtttgcatttattggaggaggttgtatgtcatttttgttttaagagtagtgtcccactggtaaaactaacttttccaatgtttgccctcgcaggaaatggcccccaggaagcttgcctcaaagaggtccaggaaggacaaagcagccgaaggaactagttccgctccggagtatgatagtcaccgctttaagagtgctgttcaccagcagcgcttcgaggccatcaagggatggtcgtttctccgggagcgacgcgtccagctcaaggacgactagtatactgattttcaggaggaaatacggcgccgccggtgag

SEQ ID NO: 2714 - DNA, 208 bp, Glycine max
tgttgtgcaccatcgcccgaccgccacctagtaccacatgtgatgggtaccccataatcctacaggcttgagatgaggaagtgttgaagggtgaaacttcctgcttttattgttgaccacagagtggtacctggagatatgtcgcgggggtcaggagaccttggggacgtcaggtggggtgctattgcccaaaatcaagcttgaccaa

SEQ ID NO: 2715 - DNA, 901 bp, Glycine max
  unsure at all n locations
tatattgggtatttccttacatctgcgtctcgggtgaatgcttcgctatggccgtttttattaacaacaaaacgtcaatggttctaataaattctgatactttttggttaatatagttgcaaccctttggttcataataacagccttgaattctttaactcttgtacattggctaaatttgttaatgaatgaataaacaacaattttactttgggtccttttaactctccctttctaagaaagtttaagctgcgagaaacgccctaaatttctagtaggaaaatttttaaattaatcaatgggttggattccaaagctcacgaacccaacaatatctaatttggttgcctaacatacctgcccagaaattttaactttattcatttcatttttgaaaaacaaacgtgtattgccaatacggaattgccaaaacaaaatttgaatttctaaatgcttaaacccaaacctgttgtgctaatgcctaaatggtcatgtaaagactccagggccaaaatatctatttgtttggtggcaggacggagaatcaaaccttggtcgacctctgatgaaaactaacttaccaacggatgggccaaggtggccagccagatggtgcccttcgctctcttcttgtgaaagactttttctttattctttaatcaaaaactggcaccactcaagcattctctttaacagataatagcactacctcttcccaaaaactaacttatgtctggaatacttcacgggaacttnatataccttactcaagttaatctttccgggcaaatactctacgagaatcgccaacacgctggatactttctctctccaccctacctttcatagccaacaaatgtaacaaccctattctttccgttttattctccgccctcgcacg

SEQ ID NO: 2716 - DNA, 204 bp, Glycine max
tgatgcttctacttgtgatgaaaagattaataacataaaagatatagatgtacaagctctttgatgaatatgtgattgtaaagtcaagttcatctattgcatcaagttctcaacaacctactgttgaagaagatttcagtatagaagaaaatcaagagatggatgatccatataatgttagtcttttgtttaactatttaattg

SEQ ID NO: 2717 - DNA, 431 bp, Glycine max
gcttgaaatattaatacattgtatgtaacgtttatctcaagaaatccaactataacaggcttgcatgataaactttaacccaattatacaaacaatcaataatacaaaaatcacaccttggagcctgtgcataaaacccatcctttgtatagtcactaacaccaattgtgtaaaccaaatctccatcaggatacaattttgaatacccattccacaatccatactgcccgaacctacaagttgaggaaaaaaagaaaaatctaagaacagatcaactgacatctaaaggaaacattttcatacaattaaaaggataataagcacagttggataaagatttatcattttcatcatttcatggtggagtaataaaatgtagcacacatccaaaattagcaaatccattaaagccatataaggacaaacaaaaa

SEQ ID NO: 2718 - DNA, 203 bp, Glycine max
taatcagctgatcaggaacatagtatataatatgcggacctatactaaaaattaagagaaatttgttgtactttaaatatgatagtcatatgtgggaccttttatacaacatgagatttttttagtcttaaaaaattaataacatttttttattgatgggtttaaagtttaaattttagttattttatcattaaattaatctt

SEQ ID NO: 2719 - DNA, 894 bp, Glycine max
  unsure at all n locations
gcgacctgtctgtagctaaacaactcaccgatttggtaacacttctacttaaataacacattgtacattcgtatctcatccttactcaaancncagacnnttgtgacctcttgtaccgccgacctctacatcgacctgcggcatgcaagcttgcagcacaatcactaacaacatagtatgtgtttttgagcaagaagcctcctacccagatgacgagctttgcaggcttcaaaacatgtcggaagacgaccctgaagatactaatgaaacctttgcggaaggtgatggaggtagacaaaaactaaatgcacaattacttcaacaactagtcttggttgaaccaaaccaggaataatgcatattaactgaaaatgagaacaaaaatgacttttatgatacagacactttttaggaaaaccatacatttaaagtgaacgcggggcctaacttaacggggaccaatactttacacctggatggacggggcgatgtatattaacacattttacagccatctcaattgaaagaaaacctaccattttggccgcacaaaacatgctaagagggggttcatataagaccaacttaaactgttaccaaacacatatggagaagggaactccctattaaataaatgcgccttaaaggaaaggccgacaccctcagatcactcctccagacggacggcctcgccaactcaacatctacccccacctccccgtttactacctcaaagcactacgctcattctcctcaacaacagataacaccgcttctcatcctacctcgataacactttattatatgtatttttttttatttatccccacccccatcaccccccccccgcccccttgtcaccccccctattaattgagtccccccccccccccg

SEQ ID NO: 2720 - DNA, 206 bp, Glycine max
tacaaatctattttcagtccaagaccataaaccagataaaattttatatggacaagataagataatattggatgaaataaaatctggacgaaataaaatctagatgaaataaaatcaggataagataagatttgataaaataaaattgtctgctctcttcaattccaagcccaattctgaattcaagtccaattacttataattct

SEQ ID NO: 2721 - DNA, 315 bp, Glycine max
agcttctgttttcaattacgagcgtcttgatatattatgggactgaatcgcacatccgagtcaaaagtttaatttcgtttgaatttgcttagagcttatgttttcaatttcgagcgtctcgatatactacgggacacaatcggacattcgagtcataagttattgtcgtttgaatttgctcagagcatctgttttcaattacgagcctatcgatatattgcgagactcaatcggagatccgcgtaaaaaggtattgtcgttcgaatttttttagagcttcagctttcaatttcgagcgtcctgatatactacggg

SEQ ID NO: 2722 - DNA, 489 bp, Glycine max
cagctttttgcaatactaacacgaatacataatttatataaaaaaatatgctgacacattaattaacattctaatggattaatttagccatataaacatttaaaaaactaatgtaattatattctaattctcaggaaaatgtatgaagactttatttaacatatatcttgctttaaaaattaacttacaaaagttccaattaaaaaactattatagaatttttttgaaggggttttacctagcaccaaatgatatattcttggataaatatgaaaccacattgaaaaaatatataatttttcataactgttttttctttaaaaaaaaaaaaaactaatttcttcttgttccctgaggcacataggaataaggcgacgcataaaatttcaaccatcgaagattgatagaaactactttccattgggcaaagttttgtccttaaaacacttataatttttcttttttgagggatgtgtttctttttttttt

SEQ ID NO: 2723 - DNA, 202 bp, Glycine max
ctagagtttttccttttgttaaggcttcgcgacttttgttgttgaatatataatacaaggatctttcttcatttgttcctacgtctctacccattctcattcatttgcatgtatacttctttttctgaaacggcagatccgatgacgagtcccccgaaggtactaatacctgggacccgcctatcgacttcgagcaagaaat

SEQ ID NO: 2724 - DNA, 512 bp, Glycine max
agctttcacgatatccaagcaattcaattccaactatcatgaactaccctcaaccaagaaaacagagtagaggcagcaaaatctgcccaaaacacattcacatattacagcttttcttactcaaataccccagtaacactctcttcgttccgatttggtaaccgttggatcgacttgaaaatgttactggaggttcctagtacataagtctacattttggccggtgggatctgctagaaagtgtccaaaacccaatatgtactacctttcccataaccagcaatgcacaagaattttctgcacatgttgagcaattctgctggacaaatttaacagctttttgctgcacaaattgggagaattcgaaattcatcctacccaccatccattttgctcaaaatggaacctacaagtcctaaatcatgtataaatcatatttaaaccaaaaacaagcttcaaaccaaggaaattcaaaatctacggatctaaaacccataattgagggaattttc

SEQ ID NO: 2725 - DNA, 1151 bp, Glycine max
  unsure at all n locations
agacatattcgcactggacagtaagtcggaagaaatctgcattcacatcgaggatcgatncgtgtcacgcatagaaatggaatgatctgccttaatantcaccccccccgacagggggttgatagcttgaatacactagaaacnatcgaatacacatgccaggaggtactgatggcgatgaaaagaataataatagagaagattaatggtctaactctttgaagaataagggaacgtgaagtcaggtacaactaattgcatgttgagtgtgcaccagactaactgtggaatgacagaaggtgaactaatagcgaaaagaaaacgcagaagaagggtgaagcgataataatgtgaagagtttaagggcgaaactaattcacagttgcgcttctggnnnnnngagagaaagggagaagaagaaggagaaagaagaagaaaggaagagagagggaaaggaagtagagaaaaagagaaatgagagaagaggaagaagnaaaaggagaaggagaagaggaagaaaagaagaagtggagtgaagggaggaagatagagagggaaagagagaaggaagaaaatgagaataagagatgtagtgaagaagataaatgataagagtgaaagtgaatgtgtgtgatgagtgagaaaagttatataggttgtgaagagtagagatatgggtgagatgtgtgtgaggataggaagaggtgttagagagtagtgatagagaagaaggataaatgagataggataaagtgaagatgaaggagaagtagaaattaatagtttatagattagaagtgtatatatgatgatatttagaataggtagagggatgagtagtaatggagaatgtgaaagaagattaagggttgaaatgagagaaggaagagtgaaagagaaggaagagagaggagttagtaaagtgagaagtatagtgggaagataagagtgaatgggtagaaaaggaggttgaaaggagataatatagaggtattgagtgtgatatgtaatagaaangagcagatggtgaggatgaggtgtagagggatgaagtacatgtgaatntaggggagatgtgaaaaaggaagatattgtgaagagtagtgttataaaagttaatgtgagatgagatgagttgagtagaagagtgg

SEQ ID NO: 2726 - DNA, 517 bp, Glycine max
agcttattggattatggggcacccgtcatatgtggtactaggaggcgatcgggcgatgacacaaatcaactatcccatttccaaaagccaggcagaagctttcacaatatccaaacaattcaattccatttggcatgaaactaccttaaacaaagaaaaacagagtggaggcataaatctttgcacaagattcattcaaattccatagagtttttcctaccctcataccttagcaaaatcctcttcgttccgattcgctaacctttggatctccttgaaaaattaactgggggttcctaatacagaaatctaaattttgaccattgggatctgctaaagaacatacaaaacacgaaatatactaccctttcccgtgacagcagaaactagcactgcacaaccattttttttctgcataattgggcagaatttgctgcacaatttgacagccttgctgcataattttggcaaatttttaaaataagctcacatacatccaattccactcaaattggat

SEQ ID NO: 2727 - DNA, 201 bp, Glycine max
tgcatcagctccatccatccatcttatctctccccttttttatatatttgattttaagtggctgcgaagaaattgaaagccttaatgttcattcaaaatctctcaatgtactgagactcagaggatggtcatctctcaaggaattttcagtgacatcagaggaaatgacacatttggacttatctcagactgctatacgtg

SEQ ID NO: 2728 - DNA, 383 bp, Glycine max
agcttcatgatgattaaccaagcaattttgatgatgcctaaagcccaagtgattgattcaagacttcaagatcaagcttcaacaattcaatccaagatttaagattcaagagaagaaatcaagaagcaacaagtcaagacttcatatatgataagtattaaaagatttttcaaaaaccaaatatcacagtttttgttttacaaaagaattttctcaaattttctaagttaccagagtgattactctttggtaatccattaccagttggcaagaatcgattaccaaggacctatttggttttcaaaatatttttaagtggtttgcaatgttcccaaatgattttcaaaataggtaatcgattaccctatatttagaattgatta

SEQ ID NO: 2729 - DNA, 199 bp, Glycine max
ttccgcaagacttacggaaagatcttagagtcgaccttatcattagtattcatataagtcattgcatgactcacccaatactacgaccagcctttgagatgcttcacattcggagactttcaattagtaccaaccattgaaaaatttgaggaaattctaagatgtcctctcgagggaaggaaaccatatcttttctccg

SEQ ID NO: 2730 - DNA, 477 bp, Glycine max
agcttgtccaaggaaccctcatcttggtcattgtccaaagcactgagtgtggacaaattttcttatcaagaatttgatgaggatgaggaactggccttcatcttaagaaagatttgaaagatgtggaagaacaagagtgggttaagaccgaactcctccaaaaaggtgttcaaagagaataaaaacacggaaaagagcttcataatatgatatgagtgtaagaagcttgtacacttcaaatcaaaatgcctaaaactagagaagtccaaggacaagtacaagcattaccagtccaaaagtctcatgagcagttgggaggacatggacaacaccccctttaatgaaaaagtagaaggggaagccaacctatgtctgatggatgatacaactttctgaagagtcagactcagaacaagagaaagggagattttgatgaccctaaatcattaagacaaacctatcataaactactttcaa

SEQ ID NO: 2731 - DNA, 202 bp, Glycine max
tccccgtggcttctttgagaagctagatccttatctacccatacccttttattaactaaattaacctccttgaaaataattacggataaaaataacacaacaaataatcaaacatcaaacataattactaataatatatatatatatatatatatatatatatatcagggtgttacactcaacattctctgtctttatgttt

SEQ ID NO: 2732 - DNA, 522 bp, Glycine max
agctttgatgatatgggctccaccgacgaaatgatcaaagtgagtctaaaaagaggcaaatttgatcatcatactttgataaatggcaaaaaaaactaaggcaagtgaagaagatgagaaggagggaaaaacctatgctgttactgccatttttatacgaccaagtttcacaccaacccaacaatgtcattacttcagccataacgacccttctcattacctaccacccagtcatccacaaaggccatccctaaaatcaaccacaaagcctacctaccgcacttccaatgacaaacaccacctttagcataaaccaaaacacccacccagaaatgaatttttgcagtgaaaaagcctgtaaaaatcacccccaattccagtgtcctattctaaacttgctcccatatctacttgataattcaatgggagccattaccccagccaaggttattaaccttcatttttccagaataccattcaaacgcacgtgtgcttgtacggaaaaaccctggggcgttccat

SEQ ID NO: 2733 - DNA, 1060 bp, Glycine max
  unsure at all n locations
agcaccgggggtttganncccatgagacgccacgnctatgctacgccgacacatatagacatcgctcaagtctttatctagcacggcgtctacggaggacgaagggccatagttggtcgctcatgtatcgaaggatgaatgtgtcccgagtaacgattaagactttgtgtactgaactatcgaccctcacctgatcttctcatgctgtggcaaatcagtgcgagatggagcgaacgaccactgcgcattgtacagcaacgtagcattaatgtagcatcctttacgcggtgttaaacatgctctattgctcgggcactgaggccccgnnnnnnnnncnannnttnnctnntntnnagttgagattcaattccagtatattataaaatgttgttctgaatattattattgttgttgtaggttatattatctcctttatgttttctttctcgttttgttcttcttttttaatacttacttgtttttcgttatgagtttacattgttgagtgtatagcttttatgcttgatctcaattacaattagtggtcttatttacgtattgtttcattaattaatgtccgacaattctagtctggagtgtgatggaatcttcttatattcgtttatgttgtctgattgaattcggtattattaatagttaattcttgactcttgtatctagtattatattctgcgtttatctatctatttattctatatgtttagaggttagtgattattcgggatttattttgctcttatttgttttggcttttattatcatctcctatatttaactatcacgtattttatcgctgttcgaattctttaggagtgctgtatcgattgttagattctcatctttatgaatatctagtgtacgaatcgacttatgttgttagaattatcatgttcgaaacnccgaactctcttctgttcatccttgtttatgatacttattctantcgtatgcnacgtattgcactgatttcttagtgtgtgttatatgtccgacgtcatactagtcgacagtgccgctataatncattcgtatgtcaatn

SEQ ID NO: 2734 - DNA, 309 bp, Glycine max
agcttatgcacggaaaatgtaattatgaaattgtgacgccccaagaaacaccatttcctagttaaccatgcattaagcaccatgctcaaattattttgttattaagtgaaacgggtttatgatcccaacatggttggctcctaacacatgaaactaagaatgtagcgcgaagttccacacttccccctcttttgttcttgtttcgtacacgaaaacgcaaggatgagccaacatgataacaaatggtatgcaattttgcagatcaaaaagattgttgaacgcatatgcatgatgatgccatgacttatg

SEQ ID NO: 2735 - DNA, 201 bp, Glycine max
tgtgaccatttgaataactcaagagcttccattgttcaattttgagcgtctcgatatattatgcgccttaatcggacctccgagtgaaaagttatgaccatttgaataactcaagagcttccattgttcaatttcgagcgtctcgatatcttatgtgcctgaatctgacctccgagtgaaaagttatgaccatttgaattt

SEQ ID NO: 2736 - DNA, 454 bp, Glycine max
agcttctcccctattttgctataaataggggaagaagtgaagaagaaaagggttcagccccttaggcacttctctctctctctcgaatttgctgaggaaaattattttcgtgaagaaaatccaagccgaggcgcttccgtaatgtttccgtaacgtttccgtgagtaattacgcgaagattctcgaccgttcttcaagattcatcgttcgttcttcgttttcttcaatcttcaacgggtaagtacctcacaccaagcttttcaattcattctatgtacccgtggtggtccacattttgttgcatgtatttttattcttgtttttgtctactttttatacccccttttgacgtgcttaagccgtttatttaaggcatttctcgcttaatctaaaaataaaataaatttccaccgaacatttgaatcgtatcatccgctaattttggttaaaatga

SEQ ID NO: 2737 - DNA, 446 bp, Glycine max
ataaaatttacacataaagagtagaaccaagagtctcatcattcttttcttattcactcaactttactggctttctttttctttttcgatttttttttttgctctgtagccttttgagaaacagcatcatattcagcatgtccaacatttaaccaatatgcaatgtatatcaagtatggctcaaaatatatcatgaagcatggccaacaaaacatgttatccaatgaaacaaaaacccccacacttattcctaaaacaattccaaagctccaaaattccttaaggatatggtgatatcatggtttttcacttaaggcttgtagtgagcttcaaaacaaggaaagggaaacaaggctcaaaagggctatcaaaggaattaagtcaaggtaagtccatttggctagaagcttataagaacaaaattgcctcaatcgtattcaaatatg

SEQ ID NO: 2738 - DNA, 537 bp, Glycine max
tagctggaaaacgaattgaaatacttgacttaagcacacaatacaaagaatagtttgcactataatcagaaggtacggtcaaaagagtattctttatgaaatatttttttttatgagtcattgaactatagagtatcaccatcgctaagaacaagaatctcaaacaaccatactatctatgcaattaaggcaaaacaccatactactaacatacccaaaattataaggttcttataataagtatacaacgtacatataagaagtaagaatttaatagctaatacggatgtattaaaaaaattacaaacttcaactactacattcatgactacacacaaaataaagtgagttaagtagtcatgcgtttacacatcaagaaagacatactcatccaagacatatatatggttcaaaaggtttttacaacactaatccacacatcaagatagaaataagtttattaaccacatacaccgcagaagataagggctcattaagcattatccacccatatcaaggctttttgcatcacttaac

SEQ ID NO: 2739 - DNA, 583 bp, Glycine max
tcacttcaattggtgcatgctaatatctggggaccatcaagtacccctagctttggtggaagaagatatttttccctcttcgttgatgactacacctgaatgatgtgggtgtacttcatccaacaaaaatctgatgcattctctagcttcaaggagtacaaggccttagtggaaaagcaaagtgggcattccctcaaaatcttgagaacaaatcgtgggggagaattcaatgggcacatattcatcaatttttgcaatgatcatggcatcaagaaggagctgactgttcgtcacactccacaacagaatggtgtcgctgaaaggaaaaatagaaccattgtggaaatggcttgattgatgctacaacacaagaacctgccaaagaatctatgggcgaaagctgttagcatagcagtatacattctcaaccgttctccaactaaagaaatcttaaatttgacgccatatgaagcatggttcaacagaaaaccaacagttgatctttttaaagttttgggatgtgttgcttattcgcacttcccaaggagaaccgattaaagctttttgaaaaaggagaaaaatg

SEQ ID NO: 2740 - DNA, 450 bp, Glycine max
agcttagagccaattcaaacgacaataactttttactcagatgtctgattgaggcccgtcatatatcgagacgctcgaaattgaatgttgaagctctgagccaattcaaacgaccataactttttactcggatgtctgattgagtcccgccatatatcgagacgctcaaaattgaatgttgaagctcagagccaattcaaacgacaataactttttactcggatgtctgattgagtcccgtcatatatcgagacgctcgaaattgaatgttgaagctctgagccaattcaaacgacaataactttttactcggatgtctgattgagtcctcgaatatatcgagacgctcgaaattgaatgttgaagctctgaaccaattcaaacgacaataactttttactcggatgtctgattgagccccgtcatatatcgagacgctcgaaattggaa

SEQ ID NO: 2741 - DNA, 375 bp, Glycine max
tcaacattcaattttgagcgtctcgttatattacgggactctatcagacattcgagtgaggagttattgacgatcggattggctcaaagactcaacattcaatgtccagcgtatcgatgtgttactggactcaatcacacatccgagtaagaagttattgtcgatcgaatttgctcataacttcaacattcaatttcgagcgcctcgctctattacgggcctcagtcagacatccgagtaaaaagttattgtcgatcgaactggctcaaagcttaaacattcaatttcgagcgtctcgatctatcacgagtgtctttcgcacatccgaggccagaggaattgtccccagaattggcgtacatgctgacattcaac

SEQ ID NO: 2742 - DNA, 446 bp, Glycine max
agcttggagaggatgcttcaatggaggaaaagaaagagggagagaaagagataggggaagcacgaaattgaaggaataaaagagggagagaagtggaactttgaagtatgtctcacaatactctcattcatcaaaggtacaacaagggttggtacacatgcttctatttatagactaagtagcttccttgagaagatttcttgagaaaacttccttgagaagcttatttgaaaaaactttcttgagaagctagagcttagctacaaagacccctttcataacaaagctcacctccttgagaagcttccttaagaagattcctaaagaaactagagcttagcgacacacacctctctaatagctaagctcaccttcttgagatgagaagctagagcttagctacacaccccctataatagctaagctcacccccatgacaaaaaaca

SEQ ID NO: 2743 - DNA, 145 bp, Glycine max
tgcactatcacacatgtgatcattagcaacatttagtaaaaagttcctaagatcttttgacaacatttaaaaaatgttgccaaatatgaataaatgttactaatatgtttttgcagcagatgcgtaaacccttgctgtgactgcc

SEQ ID NO: 2744 - DNA, 571 bp, Glycine max
agcttatggtaaaactaacagcaatggaaagtacagtttcactgttgaaggctttgactatgtgaaaaatggagcctcagactgcaagggtaaactccatgctccttctaaggattcacgctgtttcatacccaccaagcttaatgagggaaccaaactgaaggtgaagtccaaggataaaaatgaaggtgcgctcagagcttaaccatttgcttatgctcctgaaaagccatatgattgcgaaaagtccaatcccaagcctttccctacttcttatgacaaaccatattattagaactctaccccaccccctttacccttaccgcacccacaccctccttactactataagtcaccacctccaccaccatcaacatactattacaaatctcctcccccaccttcttattactacaagagcccttcttcaccatcaccatcaccttctccatattactataaatctcccccgccaccatcaccatcaccacctttaccctactactattaaatctcccctcctccccacaaagatccataccatcctccttactactacaaggcaccctcc

SEQ ID NO: 2745 - DNA, 357 bp, Glycine max
atgtgtgggcaccacttgtgatgaaggaagatccggtcataagagggcctttaatctcatgcacatatattgaattgtactaatatggcgtacttcacatacgctgaaatagcagccaatcttgggcgctaatcaatcaatggttgttctacactctataaccgatctagtgtcactagaacttgctcactgcttaatgaactaagatccggctccatcgccaaacatcctatccaaacaactcagcttacaaagagaatgactgtcattcagtgaacatgcatgtataccaaaaactaaccattactaactatccagagcttcttatacagggatcgagcggagttcttaatcggc

SEQ ID NO: 2746 - DNA, 292 bp, Glycine max
  unsure at all n locations
agctttgaagntagatatattttattattataatacatgtttatctatttgttaagtatattttgtagttagttaattgagacttatgggtgtatatcaatgtttatacttactattttgattaggttagtgcgtgtatactacctaaggttattggtcgagaccgtacccgaatcaaataaacattaaaaatacagtatctaggaagtgatcctaggtcatttcccaacgagcaatgatcaaccaaacattcataacagataatagtgaaacagtaacgaattgggggggg

SEQ ID NO: 2747 - DNA, 586 bp, Glycine max
tgatgatgttattaaaggctttgcactacctctggcagtaacagtgacaaagatgatcataagtacgtttacaacttgacatcaaattttacttgagattttataatttctgatacttggttcacttggacataacagtggggagcaattgatggaagatgaatctcaaattgatctaaggagaaggaagaaacttgttcttgatggtgatttggaaagacaaatcaaagatctccatgagaagtaggtttgaccagatcaaacttttgtctgaactttggagcatgatttaaattagagccttgtcaaaaagaaattcagtcttttttatttcattttgtttacatcattggtacaaacattcttaaaaggagtgagcaagatagatcaattcatagcttttcaatattttgttgaatatcattatttgtactgtatttcaattcatagcttttcttgtactaatttaacccgagtttaataaattccaaaaattaaaaaaaaaatctccatattctacatcggttcaattataaacgatgtagaacatatcctcattctacatcggttaggcaataaacgatgt

SEQ ID NO: 2748 - DNA, 395 bp, Glycine max
agcttgccactggagctgacccatcaactgccctaactcttttagataggcgacccctcagctcttgaccttgacttgatagaacctctttttaagcgaaggcatttgacttgaacccatgttttactaaagtgaacaaaaaatggggcgaatcaaaactccgacatctatcatgggcggaatggatgaatgcataaagaaatgcatatgacacagatgcaatttatgaatacgggagctcgggaaattgtctccttcttaaatacaacgtcttggggtagtaaagtgcccaacgtatgtatttaagaaggtgacacagaccctccggtggtttgttaaagagaggggatcaagacagaacccgtgcgtgatgcatatgcgaaaggcacaacaca

SEQ ID NO: 2749 - DNA, 446 bp, Glycine max
tacaatacccacgctttaccatatgtttatgtaagtcgcaatcaaagtgattatccatgctgcattgaatatagctgactgatggattacatatcacttaatgctccccagtcttactttctccgtgcggctgctgctattcttccttgctatcttatggcctggatgatccgcataatacagcatcaaaggcaaagacaagttactaccctgtgcttattctaatattgaagtatttgtattgctttcatttcattttttcctttttcatattttgattaatcatatgatgccgtttggtacgccacttaagatgataagatttaagtgaaagtaccaataggaatgccaacaacatatggtgcacatggcgtggtctctactaaaaaccttgaaagttgatagtgattgcggattaagattttagagatgggaaatgcttttgt

SEQ ID NO: 2750 - DNA, 420 bp, Glycine max
agcttgccacccagctcgcccaggcgagctcatctcgcccaagcgagcaaggttgcttcctccagaagcaacagccttctggaggaatcttctggagggcccaagtgggcctggttgctatttgcacccccatttttactaagtaccccccccctgcattttttttggtaattcttttttcgtaaagttacggaaacttacgaatttcgtaacgatacttgttttctttccgtaatgttacggaaccttgtggattacataatcatcccctttttgacttacggaatgttacggaacctcactaatcgtgcaacgatgcttccatttgatttctggggtgtcacggaaccttacggattgcgcatcaatttttcttttcttttttggcatgtcccggaatttcacaaattgcctaatgat

SEQ ID NO: 2751 - DNA, 588 bp, Glycine max
ttggtcaattctgccatctcgagggtcaaattaagcttggaagtcaaaacctctgcacttgaataattgggctttgttttgtgtaattagttagattagatgggcctaatcaaggcccatacatcacttctaatttatcactctatatattagtgttttttagttagttagttacttcatattgtaaaaaacaaaattagttacttattgtgcaagcttccttttttctctccttttctctcaattgttcttcattcttcttcatctcttcacttccgctcttccattttcttgcacaaaatttcatgtcttttcattggtgatgatcatggagggctaaacaattaatcaatccaaggatccactccaagcaaggctgaattttgagttctggtttagtatctttactctttgtgaatgttcatctttctcttcaatcctattttcatttttcattattgtgattatgtttaggattgaaaatgaattaagttatggattcatttcctaattcagaatttaatcacagattgtttggatgatgttccatttgattgaactttttctaatgcatttgactgaactttc

SEQ ID NO: 2752 - DNA, 522 bp, Glycine max
agctttaacctcatcgtctctcacagtctttatatttgggagccaatccagtccttgtgttcggactctcagccacttatgatagccgccgatgatcccattactgcttcccctaagctctctgtcctttcttcacgccgcatcccctgccttgcgaactccttggagtaccctcgcgttgtggtcactgaaacctcgtgcgatgaaaggcgtgatgctttcgtctgatggcactcctttcatgggacatccttcgcatgaagatagaatcctgattcttccttccttctaacgagggaaccatttaacagacgcccctccatgctagccaagagttggtgcacaacaaacaattcttgcgccgctctttttacatccccggtcgaacgtgtcatacatggccaaaatggcgacgaccgggcttttcttgccatgatgaaaggcgaggaaagcgtcaatcgctgctatgtccactaaccctttcatattcggaaagaagacaactccaaagatcataagcgc

SEQ ID NO: 2753 - DNA, 576 bp, Glycine max
  unsure at all n locations
ttgcagatttggtcttcgccagcgaaaggatcaatgtgggtccgaaaagaggcaaatttgatcatcctactaggacgactgagaaaactggggcaaataaagagggtgaggatgagggagaaacccatgctgtgactgccattcctgtacgaccaagtttcccaccaacccaacaatatctttactcatccaataaactttctccttacccaccacccagttatccacaaaggccatccctaaatcaaccacaaagtctgtctaccgcacttccaatgacgaagaccacctttagcacaaaccannnaaaaaaaaaaaaaaaaaacctccaacaagaagtgaattttgcagcgagaaagcctgtagaattcaccccaattccagtgtcctatgctgacttgctcccatatctacttgataattcaatggtaaccataaccctagccaaggttcatcaacctccatttctccgagaatacgactcaaacgcaacgtgtgcttatcgtggaggagccctacggcattccattgaacattgtatgaccccgaagcataaagtgtgaagtctaattgata

SEQ ID NO: 2754 - DNA, 509 bp, Glycine max
agcttctcttagaccttaggcaaaccttcaactcatccttcaagatcaaactgtctactcgtgattggtacctctcccctctcttgagcttaagctcgctgttactgccccacagagcccctcagaattttttgcggccgtgttcttccctacgagcccttttggtctcttgttccaaggccttggtggtagctatatttacatctctcagttcggcattctcctttcggatcttaagatctgttgctttgaacctttctttgactgtttgggcttgctcgacttttgccctaagggcctgcacctcctcctcttcctcaggggccctaacttccttccctttaaccgctttcacaccaccgaaccaaaccacacctttctttggggcttccaacccctttgagatccactcgcggaccccttgttgtttcctaactccctcctcgcccctttaggctaccccccacgcttgccatacgttctccttactcccccccttgtacccccca

SEQ ID NO: 2755 - DNA, 465 bp, Glycine max
caccatcttttcataggagaacactggtgatgtgactactatcacagttatgatcgaccttttcatcattgggggtgccacctgtgctgccagggctctccaccattgggcgtatgatttgcaagattcatgcccctttttgcacatgttctgtagttgcatcctacgcggagccatatcccaatgatactgatactgcctaacaaaggcaaccattaggtccttccaaaaatggactcgagaaggtaccaagttagtgtaccacgtaacaactaccccagtaagactctctcggaagaaatgcctcagcagatcctggtcttttgcgtagtcccccatcttctaaaaatacatctttatatggttcttggggaaaggagtccccttggtcttgtctaagtccgacaccttgaacttgggaatgaccatgtttgtgtgctacgaacaactcttctatgttagtaa

SEQ ID NO: 2756 - DNA, 508 bp, Glycine max
agcttgaagaggatgctttaatggaggaaaaaaaagagagaaggggggagcacgaaattgaaggaataaaagagggaaagaagtggaactttgaagtgtatctcataagactttcattcatcaaagttacaacaagtgttacacatgcttctatttatagactaggtcgcttccttgagaagctttcttaagaaaacttccttgagaagctttcttaagaaaacttccttgagaagctttcttaagaaaacttccttgagaagtttctttgagaagctagagcttagctacacacccctataatggctaagctcacccccatgacaaaaaaacatgaaaatacaaaaacaatcctactacaaagactactcaaaatgccctgaaatacaaggctaaaaccctatactactagaatggccaaaatacaaggcccaaaataagaaaacaacctattttactatttacaaagaagagtggacccaaccttggcccatgcgctcaaaaatct

SEQ ID NO: 2757 - DNA, 658 bp, Glycine max
ttaaataaaaggtttcactcttttttttttctattattttattcaagctctgccacatgtccctatttgattggagcaaaaagggcccactttctctttttgactgtgacccatactcaatcacaaaagtggggaaaatttgacctctgaaacgctaaaatcctgcctcggtttgcgtgccgtttctctggttccagtttctcgcgtttctctgcgtccgtcggggccagttttcgaaagtaagcaatatatatatcaaaacgctcacaataaaaccccgagcgtggttcagaggttggtttcgttaaattctaagtcgcacgcaaaacgatgatttttaactaattaattaagaattaacccataacctcccagttatggatttctctcccttaattagtccagcccgcatatcttgcccccactattcctatttctaccaagaacatatctatacatatacacggaacaatacttatatatatatatataatcattcaaaatacatcgtttccgtaaactccgggtagaaatttccaggatgttacacactgcgcccccaaatgcgcaagtaaggagagaagattttcaagctctcgtgtccgtaaatgcattcatatcatgcattgcataagcatttctttatggcatcataatg

SEQ ID NO: 2758 - DNA, 463 bp, Glycine max
agcttgtaactaacacgtgtataaaagtctactcaaaggaaataaagtcaggcagaaagttaaccctagttcttaaggaggaagccttgccctcgaaattaaggcccatactctcttttctctctccctccctcactcgtcttcttctctctctccttccccaccatcagcgtctgtctctaacatccaatgtaaattgctagctaattgctcttgcataataaatacatataatcaatccaagggttcattcattttaaaattgagtaaaattaatttaattaatcattaaatgtaggttgaaaccaataaatgcatatatttttaagagaattataaaatttcttacagcaaattttataatattttcttgttgcagtacattattcatgttattttaaaattaacaaaccaacattatcgttaaaaaaaaaactccagattgatctcattttctcataat

SEQ ID NO: 2759 - DNA, 690 bp, Glycine max
tgcttctacaacttgattaagaacctgtatgatatttaccagaagcctgttgttgtgggatgggactaaattgtagatgcatccttcttcttaacatattttgatgtaaatgaaataatatcaagtgacaaatgtttgaacatagctatactagagttgtggattatgtaagtaaattccatatcattgactaataattaatattctttatgatatacatgattaccaattttcatttgaaatgttcaaaataggtttatgcatgagtggagttcaagcttaggtcatggttcggtgtatggattccttgagcttcagttcatacacaatgcaaaggatagacatgttgaatgtcaacattacgttgaaacatgggtgaaggattcccaacgagaggtctacctacgagcttacttgaatcaataagtaagatttatgaaattcctgtaaagaatatttgcattatacgtacctaattattatcgaattcaaggcccattggcagttggttgttctatgtcttacgaacaatgttgctgtctggttttgttcgttgaataagaagcttgatattcatatcaaagctgcaattaacaagttaaagttttgtattataacctaattaatctaacctaaactggatagaaaaattgtgttttcttcgattataccttggtgtttttttcctac

SEQ ID NO: 2760 - DNA, 743 bp, Glycine max
cccctgtttttttttattaaagacgaactcggcctaacggggccccgttttttaaaataagggtgcacgccgataactttgaaaggtttttcagataaagccttcattcatccaaatcaactccagtggttcgcctcaattccaactttttgcccactgaacctccttgagaaactatttgtattaacaagttcttttataacctttcctattaaagccttcctgagaaaccttcttaaaacatctgccttgaacagctttttcgtaacctaaaacctacatcctcaccccctaataggttgaaatcacccccttggtacttacctgatagtgcagaaccactccttttccctcaacttccctttttgcctgataatccacgcgcaacaccctttctcacttcaatgggcccaacacaaggccccacttttaaatccaaccttttcttttttttctcacaaaaaagggtcccctcctttgcctcgcgggtccaacacctacccttccgtttcgtgaacacacaacggctttcttttaacattctccccctcctcttgcggcccctcgttactgcccctggaacggccctttctccgggagcctcccttttttcttacctctcctattctcgcagagcctcctttctactccctcatctcactcttccctctctcgccctgactcctctcctccaactgcactcccccactctagcctctccgccactctccgtccccttctcc

SEQ ID NO: 2761 - DNA, 354 bp, Glycine max
cggttcgaggtacttacccgttgaagatcgaagaacgatgaataacgaatgaagaacgtcgaagaacggttgaaacctttgcgagattcctcacggaaaacgttacggaaatgtttcggaagcgcctcggcttagattttcttcacggaaacaatttttccaagcaaattcgaaagagagagaagtgcctaaggggctgagatcctttccttcttcacttcctcccctatttatagcaaaataggggaggtggttgtctgccattttatataaaagagctcgtaatgaacccccgaacgtggttcatacgttggtttgcattgcttctaatgcgcccgcccaacgatgattttt

SEQ ID NO: 2762 - DNA, 216 bp, Glycine max
agcttctgttttcaattctgagaatctcgatatatttcgggattcattaggacatccgggtaaaaagttattgtcgtttgaatttgctcacagcttctaattttaattttgagcgtctcgatatattacgggacttaattggacgtcccagtgaaaagctattgggggttggataagctaccaactttcctcttgaattcccagcattccgttttc

SEQ ID NO: 2763 - DNA, 367 bp, Glycine max
ctaagctcttactcggatgtccgattgagtcccgtagatatatcgagatgctttttttgaaaatagtagctcctagcaaattcgaaccataataactttttactcggatgtccgattgtgccccgtagtatatcgtgacgctcgaaattgaaaacataaggtctgagcaaattcaaacgtcaataactttgtactcagatgtccaattgagtcccgtaatatatcgagatgctccaaattgaaaatagtaggttcttgcaaattcaaaccataataactttttactcggatgtctgattgagtcccgtactatatcgagacgctcgaaatggaaaaatgaggctctgagcaaattcaagcgacttta

SEQ ID NO: 2764 - DNA, 338 bp, Glycine max
agcttaagagattacaattcaatcaattggatgtgtgtattgttgtatcccctaaataaattcattagttcatacaaagtttaatgcatccgttatcataaaaaacaaagattttgagggaccttgcattgttcaatgtcttaagttctaacaatgtcgtcgtagagctaaacaacagtgagaacccaacctttgcacatgaatgaagtggcaacaacaattgttgcaggcattgcaacgaagttatggatctgatttgttatctagttttttatctgctatgtgtttttggatctgagattttttgttggtgccggctttcttgatctatcattttt

SEQ ID NO: 2765 - DNA, 644 bp, Glycine max
tatcaatgcaaggaattaacacaagacttgagactagaattgaaaaattttacactcataaaaactaaattaatattgaagtctttatgaaaatttaaaacattctcatttaaccttaatttttattaaaataaagtctatcgaatgaaatattttttatccctactatttttttctagttccttctccgtttcaaactatatattatgatagttttaattattggatttttaaattttgtaggtgtgattgttgaacttatgtgttatattgcaaattttaaatcatattgaactttagcctatgtgataatgataataataatacaattcttcctgatttttgctttcactcaaactaaattttgattggattgaattacagattttatcaaattcaacccagatacccacctatatgattgatgaatgttgacaagatgggtctaactattttaaatatgtaatgaatattagttcctcttttacttgagtgctaaagtccggatcagaggaaaatgattacatatgaccctggatgtcagtatctagatatattaacaaattatataaaacagcaggacataatttccattaaaaaatatatgttttattaaattaagcagataccatagctttaaccca

SEQ ID NO: 2766 - DNA, 546 bp, Glycine max
agcttctaatactttgtgctgcaattgcaacactgccacaattgctttctcttctgcagatagagaataagtgagaggaggtgctttgatgtcattaaaggaaggccatcctgaagctgttgaagagacgccagctttgggaaaatctttatcattattcattacaccctatagtcctataccacgactgactacttttagttactctgccttcaacttcagttaatttgtgcagtcaactggacaataaaattccaaagtctgataaaagaaacaagaccagatatctcacactctataactctgttttcaaccatcctgcacagaatgccaatcaattattataaaaaaaacacacagaaattggaattgattatgcaaaagaattaaatcacaaagaagtttctggaattaccactggtttccaaattgtcaagagctgtaatggtattggaacttgtttcataaaagctttggttcaaaacaaactgcatatacatgtataattatgattattaatttcaaatttttccacgcaagagattt

SEQ ID NO: 2767 - DNA, 470 bp, Glycine max
tgacaggtttaggtgcaggtgctgctactggtggaggcacttgaatttggttgccagacctcaaggtgatggcactcacatttttcggattctgcacagtctgtgaaggaaatttgtcaaaattttgggactgagcttggttcaactgagtagccatctgcccatctgatttgtcagactctgaatggaggctcttggctcttgctgaaattgcatattctggaaggtcattttccttactaactcctctaaagaaggttgaggaggagcctcagttgcttgttgtctttgttgtgaccggtgttgttgctgctactgtattggagggggaacatatggcttgctttgacccccaccattttaaaaaagagggacacattgttgttgttgtggaagacatttccctctcaaatttggatgattccttcaacctggattggatctatttcttgaaaggccataattattct

SEQ ID NO: 2768 - DNA, 474 bp, Glycine max
cgcttatgcgcatatttccttacaaacgttctctcgaaaaaaatgcacccatatacaatcaaggcagcttcgttacctagattatttacacgtacttccaaggtgtatttgttacttacatcacacacatctccttggctaaattcacataccatgcatacccaaagcattttggggtaccaaaaattgcacatgtgcacatcttggtatctctaatacctatacatacacaaacttcatgatgaatcttgactatctacacaataaggggctacatttcatgctcttttcaagtttttgctacctaaagccgcatgcaaattcaagtatattttcctttgctgactaaaattgtattcaaattaaaaggtatacattttttggtaatgtatcttctttacataacatgcaacatatttatgtatatttttttgcgagacatcttgactaccaaaaactatatgtacatacatc

SEQ ID NO: 2769 - DNA, 561 bp, Glycine max
tgtagaatggctagacatgatacatgtcagggcttggtttggttcaaggataaaagggatgccccacattatttccatgacacaaatgcaaaaaatgatgatttggaaattttatgcaaaactggtcatgcatgcgcctatgcaaacgctcaagtgtcaaatttttatggtcatgtgatgctagggctcaggattcatttcctctattttaaatcaacccaatgtttccaaaatatgttcttttatcgatttgtgcattcctccaagtccatttcgggcgtccggggaaattttcacagcattcacccttcaggtgtagacacgtttttttcttcaaaaatcggttatgatcaatgatttttttttttttcaaagaaaagttggaaatcatctcttttcaaaagcatgtcggtttttagctagacaacttattttctctttttccacctttttccttacttgctttctttttttccttatttgctctctttttctttacttgctctcttcatttaccttttgatctcttttccattcattcatctcatttttttctttttc

SEQ ID NO: 2770 - DNA, 380 bp, Glycine max
  unsure at all n locations
agcttgagtcatccttaagttcaactttgcgaggctgataatagttgtattgatttaatggttccagttttcaaaattaagttgaaggtttataatttgtagtttctaaagtaagcattagaaattagaaaaaactgtcttgatctgttttaatcccagttgttgtagttgaataaattggttaaactattgtattccatgatatgtctttgcagttcccatttttgcatttaggtgataaagaatttattcatttgagttgcacagctttaccagtaccaacagtccaacaccatcaggccctactaacctggaagctgtgcatttgttctttttattattgntgntggagacaagtgatttggttatctccatttttt

SEQ ID NO: 2771 - DNA, 555 bp, Glycine max
gggttaaagtctcacgattgtcacatgctcatgcaataattgttagtcgtggctatacgagacatcttgccaaacaaagtcaggttagccataactcgcccgtgcttttccttccatgctatatgtagcaaagtcattgatcctgtcaagtttgatgagctggaaaatgaggccgcaattatactgtgccagttggagatgtattttccccctgctttctttgacattatgattcactttattgtgcatctggtcagagaaatcaaatgttgtggtcctgttcatacacataattcaaattcattaatatgtaatgcatatattggatgaaagctttgaaaatggaacttatggcagttcatcttaaattgttgcaggtactcttacttcttcggatactgttcattcttccaagcaggtactcttccttcttcagatattgttccttcttcctagtgtctaattcttgactcattttgtatggtgtactatatgatgatgtaaatgggaatatggtttctaaacagtttttatacccgttttttgtttatgttc

SEQ ID NO: 2772 - DNA, 393 bp, Glycine max
agcttgtatcttatactaaaataatcatatattgcattcaaataaagcaatataggacaacaaggatgtatctatacagtgctcaagtgagaaatataaaaacctgatggcaatctctccttgttgagaaacaagagttgctagttgattaaagatgttgctgagctcatgaatagtggactcaacattctgaagagcttcagctctgttttgcatgtaactgtcttgcaatggaactacctcttgctgctgctgctgctgttgcagcaatggttgactctccccatccacctgcttcctgtggatttaaaaggccatagaataaattatgtgagagcataatttcagatataaattcatcacaaccttaatattggagaataaccaaaattt

SEQ ID NO: 2773 - DNA, 650 bp, Glycine max
tgtcatttccactaatagttgtatgccatattaaagggcaaaatttgtatgaagaccatgaagtatatgcaagttgtaattttctgtgtgctaagcaagtgtgaagagacttttttttctaaattttccattcaaccaaacactccctaaatgtagatgataagatggagaaaatgttggttgcttcccttttgtcataagactgtaagaagctaggcattatcatcataagttatacacatgaaatgactgggtaggtgtttgctttcacttttatcatatagccagtgttattttcagcattaataataatcaatgaattgctacaaaagatagcaaagcttcatgtctaaatttttgttcatgaatcttatcagtgatagttgtccttccaggttgtcaaggaaaaccagatactacataaaggtgataggataattgatagcgatattgaatttgctaccctcgcagatgtgaacatatttgctggagatcaggttattgtgagggactctgagatccatgaaaatcgagatattgttggtaagctatttgatagtgccgtagtggcaatgtgggttgccattctattatgttattccaataggttacattagggaacatgcaataatctttttgatctccataaa

SEQ ID NO: 2774 - DNA, 857 bp, Glycine max
  unsure at all n locations
caccccgtgaccttccatgagacggcccccctctatttaagacctccacgcctgcaagcttaatagttacaattttttttgggggattttgtttttttgcctcccctacatagaggtgttgattccttccaagtttaccgccttcgttgttccttaaatgaaactcttgcgctggcatgagatgtcaacgtgggtacccatttataatcgggctcagtaaaggctccccgctctgggagaaaacccactcattgaggatttctcgcctgcgcgaaaaaactggtcttcgaattgctccccacccacaagagggcgatttgttaaacatattgctggaaaaaacatcttatttttgcactaaaaatgtataacccaaacttcgtcgtctaaaggcccttaaaaattcgcgctcaacttcccgggtcattgttgagaaacttgcaccccaccgtttcctgttattttataatgccgagggaggccactacaactttagagaaggtccaaaggttccctcctgattgagggattaccactttggggaagggcaaaactttggcccatccaaaatttttctcaccaaagaaggttgcaataccatctcagggacctccccccaattcgggaacacttccccaattctccactcaatttgtttggcccccctcgagcatcgcaagaaagcttgatctcacctccctgcgggggtctttcaccgcccccacgggcttttaatcgcgatacctcaccttcgcctctaaatatataaaggggtggcgcctcttcgcaatctatttaattgtgtttctccccacccctccggatatcccnctgggcgtgtggagggcttatatttc

SEQ ID NO: 2775 - DNA, 912 bp, Glycine max
  unsure at all n locations
catactgcccgaggacgcaaatgggttggaggcgttttcatgcactacacagaggactgtggcacgagaaaagtgtctaactgatgagagctggatgccaattactcataaagatgcatggcggccgcaagagtcaagactgactggcagcacacatgcagatatgatcatacctcgccgccacattaatggaatccgtgcatgagaaaagacggaacaggaagctgatcttgaaattccgaacggtcaaggcgcagacttgcgcacatgagtggctcatagtaagctgcgcccccaaagtctttcaagacacgcgaatcctggttcctaatcggattttgctcctaaggcactcgtgagaatgttcttcccccggaacggatgggaggaacagaacaccaggcgagaaaattgatcttaaggaaaaacagggactaaggggcttagcagcgtaacagttgatgggacccttcgcaatcgatggataaatacaaaaacggtgctcccgtttggaatccactcggctggaaatgcatttaaagcgacacaacgccttcctagcaaagaatgtggattcatattgggatacttggtgcgggaactaatcggttgaggcgcataaaggggaggccatgtaaaaatggtacgggcagggtatcttcaaccgtgcgacggcttttaatagtatggaaaagcgaactgaacctatatgccacctattgaataaacgagtggctgaacatgcgtactagaagggattatggtgagcgccaatgcgtttctatgacttgaaaatcacggtgcaacaggttttacgaaatatgactcttataaaacnttcacgaattcgaccacgattcatccgaaggtagccataccttgtgcgcatctgacgatatggggcgtcaaacg

SEQ ID NO: 2776 - DNA, 363 bp, Glycine max
gatggaatacttactggggggtgattaataaaagcgcaaaacggaatcaaaaaatgccaaaaggataaatcctatggctgcaaactcgcaaattccgtgggtatggcttttgaatggggggaaaataagtttttgaatgctaaaacggccccctttcattgatatttatattttggtgcaggggttgctcgcccaggcgagctcaactcgcccaggccagctcacctgcacttttttttttttttgagaggaacattaaccatgtccccttcttccttatggattagcgttttgcctatttgaccctacttaagatagaattaggcgttaattacttaaaaaaaaaccaacaatggtagtaaa

SEQ ID NO: 2777 - DNA, 568 bp, Glycine max
tgatcccttgtaagtttagactaatttaacccaaacttcgttcttagatccctcttgttggactaggcttgacttaaacaacattattaacacaacataataagaaaactaaatccctggtaatgtagttatttagtcctgcttctatcaagttctaaggaaacagtacatttctcaatgcctcaaaatcacctaacaatacacacaggtgggtgatcagaccaagagcatgcagtcattaagcattgaaagaaacattgaacacacaaaacataattaattacatatgagaagtaattacatcaactgttcattagaaatgctcaactagggtttttagccagtcatacaagaaaccctaatacaagtgagacagaaaatacagagcaattgttgctttacacatgaaaggggatacctcctcctattttggcaccttgttggaattcccctacggaagcttttatgttccacttttcttcattcagatatgttcaacgggaatatcgtttgccagaaagcgcacccgattgttaagttttaaaaattaaaaaggatgaatcccaat

SEQ ID NO: 2778 - DNA, 95 bp, Glycine max
gaacgaaaactgttctagaaaattttttcttaaaagtgccatgaataaagaaggcggcttttactaatataacctattacccgtcgtacagggat

SEQ ID NO: 2779 - DNA, 205 bp, Glycine max
acaatgctcaaatcttaaatgcatacttgaatctaaccacatgtatctgattcaaaaatactatttatgacccttgtgaatgtaaagccctctattagtcattcaatgaatggggctgatattactaaaacttaaacatttattaagttactaataaatcttccaattgtattcaatttaagcaaatatatatttgtctgaatta

SEQ ID NO: 2780 - DNA, 316 bp, Glycine max
aaacttatccaatatttctttttttcatcaataatacacccacaacttgtttgtggtgaattcggttgcgagaccctcagtgataaaccaaggaagctatcccccattgtggggacctcatgcctctgtcttattattctaattcacacacttttttcattttaacctatttcattgaattaccttctacccagccaatcctatatggattttatatagaaactaccgaaaaaattgcggctttatctttatttaaagagagaatctaccgaaaacgtcgctttcgaactgataggagtttttgttacagtaatga

SEQ ID NO: 2781 - DNA, 511 bp, Glycine max
tagagagggggagcacgaaattgaaggaggaaaaagagagagaacgtgaactttgagttgcgattcacaagactctcattgatcaaagttacaacaagtgggacacgatgctttatttatagacttggtagcttcctcgagaagctttcttgagaaaacttccatgagaagcatttttgagaaaacttccttggcaaactagagaggagctacacacaccctactcgtaactaagctcacctccttgagaagctaccttgagaaaattcctaaagaagctagagcttagctacacacacctttctaatagctaactcacctccttgagatgagaagctagagcttaactacacgccccctaaaatagctaagcttacccgcatgacaaaatacaggaaaaaacaaaaaaagttcctacttcaaagactactcaaaatgcctcgaaatacaaggctaaaaccctatacaactagaatggccaaaatacaaggcccaaacgaaagaaaaacct

SEQ ID NO: 2782 - DNA, 199 bp, Glycine max
gcttaagacctaaaggggatgggacctttttaggttttggagaggatcaataacaatgcctatatgttggacctcccaaaagaggatggagtcagcaccacttttaacatttctgaattaaattcttttgcaggtggagctgctattgaggaggaggaactaacagatttgagggccaattctttttaaggagaagggg

SEQ ID NO: 2783 - DNA, 567 bp, Glycine max
tgcttttacaaaatatgaaatgtgaccctttttcatgcaattaatgacatgttttttcatttttcctagaatacaccatggtcctttctttttgaaaccttagttgggttcaccccttttgaagatacaaactgagttttctttgaaaaggagatttgtttgttatatgacaagtcggtcttatctgtagtatgcttttgcatactgagcatgcaattaagatcactatttcctttgtttgaattttcaaacaaatctttaaggtaggaaagctcagtttgcaaaaatttgtaatcatccatgttaaaagaagtagaggtatatttacaagtagtgggcttaaatcttgaaacaagcttttcattttcttgcttcagtttgttcagcttttcttgtgttaaaggcaatttattgacatgcaattttagattactttttaaatttttgtttaaaacagaaaacctttgagctctctcatgcattttattaaatggcttttaaaagttcttcaaagtatgaatttaacttaatgttttcacttgttgacagattatttatggaattttg

SEQ ID NO: 2784 - DNA, 337 bp, Glycine max
agcttgagattgatcaacggaaagtctcgagaaatacaaatggtcataattttcactcacaagtctgattcaggcgccaaacatatcgagacgcttaaaattgaacaacggaagctatcgagaaattcaaatggccataacatttcactcggatgtctgattaagccacataatatatcgagacgcttgaaattgaacaacggaagctgtcaagaaattcaaatgctcataacttttcactcggatgtccgattcaggcgcataatatgtttagacgctcgaaattgatcaacggaagctctagagaagtcaaggggtcattatttttcacacggat

SEQ ID NO: 2785 - DNA, 369 bp, Glycine max
tctgttgttcagtttcgagcatctcgatacattatgcgccttaatcggacattcgagtgaaaagttatgaccatttggatttctcgagagctttcgtagtccaattttgagcatctcgatatattaactccccgaaccagacatcggggtgaaaagttatgaccacttgaattctcgagagcttccggtgcttaatttcgagcttctcgatatgttatgcgattatatcgaacatccgacggagacgctatgatagatttaaattctcgagagcttccgctgatcaaatactagcgtcaagatatgttgtgcgtctgaatcggacatctcagggaaaagttctgaccatttgactttctcgagagcttc

SEQ ID NO: 2786 - DNA, 254 bp, Glycine max
agcttgaccagtcccgacccaacccgggcatagtcggtcagtgagaacctgtgatgtacctaaacaggcgagctcctggcagtcaacagataaaaggaacaaagaccacaaagcaagggggcttgtggtggctggccagctgtgaaacttgattgatatgtgagatatggcctttggtaatcgattaccaagggtgggtaattgattacaaggcttaaaaatgaagacatgaggctaagatggtctctggtaat

SEQ ID NO: 2787 - DNA, 371 bp, Glycine max
ttgcctgtagcagttccttgatcaactccaagttgcttaaagacaaaagaattatagtaagttttggtagaaatgcagtagtgacataataagtgcattagtgacacacttcttttaatcttggccatgtatctccaaaagtagatatgggtattctggtcatcaactagtacataataagggcattagtgacacttcttttaatcttcctatcaaaaacgctttttgagctataataagtcatggatcctgctgagaaaatgattgagtcttatggggttgttggttggatagcagaaacagaacatgccatctcttcaataagaactgtttattcatatgtttatgggctttgcaaaggggttggtgtt

SEQ ID NO: 2788 - DNA, 259 bp, Glycine max
gagcttagttattagaggggtgtgtgtaactaagctatagcttctcaaggaagttttctcaaagaagcttctcaaggaaggtttctcaacaaagcttctcaaggaagctacctaatctataaatagaagcatgcggaacacttattgtaactttgatgaatgagattcttgtgagacatacttcaaaagtccacttttctcccttttttattccttcaatttcgggctcccccctttctctttctctccctctttcttt

SEQ ID NO: 2789 - DNA, 572 bp, Glycine max
tgcttgtacaatagtatgaaatgagacccttttttatgcaataatgacatgtcttttcatttttcctagaatacaccatgttccttctttttgagaccttacttgggttcaccccttttgaggatacaaactgagttttctttgaaaaggagatttgttcgttatatgacaagtcggccttatctgtagtatgcttttgcatactgagcatgcaattaagatcactattccctttgtttgattttccaaacaaatctttaaggtaggaaagctcagtttgcaaaaatttgtaatcatccatgttaaaggaagtagaggtatcatcacaagtagtggctttacatcttgaaacaagcttcttatttttttgcttcagtttgttcagctcttcttgggttaaagctaatttattgacatgcaattttaacttacttttcaaatttttgttaataacagaaagtcttttgaactttcttatgcatttcattaaatgcttctaaaaggtcttccaagtcagaaattacctcaatttttttaatttgttgactaaatcaattatggattttggcatt

SEQ ID NO: 2790 - DNA, 353 bp, Glycine max
gaaagacagtgaagtgtcttaagactgacaatggcttgaaattctgtaaaggtgaaggcattgcaagacagtgtgttgtacactatactctatagtagaatggagtagttgaaaaaatgaacagaacctcgttagaaagggccagatgcatactatccaatataaggttgaataggagttttggggctaaggtagttagcacaacatgttatctcatgaattgctcaccgtccactggcatagatttcaggacccctattgaggtatgatctaacaaacttacttaatattcaatgttgaagatggtttgatttcccacatactatcatgtaaataaaggtaagctagagccc

SEQ ID NO: 2791 - DNA, 234 bp, Glycine max
tcccagttatagagagctaaatcctctgatgggttttccttgtaggtacttgatgcaaatacatgtatatctagctaacgatgttttatgtgttctctgcgctatcagtatgtcatttcagtgtgttttttgccttgatcatgcagatgcatgctttgttacgatctttcaacagtacaaactgccctgattcttacaacttgatatgacatggctagtttatcgtattatcac

SEQ ID NO: 2792 - DNA, 394 bp, Glycine max
gaactgcacccatgcacgcttttacaaaaggtttgtcccatatttttctatacttgtagcaccactcattgagccggtgaggaaccatgttccttcataggaacatgcccaggaaatgggttttcagaccttaccttacttcaacataccaaacaccactaatacctatgggttttcagaccttaccttacttcaagaaccttgggatttgaggtcaaatccttttcaagggggagggaatgatgtaatcctacctcgcaaggccaaagatgcaagaaaaggccctaagggtctcatgagccttagggtagatttcaagcccatgggctacagatgagcccacttatctttttacatattaaattaagggttcataaattttggggcttctatt

SEQ ID NO: 2793 - DNA, 929 bp, Glycine max
  unsure at all n locations
ctcatcaaatatctagngacaagatactccattatctctcaccncacctactataccntctgtntcccatattgttcaccagatactgcagagatctcnnctattnanacacnnnnnacgagtgatgccctcctatcgaaccccccnatacataactaatccggcagctggctagaccatccctagaagcgtgtgcaacgtttgttgaaactctgatgaatgatagggttatgatactgactccacagttacacttccgtccctcttttattccatccaatgctgagctcaagcctgatctatttcttggcaccccattagaagcatgatctctgagccggttacgaaaggctcaccaagggggggaaactcccacttacagggcttaatccttaaagggagtggcgtcctcttacaacttttcctatggactcccgcggatctccataggggaaaatcaccacaaaaagaccccattgaagctcataaagtctacctacatagaagggccacaagcctttgcttccatcattatggttgagccccataaacccaggccaaggccgaaaatatttgcctaaagtgggccaaagagatctcaaggcatgttaagcaagagacacctgcacaaggcgtgactattcaattgaggcaccggggggtacgaatgcaaaagcttaccgtcgcttttaaaaaaaaaatggaatgggcttgcaccaagtgaattacatggaattccacacacccacatcagaaatcttctttctgcgttcgaaaatcacagaatactctaatacaagaacaagcttgctgccctaatataaagggctgaaaacttatattgtaggggtcactaccatcatgaggggcccccaatccaccccccaaatcattgaaactctaattgatacggacccagatatagggcg

SEQ ID NO: 2794 - DNA, 1131 bp, Glycine max
  unsure at all n locations
gccgggcgcgtatcgccgacccnttnccccgctaccnacaacagtcctccaaccggtatcatgcgtcaaaccgnacccccaccccnccaggatgagaacatgtagaaccncccgnctctagaaaagaactcgccgcacgccaagccctgcaccaanaacacactaccgcacaagcgccgctgaggattttaattcactgcgaaganacctctcgttcaatctaaccagaggcgcaggcatgaggagacgccgctcaggaacatctaacaactgcaagagaaatgggcgacacccccgaagcgcactgcgaggccgggactctaaacctaaccacaactcagctacaaacggcttttccaaaccagcctgaaccatagaaaaggcggaggggggcaatgcccagtgatgccgttgcgcctcaaccctcacactaaggaagaaaggacgagggcgccttggccaaaaagaaccaaccccggaataaggaaagaacatctccncatcggggtgccttctggcaggacagcccctcatggtgccccaagagaggcactcactctaaaccctggcgagctccaaaatctttacttgctttggcgcggcacaaaacattctcctaaaaaactctcactagaacgccccctggttagaaacacaatacgcgcccggcacacttggttctgggggggtggggaatggacgtcgaaatcaccaccggcggaccaaacccccaaaccctttttaaagcaaggacatgcactggacgttaacggcaaaaacaggcggtcccttgatcaaccaaacggataggttctaagggacctccccaaaccccgcacaaaaaaaagtaagaacatggacgacaaacctacgacacccacctttgaccacacatctaggtccctaaggggcggttgcgatcttccaccaccactcgtagaaaccaacaacgccacccggcgcgggaggaaagacacatcactacaccccaaagataaaccggaacacaggtgcctacgaaatatcaatacccctcagcaacaccggaacacctcccacacaatatacgataagcgcggggggcgcgagatagcggcatccgcgcacactacgacgcaccccgcatcgccg

SEQ ID NO: 2795 - DNA, 1081 bp, Glycine max
  unsure at all n locations
tggtgaacgcatgcatctacgnngacactattgtggtacattaagacccaccgtctgncatcgacatccgaaagcaatcntaagatgagcagggtagcggcgactcatttatttatggacattacgcagtagactctagagcattgacgaggagctgcatatcttcatcaccacgagagtcagcgttctcggcagcaaaccattctcttatctaaatacatggtaacatcgctgtctctcgactcacaccccttgattgggctctcgcggggtatcgtctcctactatgaaccacacctgacaagcgatgtcgcttcgcacacttcacgtatgccatgcgaggcactgtgaagaacaggacttctattagttacanagccgcgtcgatggagcctcttcgtgacataagaacgtaatcctacacttcttctgtagaatgttctctataaagtcaactgtaaatgcctgttgaatcaacttcaatgtgataccatcagatcattactcaaaaatgtaacgcaactccggtcgcctctgtacgtgtgaatgacaccctccgatctttatactatacacgctactcgcctgattcctaacgttcgctatccacctatggacgaacctatacctcaacacgattcagcttcacttagagctcacccgatataaaaatatatttctacgcccatatttacactcgccgcatatatcatccttaatgaaacctccattctgcttctatgccaattgatctaatggtaaccccattccttacccctgcttcggacaggcttactatcgaatatcctcaatctcggcctacgcgcatatacacgcgaaggtacatacacatccctagtcgcgcgcgtatatatgattccactcacgatattcactatcctcgaccatccctccgcgctaatgagacattacatacctaccgtactgatgttgtccacgattccgtacaagcatacatataaggctcgacccacggctgcaaaatcgcacacgctacgctctgcctatcgtcaaacacatattggctcccgcataacagtcgtgtgctctcggacgcccg

SEQ ID NO: 2796 - DNA, 312 bp, Glycine max
agcttgaaggtgtgtagctcacaatcttttcatagtaaaatactggtaatgtgtctactatcattggcatcatttttttttccggcattgaggtgccacttgagctgccaggtctctccacctttgggcgtattcttttgaaagactcgggccctctttttgcacatgttctgtagttgcatcctatccgaagccattataccgacattgcctaacgaaggcaaccattaggtccttccaagagtggactcgagaaggttccaggttggtgtaccaggtaacagctactccagtaagattttcttggaagga

SEQ ID NO: 2797 - DNA, 940 bp, Glycine max
  unsure at all n locations
tgttgctgttgaatcctacgttccttacatttttctctcatatgctatagccaatcctctctntgtctantactttntctagcttccnncncncggtgttctgtgctacctccgagncattgaaactatacaccaccctggcctcagactgtagatcatcacacaaagcaggctcaagttagctacacataggtctataggcgatggcgcctgagtacctctatgacataattgcaggaatgaggattcggttatattaatctcaactggtcatttatgtacctatttagacacttaaatgtcaaactcctattatcatgtgatgttagtgtttatgaattatttactctttatacaaccaacccaatgttttcaataaatgctcatttatcaaggtgagcatacgtttgacttcttttatgccgtacggggaagagcctaaacatacccccttaacgtgtttatacgatgtgtttctctgcaggaatatgatctttcaacgaccttattttcaaataaaacatgcaacctcatttataatctacaccaggaaggtttcatacaaccaacaacttattatctgtttatgcacctggtttcctaacttgtggtcgatactacttgaaattcctcttcattcttattatatacgccttttaacctcacttccggaattgcaccgatgcaaaagcacttgtgggtatcctatgcataaactcacgggggaccttatttttcacctataccttaagtccctgcttttttcaattagaaagatttccttccgttatccatttaaaatccaaatttttaccttccatagatacgatcttacctaattacactgacaccatacaacttttccgtctatgcacactgccataactgttcgctcattcattcaaatgtatcctctctccacactcacactctgattccg

SEQ ID NO: 2798 - DNA, 434 bp, Glycine max
  unsure at all n locations
agcttgtagaattatggggtacccatcacatgttgtactaagnggcggtcgggcgatggtgcacaacaagttttccacatccacaatgcgcgcataaacccaccatcccctgttgcccacctccaactgagctcacgtactcccacctagcccatatcctcgtttttctcaacaccgggtccccatcaatccttccaagctttcccaacatcaaagtaatacaacattcacacagcacaagctaccacagccaagcaaaacagagcaaaggcagaaaactctgccaaaacaccaaccaaaaatcacagctttttccacttcaaagaccccagtaacaattccttcgatccaattcgttaaccgttagatcgactccaaaattttactggaagtctatagtgcataagcctacattttgaccgttgggatctact

SEQ ID NO: 2799 - DNA, 413 bp, Glycine max
ttgcggatttgggtcttagccggagaaatgatcgaagtgggtctaataagaggaatatctgatcatcttgctttgataaatgcaaaaaaaatatctgcggctaatgaagagggtgaggatgaaggagaatcctgagctgtgactgccattcaagacagccaagttttctaccaacccaacgctgtatttacttagtcattaacaaaccttctccttacccaccgaccagttatccactaaggccattcttaaaatcaaccactaaggctagctaaccgcactttcgatgacaaacaccacctttagtgtaaaccgaaataccaaccaggaaatgaattttgcctttagaaagctttacaattcaccccaatttcagtgtcctatgctgacttgcttccatatctatttgataa

SEQ ID NO: 2800 - DNA, 423 bp, Glycine max
aagcttgttcgcacatcgttcgcgtgtatgatattcactccacaagggttgaagatgaggagaccttcaatcctattacgcaacgtggcggacaaaagtgggctgttaacttgaatggtcattattgtcaatgcggaaggtattctgcgcttcactatccatgttcacacattattgcagcttgaggttacgtgagcatgaactactaccaatatatagatgttggttacacaaatgaacacatcttaaaagcttactccgcacaatggtggcctctcgggaatgaagcggctattcctccttctaatgacgcatggacacttatccctgacccaactacaatgcgtgcgaaaggtcgaccacaatcaaccaggataaggaatgagatggattgggtcgaaccatctgagcaaccgaaaaaat

SEQ ID NO: 2801 - DNA, 1198 bp, Glycine max
  unsure at all n locations
gcgaagagtgtccgcgggcttccttttactgtctctctgctgttgataatgatcantcagtgactatcgtctcatgaactccnacgcacagggagctgattgcttcctttgcattccacgagactcctatagcaatactccctcccatcccctgctcctgctttattgcgtctaatgctaaaacatttgtccgttgttctcatctcacaacctgnacataatatcctttcgatcagattactatcttctcctatctttcttacgacctgatgtccaaattacaacgtctcattctagccaccagaattatacaccattgtgacttacaccatactattctctcagcaacaaaccttatgctcacatatgaatgaatggctggcgcacgaaccgcaacttatagagcgagtccgattcttcaatgatcattccgtatgtcagattcatttctcacttcagaggctttatataacacgttttgtgcctattattcggcagctacgatcacagaagggtgtacaattacgcttaccttgtatgtcgccttggaactagtgaacactttcgcttgaaccnatagatgccgaaaattcccctggtacaagattgataatatactcacaattctaagtaccacccgaaagtattgtgcatacaggtgccgactcatattatatgctccacaccatttagtgtcttctgtgctatctacgcatataagtcaaatgacgcnctaactatgggctccaatagttggctggaaactttgggcgtctctcacattgagtgagtccgatcgccgggcctaatctaatataattttctgcatcattatagatgtattagttctggctcacataatctcagtctttgtttgatccctgtcgaggctttggccacttatcttgtggaatatatggaatgggtctaatcatgaaatgatctttctggctcctgggcatcatctttattcctcattgcgcaacccgatggtcttcttgaaaacgactgcgcagagatcacactgccgtgcccacagggaggcgttaacccaagcactgtactatggtcacccttattgtatcatcttcactatctctcgacatcgtacactctagtacaggacacttcgactgtgtctatatgattcatattgcgtgaataatgcttatcacactgtcactgatagtcatagtcg

SEQ ID NO: 2802 - DNA, 226 bp, Glycine max
  unsure at all n locations
agcttattaactgcatcagctgattgaccaattaattcactgcattcacggtcccaaagcaggaattttgtgctttcatcttcgtggntgatcatcatctcaagcctatacatgctaccatatgtaccaacagtgtaattgtgccccaagttacacaaacaatttcctgtgtgaacacaacatacacatcaaatgctaaaaaaacatcacatggttgggggtaaag

SEQ ID NO: 2803 - DNA, 573 bp, Glycine max
cggttatgggcaatagcaccccacccgacgtccccaatgtcttctgacccccgcgacatatctccaggtaccactctgtggtcaacgaataaaagcaggaagtttcacccttctacacttcctcatcgcaagcttgtaggattatggggtacccatcacatgtggtactaggtggcggtcgggcgatggtgcacaacaagttttccacatccacaaattgcgcataaacccaccatcccctgttgcccacctctaactaagctcacgtactcccacgtagcccatatcctcgtttctctcaacaccgggtccccatcaatcctctcaagcttccccaacatccaagtaattcaacattcaaacaacacaaactatcacagccaagataacagggcaaaggcagaaaactttgcccaaaacaccaaccaaaatcacaggttttctcacttaaggaccccaataacatttccttcgttccaattcattaaccgttggatcgactcgaaaagtttactggaaagctctagtacataaattctacattttgaccggtgggacctactattaaacatc

SEQ ID NO: 2804 - DNA, 506 bp, Glycine max
  unsure at all n locations
gctgcaagctttgcggatttggncttcgctggtgaaatgatcgaaggggggctaaaaagagcaaatctgatcatcatgctttgataaatgcaaaaaaactggggcaagtgaagaaggggagaatgaaggagaaacccatgctgtggactgccattttctatacagccaagtttcccaccaacccaacaatgacattactcagcccataacaaaccttttccttacccaccacccagttatccacaaaggccatccttaaatcaatcacaaagcctgtctaccgcacttccaatgacgaacaccacctttagcacaaaccaaaacaccaaccaagaaatgaaatttgtaccgaaaaagcctgtagaattcaccctaattttggtgtgctatgctgacttgcttccatatttacttgataattcaatggtagccataacccctgtcatacctaatttcgtccgggattattatttgatgatatccaccctttgattggccgcttttaa

SEQ ID NO: 2805 - DNA, 1276 bp, Glycine max
  unsure at all n locations
cctaaattaaacgttcataactcaactgattcactactgtatctatttttttaaattctaccactaacaataggctgnnnccgagtgtatgtagtcctcccacnacttgaataatatggcacccctcccctcttcagagaaggttccccaagaagaggtgtctcaagtgtatgtcttcctttcacgctattataataagaagtcactggtgcagatcacatgtcatgcgtttaantatgtgacagcacatcgtactagtgactctgtagtaagacaatcctactaacattaatccgatactatcttctgacccgatttatgcctactttcaatatttggattgtcccgacgtctactcgtattactattactactacctctacttagaatttgtccgtaccactcgagaagcattctctaatacataggctctattattccagatgcgacatttcttgtggtcggccagaaanctccctattcttcacatgggcgttagatctcctatagggaaggagggccctacttcattaccctgttacttacattattctttccggttgaacatctctcattgggttggaaacaatcaccgcattctgatagcgaaccgttcatatcganagttctctataaacaattcccagattctttctaatatgtaacagcctgacaaccaatagcataggtattctctcattcatgcacagacacacacgccccttataatcctggattccagtagcccacaatgtgctctgctgccaatacactcgcatgtggtaggngacgaacataatactatgatatgctattccctacttagtatcacatactaatgctatagcacgccgaattcgcaatgcgccattaacactctggctacaatgacacattcgtccggtgggctaatgcacagatcggtaagtgaagtttcctctcctgttcgaatacatggttctgtgacgcgggaagccacacggtactatggctctcaacacaacgaatacacatccgtcatgactatattgtgacatttatgaacaagaagctccgttatatctgtctcttgtgttgtgaattcgcggatcacatagttacacgttcatattacgctcgcatattggtcctctcaggtcctacttcatttgattcactcagccaaatcgcatataccgacntaattgcacaccgcatctgacgcactctattgtctacagtgttacactctacttacgcgacgtcgtatcgcgcacgagtcattcgcataactcgg

SEQ ID NO: 2806 - DNA, 382 bp, Glycine max
gcatgcaagcttgagatgaggaagtgttgaagggtgaaacttcctgcttttattggtgaccacagagtggtacctggagatatgtcgcgggggtcacgagaccttggggacgtcaggtggggtgctattgcccaaaaccaagcttgaccaatcccgacccaacccgggcatagtcggtcagtgagaacatgtgacgtacctaagcaggcgagctcctggcagtcaacagataaaaggaaaacaagaccacagagcaaggaggcttgtggtggctggccagctgtgaattttgtgtaatatgtggattgtggcctctggtaatcgattaccaagggtgggtaatcgattacaaggcttaaaaattgaaacagggggctaacat

SEQ ID NO: 2807 - DNA, 948 bp, Glycine max
  unsure at all n locations
aagcaatagaatcctaatccttgtgtcgcgactactaatctatctatgatgatatattttatctcnacattcagccacggcggtgatgatttgaatcattcgcactacctgacnatatanacttctcaacctttgttggaatgttgcgcggactgatgggcaaccattaagtgtattgctggggctcagaacccacagcgggtgtgtgaagagtacgagcatgggtccatttctcttccattactcttatagccgcctgttcgacccgaatttttttaggcaattcacgcttagaggacggaaacgataatcaaacatttgctctttaaaaaacccacctcacattttttccccggcacacaccagatccgcaaagttggacggcatgtaacccactacgctcttatagtataacactggcagagcgtcctatcatcatggtgatcatcttctctctcaaccatgggaggaactacttgtgccgccaaaaccctgtatagctgggcataaatctttaaaggcttcacactcattttttgaacatatactgtacttgagccgtgccaggagccatatcacgaattgcactgatatctgcttaaaaaggcggaaattagatccttccaagcacggatacaggaaagcttctaaattactgcaccacaccattagtagctcctgtcaagataaccttgaaagaaatgttataaaaggcttttcatcttgcaaactgcgctcccctatttaaggcagaacatttcaaaaaggatattggcgaatactgcgactctttaatattgttcgaaaatctctgccatcagaaaactttacgtaataacaactctttcgtcctcatcgatcaatacatttcacaccttaacaacaaccggcttcaaagcaatttcatagtgccctataaccctactacacgatccacgcagccgtccg

SEQ ID NO: 2808 - DNA, 414 bp, Glycine max
gaacaatatacttgcccttcatttaactgtctctgggcttgttggccacgctcaacaaagtactttcgacacctactgtacgttgatttgaccaatgctgttatgggaatgttgcgacaatccttcaaaaccttattgatacattctgagaggttggttgtcatgtggccatatcgacgtccttctctatcataagccatcgtccattttttctttgaaatgcgatcaatccatgttgctatggctggactcagttcacgaaatatttctaaatattgataaaaaaaagtgcttgccaggagtgtaggctacataaaaatagctatgaataacaatcttcagtgtttatgaacagttaataaacgtgaccatcaaataagaaaacttacccaattctttcaacatttttttttg

SEQ ID NO: 2809 - DNA, 302 bp, Glycine max
gctttagtgattgtgtgaccaccaattttatattgtttgttcgcacggatatgttctacgattgggtttgcctgaatttctaattgacgtaacgtatgattcatggaagggatctaagcatttttttcttatatgccagtggccaacccacttttccaatatacattattttttcgccatttgccaaccctttgagccagaaacttggtttttatcagaaccctaacctaagatgaaaggttccaaccttaccttaggataagagagttagggtgttttccagggaaaattctattcttttt

SEQ ID NO: 2810 - DNA, 811 bp, Glycine max
gcacagtttactgtgccttgattgaaaaggggatgtgtttttttgacacgctcacaataggtctttgcgacgccctattgtacgtatgatctgcacccactgctgtctcagagaatgagtgctaccaccacactaatatccattattgactaacatgccataaacgctcagatggcatcgttgaccgagatcaacgataccttctttatcatacagcccatcgatcattttagaccttttgaaaaggggatcatatccatgttagcttatggctgggactacacttcaacgaaaatcttttttaaatttttgaaaaataaaatgtgccttgcaaggagtgaaaggctctataacaaataagatatgaagtaacaattttaagtatattatgaaagttaaataaacgtgaccatcaaatatgaaattctacccaaacgggtaaaacaattcctctcgaaatgcattactgaattttagaaagaagtcttatgcttcgtgcttcatgcaccaaatgaggtaatccgtggggaagtgtataactcaccggactgacaacttaacatagctcttagtctaccatctgagtcgactaattgataataatgccttttacagctaagaggattcttcttaagatacccaaatactttactctctatttatgtcatactctcttataattcgctgccggtctatgacgaacatcacctcgctctcgcttttaagtataaaggggactgaaacacttctcaaggcatgaaccccctcaaaatcttgttgggaacatcaagcccttctagagaaaatgacg

SEQ ID NO: 2811 - DNA, 806 bp, Glycine max
  unsure at all n locations
acggttgggaccccgatagncanctgtccancntctaattgtgaattgaaagcancgcccgcttgnnttganataagtttatatagggagaaggtttttattttcttatctcatcaacggccacggacgggagaagagttatgtttaaataagaacccaccagcataggaatacgggcgagtatgtccaaatatacgcgggaaaagaggcttcagggaagggtgatcgactctttataccaagaggcaaccatgtggatgggatcgggtttccttcactcggaccggggtttgcaacctttccccgtgttatctcaccccactgctacgcggcttctcgtttcccccctcctcttatttcttgttcatctagacttttccgctctcaaacctataactttccccgcttctccacataccatattgttagagcactttcggtgtcaccttctccctccctactctttgcccctatttgctcttctcacctctctccttcttttctccccctcttctcccctcactctctcttctattggtgctcctcctatttcggtcttccccgcgttgccctccgctctccttacttctcgccttctctctctctattctaactacttcccctccttcatactctactctgtctgataacatttctcattccttctcgctctcccttctttgcatctctgttttgtcattgcctctcaactcgtgactcctccgtttactccgctctctccctgccccacatgtcctagagacgtaacaatcccctcaactttctgctaccgcttcctaccaaca

SEQ ID NO: 2812 - DNA, 907 bp, Glycine max
  unsure at all n locations
acatatcatagacgaccaccatactaatgttataagattggtcaagaattcttataagactgcaactatatcttaatatccnnccccgcaccacgaagtgattgcttgcatcgccgacctatgaatacaaacctctcccctatttgctatacaagggggaggagcgaagaatatatgtttcatcctcttaggcacttctctgtctgtcgaaattgctgaagaaaactatctccgcgaagaaaactccagccgagacgcttccgtaaccgtttccgtgagtaattacgcaaagattctcgaccgttcttcaagattccccgttcgctcttcgttcccttcagacttcaacgggtaagaacctcaaaccgaacttttcaattcatcttatgtacccgtggtggtccacattttgttcaatggacatatatcccgccttccataacttgtttataccccctcttgacggcctaacccatctattgaagtcctttctcgcctaattcaataataaacataaattccaccgaacgtttgaaatggtatcatccgctaccttcgtttaaaaacgaattccgaccgttcggccggcccgatccacgccggtaaaccaacaaagaaggtcaataatatatccacatccagaaataccctttaataaacataaagcacaaataacaatcggacgttccctctttgggactactcattcctaactgaattgactactacctgaagcgcaactaaggctcagatcaacctcgctcaaccaaactggccccaaaaaaaaagttttcggaacaacaccatttctagccctaactacatcaacgagggcctattctaaggtccaaccgcttccagtgactcacccctccgctacaatgaacgctctgagcactcacacaac

SEQ ID NO: 2813 - DNA, 517 bp, Glycine max
tgcagcttgtgattattttgccggcgaaggattttatgggtctgaaaagaggcaaatttgattatcctgctttgacgaatgggaagcctaaggcaaatggagagaataagaaggagggaggaacccatgttgtgattgtcattcccacatggccaaatttcccaccagctcaataatatcaatattcagccaatatcagcccttctcattacccaccaccctatcagccaagaacactcaatcatccacaaaggccacccctaaatcagccacaaagcccgcctgccacacatccaataccaaacaccacccttaacacaaaccaaaacaccaaccgtggaaggaattttccagaaaaaaaaaaaaaagcctgtagaattcaccccaattttggtgtcgcatgctaacttaatcgcatatttactcaataaggcaatggtagccataatcccagtgaaaattcctcaacctctatttttctgaagatacaactcgaatgcaacatgtgcttatcatg

SEQ ID NO: 2814 - DNA, 595 bp, Glycine max
tgcctaattaacctgaaattgagagaaaatgattattaaactcacaaaatgaaaatactaagtatttattacctatacttaacagaaaatacttataacactacaaaataaccataaattgggagagtttgatacaatttatacaagttttatacacaaaagttagtcattattttcaactcccgaacccttattttcaaaattcgcaaacctctttttgatttttttaacgttttccttaaataaaggtttgtggtgactcccacgcattttcctttttggaagatgcgccttttgcttttcgcctcgccctcccgtcgaagggtaggttgcgatatgtctaaatgcaaagtcctatatacaaattgaagacaatttagtatagatttcaagggcaaggttaatatcaacatttgggtcaaatatccattcagttttaaaagggacaaaaaatggtgtttttggtttctacatcaagagacgtcattttgaaaatctggttatgccaatgtgaccaaggttaagtgaaggtcacgaaaacaacatcaattttataaaaaggtacttttacatcgtcttattttaagggttttca

SEQ ID NO: 2815 - DNA, 351 bp, Glycine max
agcttggtgacacgcggagatttatgtcatcttccgcgctcacaagatctgtcatattgacattatagtcacgctgacgggcggaaatacccaaatggttatctgtataaatattcttttttggttatctgtaaaacgaaaagcctgatagcacgcagagactaacctcgtcttctgcgccctttgtcaatcgcggccgacaagcccattaacacgccgagatttacgtcatcatccgcgctcacaagatctatcatactgacatttgagtcacgttgacgggcggaaatacccgagtgggtatccgtataaacattcctttttgctatctgtaagaccaaaagcttgata

SEQ ID NO: 2816 - DNA, 624 bp, Glycine max
acctacagaaactaagcttattcagctgccctgctcgaccaagcatatccaccacacaagcataatgctctaactttggctttacgccatacaaactctgcatttgaccaagatattttaatccttctgttactaagccagcatggttacaggcaattagcactcccagaaatgtaaaagaatccggtctgcatcctttattttgcattaatccaaacagctcaatagccttcagcacatgtccatggataccatatcctgcaattataacattccatactgcttcatccttctcatttaccctgtcaaaaatgttccgagattgttccaagcatccacatttagcatacatgtcttttaatgcacaagtaacaaagttatcctcagaaagacgaggtttcattgcaaaggagtgaacttctttccccagccgcaatgcatccacatttaatctcggtattatattgtattatttgaagctattgaaaggaaaaattggaaaaaagatagtacctttgtagtaagaggttgtaaaagcaaaaagcatctgaagagtccgcattgaaatggagacagactacgagcaacgacaccaaagcaggaggaaaaattgcataccaaaaa

SEQ ID NO: 2817 - DNA, 380 bp, Glycine max
agcttttatcaatattaaaacatcttactcttatcaaagcacatgtaacttataagtcttgaataactctattaccaattaagcaagattgtttgcacagaagaaaatcaacagataataaccatataacagcaaacttgccatgggttgacaaattcaggaggaccagtttgactgcctccactactttgaggatcagaaggattatttggcattccgattgacgagatgcttctctgggaatgagctgcactatggtctaacttaaaggtgctgctgctccagaaatcttctgatccatccaccttagtcactgtttgaccttgagtccttagtcctttagatgcttcatccattgaaataatccctggagttttttt

SEQ ID NO: 2818 - DNA, 572 bp, Glycine max
ttgaacaatatacttgcccttcatttaactgtctctgggcttggtggccacgctcaacaaagtactttcgacacctactgtacgttgatttgaccaatgctgttatgggaatgttgcgacaatccttcaaaaccttattgatacattctgagaggttggttgtcatgtggccatatcgacgtccttctctatcataagccatcgtccatttttcctttgaaatgcgatcaatccatgttgctatggctggactcagttcacgaaatttttctaaattttgataaaaaaatgtgcttgcaaggagtgtaggctacataaaattagttatgaataacaattttaagtatatatgaaagttaaataaacgtgaccatcaaatatgaaatcttacccaatttcttcaacatttctttttgttttgcattattgaatttccgattgaagtttcttgctatgtgtcgcatgcagtagacatgataaccgtggggaggttggcaaccaagtgctttgttagcgacaacggactttatactcccgtgtcgatcaataataaaccaatccatttttatctg

SEQ ID NO: 2819 - DNA, 386 bp, Glycine max
gcatgcaagcttgcatgaaaatttctcacgggaggtaaattgcaaccttgcggtgggggcttgggggggggatctccttgataagggccaaatgggtggattcaaaatcgccatgcataaaattgtcaggctctgaatctgaagtgtagtctacttcatgcagaattaataaggcatataaatctctacataatgaagtaaaatgaaatttctaccaaaacaaaattaccaataataaaatgatgctagagaaatttaaggaggttgatactttttgaatcaaaattgaataaatttgaccatactaaagaaaaaattggcaaatttgcatattgaatatagagaaagccatcaacaccaatttacttattacattatcttttttt

SEQ ID NO: 2820 - DNA, 490 bp, Glycine max
tgcccggtgctggttctcgagtgaggaaacttgacttagagcgtccatatcaactcatgcacccgatgcgatatatggtgagctatggcggctcctatactttcctatgcgtatgcttccaccagcgagatcaatcccatcagtggccttgtttatgacattctgatgcttgagtcttctaccacctttcgtgagctatccacacgccttgggagcgcgcagtgggttccttaataattctcgcgacaatgggaccatcaatgacaccggccggcaaactcgattgcctgcctgttagaatcgtacacctttgatgtgcactggtacggataaacagggatgccttatttagtatataaaatatataaacgcgcatgaaaacactcttggttgctggagaaatagcttgcctcttagagagtgccaattatctaggacattgagctcaggccccttgcttgtcttccttcgggccggctgaatagactac

SEQ ID NO: 2821 - DNA, 273 bp, Glycine max
atgcaagcttgtctcagcgtttatgcgagacggagacttcatgctagctatcatcgccaagtaccaagaagagttaggtctagccacgacccacgagcataggatcacggacgagtatgcccaagtatacgcggaaaaagaagctagagggaagggtgatcgactctttacaccaagaggcaaccatgtggatggatcggtttgctcttaccttgaacgggagttacgatctttcccgattgttatcctaggccaaggcgatggcggttactt

SEQ ID NO: 2822 - DNA, 551 bp, Glycine max
  unsure at all n locations
tcttctcaacaggatcatataacctgtaaccaaattcattctcatcataaccaatgaagatacattgccttgactttgcatccaacttggatctctcatcctttggaacatgcataaaagccttgcagccgaaaactcttaagtggtcatacttcacattcttgcccaaccagattttgttcggcgcctcactattcaaagcaataacaggactaagattgataacatgcaccgccgtgtatagtgccttaccccagaagtgcttgggtaactttgcttcagagagcatacatctcactctctcaattaatgtcttattcatcctctccgccaaaccatttagttgaggagttttctcatgagcaatgtcatgcttcttgcagtagacatcaaatggtccctaatactcaccgccattgtcaatacgaatgcgnttcagcttcttgcttgattgcctcttaactaagacatgaaactccttgaacttcttaagaacttggtcatttgtcttttaagcatatacccaaagtttcctggaatagtcatcaatg

SEQ ID NO: 2823 - DNA, 353 bp, Glycine max
  unsure at all n locations
tttgaaagtattgnaagaggggaaaacatttatgtgttactcacgcacacaaagaccttgtatgaaggattaccagaatagaaaaaatgattgatcattgttgatgtgaaccttactaggagtggatcgcttgatacaagctactcaattttggacgacgccacttcctgatagggaagataattcatgtacatgccacatgaattaccttgataaatccgagattggttcagcgaggaacccatagagaagttctcacaaatttttatgaaaggcccatagttccttcattgaaaacgaaaacctatacatatagtgtatctgaacaaaaagatattaatagacgtgtgcct

SEQ ID NO: 2824 - DNA, 869 bp, Glycine max
  unsure at all n locations
cgccntttcgaattgccttgacgatcccatcctgaacacgnacctcngatcncatataacgccatagccttcaaggccaactatacggtgtgacacaaccaacatcgcaatcagtaagacatgttctatgtactgtatgtagtatccatcactgatccttncacctccgcagtgtgcttgtgaagtgacatccatatgagaagcactgggatagactcatcatacaacggaatactgggtggtacaactcaactaacccatcataagctccatgaggaccttattaaagcaaggagccacgacattaactgcttcaccgtgcgtcgcgaacacgtcacgtattgcctcacagttcaactacaaagactaggcaacttaaggaggataaagcttgtattactgaacctttttcccattcgttcccatctagcgatgaagagctgcctctatacgaaagagagtcataaggaaatttgctaacgattagaacgatgtagggtagcccagcacatgaattgcatgatcgtcgtagagaaaatattttttaagccaagtgcctcatacaccggaagtaatgctttttgatcatcgatggtgggagtttaactaacgggattggtctaagctggcttccaaaaataaatcggagattaaagccaatccctctagcaacaaacttcaaagttgagactttatttttctttcgcccaaaatggtgtcaactttttaggatagcgcaactccatgttcttttgtgaaattcataactcgggctttaacctgtcccacaatccgtggcttcctctcttctatgactataccgacctcgatgcttctctctgcccccctttgcttcactcatttctccg

SEQ ID NO: 2825 - DNA, 371 bp, Glycine max
agcttgaccaatcccgacccaacccgggcatattcggtcagtgagaacctgtgatgtacctaagcaggcgagctcctggcagtcaacagataaaaggaacaaagaccacaaagcaaggaggcttgcggtggctggccagctgtgaaacttgattgatatgtgagatatggtctctggtaatcgattaccaagggtgggtaatcgattacaaggcttaaaaatgaagacaggaggctaagatggtctctggtaatcgattaccaaggggtgtaatcgattaccaggcttgaaaacgaagtcaggaaactaagggagcctctggtaaatcattaccaccctgtgtaatagattacacacagggatgggtcacc

SEQ ID NO: 2826 - DNA, 409 bp, Glycine max
atgataatgaaaatattttcacaacagaccataatgatgtgatagctacagacaaatcgaaaccccttgtcaattaaatcgaaggaaatctgtctaagagaaaaacacacaaagtttataccaggtcatctgtaccatctagactacattcagatcttgtcaaaccactaagttccactaacttataaaagctacaagctattttatactgctactcctgaatcttacagacacaagctctacccaaagcttgattttaacccagtattctatgatctacttagtcatagtgggctctaaacaaattaacatgaatctgcgttgaaaggggcttaatgactaaaagattatcgtcctacagacagatattacactcgactatttcgttgattctctcgagaatacaaat

SEQ ID NO: 2827 - DNA, 362 bp, Glycine max
gcatgcaagcttaaagcactaaaagggggaaaaataatgaatatttactaggacaggttgtatcggatcccgtaacaaaagtaagcctctagaaatgaaaatgaagctacctcgttaactatagcacctaagacataggaaaatagccactcttgagctttccccgctggacatgaaggctttgctctctttggtttccccaataaccaaagttgaagacctggcaagtgtgcttttggccggctcacctagagaaagacttctcccagacatttcaaaatcagatatatttaaggcagctgccatactgaatatcccttcaaacatagcatctttactacatacgaatggctcattttcaa

SEQ ID NO: 2828 - DNA, 281 bp, Glycine max
gtcaaacggtcttttttttttctactgtagaccttagcaagagctttcgtattttaaactgttgtctctgaacaataaaatctcgctatattctcatcatgccattatgttttgcagagtggaacactagcattccgattctgaatgattggcttatatattgcacagctctattcactgctgttttaccttaggacaggtggtgacttgagttagttctctatgggaacccttatatacgacgatgaagaaatcagcgttgattgtcttttgaaaacttc

SEQ ID NO: 2829 - DNA, 461 bp, Glycine max
  unsure at all n locations
cttatngcaacaaatcaacatgtgcttgcttatcgaacacatgcacattgagcgcatagcataatcagacaacaaacaacaacaaacatttgcacttaaatcaactaacacaaatattcatagagtcatgagcataacccaaatcaacctaacatcaacacacaaaccaactaacacaattattaaacaagttacagaaaagaggagaaagacacaaaccaactaacacaattattaaacaagttacaaaaaagaggagaaaaagggtagaaatcctgggttgtctcccactaagcgtttttttaatgtcattagcttaacgggtcaaatgacttcaagacggcatgaaggtcacatagaacacatnatccttacattttcacttcttagctagagactccatganaaatatgtatncctgagatggcttccatatcattgcaagggaagggttggtgatc

SEQ ID NO: 2830 - DNA, 487 bp, Glycine max
tctaaggtggaacaacaattgcatagaaacagtcatgaagatgagttcatctaattttcactcgcttggttggaaagacacaaataagaagaagggaggatcatcaacaatcaatctcaatgttacaactcaaagaactcaaaataagttcgatgaggagcttaagaaagcaaggagctatgaaattaagtgcttcaagtgtttgggaaaaagtcacatagtttctcaatgttcaactaaaaagactatgttacttaaggaggatagagaaataattagtgaatcttcttcaaaatctttcccatctagcgatgaagaagagcatcaagaggaaagaaagttagaacgagatttgttcacgattagaaggatgttgggtagccaagcagttgaattggatgatagtcaaagagaaaagatttttcatgcgaggtgccttatccaaaggaagttatgctctttgatcattgatggtgggagtttcact

SEQ ID NO: 2831 - DNA, 114 bp, Glycine max
agcttctcgatatattatgcacctgaatcggacttccgtttgaaaagttatgcagaattgaatttctcgagagctttcgttgttcaattatgagcttgtcgatatactattcgc

SEQ ID NO: 2832 - DNA, 192 bp, Glycine max
gaacaatggaagctctcgagagatggacatggttatgacttgtcacacggacgaccgctgcatgcgcatactatatcacgactgttgaatatcaagctcgataagctctcgaggaaatcaaatggacatatactttacgctctgaaccccctttcgcgcacataatgaaaagcaacgctcgaagaaagacag

SEQ ID NO: 2833 - DNA, 363 bp, Glycine max
gacacgggcttcttctccttttgctagttgtgggttaaaaagacaattgtgcaaaatcccccaaaatttaacaaaacaatcatcctcaatgtccacatctggaagttgaaaaaagagtttcaaattaatgttacaaatcttccataactaatgagggacacaaagtgagtaaaggttgaaagaaatataattctagtccaagatgtattaattatcatgtatgtaccctagctttcttcgggcagtaagtgataaataccgcaaggtaaattgtctcaatcaccccaccgaatgcattgatggtgataaaaagcgtttctccggtcttcacataggcataaaagatccaaagcattgcactga

SEQ ID NO: 2834 - DNA, 381 bp, Glycine max
ctggtgagcaggtcactcataatgtgaacattcctgttgacttttaaaaggagaactacaaatggttcttccttgaccagtaacccccaatccaaggtacatgaattgagtttaattactatccactttcagtataattattatcttacactctccatttatactgttaatcaatcagaaatcatatatgaaaacaacttttaagtaattttatataaaagttaacaaacttattatatgtaccatacataaactgcttactcataaattactatttttattaagaaatgttttagctttgttaattatatataagttctgtgtatttttgccaacattatcttgctatactagtagaatgtttaatatgttaaccaaatt

SEQ ID NO: 2835 - DNA, 627 bp, Glycine max
  unsure at all n locations
caatttttttgtgttgtatagcaaatattttttttagttagataccttatgtttgaatttgataatttacgagtttgatatatatagatatttattataaatattaaattttcaatattattaattaatcaaaaattattttaaaacaatgttaacaagatattataaaagttaataaatttatcttgtgtaaaaatttataaatagatggccttgtaaaaaattaaaacaaacattttacaattagtgcatatgatgtttattcataatattttgtttaattgaaaattatatttttaatatatcatattaataaaataaatgtatattagtaataataaaaaaattattatttaaatatgttatttaaatttaaaaatttacttacaattaaataccttactattttaaatagtttttattaatgtcaataacaaaaaattcaatgtaaaattattttatataaaatttatgtaaaatacattgataatgtaaaattattttatattgttatcataatcttattaattttctcaataacaactttaaaaatcatattcaagttgatgttcaacangttaacatgacaatgtaatttatttttatatttacaatgcataataatta

SEQ ID NO: 2836 - DNA, 621 bp, Glycine max
tgtatgaggggaaaaagtattaaacgttacatatagatacccattctccatcttttaagcgctcaagagcttcaatcatgtgctcttgataaattccaccacctcttgtaataggtatgcatttccctgtgcaagttaccattttagaaacaacagtactctgtaaaaacaactagaaaagcttttcagcatattttgatgcatatattaataaacttcaacccaatcatatgaaatagacagcagtaaagcatcacagtaagtattaaccttccgattcaaacattgttagcctagtgaagtgaaatgggtttaattcaatgctactgaactatagacaaagacaacacacaaaaggacttcatccaaatcaccacaatgtaatacattcattgaagaaaggccttgatagttgataaacagatttgttatattcaatgacatttttgccaattctggttttcttttttctttttttgattcagaattaaattttgggagtcgaaaggatactaaagtgctttagctgcaaatttccttttcaacaacttttaagcaacagatctgttgtgttaaagtattgtcccaagatgaaaagaaacaagattgaggatctatgtc

SEQ ID NO: 2837 - DNA, 579 bp, Glycine max
agcttatctaattaatctgaaattgagagaaaatgattattaaacacacaaaatgtaaatactaagtatttattacctatacttaacagaaaatacttataacattacaaaataaccataaattgggagagtttgatacaatttatacaagttttatacacaaaagttagttgttttcaccgactaacaactcccccaaatttacagttttgcttgtcctcaagcaaaaagagaataacttacttttcctcaagtgacaatgacatgtagtgactatgtacaaaggtgtatgctacaaagtgactaatttcatgataagagaatggagtaaaatgccctcatcacttgtctttcacaaggtatgcagttatccaaagagaagaataaaatgtaacctgaacagatagatgaagttaggcataagataaatatcaaggaaagtagcttaaaccacagtctcatggctactgtttcactcaagcacaagtgtttaagctattcattaatgacaactagcaagagatccaatctttgaatttcatctcatgccataaagtcaaaaatgtataaatagaatca

SEQ ID NO: 2838 - DNA, 527 bp, Glycine max
  unsure at all n locations
tcttagtctcagctgatgaagatgaatttgtggctacttcatgcactcctctaatgacaatagcatcatttctggcactaaattgctgggagttggaagccatcttctcaattaaatttttggcttcagcaggggtcatgtctccaagggctccaccactggcagcatctatcatacttctcatgaaatgtatgtgtgttacgataggtagcaaaaataccttatcaaatttacgtagcaaaatgccttgttgatttaattagcaaaataccttgttaatttgtagcaaaaaaatagtaatataccttgactatgcgtatatgtatttcttaggtagcgaaaaatgccttgaatatgcatgtataagttgctctaggtttacatttggaaagagtcgtangccgttgttgctgcactttgctttaaaatggcacttccttgtaaaatgactttccaaatgttggcttttgtaagaaatggccccaagaaagctttccacaaagacatccaagaaagacgtcaccgaa

SEQ ID NO: 2839 - DNA, 571 bp, Glycine max
  unsure at all n locations
agcttgtccccaagtcccataattgttgggcctctttcaacagctgattgttacaaataattttgctttttaatctcccttctgcttccaattttatttttttgatcagcgaaggtaatctataaattaattggagtaccagaagtacttaatagtacataaaggaccatacaaatggttccacaatcagacattgatattctgaaagggaaccagagtatggatatatatttgctatgaaatttacaataaataggctcgtaacaatgtaggctactactgatacaaaaagctttgtgtaaagctgcttgcccattgattgaaatggactgtgaaacctttctcaaaaccccttagccaagaccacagtagaaaagtcgcatcttcaaatagtgcattagcattgaaagtggcattggagaacactatgttgtttctaagcttccaaatagaccacgttaaggctaaccaccagtattgccatctgttcatccttactccagcaagttgtacacccaaatgttgtangaaatgctgctttgggcttaatgggaaagcaccttttatgtgc

SEQ ID NO: 2840 - DNA, 110 bp, Glycine max
cgagcgacagtaggccttagaatcattttactatagtgatcatagatgtcgtgatgggtgcgagctccttgaacgacatgtgtatgatgctggtgcacctttctcttgct

SEQ ID NO: 2841 - DNA, 521 bp, Glycine max
agcttcttatccaaggcacatcttgggggtgaagctccttcttccatggcttattccttaatggatagcgcctcctctcacctcctttcctttgtcttccgctgcatctccatgggggaaaatcaccattaaaggaccccattgaagctcaaagatccagcctccataaaagccccacaagcaagcttccatcaagtggtatcagagcacaagagcttcaagtaggtgctccttaaacctccattaatttttttctttaccttctcttccattggtggttcttcatttttctccatgtatctcctcacatgtcttgttctaaatgttgttaacatgattctttagagtttccaccgattaaacttgctatagaagttagatttgattttctatggttcaaatttcttgttcttgttcttgaaccatgaattgtgttgagtttacgctcctttgagtttgtcttgttattttttgtggctgaatcctaaaccataaaattcttacaaaaatattaaagtaga

SEQ ID NO: 2842 - DNA, 534 bp, Glycine max
tgcctgtccgatgcagcagtaatgatggcccgagttatgttggggaacggttacgaacccggaatgggtttaggcaaagacaacggcggcataactagcttgataaatgccaaaggaaatcgtgggaagtatggtttaggctataaacccactcaggcagatataaagagaagcatcgcgggaagaaagagtggtggtcaaagctcgcagttgagacaagaaagtgaaggaagtccgccctgccacataagtagaagctttataagcgcgggtctgggagacgaaggtcaagtggtcgcgatatacgaagatgatgttccgagtacattggatttagtacgaccatgccctcctgatttccagctaagaaattggctagtggaggaacgccctggcatttacgcaacgagcataatgtaaacctttacggttttaaaagctctataattgggcctaggctttaaagtttttcttttgttaaggctttgtgtcttttgtttttgaatttataatacaaagaccttttcttcatct

SEQ ID NO: 2843 - DNA, 503 bp, Glycine max
  unsure at all n locations
gcttncacaacattcaagtaattccacatccaatcatcatggactaacaaaaccaagcaaaacagggcaaaagcagaaaactttgcccaaaacacaactcaaaatcatagcttttcacatacaaataccccagtaacatttccttcgttccaattcgttaaccggtggattgactcaaaaattttactggaagtctctagtacataagtctacattatgaccgttgggatctgctaccaaatgtgcagaaccccatatgtactatccttttcacaaccagccatacacaagcatttttctgcacttatacaaaattctgctgcacatttcaacaacaaaattctgcataaagtgcagatttcgaaaaccactctttccctcatccaattttgcccaaattgaatcctacaagtcccaaatcatgtaccaatcatgtctaaaacaaggacaagcttcagaccaaagcaacacaaaatctaggtatccaaaacccctcaattaat

SEQ ID NO: 2844 - DNA, 627 bp, Glycine max
tctatagaaggttcgtccctaatttctctacaattgcatcacctctcaatgagctagtgaagaagaacgtggcatttacctggggtgaaaaacaagagcaagccttttctttgctcaaagaaaagcttactaaggcacctgttctagctcttcctaacttttctaaaacttttgagctagaatgtgatgcctctggagtgggagttggagctgtattgttaccaggtgggcaccctattgcttattttagtgaaaaactttatagtgccaccctcaactaccccacctatgataaagagctttatgccttaataagagccctccaaacttgggaacattaccttgtttccaaggaatttgtcatttatagtgatcatcaatcacttaagtacattagagggcaaagcaagttaaacaagagacatgcaaaatgggtagagtacctagagcaatttccatatgttatcaaatacaaaaagggaacaacaaatgtggtagttgatgccctctctaggagacacgcattgttttgctccctaggagcccaaattttaggatttgataatattagggacttgtatgctttaaatgaacatttctcttccatttacgagagttgtgggaaaa

SEQ ID NO: 2845 - DNA, 455 bp, Glycine max
  unsure at all n locations
cataatctacattttctcttgacgaggaattgccctgaagcttgaccacacttatccaacaagccaacaatgcaattaattttaaaaatagaggctttgcaaaacaacataatcttttttttaaagggactgaattggaaaaacttgcttccttaaaccacaaatgggggacaaagcaccaaaagaaacaagtcgatgaaagcccctactaagaacttcatcagcaaggtaagaaaggattgaaaacaacaaatctgcttgtcggaccccacacacaagagaagaagctaactggttttccattgataagaaagaaaagcttagttgacttgaggaacacacaaatccaggaggcaaaagtagaattaaacttanaataacttatgacatgaagtagtccaatccgtggtatcaaaggcattaccagtgtccaagcttctaaatcatattaccac

SEQ ID NO: 2846 - DNA, 340 bp, Glycine max
gtaacgtcggcaacgacaaccaggacatggatagcttagtgacgactagaaaatgatatttcatatggctttagcgaaatcatctttgaagactccacacatttcaaaaacggcttttgcgaaaatgactttggaacctcagaaatgatgatgatcttcattttgaaatttcacagtcaattttgacaaaaccatttgtgaagtgtgttcagtattaacaagaatgtgactgcatctattaacaatgacaatcatttcatagccgactcagataacgcattgtaaaagatgcatttattgactaggataggcagaggagattgaaaatgagtttcatttt

SEQ ID NO: 2847 - DNA, 306 bp, Glycine max
cagctttgagcaaattcaaacgacaataacttttgaatctgatgcccgattgggccccataggatattaagacccttttatttgaaaacggaagctcttacaaaaatcaaaccacattaacttttaactcgaatgtcccattgagcctctttattatatcgagacgctggaaatttaaaccagaagctctttgaaaaaacaaacgaccatgactttccactcggatgacggaaagagcgccgttatatatcgagacgcttgaaattgaaagctgatgttctgaggagattcctacgacaataactt

SEQ ID NO: 2848 - DNA, 427 bp, Glycine max
tcagttttcaattacgagcgtctcgatatattacgggactcaatcatatatccgaattgaaagtttttgtcattcgacttttcatagagcttctgttttcaatttcgagcgtcacgatatattaaagggctcaatcgcacattcgagttaaaagttattgtcgtttgatttttctcagagcttccgttttcaattaccagcgtctcgatatcctacgagacacaatcgaacatccggcttaaaagctattgtcgtttgaattggctcagagcttccgtgttcaattaccatcgtctcgatttattaccgtactcaatcggacatccgaattgtgagttattgtcactagacttttcatagaaatttcgttttcaatttcgagcgaatagatatattagagggctcgatcggacatgcgacttaaagg

SEQ ID NO: 2849 - DNA, 488 bp, Glycine max
agcttgccaacccatggaagctcctaatatctcccacactttttggggtgggccattcttggatggccttgattttctcaaggtccacttggaccccatttctaccaactacaaaccctaagaaaactatattatctacacaaaaagtacacttctctatatttgcatagagggtgtttttcctaaggactgaaagaacttgcctgagatgtcctaagtgatcatctaggctcctactgtacactaaaatatcatcaaaataaacaactacaaatctacctatgaaatcccttaagacatgatgcataagcctcataaaggtgcttggtgcattagtgagcccaaaaggcatcactagccattcatacaaaccaaacttggtcttgaaagcggttttccactcatcaccctttttcatcctgatttggtgatacccacttttaagatcaatttttgaaaagatattggcaccatgcaactcatcaagc

SEQ ID NO: 2850 - DNA, 593 bp, Glycine max
tatcgtcatcgattacatggttcttttttagactggttgatttttcaggagtctctacttcaatcgattactagtagatataatcaattacttctctcttaaaagtgttttagaagtgatcaagaacactttaattgattacatcaagaatctaattaattacattgttcttgaaagttttccagtttttgggaagaacactttaatcgattgaaatgataatataattgattacttcttcgaaataatcaatgacattgtatatttaatcgattacaggtgggtataattgttttctctataaatagccaccatgtgttctcacttcgaacaacttctgaatgagatagaattacgagctgatattagtaaaatgaaaaaaagaagaaaaagttcttagaaacaatgtgactcacaacttctaatctttgattatgaagatcattttgtgaaaagtgagttgtgaatttttcttgagttcaagaaggcacccattcattcaagcccaagtcttgcatatgtttgatcagggtttgtctatctttggacttacttttcgtggggttacacattggtagtttgtgcatgaattt

SEQ ID NO: 2851 - DNA, 544 bp, Glycine max
agctttgagatttaagaggaacaagaaatactattaaggttatgggtttgcaaaggaaaaaagagaaaatgaagatgaagataaaaaaactcaccctttgtgatgattgttatctggcaatatttttattttattaatgaaggtaactttagacggatgaaatgatcattttgaattaatttaaaaagataaaggattaaactgaaaaaaagaagataaaacactaaacaagtcatttggccttattattatttttaatatttattattattatgttaaagctgaaatataatattggttttcataatacaatgatttcaagtaaatttattttattgtattatttctaatttttaaaaaagatgtgtatttttaatttttgaaaaaatatgtattatttttattaaatataagactaaaaataatatttaaattaaaattaaaactaaaaaatatctttaaggacaaaattacgctttattctcaaggaatttgatttgattttaataaataaatgagcctataatttgcaacgacattcata

SEQ ID NO: 2852 - DNA, 618 bp, Glycine max
ggaagcgcttcctaatcatggagaattggtttgggatgaaaaaatggaaggccaacgttcaccaatcactacaaacaggaaatcgaaagatgtagagaggttaggcattggaaaagagaggtcaggtgcaagatttagagtagcattttaaaattaatctaagccattaatttaaaatgaaatagaagattcagattgagagtaatttgaaacctaacatgatgaggggtaaaaagaatcttaattgacctttagccttgatcaaccacccaaagtgatagcttcaccaagtctagaacatcgatctgagaaattataattactttatatataattgaacaaaagaaaatagtaggttcaatctcatccctccaaattcaagaataagaaaaatgcagatacatgtgtgtgaatatatgtcatagaattgaatagattgggttccattccattctatcctttcttttgtaatttacagaaatttttttggtatatatgtaggttaaataatgtaacataattttattgccattcatttttttccaattaattttatttcactaattaattcataatttactcctttttagagataaatgaaaatgtttatgatgaatc

SEQ ID NO: 2853 - DNA, 538 bp, Glycine max
agcttctacttatgtggcagggcgggcttccttcactttcttggctccaacgcgagctctgaccactgttcttccttcccgcgatgcttcttttcatgtccgcctgagtgggcttatagcctaaaccatacttcccacgatttccttgggtttttatcaggctagttatgccgccattgtctttgcctaaacccatcccgggttcataaccgttccccaacataactcgggccatcattaccgccgcatcggacagacaaggttgcccaaagagggagtccacggaggaaatgctgaccacctcaaaagactggaaagcggtttctaacgattcttctgcggcttccacataaggcatggaggatgggcagcttaccaagatatcttcctcgcctgacacgatgaccaagtgcccctccactacgaatttcagcttttggtggagtgtagaaggcacaactcccactgagtggatccaaggcgccccacaggcagctgtaggggggttaatatccattatttggaagcgacttgacag

SEQ ID NO: 2854 - DNA, 664 bp, Glycine max
  unsure at all n locations
tcaagaataatcnagtttcaagattcaatcaagtttcaagactcaagagaagactcaatcaagataagtactaaaaaagtttttcaaaacattgagtagcacaagaatttttcacaaaatcttttaccaaagagttttactctctggtaatcgattactagtagccagtattgttttcaaaactgatttacaaagctgtaatcgattaccataatcatgtaatcgattaccaatgttttaaaacgttaagatttcaaatttcaagagttacaacttgtgtttaaatattttcaaatcattttaaacttgtgtaatcgattacacaatacttgtaatcgattacctaagcttctaaacgttttaattttcaaaatttaaaatgaagagtcacatctgttgatgtgtaatcgattgcaccttaatgctaatcgactaccagtgactgatattgaaaaatacatttccaaaagtcacaattcttcaagtgacttatttctgaagattttttcaaaagtcacaacttttttagtggttacgttttaaagaaattgtcaaaagtcacaaactttgacttgagtcatcaagagattataaatttgtgaccatggcatgaatttcataatcatctaattatcaatcatctttgaatcatctatctatcaat

SEQ ID NO: 2855 - DNA, 978 bp, Glycine max
  unsure at all n locations
ggcgcgcggggggactctcaccgtgggntnccctctcctccttaacattgactacaggcgggcgaagctagtagtgcaacctcccccgtagaaccgggagtgtaacgtggagacctctgccttctcgagagatctgagccccccccctcgngacaagctctcngcccatgaaggaaaaaaaattctttttaggtgcggggcgtagccgggggaagcggagaatatcactatcgtaaataccacaccgtcccctttggtaaagcacggtcttcgcgcaacatcttaatatagtcagggagggcgaactctcatacggaagacaatggagaatttgaacccaaccttaaaaagaaacagggattctcccggtcgacaaagaagcaaaacaccccttaccagcccgttcgggcccctatttataatttttaataatcacctactcataatgccgaaaggcggagatatataaattgtggtttcataataacaacggatgtcccaggaaatgtcactgcaatggggcgatttctcaaaccctaaaaaaggatggggaatctttacattcttggaaaaaaaaacggaataattttcaataaaacagcacgaaccaaccacaatattttacatgcaaaattcaggcctacaaacaaatcttttatagggaacaaataacggtctatttctccacgaatctcggactggagcttattaaataaaatcgggcttgagtatttgggagggacattctacacataccgcttcttacgacttaccaaaaccttctttgaagacagcactgtgggagagataattttctaacaaacacttttttagaagagggggtgttataaagaaagaggttcaggcctcacttagccgcttttatataccatcgctcgacctgcgaatgcaaatcttcttcagagaattaccatcgaccatgacctctgggatgctaatcaacctgctgctgtaccg

SEQ ID NO: 2856 - DNA, 448 bp, Glycine max
tagaatgattgcacttcgtgctctatctttcatctttgatgtcccctttgagcctttgagattcagacatcattccttctactttaagagcttatgcacaaccatgttgaatccagattgcttacatcttgaatcttcataacccaaagtcattttcccctgaaaacttctctatatcatattttgtgggtcccatctttcttgatcctgaactattccccacagacagcgccacttgtcggttctttggaaaagtcccgcaactcttaaacctgcccatgatcagaacatgaacctgagtaaatatcattcctgacctattcagtggagctagaaccccaagatgtacatggttcaccactctgcctacttacaatcatcacatcggtcacgaaagtgccaatttcatttcaagccaactggctaactttggagctctctttgcttt

SEQ ID NO: 2857 - DNA, 301 bp, Glycine max
cggcaggatgtttcaatggaggaaaagaaagagggagagaattatatatgggggagcacgaaattgaaggaagaaaaagggaaagaagttgaactttgagttgtgtctcacaagactctcattcatcaaagttaccacaagttttacacatgcttctatttatagactacggagcttccttgagaagctttcttgagaaaacttccttgaaaagcttttttgagaaaacttccttgagaagctagagcttagcttcacacaccccttttataactaagctcaccttcttgagaagcttctt

SEQ ID NO: 2858 - DNA, 615 bp, Glycine max
ctctagcctgctcaatggttagacatgatacatgttcaaggttcggtctggtttcaagactcaagagaagactcactctatatccgtgtcacaaatgctttcaagacgatgaggacactatatgctttcacggacatgtttgcccctgagtggtcccttctgggtatcaattacttggacccgggatggtttggctaactgatttactactctgatatcgattaccataatgatgtcatcgattacccatgttttaaaacgtgcatatatcctatttcattaggtgcgacttgtgattaaatatttgcaaatcattctaaacttgtgtaatcgattacactatacttgtaatcgattacctaagcttctaaacgttttaattttcaaaatttaaaatgaagagtcacatctgttgatgtgtaatcgattgcaccttaatgctaatcgactaccagtgactgatattgaaaaatacattttccaaagtcacaattcttcaagtgacttatttctgaagattttttcaaaagtcacaacttttttaagtggttagttttaaagaaattgtccaaaggtcacaaactttgacttgagttctcaagagattataaatat

SEQ ID NO: 2859 - DNA, 513 bp, Glycine max
agcttgtagcgtttttatagattgttatagaagctcttaaaagctgtcctgtaatctgtcaccataagctaagcagtagccttcatcatgaactattttttgtactatctgtcaattcatatacatatatatatatatatatatatatatatatacatctcagcaaactaaggttgaggatcctttttgggtgcatattttcatactcaaacatttcaagtaattctaaagagtctaaacgtctaaccattttaattcatggaatctaaataagccttatagatgcaaacatccaagatattaccattcatgataatttaatcatttgaaatagcactaactgcagataacacaaaccttattacaattgctttatctgtatatccttccccgcggtcactaaatgaatttcgcaccatactcattggctacaacatttaacgaacaagacaacgaattaataagccatgacaagggcttgaagaaatctatgaataaccctatggagaaact

SEQ ID NO: 2860 - DNA, 304 bp, Glycine max
tcttagtttcagatgatgcagatgagtttgtagctacctcgtgcactcctctaatgactatagcatcatatctggcactaaattgctgggagttggaagttatcttctcaaataaatttttggcttcagcaggggtcatgtctccaagggctccaccactggcaacatctgtcatacttctctccatgttactgagtccttcataaaaaatattggagaagaagttgctccgagatctgatggtgagggcaactggcatatagttttttaaatctttcccagtattcatataggctctgtcgca

SEQ ID NO: 2861 - DNA, 263 bp, Glycine max
  unsure at all n locations
agcttgcctccttcttcatactatgtgccaatatttccgaccgaagtttcagtatcctttgtctccatgtgtgtgtatatatatgagaagagatcaaatttacaccggtataactttgacaactattataccattctataatttttcaactgattaatgtgttcttaaaacttaccattgcatcgaaagttcattttacatanattacatacccccattttatattaatctacaattattcggtacccttatccatatagatt

SEQ ID NO: 2862 - DNA, 960 bp, Glycine max
ctgttgagacatcgctggcgatgcgaacccgactactaatataactacgtcatagccttattcgcacaatctgatataacatgtgcctactttctactgaggactggatttcatgtctttcacagtagcacaatctaacttccacatacgacttagctatggtatgactatacactcgaatacaccatttgctcatctctgaataagaagatatataccacagtcgtatcacaagcaatcgcctcttaggtacgaatgcctcctcactgacatcactaattatatacaccggttgcttcattgaaaacgcatctctccacaatatttcgggaagataacaacttttacatcggatccgaacacgactaaatattaatctcgattatctttctttcgacaataaatctgttgcacaaatgctctagtctaagaacgattacccagtgcggtaataatcagcctgtgtgtataaaccacccaccagtgtgtttctcactctccaaccagcttcctgagtgaggatacatattaccaagcggatggtttgtgctcctgaggctggtgacagaaggaggtctttacaaaccaaagtgagctcccggcttaaacatgttctactatcagagaacattttcgtgaaaacgtgagctcttgaatgtttccttgagctcaagaaggcggcccaatgaattacaacccaaatcctgtgttggaccgaaccacgtgtgtgtgtaaggttgacctctcctttcaaagggggaatacacgtcgttcggttcgggcctgattttcctagggcccgcctcaacaagatactcgttggcggctcatacccgacgacccttaggggggaagcctaagcctctttccaaggggaagcaccgtactttctgtgggaaattcttcttgcatggcgcaaatctatctgggttgggttacatacctaatttacctctctac

SEQ ID NO: 2863 - DNA, 508 bp, Glycine max
ttatctccaaggcatagaatgattgcacttcttgctctatctatcatctttgatttctcctttgagcttagagattcagacatcatttcttctcctttaagagcttatgcacaaccatgttgaatcaagattgcttccatcttgattctccataacccaaagtcattttcccctgaaaacttctctatatcatattttgttgttcccatctttcttgatcttgatctattccccacagacagcgccacttgttggttctttgtaaaagttccgcaactcttaaacctgcacaagatcaaaaaaagaaaaaaaatagaaaacatagcaaacaaatacagcagagcaagaacccaaagatttacatggttcaacaatatgcctacttccaatcatcacattgatcatgaaattaccagttcaatacaagcagcaactaactttgatctctctttgtttctcttttgacaaaacctctctcaatcacctagcttactacctcgtttttgaa

SEQ ID NO: 2864 - DNA, 1070 bp, Glycine max
  unsure at all n locations
ggcaggtggttggttgtgtganacntataatctatgacantataatcaagtgtgagagtgntgtatagangtgaatgggaacagaggtgagagtaggatgatatgaggtggaattatatcncanccagtnncnnncacgagggttgtggacatggaagtagcnacttgtgganagnaacccactcanaattttggtggagaaaagaccctcnncncacattnatnananattaataatggtntgggacctttccttatatagtgtgtgtgtgttcagngatcataaaattttgggaacgcttagagggaaaataggagtgtaatattgggatttcgatgggaacaataaattaagggagtgggaggctcttgggttaattatggggaattgaggagagtagaggggataggaagcgtggntggttacagagattaggagaggtgttaagaaaagtatgggggagttaaagttagagggggagattagttgaggtaggggagataggaggttttgattgtttagggataaagggggtaattgttaaaagtaaatttaggagggagtagggggagaaaaatgtgaaagaggtttaagaagaaaagttagagtaggtgggggggaaatgtaattgggggaaggagattggagatgggtgaaaattgggggttgaggtaatgaattagaaatgatggtagaaggggggttatttagacaggtaggagggacgttacaaaaatgttggaggaaaggtggaataggagaaaaggaggtatgggtgtgcagtggtggttgagaggaagatgtagaggttgaggggtggagaagggataaagagaaaatgggggggtgagggataacaggggagagtggtgatggggagagagataggaggtttgggggatgaagtggtaagtattggtgtgataaggtgaatgttgagggaatgggggattagtggggaggaagggcgaggagtggtgtaatggggagagtgaagagaataaatggcggaggtaagggagtatgaaagaggaatatggtggttgtttgtgaggaaatgtgtgggagt

SEQ ID NO: 2865 - DNA, 302 bp, Glycine max
cgacgtttgatgttggtgataaaatgaaacccttttttctcttcctttgatgttgattggctaaccatggcgtggcaaacattttttcttcctctctttgactccaattttgttttatacatacagcattcatggaaactgttaaaaaccacattgtttccggggttatgatccccatacagggaatttttacgtgatgtctttgggatgaaaaatgctattggagtggaggaaacttccccttggaccccaaagctattcttttattcctttttcttcacaaaagtacttttttgatccaa

SEQ ID NO: 2866 - DNA, 911 bp, Glycine max
  unsure at all n locations
ccccgccccgtggaaccttccgccacaccctcccacccccctcttcaagtntaattgcggatatccttccctnctnnctcccccagccaacgagagngtgtagactcgtcggaaccccgccgatcctctagagaacacctgcaggcctgccatcttagcaaaaatagaccaaaacttcgtaagttatctaaccctgaacccagcccaacaagagggacccgaggatgaagcttaactttagttattccaaacccaggagggtcgtctaaaccaagcctatcccaacaagagggatcctgggaccaacctgatgcaagcctccttggagcttgcatgcctaggatcttcctcatcaatggattcccttgcttcttggaagatgaatggcaccggaatgaataaaggaagagagagaggagacccccacttcaaggagaagataagtctaaaagaagcccaccaccataggaggccatggataacaacttggaggaagaaggagatgaatgctcggagaggaagaaaagagcacaaaactttgggctctaaagagctttgaaaactgaagtctaaaattcaaatgatcacaagctccaaaaaaagcccacacatgacctctatttatagcccaaggggccacacaaaatcggcaggaaatctgaattccatccaaaattcacttgaatctgcgattgaatttgcggagccaaacttgggagcccaaatttcctaaatatgataacggaatctaatatgggccagcccactaacccagaaccactccacaaattcccataaagggctaaggggtcacgaggcggcaagcatgaaggacatcccacaggggtaaacatgaacggccacggggcgcacaaacataaggccatctcccccctaaacaaagacgggat

SEQ ID NO: 2867 - DNA, 282 bp, Glycine max
gatgaaatcgtgacgcactatttgcatattataaaagactacaaaatcgtaaaaggctatctgtgactataattgcggaaaaaagaaactgataaaaataattaagagttagtactgcaattgatcccatagagtacatcaccgtcactttaggggagccaaatccacctctcaacactttagattgtagcctatagatttaccatttcattttataaatcggtgtatacggcgacggtcagaccataaggtgaaactgaacaatgaataatgacatgcctg

SEQ ID NO: 2868 - DNA, 437 bp, Glycine max
gaaaatatctattgttactacccgagatacaggttttgctgctcggcctattggcaaatccaactgcatcaatgcatctttaacaagcataccacgaaccagagcagcccccaagttgacctcctttggactctaaaataccatagaaaacaaggtatgtaaaatgtgcaactagtcatatattaatcagacccttcttaaaccataaattaaggcattttccacagcaaaccagggaaggcatttcaatgggtaaaaaattagacgccaacttttctgcaaaataacatggtggttaaaacacagaagtttcttatgcagtacctaggcagtggcaccacataaatgtaacaaaacatttgaatctttcaatatttatggtatggctaagcggaacatacttgcgaaaatacttaaggtcactttagcatgcatac

SEQ ID NO: 2869 - DNA, 651 bp, Glycine max
tcataacatttagctagagggagtgtgctagaatatctcaataacatcttaatatcatagacaatagattttattctttcctatatcaaatgatgaccacaatcaaggtcacatcaactatatttgtttggaacttttcacaatatggaagatgacgaaaaaatgttgatagtgaccacaacaatgcaaaattttataatagtatgttacaacggcatatggggagaggaaaagaaggaatatacaagggcccgggccaatgatgcaacatactaccttaatcacaaaataaacattattttgtcactcagtatggaattttgcaatccacaaacaacaacatatggggagaagaaaacaaggaatgttgtatgatatatatttacaatagttacacgcctttgactaaaatattttcatttttgcgattccttgtaaagatcacctttggatccatactatataatcaaataaactcggctttataataataattcagaaataacaaagtaaaaccttttcggtgaactttggcatgtgcttctttagacgtcaaatttttttcttccttgacatgtgtttgtctaacgcggaacaaccaaagcaaagacccatctttggtggttctctctcttcctttggttctttggc

SEQ ID NO: 2870 - DNA, 309 bp, Glycine max
agcttacggtaaaatctgggacctagccatggtagaagtctccacagaggccatttgcctccctcgcccagtattatgatcaaccgttgaggtgtttcacttttggggacttccagctatcacccatggtggaagaatttgaagagatcctaggatgtcctctagggggaaggaaaccatacctcttctcagggttctatccctcattagctagaatttctaaaatagtccaaatctcggcacaggaattaaacagcggaaagcaagtcgaaaatggggtggttggaataccgagaaaatctttggagg

SEQ ID NO: 2871 - DNA, 649 bp, Glycine max
cgtatagttccccaatttatggtcattttggagtaaattttgtaaataaatcttgttttatgattaatgctgtctctagaacatttccattggatttaatgatgaaatctgtgcatttttaggtgaaaaagagactacgttttgaattgcaaaaagtagtagatgggttaagctcagcagttgggctaagcgcatatccaccgctaggcgcagcttcagcgtgcttagcgcaaaggagaatatggcagagcatcagcatcaaggtcgcgcgctaagcgcgagatcaatgagctaagtgcagcaggttccttcagccaggctaagcgcgagactggcgctaagcccaatttcacttatgcgcgctaagcgcaacattgggatttcagagcgtatttaaagcctgtcttatgcagaattagggtagacaatggccggggcacaaaattccagagcagccataagcctatttggggaaaagagccctataagcagaaaaaggggggcagattgtgcattaaagcctcaggtttgtcatttgagagagattattgagtaaagagtgagtgtgagatgctgagaagaggaggaggaatcccccttcttgtgtagaaactatcaattcttgcttttaatttcatttattgttaag

SEQ ID NO: 2872 - DNA, 424 bp, Glycine max
gcatgcaagcttggaagtcaaaattagctaaccaatgtcaacttattttcttgtagcctaagtcttgacaaacaacaattcattcaccagttttttcaaattcaaaaaggacgaaccaaaagtatatcatttggatctatggtacgatagatgccagcaaggtcccttaaagtgatgttcttcaagctaggaatctaatctatggcagagtctaaatgaccatttgtcaaatagtttgcatttgaaaaagaagatcataatagaaaaatattaatacatagatatcataatcataagggacttgctaattactatacttggttattagttaaagaactaaaagaagaaaatgatattgcttattgaattaaatactacactgctattgtaagacatagtctgctttttcaccaatatgttacat

SEQ ID NO: 2873 - DNA, 498 bp, Glycine max
cgtgcattcaatatcctgatgagggtgttccatatgttctcaagactggactaatacatttgctgcccaagtttcatggtcttgcaggtgaagatcctcataagcatcttaaggagttccatattgtttgttccaccatgaagccccctgatgtccaggaagatcatatctttctaaaggcttttcctcattctctggagggagtggcaaaagattggctttactaccttgctcccaagtccattttcagctgggatgaccttaagagggtgttcttggagaaattcttccctgcatccaggaccattgccatcagaaaagacatttcaggcattaggcaacttagtggagaaagcctgtataagtactgggaaagattcaagaaattatgtgcaagctgttctcaccaccagatttctgagcaactccttcttcaatatttctatgagggacttatcacctggagaggagtattattgatgctgccagtggtggagc

SEQ ID NO: 2874 - DNA, 486 bp, Glycine max
agcttatcttaatgaaaaagggtatgccaaaatatgtatctccagaagattggaattggctaattaaacacaagtagagtggttcaaaattttaagtaaaattattttattattttgaacataatttttttaataggtttacacttataatataaaatcacttatactttgatgtaggaaagaagcttgacaaacaaagctaattgaagcaagcaagaaataaaataaattattgaaaaaatcaattgtgcaaaagacatttgaaatggtagcatcttttaatattttatattagttttcttacaagttatataaaataactcattttttattttgtgattatttttatatgatatatgaaaggttggtgaaatttataaagacattatgcattatattatattatttaatttgttttttactatataaattttaatagaaaaaagatttaatatctggtgaatgacaaaaaaattaaggtaaaga

SEQ ID NO: 2875 - DNA, 440 bp, Glycine max
aaggtgaactctgatccgaatatacaccgggatagcaataccataagtccccactgatagaaacaaagtatctagaaatgtgacactaaaaaatatacaatatctatcagcggtgagaacaacaccgaaactctatcaaaccccaacctttcatatcaatgttgtgctgaaaaagacctaaaaccaatcacttaattatttgcacctcatccttaggcaacttgaatctctcaagtaaaagtcatacatacctgagttaagaatccaatggttttaaagcatcttttttaaacttatttataaattttagatcctgcatgaatccatattatagcaattaaacctgcaggatgactatgcatattcatgaaagggaaagtcctaagacacagattacaacagagataaaattcagctacaaacccgaaattctcacaaga

SEQ ID NO: 2876 - DNA, 432 bp, Glycine max
  unsure at all n locations
aatttgatcatgaaaattcctttncagaattttaccctcatttgcgcatttcatcagagcaacaattcaacaattcaatttggagaagaggttgtctgataaaagctttgaccattcaaaatggactatttcctcccaaccacgctcaagaagccaggaggtctcaaatatgaagttcctaccaaaaaattttctttttgaggcatccaggtagaggagaataaaggagtgatcagatttggcaagaataccttttgagaatatggagttcgggaaaagatccatttaatcaatagttgcaagaaccttatctagtttctcctcaataacatcatgttttcctctgctacgggcccaagtgtactgatatccttccatggggagatcgtgaaggttacaattaaaaatggcttttcttaaaccatggggcta

SEQ ID NO: 2877 - DNA, 1167 bp, Glycine max
  unsure at all n locations
ctgacatatatatgctgagttacagaatacttatacctctattatataagacttgaatatggatctattgatattaagtaagttattatataagtgctgcctccactgaacgccnnccgagattttttgacatccnttcctatgtacngacactatanaatactcaaacttccctgtgctggaatcaacttgggaagtatcgaaaactgttgcctttctcatatttacaaaactgcatttctctttggtggtgagaggaatatatgatatatctcacttttaagccatcacatgtaaatgaatatttgcccatggaaaaaaatatttcaatgtacctacagtcaagataggtgggatgacaactaaaggttctacacggaaatttatgggtattctctgtagaaagttaagatccgtctcttctaaaatttgagccatgatccatttggttgacagcctgcttcttgggataaatatttccgagaaataatgggctcaaaataaaatttcccatcaatttgtaaaggaagccaatttttggggaacatttattaccacttgtagtctcgaggttcttaataaggaatatttaataacaatgaagttggctctgaaagattgggatggtaatattgtatgcgcaatgaaaaagcctttgtgtttcatagctaattgatacaatagaattcacacaataatgtaatgaacgcgtaccagagactcaaaatggatgaccgagatatatttgatttttacccctatgggttaaaatacttgaacacacaaaaggactttaggttagaatgaaacttatgaaggatttaactatatggttgaacaataagtgtgtaaacacgttgtgagactttctgggacctatttgaaaagctttgatataaatatgtaaaattaaggtcctcccactatccaggcacttacaaaggctctataaatatgctaatagcacacattaattatatgcgataatgactgatcgggaaattctttgtttctgatgctgcaaatatgaaatctttcggcggtataaacaattagcacatgtcttactactaaatacaaacaactatactttggctaaataactcatgccgcttagacactaatacagaataggtttcatatctaatattgaaatgagagaaagcc

SEQ ID NO: 2878 - DNA, 881 bp, Glycine max
  unsure at all n locations
caaaaagggggaaatactctcgcttcaacatcctntcacaacttcgccnacctcccctcaactcgcgcaaacatcacgaanaaagagttgacacgtgcaccccccnnntttnaaaancccccaggcntcaacncggaacgtcacggagaaaacactttttttttaggaacacgggaaaaaaacccggggaataatataaagaagtgaaaaccgaaagaggtaaaaataaggaaaacggggaggaaggccgagaagagagaacccggggggagcgggagaaaggaaacagggaaaagaacagaaagaaaaaaagggcaatgggacgtagggggaagagggaaaagcgtcaaacgaggagagagactcgcggacaacaagaaaacaggaaaggaagcaaagggcgaaagggggaaaagggaacgaagaagaaaggcaaacagaggacagcggaaccgcgggcagaagagaaggaggaaaggcggaacaacgggagaagaaggaaactcgcataacgcagaaggaagaaatggacgaaaaaggggaaagcggaaacagggaccaggagcgaggaggccgaacagcggaagggagacagaggacgaaaggcgagaaacggggaaaaggggaaaggggagaaacacgagaaaagggggggagacgggacaagaggcgggggagcgcggaggggagaaagaggggaacaggggagaaacagggaagcagggggagaaaagggacacaagacgaaggaagaggggaagagagcgagaacgaggcggcgaaagaagaccaacgagagagaaaagcgcggaccaagggaggaagaatggaggagaaagggagaactacgcgcgaagaacaacggaaaaaaggggagaaag

SEQ ID NO: 2879 - DNA, 305 bp, Glycine max
tgcagggataacttggattgaattttacgaccttatgatggccaccaacaattgttcacctcagaacttcattggaagaggtgaggttgggatggtttactagggcattctacctgatggctcaatggttgcaatgaaacggcttgaataatcaaattctcaaagagatgctgtgttctaaagcgaggaggacattgttaagcaccttgaagcaccgtaatctggtgccattaaaaggaagttgcaccattggaagaaccaatttgggaaattatatattgtgatggtttttaaagatatttaac

SEQ ID NO: 2880 - DNA, 330 bp, Glycine max
agctttccatcttgaagacttgcttcagagataatcttaaagaataagatttctgaaggaagaggatgcttctttttcaatttggtcatggctgttgttgtgacttggattctatgaaagaaaaggatttctaaaggaagagattaggacgttttttgcagctgcaggaggcaactgaaatgagtaagtaatctgtgccactggtaatggtgcatatatttttactttggaaagagtagaaagtttttattgaaaaatgttatgtatatttttttttctaacctacgtaaccttgcacaagttaagtgtctttaataatcccccaccccc

SEQ ID NO: 2881 - DNA, 587 bp, Glycine max
tctaccctattttcctataaatagggggagaggtgaagggaaaaaatgtccagccctcctggtaattcgagatcacttgaaattagtgaaaaaaatcgtttccgtgaagaaaatccaagccaaggcacttccgtaacgttcccataatgtttccgtgggtgatttcacgaagattttcgaccgttcttcgacgttcttcgttcgttcttcgtcgttctttggtcttcaaccggtaagtacccgaaatcgaactttttcaattcattctatgtacccttagtggtcctcatttgttttcacgtgcttttattctcatttaatttactttctgtacccccttttgacgtgctttagtcatttacttaagtcattttctcccctaatcaaaaataaaataaatttccaccgatcatttgaattgtaacattcgttaatctctgttaaaatgaaatctgaccgttcggtcatgccataaccacgttgggtaaccaaatagagggtaaattctaatataataattcaaaatatccttttagtaaaattaatcacaaaaatcaatcggacgtttttttttgggattttttttt

SEQ ID NO: 2882 - DNA, 578 bp, Glycine max
agcttttttttatcacaaaataagctattccaaacatgtactaaaatgtttatcacaaaattaacttttctggtaatttcaaatggtgatattgatgtagatgcatgacttattttggaacttggaagcaacaggtctaggaaattatgacaaatatcttttgttgcagctccctttaatttcacagcataattctaaactttagtataatttgtatgcaggtatgattgggatagttgattataccaattatgatgatatgaaatatgctgtaagtgttctaaacaactaaacctgtatcttgtaattgttatcaggatctgtgttttacttgccttggtgtctttttaactagtacttttgttctacttctttaactttgtattctgttacagatcaggaaacttgatgactcagaattccgcaatgccttttctcgtgctttcatacgggtgggtggatattatatttggctacattctgctttcaatatttttttagttgcttttgttaatgtacatctctgattggtccaagtgagggaatatgattgaggttattctacaagtcctagtcgt

SEQ ID NO: 2883 - DNA, 625 bp, Glycine max
tcttcaacccatgatactcgaagagttctgaaaaaacaaaacctttagtctttagccattccaagtttagaaacatgaagtgaatcaactccttctaagcataattgtacacgtaggacacttcataatgttcctttgaaaaccatgaagtgacctttggagagggtggtggtgatggagaccatgttgtccttttgcccttattggaagagtgaccctttgtaggctcattttccttttgtgatattgtttttagggttgtaggtctgtgcctaatgctcttcatcttcttgcctttagttttagccattgatggaggttaaggataaaggacgaaaaagaggttgaaaagggttggagaagaagataggatgtgggttatgtctattaaggtttgaaaaaaagggttgagtgttagaaaagtgaggattttaggtaaaggtttaggtatttacaagaacagagaaagtgtatttttgtttctaaaaatgttttagacactctgtaatcgattaccaagtgttgtaatcgattatagcctaccctagaaagagtttaaggcctcttcaaaaatggtaatcgattatcaatcagtgtaatctattactcccaacccttaaatcct

SEQ ID NO: 2884 - DNA, 433 bp, Glycine max
  unsure at all n locations
agcttaaaataaaataccggacccttatttatttacanacattttggatgaaactagctacacccatattgtaaccacacggcgctgtattgtatgaaactgataaacgatgatgatgtccacacaatgttaatggggcaagagcaatttttttgtgttggtgcgatagaactattatgctccgttggaagaacaccccatggaataataaacttacttcaacccattatgccccctactcatgacgcgatcctgtattacaacaggaaatggggcatgccaccgcagaacaaatttgttggatgcgcgttcacaggaaaaaatcctaagaaattttaaattccttcaacatgtaccatcgatgaactgaaggatttattaagcaagttgcacctaaaaagattctccctcttggaaatcacgaatcacaaac

SEQ ID NO: 2885 - DNA, 843 bp, Glycine max
ccttgatcacgtctctaaccaacccaacactatttctaaactctagaccccgtctcacgatccacaatcttatcgtacatcggtgagtgattttctgttatgcaccttggcatgcgatctacgggcggtctatagcttttgcgtagacatttaccgcttagctctgggcttgttgtgggtggccagactgtaaattttgagttgtacccggattgaggcctcttgaaattcattcccaaggctggcgcatatattccgatgagtgcaaaattgagggcacgaagcccaaatgacctcttggcatagaataacaatgggtgtcacgcgctaaccgccatataaacgaacttagtgcaacttagggagcctctggtgatctattacaaaccggcgctatccattactctcactattcgcgcctcgcgcatccttgtgatttcatatcggatctaatgccggcttatgcatagataatgcatactactggcggtggctcaataatgcagagcccctgtaagcctattccgcgaagctgagcccttcaatcacaaaaaagggggcagcattgacaatcacattcctttggcttgaaatgttcatagagaaccttgtgtagcaacctgagctagattattctgggaaaaagtctgccgcttttctcctctatgttgtcagaaactaaatgtccgttgcacttaaatttcattttatatgtacagattctattgcctttggtggcctttaacaacccctcttggggtatctcatggagccgtctatgggactacctctcaattgaatgcgatcttgttttgttttcctcaaaacaacctttaacggacc

SEQ ID NO: 2886 - DNA, 392 bp, Glycine max
agcttgtatcttttggtcatactagtagtgtatcttctactgtgagggttcacgacaccacgaatattccaggagagcacactcagaattgtactatccatacaaaactaataaagggaggagcagatgagagccctactgaggtccaggatcaaagtatttggaccatttccatgtcttaaacatggttcttctccatcatggaggggagacgcaccatgttcctacccaggatggaaaacccgagtttagcattgggttgggaatgcttgatcacgctcttaggggggtaggcctaggagtagcactacactccttgtccaaattctcctttttttccccacgagttggagttttgctggctacctggaaagaccacgcaccccgtgtcc

SEQ ID NO: 2887 - DNA, 435 bp, Glycine max
tcacatgttttggatcagctttggatgtatcaaattgtgcctaccattttacaaatgcattcctttgtagtgatggatattgattagtttttttagtcttactgtaatgatattgccatgaaaaaatccatgacaaagcaaaagtggagaaataagtctaccggaatttgtgattcctgagaaattaaattgttttctaaattgagcaaatccttgttgaacctgctctgggaaaatctccggaatagggccaaagaaattccaccattgtaagaaccaatttgggaaattatagattgtgttggttttgaaagatattaaccatgagtgcttgaagcgggtgttttggtgccaaaaaacctttgtccaagcattaacataattccaataggtataacctacaggatcaaatggtactgaaaattttttcccctt

SEQ ID NO: 2888 - DNA, 438 bp, Glycine max
agcttgaatcggacatctgtgtgaaaagttatgtccatttgaatttttcaagagcttccatttttaaatttcgagcctctcaacatattatgcgcccgaatcggacatccgtgtgaaaagtcatgatcatttgaatttctcgagagtttccgatgtttaatttcgagcgtattgatatattataaccctgaatcggacctcagtgtgacaagttatgaccatttgaatttgacgagagcttccgttgttcaatttcgaatatcactatatgtgatgcgcctaaattggacatccgggggaaaagctatgaccatttgaatttctcaagagcttccgttgctcaatattgagcgtctcgatacgtgatttgcctgaatcggccatccgtgtgaaaaagtataaccatttgaatttctcaagagcttccgttgttcaatt

SEQ ID NO: 2889 - DNA, 366 bp, Glycine max
tttgagaaattcaaatggtcataacttttcacacggatgtttgattatagcgcatcgcatatagagacgctcgaaaatgaacaacggaagctctcgagaaattcaaatggtcataacttttcacactgacgtacgattcatgcttataatatatggatatgctcagaaataaacatcggaagctctcgagatattcaaatggtcataacttttcacatggatgttcgattcgtgtgcataatatgtcaagaggctcaaaattgaacaacggaaggtcttgagaaattcaaatgttcataacttttcacacgaatgtccgaatcatgcttataatatatcgatacgctcgaaattaaacaacggaac

SEQ ID NO: 2890 - DNA, 473 bp, Glycine max
tgcttgggattgatcctccaaagggtgttttttgttatggccccccaggaactgggaaaacacttttagccagggctgtggctaataggactgatgcttgttttataaaggttattggaagtgagctacttcagaaatatgttggtgagggggctatgatgggtcgtgaactattttaggtaaaatgcacaagactccgtcctctagcttttttttatcattgtttcgatgaaaataaatcattcgactaaaattttctgatttttagatggctcggtcaaagaaggcatgcattgtgttttttgatgaaattgatgcaattggaggagctcgatttgatgatggttgtggaggtgacaatgaggttcaccgcaccatgcttgaaattgagaatcaccttgatgggtttgatgctaggggaaacaataaatttttgatggcaactaacagggtggttgaatttattgtgagag

SEQ ID NO: 2891 - DNA, 456 bp, Glycine max
acccgatactatacacaaccctagcttgtattatataatatccttgaatcttcaatcaagaatttgatattctgaaggccaaaaataccgagatatatttaaaaaattattaatctatcctaataaatacttattcatattctcaaatcttgtatcatatccttccattcattatattttttaaaaataaaattatctgtcaacaatgtcataccataatggttatctaatctaaactatttaacctggcaaaacgataatttttgttattatgatgaacaagaattataaattataaaatcttagtcatataatgaaaattaaaaaaatacatataattttgtaagtgattattcaaccagtaataaaaattttaggttaattatttatataaaattaaattagtcatttttattcttatataagatgatgatttacattaagatggagtcaatg

SEQ ID NO: 2892 - DNA, 522 bp, Glycine max
cagctttgaaccaaaaacctgactcaccataaactttgacccaaggggagaaagacaattcttaccctcggaaaccaaaaaaaaggggagagggaaaaattccaatcctagaggaagcccctaaggagagaaggaaaatttccaatcctacgaaaaaaagagaggaaagggaatttccaatccaagagtgggagaaagccccaagaaaagaaagaaaacccccaatcaaagaatgggagaaagaaaacagagaagaagaaagggaagaaagctcccgatcaaaaaaaaataatatgccgaaaggtctttggaccggacaatatctgaacaatacagaactgtcaccaaatgaaaaaaaagaaggaaagggaaccatgacctaaaatgggcttccccccttaattgacaagcaaaaacttgggcgctaacaacctttttttctcccgcactaaacccgaacagaaaaagaaaaagcccgaaaaatccaaagcccaaaacacccaaaagccgcgaaaaaaaacc

SEQ ID NO: 2893 - DNA, 1253 bp, Glycine max
  unsure at all n locations
tagcgaagacgcgccgggangtcaaatcatccaacacgctcagaaataccatactcngcgtgtctgttacaagagaccgatccctgctctcnccaccgggcaccccnaacgggattgatgaccgtcctaccaacgtgacacgacacnaatanaaaancctaccctaacccatgaacacgggagctagcgcctgcaaaaaaataaagtctctttggttcatcagccacagcccaatatggtcaacaagcgcacagtgaagggactgttcccacctaaacgtagaaatgtccgctccaagaacactcccacaaggacgccccttagaaacaaccaccgcaaagaggtcggcccacacgaggagcagctgacgaaaggccgttcggaaacacccccgacgtctacggcgccgcggacctatatacgcggggaagtcgaatcncaattgtaacgggcaaggaacgataggcacagctgggaatatccaagaggagtcatatggaggggaaaacctagagcgccctcaaaaggccccgccacgcacaagtcgacccattaagaacaatcgcccaaaagaacgggatggcccactgggggaacgacccatggcaaattaccaccgattagaagaaagggctcccggacacacaatagaaacggaatgcggacgccagtcaccaacctctccgcggcaacgaaacaggacagggctcacacgaggctcgtatcaagccaaatagccaacctccttcgtggataagagacggacaccacatttcacatgcagacgagcctatccaccgtctanacattcgaggcatctcatcataatagtggctgcgggaacccggacancgtnacgaccgctcgaaccgctagcccgtgcgtgtgcatcgcctcaccacaagcgacatatccctcatgacgagggagtatcgcaaaggacaccatggatcacgaatgccgcatgaacagcgctcggaagccatacctcagcggcgtgcgccaacggttgcctactggcaacgtacgctacgcaacaaaaacatccgcgtcaaactgcatccccnggccgacacgagccatcgctcttcgaggacgnccgtccaacgcgcgttataacaaangcgccactcgtacagagaggcgagtcgccgaccacgagcgacgacagcccgncagctgccactcacattcactgatagggcatcgcgtaatacagggacgcgcacatatctacagcagacacaccaccc

SEQ ID NO: 2894 - DNA, 366 bp, Glycine max
gcatgcaagcttgtgcctcttcagctattagtttcacatccacagtttgtctgaacatgcaaatcatatgctaccaataatggggaataaaatttcaaaaaatcttaacttctataaattaaattgtcaataacgaaaaatataactatcatatatgttgtaacaaatcatttaacccaaatcatatgtatcacgttaaaaagtttaatgtcaaccttaggtattatattccccttgggtctattaaatatttttttcctttttgtcagagttgttgttgagcttatgtgtttgttgagtgactatagtcagatgtttatcgatgttattcttcactccaccattaatggttccttgaaccttgat

SEQ ID NO: 2895 - DNA, 533 bp, Glycine max
tgcttctacaataaggtgatgtccttcggactcaagaacaccggggcaacctatcagcaagcgatggtagctttgttccacgatatgatgcaccaagaaatcgaagtgtatgtggacgatatgatttctaagtccaaaaccaaagaagagcatctaatcaacttacggaagttgttcgagaggttgcgaaagtaccagctaaggttgaacccagccaagtgcactttcgaggtcaaatcgggaaaactgttgggtttcatcgtaagccaaaaagggatagaggttgaccccgaaaaagttaaagccatcctcgaaatgccgaagccatgcactaaaaagaaagtctggggtttcttggggcgcttgaactacatcaccaggttcatatcacagctcacggctacctgcaagccgttattcaagcttttgcgcaaggatcagtccgttcgttggaatggtgattgtcaagaggtgtttggaaagatcaaacaatgtctcatgaaccccctggtactaatgccaccggtgggtgg

SEQ ID NO: 2896 - DNA, 201 bp, Glycine max
cagcttgttgcaaccttatacgcgaaaatgacatttttttttgccttaatgaacaaacacccatggtgacattccattttcatggctgcgtcatgcggggtggtggaatgggtgttcttgctgggccgcgcgcggtggttgtggaaacaccgcacctacatgggcagttacaaatgcgccaccttggcctttcggcactga

SEQ ID NO: 2897 - DNA, 941 bp, Glycine max
  unsure at all n locations
gatagggagtagtgtttaatagttcggttattatgttaattcgttgtttaataaggacaagataanttttttctataaancnccgggttgttgatgtcatcggatagaacccacttgatanttataaagantnctgacttgggatgtaaaaggagtggaaatttagataatgcgatatttattttttatgagcgatgtacgagaaataaggatagtgatgtattagaaaatatttgacagactgcaataaagttatcaaagaggactgataatcttaataagtataatgaaatgatatattgtagtgaaagagaaacacgtctgaagttttgtattaaacgtgaacagagaacagcggatactatcaataaaagaaaactgatttatagtaaagtaagaagagttacgaaaaagacaatactttggtaagtttgatatgaaaaagatgaattgtgatctggacaaatggaagaagtatttaatggtagttataactaaggagtatttgaagctagttctattgaaggtgtataattataattttgtttaggaaggactgacgatatttcttagactaagtgaagaaattaaatttttaatgcggggagattgtgaagggatattaagatgaggataggagatggaaaaggaggtatatagcaaaaggtagtgttatattaaatgtaattattttaaaggaaattagggaagagacctttaagtgaaaagtaaagagatcggttattctgaaaagcattagatcttattaaagatgtctttgatggaatgaaaggggtttaagtaaagagatattaaatttaaggtagatgaaaaaattgggcatgttggttaagataaatgagaaaggctttgttgattggggaggatctggatgggaataaaagggaggttggcgcggtaaagaaagaacggtttttgtt

SEQ ID NO: 2898 - DNA, 473 bp, Glycine max
agcttgtcagtttattcccaaaaacctgcctagtccaagaatatggctttcaattgaatgacaatagtctctaaatcaattcattggcgtatcacttcactcacttgaattacaacatgatagatacttaactgataaatcatatatatgtgatatgagtaattaattaaaactatatatatataggacaaagatatattattgattaaatttttaaaaaacaaaatattgttagtgattatttttttaaatgaatatatgtaacataattagaattgacagtaaactgtatggtaaaaaacacagttataatattaagaaaaaaatttaatcaaatctcctattttaaatataactatgcttattataataaaacattaaaataccataattggatttggatgtcctaaaacaactggcactaatcctttttaaaaaaaacttataactcaaattgataaaagcttatcaat

SEQ ID NO: 2899 - DNA, 1063 bp, Glycine max
  unsure at all n locations
agcntttgattgnactagacgacccattcngaaaccnaacctcgaanacctatttnacaacatctcacactccctgagtttctctctaatcccattaaagagacaggtatatcgccatctatttcctcctatcacagcacaacgcctattttggcgctggaattgctagttttgcacgcctgtcaaatttaaatggaaaagtcttttggttactattgataaatcatttatttttggcgaatggactaaatacctagtttgttatactatcaattattaaatcatctttttggggaattattttactcccattgnttttaaataatatcgaaggattttttatcttttgattcaatataaattttgttttagaatatattaagctccttatatgacgaaatattcccctactctgccttttctctttaattcaaaacaagttgtattctcgactatccttttcttcaaaaatattttgacttttcttaaaattcattttatttattttctttattaagaaatcatatcatcctttctttttaattagtctttgtaaactaatagaaaaaactctttttcagaaacttacacttctacacctccacccagggaagacaatttcactctgtttactaatgttcttgtgtgcagaatagttctcgttactgctaattttataatccgcacagtaatatgacatctgctttttcctatgataagaaactattctgtgataagacttcagtcaattttctttgtattttatttgaaatatctatgattctacgtattaatacgggttgtcttataataaccttacaacgactccatctattatccaatacaataagaggggatgcctatactgggtctttcatgaactaattatttcttttatcggagtgctaattaattgcttaaatacagttcacaattctgtgtcgacccgtgaattccttctccgtacaataatatactcactttataactccatttgtgggatcttaccgtctatccttagttctctccgtattgtctacaacttcacacgattctgatcacg

SEQ ID NO: 2900 - DNA, 190 bp, Glycine max
agcttgtagcaaccttagacgcgaatcttccattctgttctgcctgaatgaacaaacccacatagggccattccattttcatggctgcgtcatgccgggtggtggaatgtgtgttcctgctgggctggccgcggtggctgtggaaacgcttcacctacgtgggcagctacgacagcgccccgttgccctc

SEQ ID NO: 2901 - DNA, 568 bp, Glycine max
tatgaaaataagagaaagaaactttcaaaataaatttgtatattaaacaaattatttttggtcaccttgttaaataaatatttattttagtcaaattaatttataagttagtcgaataaacttttataatctaattaactattagagcaatttggcaatcatacccatggttaaagaagttatttaaccagtaaaaaaaacttttaggaattaaatttacttaaaatatttataaaacatatatacttttttagggtaaacgtatgtacttaaaatatatcctttattcaattttgttagacattttagtaatttatttgtttcattttaattgtgattttataatattgatgatgtattaaatatttttttcttaatatatccattatcggtcatcattaagtgagaaaacaaaaaaaagtataaataaaagatagtccaattaatataaaagaaaaaaatattataaaaattgcataataattttaataaaatctataatataattacatatctaaatttctgtaccaaaatttgtccacaaataaaatggagggattttatatta

SEQ ID NO: 2902 - DNA, 553 bp, Glycine max
  unsure at all n locations
agcttatggtgaatcaaaggtgattcaaaggtgttttgatgataacaatgatgataacaaaagatgatgacaaaggtgatgacaaaaagctcaaagatcaatcaaaggacaactcgagtgaatcaaagattaatcaaagaacaactcaattgaatcaagaagaattcaagagttcaacataagaatcaagaagaattcaagaatcaagaagaaagtttagagtcaagaatcaagattcaaggctcaagatctcaacaatcaagatcaagattcaacactcaagattcaagaatcaagagaaggcttaatcaagataagtatgaaaagtttttctcaaaaattgagtagcacatgatttttctcaaaacatgtttaccaaagagtttttactctctagtaatctattaccagattgttgtaatcgattaccagtagcaaaattgttttgaaaaagttttcaaattgaatttacaatggttccatttaatttcaaaaagttgtaatcggttacaatgtnttggtaatcgattatcattgcctttgaacgttgaaa

SEQ ID NO: 2903 - DNA, 503 bp, Glycine max
tgttttaaagatttagggttgttaagatctacctctttgtcttgttctaattttgactattttgatgtcatgtcaattatcagacacaggttgactttctcttcatcctttttatctgagatggagtcatcaaagtcttcctaggtgctcatcaatcatttcttgctctttgagttgaatgatttcttcttgtctttggtcttttccaattctaggcattttgatttgaagtgtccaaacattttgtattcatagcagatgactagactcttctcattgtcccttttttctttgaaatcgtcatagttagggatgttaatggggaagggcaggggaaaagagtactccctcactccccaccccctaactaaccctctatcctcgtccccgatccttgctgtgagggatttttttcccttgttcccgtccccgcgggtcctcactaacataatattcaaactcaaataatccatgtattgttaaactcaaataaacaacacatg

SEQ ID NO: 2904 - DNA, 1080 bp, Glycine max
  unsure at all n locations
accgagagcactagtgatccaatactctcagactctccccctcancaaacncgtgcaactagtgcctattcatcctcactcccagcncnccaggatgagacatggaaacacttcaaaaaccctanaaaattcgagaggaaaccgccgcggctaccccctcaaagaacaacacataatttttctacttttataagaaaaacgggtacatgcgcggagagcggcgctaacaccgcgcacataaaaagtagacggcagacaaaaaacgtccgcagcggacaaaaaagccaacgacgcaggggcctatggagaacgaaacgcgcgcagggtgaggcctggcgagagaataataaacgaggctcgtctgacatctgggagaataaagaacaatggcaaccgcggtacagagtgtgacaaacaagaacaaagactgggcaagaggagtagctggacgaaagagagcaagagggggactcaacgaaggagaaagacgcgcacgataggtggcagggcacaaaagacgccgccgggagagcacaacgaaaaaaggcagccaaacaacgagccccaagatgacaagaccacgcctcgaggcagaaaagagagaagagcgacgcaaggcagaatacggcgtacggtggaacgcccgaaaaacaaacaaggcgacacaagacgtgtgcgacagaagaaacatcactgaggcgaacgacgcggaagaagcgtgcacagcaaggggcgcagtctggagcagcagcacatcagcgcagaaaatagccttcgactcgtggaaatccgcaggactgaaagatgcggagcgaatgctaccggtacacgacgtcggccaaagatggaaacaaagaagagcgataaactgacgggaagggatatcggaagatacataaatcaagtccgccgacacaccacatagaagacggggaagcacgccggggaaaagacgggggaacgagacaatgaactagcgacacgaaatacgagaagcacgcaggcgaaaaaagcaagcagatagacgacgaaggacaggcgaaccaacgcactggcacaaaagacgagatggtcatcgcc

SEQ ID NO: 2905 - DNA, 175 bp, Glycine max
agcttgcatgatttacatctccccctttctcaagcaaattcttcttgatatcatcaaaatcttcatgatcccgactcgttggtggaggatgcatgaatgacaatcaattcatggggctccgaataaaagtggagaatggaggataggcgaacgagcgctaggcaatcaattcgcg

SEQ ID NO: 2906 - DNA, 318 bp, Glycine max
tttcaactcattctatgtacccgtggtggtccacattttgtttcatgtatttttattctcttgtccatttgctttttatacccctttttgacatgcttaagccatttatttaagtcatttctcgcttaatctaaaaataaaataaatttccactgatcgtttaaattatatcatccgttaattttggttaaaatgaattccgaccgttcggtcgttccgtaaccacgttggaaataaaaaaagaggtaaaataataatataataatcaaaaaataccttttagtaaaataaaagcgaaagatcaatcggacgatttct

SEQ ID NO: 2907 - DNA, 189 bp, Glycine max
agcttaggagcctaaacttgtatcttcaatgcaaggaaacatgcttatggcttggaatccaaaatttggttttaggattagaaaagcatgaaaatagggacttgtttgtaagaatttgggctgccccatgattggtacttctgcacctaagtaacatgggaaatgcttttcaatggtgtgtagatatat

SEQ ID NO: 2908 - DNA, 497 bp, Glycine max
atttacattttcaaagattacatattggggaatctaacataacagacaatcgattgtacaaaacaatgataggagtaaaatctagtaacatcataatttaaactcactgcgacggataaatgacaatcaccatactcaagagcctcatggataatgataagatctttcctaccctaatctaaaaaaattagacgattaaacaatttatgtttggtgactacatagtggcactaatatgtaaatgcaaaaatgctgacctggccatgttcattgaaagtatcgagtccaacaattccaaggtccagatctccagataacaattttcttgtgatgtatttgggcctctaaaaccaaactatgagtttggattgctgcagtaatgcaagagaattggtttatggtcatgtagagatatagtacattgatggaagccaagggaaaaaatagaacgcacatgaggaagcaactcacttaacttatttctgctttttggatca

SEQ ID NO: 2909 - DNA, 342 bp, Glycine max
agctttgtatggtagaaggtgtaggacacctctatgttggctaaagccctgagaagacctcaccttaggacttgaagtggtacaacaaaccaccgagaaagtcaagttgatccaagaaaggatgaggactgctcagagtaggtagaaaagttatcaggataagaggaggaaagacttggaattcgaggttggtgatcatgtattcttgagagtcactctgtggactggggttggtcgagcattgaaatcccaaaaactaacacctcgcctcatcggtcctttccaaattcttaaaagagtcggtcctgtggcataccaaaatgcattatccccatcacattc

SEQ ID NO: 2910 - DNA, 282 bp, Glycine max
gccgcagctttgcttctacaaacacccggagtgggtgctcctttaagaataaggggaacctataagggtggagcattttcgcaaaaaaacgtgaccctgactggtctgcctatgattttacctacggagagggacccgaatcggcagagcggggtctggcttggcatgtacttctaagcgcccgaagagaatttacactgacatggtaccacatggcatatacgacagaaacctagtgtatatgatgcataccgcttatgcaatgatcgatatcgattaact

SEQ ID NO: 2911 - DNA, 572 bp, Glycine max
  unsure at all n locations
tgttaaagaacttagaaaaaatcaagaacaagtgcgttcgcacatcattcgcatgtatgatatccactctacaaggtttgaagtaaaggagaccttcaatcctataacgcaacatggcggacaaaagtggacagttaacttgaatgaccattattgtcaatgcggaaagtattttgcgcttcactatccatgttcacacattaatatttcttctttttcagtctttgtaagttcacactaaaattgaaaaaaaaaaacttagaggtaccaaattgaaaaattacacacttatatgaaccaaaaatgaacaaaaaaaattccatgcataaaacttgaaaaaaaatgcaaacttatgggaactgaaaataaataaaaaacttagagacactaaaattaaaaaaaaatgtgaacttatgaggacaaaaccatatttaggcctatttttcaactgaattacagtctattaatattgacaccctttgngtttttttgggttcttgctacatcaatctcgttaaaagaattttacatcacactttaacctcaaaacctttatattccaataatctccc

SEQ ID NO: 2912 - DNA, 434 bp, Glycine max
aaaaatgttcagccctcctgttaattccagatcacttgaaattagtgaaaaaaaattgtttccgtgaacaaaatccaagccgaggcgctttcgtaacgttttccgtgggtgatttcgcgaagattttcaaccgttcttcgacgttcttcgttcgttcttcggtcttcaaccggtaagttcccgaaatcgaacttttcaattcattctatgtacccttagtggtcctcatttgctttcacgtgcttttattttcatttcatttactttccgtaccccctttgacgtgctttagtcatttgctttagtcattttcttgcctaataaaaaataaaataaatttccaccgatcatttgaattgtaacatccgttaatttctgttaaaagaaatcggaccgttcagtcatggccgtaccccgttggaaaccaaaaagag

SEQ ID NO: 2913 - DNA, 582 bp, Glycine max
ttgttgacaacactgtggctgcagcattcaatgctgaccttgtccaacctccatcacccttgctgcccaaattactttgatctctaagtacatcatgatgtaagctccattggagcttgtaggcctaggatcttcttcatcaatggattcctttgcttcttggaagatgaatggcagtggaacggataaaggaagagagagaggagacgccacttcaaagagaagatgagtttagaaaaagcccaccaccataggaggccatggataagagctttgaggaagaaggagatgaatgaagggagagggagagaagagcacgaaattttgtgctctaaatgagctctgaaatctgaagtttaatattcaaatgatcaaagttgaaaaaaatgcacacacatgacctctatttatagcctaagtgtcacaaaattggagggaaattcaaatttcacttgaatttgaaattgaatttgtggagccaaaaattcacttaatatgattagtgaaatttaattatgtttcaaccccactaatccaagatcaattccaagattctccactaagtgtgcttaagtggcatga

SEQ ID NO: 2914 - DNA, 559 bp, Glycine max
agctttgcggatttggtcttcaccggcaaaaggatcgaagtgggtctgaaaagaggcaaatttggtcatcctgctttgatgaaaactggggcaagtgaagagggtgagaatgagggagaaacccatgcagtgactgccattcctatatggccaagtttcccaccaacccaacaatgtcattactcagccaataacaacccatctccttacccaccacccaattatccacaaagttcatccctaaatcaaaccacaaaacccacctaccacacgaccaatgctaaacaccacttttagcacgaaccgaagcaccaaccaaaagggaattttgcagcaaaaagcctgtagaattcaccccaaattccggtgtcatatgctaaacttcctctcatatctactcgataattcaatggtagccataacccctgctaggtttcctcaacctccatttttccgaggatacgacttgaatgcaacatgtgcatatcatggaggagccctggggcattccattgagtgttgtatgaccctaaagcataaggtgcaaagtctaaatgat

SEQ ID NO: 2915 - DNA, 539 bp, Glycine max
tgctatgtacccctacgccaaactagtatcatagaagaaatatgatatgggagaagagcggcgtaaaaccggtaaaaaataagtcaacaaggtattgcatgcgaactttatcatagaggtccgattctctacttggcttgccaacatcatcataatcaaaaaggccaacgcctaatggcaaatattcatcgactacactgatttgaatagggcatgccctaaagacgcataccctttgcccaacattcatagactagtcgatgggacatccgagttccaggagcttagcttcctagatgcttactatggatacaaccaattcaaaatgcatgctctaaacaaggagaaaatgacattcatcactaaagatgccaactttaactgccaggacaagccaactttagtggagttgggtatgttaaagtaagttaatgacaaaaaactcccttactgagcatcatcccatgagggaacatgtttcctcaccaacccaatgagtggtgctacaagtatatacaaatatgggacaaaacttttgt

SEQ ID NO: 2916 - DNA, 314 bp, Glycine max
gcatgcaagcttgtaatcgattacacaaatcttgtactctattaccagaggagaatttcagaaaataatttccaagagtcacatctgttgccatcaaaggtctatttatatgtgacatagaacacgaatttgcgaagagtttttgagaacacaaaggtcttatcctctccaaaaaagaaaaattatcttatcctcttaaaaattccttggccaatacccttgcaattcaataaggaattattttgagtgctccattgttcaatctatctctttcaagagagaattcctcttctcttcatcctatttccaaaaag

SEQ ID NO: 2917 - DNA, 318 bp, Glycine max
gaccctataatatacatcaccctatcgtgccgcatgacctggcccattttcagaccggcttattttttactgaggatcactatgctctggaccttgacttagataaacctctacttaagcgatagcagtggactagaacccatgtttaactcttgtgttgcatactttaacatgattaataactccgacgtctatgatgggtggccatagatgaatgcataaccatatgcataatagacataagcatattatggataacgtagcccaaaaaatcgatgacattgtatattcaaccgattacgggaggacatagctgga

SEQ ID NO: 2918 - DNA, 510 bp, Glycine max
  unsure at all n locations
cagcttttgtctcaaaacacattgttttcaacattcaagactctgggaatcaattaccaagcagggtaatcgattaccagaagacaatttttaaaatcagcttttaaaaaaggttttgaatttgaattttgaatcatgtaatcgattaccagcaatgaaactttagaaaacactttgaaaagtcatgacccttcaaaatataactgtgtaatcaattaccagtgaagaatttcagaaaaaactttttgaaaaaacacatctcttaaaaccattttgaaaagtcacgaaaggcctatatatatgtgtgtctgacttccaaaagcaagagagagatatgctaagagaacttaattgccaaattctctctcaacaactcttggtcaaacacttgttaatctattgataattcattcaggaactttnaattgtattatcatctctaaaagagagaaactcctctaggaacttcaatttgtatcattcactctaaaggaaagaaatctttatgtt

SEQ ID NO: 2919 - DNA, 565 bp, Glycine max
acggatttggtcttcaccggtgaaaggatcatagtgggtttggaaagaggtaaatctgaccatcttgctttgataaatgcaaaaaaaaaactggggcaaatgaagagggtgagaatgaaggagaaacccatgctgcaactgccattcctatacgaccaagtttcccactgacccaacaacccttctccttacccaccacccagttatccacaaaggtcatacctaaatcaaccacaaaacccacctaccacacaaccaacacgaacaccacctttagcccaaaccaaaacaccaaccaaaaatgaattttgcagcgaaaaagcctgtagaattcaccccaattttggtgtcctatgctgacttgctcccatatctacttgataattcaatggtagccataaccccaaccaaggttctcaacctccatttttctgaggataccgactcaaatgcaacatgtgcttatcatggaggagccccggggcattccattgagcattgtaaggccctgaatcataaagtgcaaggtctaattgaagccggctggctagaatttgaggagaat

SEQ ID NO: 2920 - DNA, 412 bp, Glycine max
gcttacatgttccttatatggtgctcactgatcaagtccgttagcaaaaaatttaaacatgttttaacacaaaacgaaaactgaaaataaagaaataaaaacaaataagaatcttttaattaagaaaaatcagttagcattaaaaaacttttttaaatttgcaacgtttataaatctggtgcttaatgattttgaaaatataaaaggaaacttaaaagccgctaatattacctagcttatcctaattttaggctgaaaaattaaaatgtcaaaaataccctattgttttcaaattaaatgccattaacattacgtttgtaaattaatttttatttccaattgttttcaaattaaatgccattaacattacgttttcaaattaatttttatttccaatcaattaaagcctatt

SEQ ID NO: 2921 - DNA, 584 bp, Glycine max
tgtttttggacaatagcaccccacctgacgtccccaaggtctcctgacccccgcaacatatctccaggtaccactctgtgatcaacgaataaaagtaggaagactgactcttccacactttctcacttcaagcttgtaggattatggggtacccatcatatgtggtactagggggcaatcaggcgatggtgcaagtcgactctccacatccacaaatcacacataaatccaccatccccagttgtccaccttcaactgagctcacgtgctcccacgtagcccttatcctcgttcctctcaacaccgggtccccatcaatccctccaagctttcacaacatccaagaaattcagcatccaaacatcatgaactatccaaaaccaagaaaacagggcataggcagaaaactctttccaaaacacattccaataccacagttttcctcactcaaataccccagtaacattctctttgtttcgattcgttaaccgttggatcaactcaaaatttttactggaggtccctaatacatatatctacagtttgacccgtgggatcttcagaaaactttcataacccaatat

SEQ ID NO: 2922 - DNA, 917 bp, Glycine max
  unsure at all n locations
agtccgccagaacgatattcaccgacattcatatctctctgcttttagattatatgtataatatctactnccacaaggcacgaatgatgcatccctgcgaaaccaaaaaaaaagaacctaagctccaaactctgaactctatacacggggggagtattacatacatgtgcatctaatacacaccggaactggcattaaaatggctagcggggggtcaaaactatgggagatacgggagaacgttgaagataccacaagacttcaagaatattccccaccccgaacttctcgggcgatgttctaaatttcttactggcgaggaaaaaagtactgccaatcaaacacaatagggtggaaaaagagaacaacagtaggagacctcttatgaagacaacttaagttaaatccggagggcaaaaccccttgtttcaactagaaaaccccctccctaaaaaaggaggggatcattcgggacgaaaaaactcgatagtgctggcggattgacctgaattctacttatgaaacgcatgaattattggcatccacaaaaccatcgagaaccaaggctttgcatccacaatgagcccacaattgaaaatatactctcatttccgaaaacaaaatacagggaagaataaatgtccatatgtagacactacgttaagttattgcatacatccccaacgttaggggaaaaatgagccctttaaatatactctctccaaaccgtgaaaaaattagttgttgtgccatattcgacacaaaaatgaggaacccccagaacgctatcatgtgggaggaaagatttgacattacaacttgctcggtatgacaacacccctatacttcctctatggagaagaaaagatgatcttctactttagaaatcatcttctggaagcgaaaattgtaaaaaa

SEQ ID NO: 2923 - DNA, 511 bp, Glycine max
ctgagccaaaatcctgactcaccataaaccttgacccagggtgagaatgtcaattcttaccctcggaagcaaaaaaaaaggggagagggaaaatttcccatccaagaggaagccaaaaaggagagaaggaaaatttccaatccaaggaaaaaaagagaggaaagggaattcccaatcaaagagtgggagaaagcaaaaagaaaagaaagaaaattcccaatccaagaatgggagaaagaaaaaagagaagaagaaagggaagaaagttcccgatcaaaaaaaaataatatgcacaaaggtctttggaccggacaatatctgaacaatacagaattgtcaccaaatgaataaaaagaaggaaagggaaccatgacctaaaatggtcttccccctttagttgccaggcaaaatcttgtgcgctagcaaccttttttcgccccgcactaaaccagaacagaaaagggaaaagccagaaaaatcaaaagccaaaacacccaaagcccgaaaaaaa

SEQ ID NO: 2924 - DNA, 581 bp, Glycine max
taaagatccaacctccatagaagcttctcaaccaagcttccattagtgtgtctgcttcgtaaaggattctgacagctactcgtttatttaacgccttctcaaaattcctagtattcaatatgaaggcacctatactatgaagaagatgactgaataccagatgttagctcatttgactcaactccatgaaactcatcaaaataagaaggctaaagaggaaaaagttgttgttgttgtgaaagaagatgctgcctccatccaagctgaagcatctgctaaagctatagatgacaccattgtatgtgggatcatcattgatcttaccaacactggtgtcatggataaaacttctgaggcatctaatgcagccatagctgatgaagttgaccataatgctttagaacctggtccaagcagtctacaacttcaaatgatgctactaataaaggcaaacatggctcatctactgcaaatttttaagaagggtatatttttcattggcatttgtctatatctcaatgcttaacatggactcattttctttaagagtttcacaagctttaaatgcttgagcggactcg

SEQ ID NO: 2925 - DNA, 542 bp, Glycine max
taggctaaattaggccgaactttcataatctatttaagctaagtctagtccaacaagagggatctaaggatgaaacttagtttaagttagtctaaacctaagagggttgtctaaattgagcccagtccaacaagagggatctgaggatgaagcttggattgattcagtccaactaatgatcgatgtttagtaatttaggctacaacatataacacagaagcatgattgattagaataacacccttatatgcatcagctggtctgttagaaagacccaacacttctacctactgctgttatcataccctaatttcgtccggggaccatttgtttggtggcatgcaaccttcgcttgactgcttcggggtacttaacacccatcgttaggcaatccgtgaagttctgcgacatgcacgaagtcgaaaggaagcattcttgcgcaatccctaaagttcagtaacattccagaagtcaaaaaggggatggttgcgtgatccgtaaagtttcgcgacatttacggaagaaaacaagtatcgttatgt

SEQ ID NO: 2926 - DNA, 561 bp, Glycine max
tcacgcctaagccaccttcattcttaggcaaacaaattgtagatcaattgatctatcgaatttggttagaatcccttgtcgcattccataaaatctcctctgtagctttgtcaattctgcattgatcctttctagtgccctaaataattatatatatatatcagcgaaatggcattaaataaaaaaaagttatagtttagttttttttatggcgtgggaaccttctttcatttaacagtttgggagttcgtaacttttctaatattagttgcagatagaaattataaaaaaaaaaaaacttaaaaaatgataaagcactgagtatgtatttggaaattgaaaatttttcattattcaaggtcagcccaaaaagtataagataatataagttgatcattttaggtttttatgtttattataaatatattctaaaagcaaaaactcagtaattatttaatcaataatattaatttattaagcttacataaatatatttatctttgagaaaatctttcatcttattatgagattttcttcttttcataaacatatgtaggggat

SEQ ID NO: 2927 - DNA, 820 bp, Glycine max
  unsure at all n locations
cggaacagattgttgccatgctttgttagcgaaccatctagactcagcgccatatctggtgttgctctgaacactctccgcaggctgatggtgatagaggcctttttatctaacccttatcttcacttgaaaaatggctaaccgtgggtttattagcgggggttgataggctgtactttgagttttccaaaatctccatgaaatattgccaaccgcgtcttatgtggatgttctcattttttattttgcgatgaaaaattcgccccacagtctctaattgggtataaggtgaagcaactttgagcaacttttgagctggaatgcgcattttatactgaggtatactgatcctttttttnaagaaaatgcctgccaacattagaggtgggttttggactttaaagaggcttttgagctggtattaccgtcttttgtgtttttttaaagcttagatatgcacatacctattccagggagagttgtgatgtatacaaattgagcgccctacaaataattttttctttctgacatctgagcttggtcgccaaacttcccttggcgagccatattgttgggttgaccttaaccgccccgtgtgtgtttggggttttatgacccccccgccccccacattttggcctcccgcccgaccaatccttaactggtcccgcccgccccaccttatcgcgttcctctaccatgtgagaccagacgtccctttataggccccctcaaaaaaaacgcccccctccccatntgtctcaacatcgcggggcgtcattcccaaatatcccctctcccccggtatccgcccacactc

SEQ ID NO: 2928 - DNA, 514 bp, Glycine max
aaactcagcttcttatccaggctcatcttggtggtgaagctccttcttccatggcttattccctagaggatggcgcctcctctcacctcttctcctttgtcttccactgcatctccatgatggaaaatcaccattaaaggacctcattgaagcttaaagatccagcctccatagaagccccacaatcaagatcccatcagtgaccttgactggtctccctatgatattacctagtgcgagtgacttgacttgctagtgtgtggtttgtcttgtcatgtactcctaagcgcccgacgaggtttttcactgacatggtgccacattgcatataggattgagtcttagtgtatttgttgcataacgcttgtgtattggtctatattgatttatctgatgatattgtgttttgactattgagtatgcgaatgttctgaaaacaaatgagactatggtgaaataacgtgagttacgctcaagtaaattgtattttggtatataataattatacttatat

SEQ ID NO: 2929 - DNA, 493 bp, Glycine max
tcgccctacgcctccgaatttatgtcctcttgaacgaaccccttaaatgcaaaggcaaccatctctgtccccatccattcatttctgccgccgaacaggtgatctggatcttgacctccttcccctgcataaaaaggttacagtaaataaacaaagcaccattgtaacataaatatgaagcctgacaaattcacctgtgcagcttaatcttatatgatgatggaagtttgtctgaaaaacataaatcttaatcttgaaaaactctggcaacaaacctggaagaatcaagagaagtatatggagaatgcctgcgctgagaatgcttgctatgaggagaccgcaaaagttgtctaaaaatgaaaccaccgtactgacttggtgagtttaaagtatacaaaagttcataaatacaactcaacctggtacagtgtcaacactccattggaagaagccctattacatacatcctatctgtttctaatgagtatgatca

SEQ ID NO: 2930 - DNA, 550 bp, Glycine max
tctagccaaatggacttaccatgaattaattcatttgatagcccctttgagcctatgttcccctttctttgttttgaagctcattacaagccttaagtgaaaaaccatgatatcaccttacccttaaggaataatggagctttgaaattgttttgggaataagtgtgtgtgtggtggggggggctatgtttcattggaagatatgatttttggccatgcttaatgttttattttggccatgcttgatgaatatatatattgcctaggtcttgctttaatcttcaatttcgtactgttcaatctaaaaaaaacaagtgaaaaaaaattcagtttctgcaaattcttcaatttcgtactgttcaatataaaaagaagaagaaaagaagtgaagttgaataaatgacgtcttgttatgaggactcgatttgtgagccctggttgattttgttgatattaaaagggtttgggtttactaacttgtcttaatttccacttattccccatggctgcactatttctttgggattagctacttatttcatatttttcc

SEQ ID NO: 2931 - DNA, 491 bp, Glycine max
ttgatgatatggtcttcaccgacgaaaggatcaaagtgggtctaaaaagaggaaaatttgatcatcatgctatgataaatgccaaaaaaaaaactggggccaatgaaaaaggtgagaatgagggagaagcccatgctgtgactgccatttctatacaaccaagttttccaccaacccaacaatgtcattactcagccaataacaaaccttctccttttccaccgcccaattattcacaaaggccattcctaaatcaacgacaaagtctgtctaccgcactttcaatgacgaacaccacctttagcacaaaccaaaaacaccaaccaagaaatgaattttgcagcgagaaagcctgtagaattcaccccaattccagtgtcctatgctgactttctcccatatctacttgataattcaatggtagccataaccccagccaaggttcatcaacctccatttctctgagaatactactcgaacgcaacgtgtgc

SEQ ID NO: 2932 - DNA, 420 bp, Glycine max
tgcctgtccgatgcagcagtaatgatggcccgagttatgttggggaacggttacgaacccggaatgggtttaggcaaagacaacagtggcataactagcctgataaatgccaaaagaaatcgtggaaggatgggttaggctattaacccactcacgcccatataaagagaagcatcgcgagaacgaagagtggcagtcaaagctcgcggttgagacaacatagtgaaggaagcccaccctgccacataagtaggagctttataagcgccggtctgggggacgaagttgaagtggtcgcgatatacgaagatgatgctccgagtacattggatttggtacgaccatgccctcttgatttccaattgggaaaatggcgagaggaggaacgccccggcttttacgcaacgagcataatgtaaa

SEQ ID NO: 2933 - DNA, 572 bp, Glycine max
taatggtattatgagaaaagcatctatgaaaaatattttctctatgtatctagtgggtaaagaaaaagtgaaattcaacatcatacatcatgcatataatacattatttataggggagacgtctttgaggaagtgtgttgactatcaaatgcattatgtgtcatttcgaggtggcatctaatctaatagtaagttttctcaaaagtagctttggaatttttggaggtggagggaagtgtcgtggaaatagatgttgattttttgaattggaaaatttaatctatctttgccttttgtgtacttaggtatcctaattggggctaaccttacgaggagggaacatgtatgaagcccactatagataaattctaaaaacaattatagaagcatagatggttatctttggtcgggagggtatgctttattaacattaatttataaactttatgtaacactttgacaaaaactacaactttgactgatagaggaaacattgtggttgatcatctgtgcatgaatgtgtgttgtgcgtgtgccgcgctaattttagttaaacttggtatagaaatata

SEQ ID NO: 2934 - DNA, 383 bp, Glycine max
tatatggcctaggatgtgggtttgtgactaaattcaatttaaacacaagtcttgcacttgccacattggtacaactccctccatcaatgatcaccatgcaaactttgccattgatcaaacatctaatgtggaaaaagttttgtctttaacttttctccatagacttcaattaatgggcaagtaaccgtctaatcatcaacaaatctccctccggtggtttctacacttcctcctcatcatcctcactctctttttccttttcaacttccgactcactaatgtactctccatctctaagaatcatggctttcttgttagggcactcatgtgcataatgtcccaagccttggcaccgaaagcacttcacataccaactttttttt

SEQ ID NO: 2935 - DNA, 464 bp, Glycine max
ccatgatgaatcaagattgattcacagagttttgatgataacaaagataatgacaaaaagctcaaaagtcaataacacttcatgataacaaagatgatgatctcaagaatcaaagaatgagttcaagattgaatcaagaacacttcaaggttcaaaaggaaatttgatttcaagaatcaagaatcaagtttcaagattcaagttccaagaatcaagatcaagattcaagactaaagattctagaatcaagaaaagactcaatcaagataagtattaaaaagttttttcaaaaactgagtagcacatgattttttctcaaaaaccatagagtttttactctctagtaatcgattaccagattgttgtaatcgattaccagtagcaaaaaggttttcaaaaatccttcaactgaatttacaacgtttcaattgatttcaaaatgttgtaatcgattacaatgattt

SEQ ID NO: 2936 - DNA, 584 bp, Glycine max
  unsure at all n locations
tgcctaattaacctaaaattgagagaaaatgattattaaacacacaaaatggatgtactaagtatttattacctatacttaacagaaaatacttataacactacaaaataaccataaattggaggagtttgatacaatttacacaagtttatacacaaaagttagtcgtattgaccgagtaacagtgctgtagctacgcttagtggtaagtgcgagttgagtccataagttccgcttagcgcgattgctcctttaggcacttcaagactttagcctcttttgatttgaaattttacagattttatcattaattccaattaaagagactccaatgacaggtatctagacatatcaagatttatttacaatttcctacaaaagaactataaattggggaaactatacatgttttgaaaaagtttttttatacaaaaattagtcgtataagacgactaacagagcttccttgccatgaaaggctaaaaccctcagttggggattcttattgagtagttgatgtaaaattcttttcatatctaattaaggggntgttagtgtgttcactggctctatctatgcttaat

SEQ ID NO: 2937 - DNA, 490 bp, Glycine max
  unsure at all n locations
gctttatactttgatgtatatgattgaaatttaaaataaatcttgttatcacaaagatgatttatttcaaatgtcatttaaccaaacatgtattcttgttatgaaaatcttcttaagtatgcattttgatgaaagtcattatgatgcttagaatgttctgatgcaaatgtggtatatatgacaacaaataacacaatttaaagaggaaagaaaaaaaggattcaacacaaggatttttatattgacaacaaagtcattatattgattcttcacccttcaagatgagattttccactaacacaaccaacaatatgttggaccagccaactattgttcttacaactaccaacacccttgttgaactttccttgccaaccatggactntacacatctcctcaccacaacaccacaattggtcttagcttggagatcacccactcaaccatgacactcacttagtcatgggagagacaaaccaagtattcttca

SEQ ID NO: 2938 - DNA, 555 bp, Glycine max
ttaggagaaaccattaaaactaaggtagttcctaaacaaaaatcaattgaggaagcttcgccgagtgtccccattgaaaaacctttattcaaacctttcaaagttagtgataaggctaaacgaaaaattagggaacttagaaaaactaaatccttaattgaaggcgtaggtgacaatcatagcgaattactaaacaagattagtagtttgcttaaggtcattccagatactccccaagcttcggaaaatacttccaaaatggtaacaagaagtacctccaaattaattaatgttattaatgaagatagtgaccaaaacttagataacacaactgagataggatcagtgtcagaaaagaatataaatccattaaactccaaacactggaaaaccccctccaaattatattatcaacgtccaactgcccctgaccttctattagaagaaagaggtgaaaacaactttaaaagttttagtgcaaataacatctatgaatggaacatagatgcacaaacggagtataacatcatgaatacactccaacatatgaccatg

SEQ ID NO: 2939 - DNA, 438 bp, Glycine max
tagacaattacatatcctccttctttgatacagataattcaaaatactttgtttcatggtctgcccaatgaagacccttatgctcacttagctacctatatagagatatgcaatactattaagttggcgggtgtgcctactgatgcaatccagttgagtctgttctcattttctttatatggagaagctaagagatggcttgattcttttaaaggaaacagtctgaagtcatgggatgaagtggtagaaaagttcttaaagaagtacttccctgaattgaagactgcagaaggcaaagttgccatctcttccttccaccagtttctagatgaatcgttgagtgaggcactcatggtttttcagaaccaatacagctcaacatattcatagatgggttgagaccacaatctaagcagctcttggatgcttcagctgggg

SEQ ID NO: 2940 - DNA, 326 bp, Glycine max
tttagccaattcagacaacaataactttttactcggatgtcttattgagtcccggaatatatcgagacgctcgaaattgaatgttgaacctctgagctaactcaaacgacaataactttttactcggatgtctgaatgagtcccgtgatatatcgagacgctcgaaattgaatgttgaaactctgagccaattcaaacgacaataaatttttaatcggatgtgtgattgagtcccggaatatatagagacgcctcgaaatgaatgtggaacctctgagcccattcaaccgccattaccttttactttgaaggttggatggggcccc

SEQ ID NO: 2941 - DNA, 411 bp, Glycine max
ctctgaagttttatggttttccaaaccttgaaaacttgtgttattcatcttttcattctcttctccctctgccaaaaagaattcaccaaggactaactgcctgaattctttttgtgtctctcttctcccttatccaaaagaacgaaggactaaccgccagaattcttttgtgtttcccttctctcttgtcaaagaatatcaaacgacacagtctgagaattcttttgattcttccctttccctaatacaaaagtgttcaaaggactaaccgcttgagaattcttttgcatccccattcacaaagtatcaaaggtttaacagcctcagatctttgtcttaacacattggagggtacatcctttgtggtacaagtaaagggtacatctacttgggtttgactgagaacaaggg

SEQ ID NO: 2942 - DNA, 421 bp, Glycine max
tcccctgcaccaaatggctttttctataaatagccatgttgagggcagggtttaggggctggtaattgaaggaatataaggaaaaatgcaagaagaaagggaagaaaaaaaaaacaaagtcgagacaccaccgaatcgaaccgtggatcattttctacatcctttctctggctagtcttgtaccctgtgcgacagtcggttagtttttcttaagattttgatgtaatttatgtacccttatgggtcctctatgatattatgtgcgcatttatcttctctaattattcgtaaggcttaattctagtagatcactaatgtcatgaaaattggtttttttagtgagactagaaggtgataaacacaacaaaaatgagaacaaaaatccattcacaacttaacttctttttatcaaatattacct

SEQ ID NO: 2943 - DNA, 507 bp, Glycine max
tggttactctacttctccattcagtttgcaccttctcatattgtgaaagcttgcctaaaatttcttctttttcattccttgatacatctgctctgtgatctgcttcctggtaatagcaataaccattcaatctacagcttactaaatcacgaatgccaagaagttgatttcttatccttattagaccaacatacttgagcaaaaatttcgggaacaatgtgagataagatcaaatgaataaagattttgagtaatgaaattttttcttttaacttttttgcattccaaaaattctccaagttatcaaattaactgttttcctaaaagctacttctgcaacaccactaagggattaattctacctagtttctacattgtaccaacgacattttgccacacaagttgatgacactaatagagttagccgtcattgaaatattttactaatctaacaacttagatgactaattaggaataaatattaatgaaactacaaatttgaaaact

SEQ ID NO: 2944 - DNA, 408 bp, Glycine max
ttggagtttccaagtgccaaatcgtcttcttcttttgtccagtcttcttctggcttcaattcattagtgggctttccttctgtgtccagcatcttgggatgttcccagcctttgatgacagctttccaggttctgctatccagtgatttgaggaaggccaccatccttgctttccagtattcatagctggttccatccacaatgggtggtctgttcactggtccttcttctttctccatgttcatcacaatttatctccctagatctcactcagtgaattagagtgcccgctctgataccaattgaaattctgatactgaggccagatgtcgtaccggatgtcacgacatcacgcttcagaacatgcagattatatttgactgtctgacagattaaacaagttaataa

SEQ ID NO: 2945 - DNA, 635 bp, Glycine max
cgcccgaatatacgatgcatcacactcaatagccgatgagttgctattatcaacgggtccatgcaagcatgtatacgtaacccgtacaattataaagaggtccatgccattcatgttcattactaacgagtcataacatagattcactggttaaaggaaggaggggaaaggaaagatcatgcgattgaatcattccactaacaaaaactaacaaactaaaacaactaatatttgtccataaaaaaaatcatattcattactattatgccttctaatctctcctgtgtaacttggtcttaattattatgaaagatatctgatacatgtacaaggttgttgttttcttttgttacaatccatcattgttacggttatgccgatgaacactgccctgaacctaactgctgagtgttagaattcttggctcttgccaaaaagaatcacttatagctctagtatcaactatgtaatccccacattgcataattatgagagatatcataatttctttgcttaattgaagccaaagatcaacgttattaatatggaagcatgacatcatttattttctaaaaaataggtacaggtaggatttgttttcaaaaatccttttttataaaaacaaaatgacaaaa

SEQ ID NO: 2946 - DNA, 381 bp, Glycine max
tagatgcagttttctaggtgttttgggtgttattctccaatcataatttgtgttttacctagtaatgcatgtagtaaagtatgtattatagattagtataagctattcgaggtgaaactccaattttgattatctgtatttaagcttaatccaagttgaaaatgggtaaggacattgaaatgttaccaaaatgcttcttactaaaatataaataaaactttcatgatatcactaaaaataacctaaactttgaacaaaaaagttgagatagaaattagaccagattctcatacccggctcaaatccttctcagtatcaacaaccatattgtgagttctggttatctgctcaccctgctggtgcaacatgtcaaggggcctt

SEQ ID NO: 2947 - DNA, 548 bp, Glycine max
  unsure at all n locations
ttacagcagattntagtaatgacccactaacctagaattaaaataacttaatgccattaacctagggaattaaaaaaacttaatggctagtgtaactgaaattgtggcaaccaaaagtcacccccaacagccaacaagtcagccaccatttggtctcccaaaaggctgatgcctaggttgccaattgggcccttattacaacttgaactaaacctaactaaagcccttttagttgattaacccaaaacatatttttggtcagccaactttacaaggattgggccattatttagacaaactaaacactctaaaattgaaacaaagtggtgtcatttagtcctcctccatttgggccatgatacaactcacaaccttggactttttctcttgaaacttgggcttgtattcaaacagtatggacaacacttgttgaagagcttccttgngctttcttgctctagccctcgtcataagtcctccaagtccttcaagtggatcctttgccttgctcttggtcatgtcctcatcattccgtaaaaaaatattat

SEQ ID NO: 2948 - DNA, 393 bp, Glycine max
ttctccgtgaggtacgtacgtcaaaattcgtgtatgctaagatttgttgggagtggtttgacccgaattgggagtggcatcggataataaaaaaaaggtttttgtttgccaatgtacaggctccgctgacgtgcgtgtgctgctggggtctcttcatcaaggtaacactaacttctatacttcatttgacctattttattttttttgggtagcaataagtaatgttgcttgattttagtaaggtgttattctgtttgcactataacagagaatcaaccatgatttctgtagatggatccacagggttcgtgaaaatgcctgcaaatgctttaacattttactgtccaacagagggggcttcactattggttgtttaacataattttttgcttc

SEQ ID NO: 2949 - DNA, 622 bp, Glycine max
ttacctattttgtaggcttttgtggataagtaatattattgtattcctgacaaattatttttacaacttcaaactgtaattttgcacatctaaataaatcagattaattaactctgtacattccttagttgtattacggctatataagttttaatttaactaggtgtttgataccaaatgccacctttttatggtaacatgctaacccaccagttccataaagaaaccccaagtactgactcaaaatggaaagtattaaaaaacttaaaatgggcattctgggaacgatgcaaaggtaagagctgtcagggacttaagaattatagctcaattcttgaattcttggttagattatcttcatgtcctattatggttgtcaagttttgacgcagatctttcccgtgacacaatcacactttcaatttctgcctattctttctggactggcaacaacgatacaaagctgcttctttttattttcggagatttttaatattcgaagccggtaaactcaaattcttcaacttatctaactagatcaacttatagtggtataggttacatttcctattacaattatggacaattttgtacccaaattattggtttagaattatttttt

SEQ ID NO: 2950 - DNA, 519 bp, Glycine max
tgtctcagcgtttatgcgagacagagaccaacatgttagctatcatcgccaagtaccaagaagagttaggtctagccaccgcccacgagcatagaatcgcggatgagtatgcccaagtgtatgcggaaaaagaggctagacgaagggtgatccactctttacaccaagaggcaaccatgtggatggatcggtttgctcttaccttgaacgggagtcaagaactttcccgattgttagccaaggccaaagagatggcagacacctactccgcccccgaagagattcatgggcttctcggctattgtcagcatatgatagacttaatggcccacataattagaaatcgttaggaaacttgtatggtctctcagaccctgactagatacgacttcctttttgaaataaaatgaagtggtcccatgttttactccaaaaaaacttgtgccaatcaaatcactcctacatttcatctctagcatgcatttttttttctttaccactcctcacgtttggttttta

SEQ ID NO: 2951 - DNA, 512 bp, Glycine max
  unsure at all n locations
tgattntgtgagttgattttaaccttagtttctatttatttattagtcaattcaattgagaaagaaaaatcccacagagaaacgtccgattgatttttttgttttattttactaaaagatatttttgattattatattattattttacctcttttttgggttccaacgtggttacggcatgaccgaacggtcggatttcattttaacagaaattaacaaatgttacaattcaaatgatcggtggaaaattattttattttttgattaggcgagaaaatgacttaaataaatgactaaagcacgtcaaaagggggtacagaaattaaatgaaatgaaaataaaagtacgcgaaacaagtggggaccaccaagggtacatagaatgaattgagaagttcaatttcgggaaatttaccactttgaagacccgaagaacgacgaataacgaatgatagactgtggaaaatcttcacgacatcaaccacggaaatgtttctgacgcgttacggaagc

SEQ ID NO: 2952 - DNA, 573 bp, Glycine max
tctttgagaaaacttccttgagaagctagagcttagctacacacacccctctcataactaagctcacctccttgagaagcttccttaagaagattccttaagaagctagagcttaactacacatacctctataatagctaagctcacctccttgagatgagaagctagagcttagctacacaccccctataatagctaagctcacccccatgacaaaaaacatgaaaataacaaaaaaaagtccttattacaaagacaactcaaaatgccccgaaatacaaggctaaaaccctatactactagaatggccaaaatacaaggcctagacgaaggaataacctattctaatatttacaaagataagcgggctcatacttagcccatgggctcgaaatctaccctaaggctcatgagaaccctagggcctcttcttggatctctagcccaatctacttggagtcttttagccaatgcccttgcggggtaggattgcgtcaaccctcacgactttatctgcgtagggacattgtgtatcatgccgccaacatgatacacctttactaaggccaccaa

SEQ ID NO: 2953 - DNA, 555 bp, Glycine max
  unsure at all n locations
tatcaaaacccagggcaaacatgtccccgatccaaggctcaacatacccaaggttcacgcttagtgagccctccttatagttaaagttctatctccccatgaactaaaggtacacaaggtctgccaatgatgatattttctattcctaatttttatctgtgtaggaatacaagcctgtcaaaaacccaaggtccaccattggtacgcactcctacaaaacccaaggcttctcttttgtccactcactcgcagcaactacgatgaccatcgtcaacggtccaagttcaacaaaacagactaccacagtactatttggcaagaccttcaatcaagtggaagtcatgccaactccttataaccatcaaaggagaagcttcacgggtcanaatgacccatcaccaaattgagtggcaagacctccaattagatgcagcttgtacatactcntcataaccatcaaaggaggaactcaacacgtcaagcgacctaccccaagactggttgacaaaacctttaatcaaaggcaagtcacacatactcctataagcatcaggg

SEQ ID NO: 2954 - DNA, 453 bp, Glycine max
ttgaggatttggtcttcaccaatgaaaggatcgatgtgggtcctaaaagaggcaaatttgatcatcctactaggacgactgagaaaactggggcaaataaaaagggtgagaaagagggagaaacccatgctgtgactgccattcctatacagccaagtttcccaccaacccaacaatgtcattactcagccaataaccaaccctctccttacccaccacctagttatccacaatggccatccctaaatcaaccacaaggtctgtctaccgcactttcaatgacgaagaccacctttagcacaaaccaaaaaaacaccaacataaaggaattttgcagcaaaaagcctgtatggttcaccccaaattccgtggcatatgctaaacttgatcccatatccactcaataattcaatggtagtcataaccccaaccaaggttcctcaacctccattt

SEQ ID NO: 2955 - DNA, 960 bp, Glycine max
  unsure at all n locations
tcctcgatcgttaaatcagaccaaaccatctaaaattngttaattccctcaataattataattcacacacnnncacagancacgatggatctggactagcgacactaanaaantaaatacttgtagtcctactcttatcataactacccgctcagtgcatttttttctctgtaacaaacattacgcctggcctttaaaactagatccctactaaagagctcccggctagaggacatataaataaagcgaccggtccccaaccatgatttacgaacgcgacccaaaaaatcaccatcacaaaatgatgctatttctcgataatcttttttcttaacaaaaggacacggcatcacggcgtccagaaacactcttccatcttataagtgtgtttccaaaaaaaaaccccgcctaaaaatagggcgactctacgatgcaccggggcttacaaacactccctcacaaaaatactaccctttgaatacgcgggccaccacaaaccgtctatatacgaccaacatacgtcttgatacctccaatacaaaaagaattctcatcggccttcttctaatcacaaacaactggcgaaaggccaaccatatcccattatgagcagttgactaaccccgtacaaacgatatcaacaaaatatgcaatcgttgctgcgaacagaaccctactcttgttcaccactttaaatacccatcccctcacattccacacaacttcaaaataccagaatcgacacccccactcaactcattcactgcttgtaaaacaaacggcccaaatgcatctcggtccaaatacggacgtctccgtacgaagaatttgcttcactctattccacaacgggacaccgcgctccagaaacagtgtggctctacactaccacacggcacacagatatgcgcatgcaacattctcaagcgcatactttagggagacactttccgtcctccc

SEQ ID NO: 2956 - DNA, 412 bp, Glycine max
ttcttttggatttgattggaatttctgacttgaaagaattccttggttgctttgacacacaacactcaacacacaattgttttggtatctcaatttggggaagaccatgagccattttcttacttttcaaattacttaaactcctgaaatttaaatgaccaaacctgtgatgctacatccagctttcatcacttatagaagcagccaagcattgaaattctgcagtctgaattccaatcttgaatgctctatttcttgacaaaggggcctctataatcaacctcctatttctatcaaatatctttatttgattggcctccatctgcattgagtagcccttttctagcaactgtctcaaactcagcaaattattcttcatattgggaacatatagcacatcattgataaatga

SEQ ID NO: 2957 - DNA, 177 bp, Glycine max
cggttatagcatcttcttgcgtatccgcttctggtatttccattttctttataaaaaaatcaacttcatatggcgcggattcatgctctgcacatacacggatttggttgaattcaataactgaacacttccggtgatcacgacttgaacgaccattaaatagatctcaatgtcttg

SEQ ID NO: 2958 - DNA, 462 bp, Glycine max
tggacttcctgtgttttgggaacctctccttcctcaagtgtacccaaacctcatcacctggttcaagcatgactttctttctgcttttgttggcttgccttgcatagctcgcatttttcttttcaatttgggccttcacttgctcatgcaacttcttcacatactcagctttagcctgtgcatccttatgcttaaacatagcaatgttaggcataggcaaccaatcaagaggagtcaaaggattaaatccatacactatctcaaatggtgaacaattagttgtgctatggacagcccgattataagcaaactcaacatgaggcaaacaggcttcccaagatttaagatttttctttaaaacagtcctaagcagcgtgcctaaagtcctattgactacctcagcttgaccatcaccttgtgggtgacaagtagtagaaaacaacaatttagtactaatcttac

SEQ ID NO: 2959 - DNA, 459 bp, Glycine max
tatgcttgatttgcctcccgcaacacatgaacacactggacatgaccctggaacttatggattgcatggatgcttctaaccagattataacaagggtacaagggtgaagaaagcaacaaccattattcactaaatttgtaccaacttgggaatcaaaataaattttgatccgtctatgtcttctatcccaaaccatttgaagaacaagcaaatatggcccattactctgctgccagattcgtacatataccaagctttgccgcaaatccacaaataaagcacttattagtgtgtttgttgacgtttaaactgttttcctttaaaaaaaagtaattttctgttttaatttgagaaaaaaaaatatctgcttattaaataaaacattttttaagaagtatttttttaaaattacttattttaagtttaaacaaattaattcaaaaacttcagaatcatcac

SEQ ID NO: 2960 - DNA, 541 bp, Glycine max
tgaacataattaaaaaatatcaatgaaaactcacaacttcaagtgagattatacaaacttctaaagtctctctcagcttgaagctcaaggactttaacacgtacctgctagttgtatttgcctgtagtgttttaatacacgttttaatacatggtttagacatatacatgtatatataaaaagtagtaacaatgtgctttacctggacttgatataatgaaacagcttccacaagaacaccaatggacaaaccaacttcaactacaacaaagtaattcagcttcacttggagttcatataatgagtaatggcattagaagaagtaaaagccaaaccaacttcaagtacaacaaactaattcagctttttctcaaccaaactatgtcaaaatacttgttggctattaaaagtgttagttactcatgtgacaatcatagtattctagtttctattcatcattaaaattcacaaagcacatatagtgttctcatagcaataccacacagagacaggggtgtagatagcagccacaagcccacta

SEQ ID NO: 2961 - DNA, 574 bp, Glycine max
tagcgcaacagccgtgctaagcgcacttccaagaattcaaaaatattaaaagattggcacttagcgcttcctgccccactaagcccagctcaaaagctcaaattacagaatggatctggggcttagctcaggatagcgcccttagcgctgctacaatcaaatttttccagagaagaagtggcgcttagcgcatcatccacgctaagcccactgattaagattcaattacattgaagatattgggcttagcgcagtgatatgcgcttagttgaactattcagccaaccaatcaggggtctctgcgcttagcgcgagcaagctcgggctgagcgggtgaagaatgagcgcttatcggatagacaattgcaaaaattttctaagtctctttttgtctatctcttcacacaagcttacaaccccttgttcattactaaacaagatgataattaatcacaatcacaagcaaggtattctaactacatgcaagagataagaatgaaaaatagaaaagggaaagaaaagtcgggttggcttccagtaagcgcttttttaacgtcactagcttgacacgtca

SEQ ID NO: 2962 - DNA, 341 bp, Glycine max
cgccaaaaccgatgaaagggacgacttgggccaataagatggcgtttttcacccggcgattaccttttttttatgagggtgatttaatcatgacattcacgtactgcccattataatcggaacgcccttaacctgtaaatttttataattattataaacccatagggttcgctctccttacctgtttgatcaccggaaaggcacctgaagggcaactgattgtcgtccatatccaactgtggcggcggtcgattaccactcgtaaataacactactgcccggcggtccctgtaatttcatgctcacggcaaacatgagggattgtgaatactacacaatct

SEQ ID NO: 2963 - DNA, 465 bp, Glycine max
tgtataaaacctctgcctaaaagggaaaataaaaatgattttttttcttgacaggtgaccatgactaaatttaagaaataaaatatgggacagggtctaaagagaatgccaaaatttttgggctcattgcaaacctgataagtatttgtttgaaagaaagagttggctgatatttggaatgtaagccctcttaaggtctctgtaatgctagatttcccatacaaagtgtattcttcctccccaacagatgtgttgccaacagaagtatttacattattaatgacacttacctatcattcatgcaaagaagaaacttcaatggtattaaaatcaatatgtgcatacagtttggaaagttaaggaagaagcacatttataagaaaaaaaagtaattaaaaaacttaagtaccaaccacttcaggaaatacggaaactttatcaactaggaacttcaacagctctggc

SEQ ID NO: 2964 - DNA, 217 bp, Glycine max
tatactgcaaacatctacaataaaccttctcaacctcagcagcttaatcaaccactacagaacaaatatgaccttttcagcaacaagtacaattctaggtggaggaatcattcaaaccttatatggtcgaatcccttccaacaacgacaacaacaacaaccaccttatttttataaagttgctggcccaagcaaaacatattttcctccaccaatcc

SEQ ID NO: 2965 - DNA, 582 bp, Glycine max
  unsure at all n locations
tgcttttggctgatccattcggtctataccaagtgaactttctctacctccaaatcttcaatccactcattaaactcctttatgctattatccgcctctcctcgttgacatctgccaatcctttttgaagggtttctgacattgttgaaatcccccaaaatgcaccataatccttcattatgagaatttttcaactgctttatgttctcccatagacttctcttgctctgaacatcacaaggtgaataaatgtttgcaatatgcacctgttgagcctccttaagcccttgacctaacaataaaatgaagccactgcctatgactttactgtgcactttgcaatcttctgcattccataaacacaataacccgcctgatgtgtttactgcgggctgcaattcccaccctacctccgaagtccctcacaaagtatggcacacactcatgtcaatgttttctggtttagtctcttgaatacaccaacanatcgattttttcttttcggacccattctctaaatgcagcccattttacacccctccctaagacccttacattgtaggaaataatattcatgggttt

SEQ ID NO: 2966 - DNA, 348 bp, Glycine max
aatttaaattgatgtttgtatttatgggaggtttgtttatgccctttttgctttaagagtgacgccccactggtaaaactaactttccaaatgcttgccttctcaggaatggaccccaagaaacttgcctcatagaggttcacgaaggacaatgcggccgaaggaactagtttcgccccggagtacgacagtcaccgctttatgagcgttgtacaccagcagcgcttttaagccatcaagggatggtcgcttctccgggagcgacgcgtccagctcatggacgacgagtatactgatttccaagaagaaatagggcgcccgcggtgggcaccactggttactcccatg

SEQ ID NO: 2967 - DNA, 530 bp, Glycine max
tttcttcacccttattgcagttctacatcatccgcaccaccttaaccctaaaaaccaacataaaacacatcaaaaccttgaaatagtacacctttatgaaacttctaaaagtgcctatggaagaaaacaaaaatggaggatgagaggggaaaaaaaagggtttcttacctctaaaatcaatccagattcgaaaaatcctttgtgctaaggtttcaagtcactaaaaactaagtgtatgactcttcctcttttttctatgcgcaccgcatagcttcctaagctcacttactccattctatatcactcaaggcccattcatcttagcccaaacattctaaaacagactattcacacccaaacaaggtttttcgcatttgtaaacataacatacatacaagtaccacacattgtcatctcataattaattaattaattaattacaggaacttaattaaagttaattactcttgcaatctaattaaatcacttaatcaaacattacgaagaaacacaatgttacatttatccta

SEQ ID NO: 2968 - DNA, 503 bp, Glycine max
tgtatagttccccaatttatggttattttgtagtgatttttgtatataaatcttattttatggttaatgttgtctctagaacatttccattggatttaatgatgaaatctgtgcattttcaggtgaaaaagaagctaagttttgaattgcaaaatgtagcagtggggctaagatcagcagttgggctaagcgcatatccaccgctaagcgcagattcagcgcgcttagtgcaaaggagaatctggcagagcatcagcatcaaaggagaatctcccttgcatttgttttcgtcatcttcgccacgggaagccggaaggtctgcatagttttcttaattgcatgcattggacaccatggtaatgactgtaaatgagccatgatacccaatgcattgtgggtaagagagggtggtcttctgggctcttgtgtccatagataaacgtgttttgcatgcatagcataaacattccctgatgcattcatcataccttcttttatgatag

SEQ ID NO: 2969 - DNA, 523 bp, Glycine max
  unsure at all n locations
tcttatccaggtaattcttggtggtgaagctccttctgccttggcttattccctaatggatggngcctcctctctcctcttctcctttgccttctgctgcatctccatggtgtaaaatcaccattaaaagacctcattgaagctcaaagatccaccctccatataagccccacaagcaagcttccatcaccggagctctgataccaaatgatatgaaccctcatggcacaagggctgacttatgagcgtctaggatggaaaatgcggaaattgattaaggaaaggatggaaaataaggtggttaatttcgtgggtcttaataaggtggttcttggcataaaatggatgaatgggatgcgtaaatgtatgttaagtggtggctggacagaaatatagaaatggcaataactgaagctacagggcttcaaatgaggtgattttaacacgcggtgaaaggtctcgttttgaaattcaatttacgcttaagaatcacttaatttgagtgcgtaaaatgggagatatg

SEQ ID NO: 2970 - DNA, 445 bp, Glycine max
ttccgccagacttacggaaagatcttagagttgaccatagcagaggtgttcatagaagccattgcagcacttacccaatactacgaccagcccttgagatgcttcacattcggggacttccaattagtaccaaccattgtagaatttgaggaaattctaggatgtcctctcgggggaaggaaaccatatctttcctccgggtgtctcccctctttgagcagaaatgccactgtggtcaaggattcaaccacaggtttggaccgcataaaacagactcggaacggcatagcgggcctgccacagaagtacctagaaaacaaggcgaggggtatggccaatcaaagagactgggtccccgttatggatgtgttagctttgctaatttttggggggcggctcttttcaaacgtggatggtttgatagacctagcagcaatcgacgctt

SEQ ID NO: 2971 - DNA, 461 bp, Glycine max
agcttctttcggaccttgaacaagcaactaactcctctttcagaaccatgctatgtgctcgcgactggtccctctcttcccttcgcagcttgagttcactattgctaccccatagagctccgcgaaatttattccggccatactcttccttgcgagccctcttggtctcttattcaagggctctcgcggtaattgcattctcttcccgtaacccggcacactccttccgaatgtgtgtagcggccaacttgaacttctccttggcaagtttcgcctttcctaactcgcttttgagagcttggacttcttcgtcctcttccggtgcttcaaaactcttttcgctgacgacttttaacttggcgagccaatctaaacctcgtatatgaactttcagccattcgtggtacccaccaatgatgccattacgaatgcccctaagctcttgatcttttcttaacggg

SEQ ID NO: 2972 - DNA, 517 bp, Glycine max
tataagaacaaaattgcctcaatcatttccaaatatgcatgtgaatttggacgcatcaacaagaatcaagccaaggctattgtgcaagcaatcaatggggcaaaacacaccaaatgattatgatgatggatggctcaaattctcacaaaggtaaaatcatcactttcaaattgagctttcaaaactatcatgacatgtagagaagaatcaaggatttcaagtcacaaaatgtcaagaacttttattttcaaaacaattacccatttcttgaacatatcctataattcaaagaaaaacatgcaaagtcgtacgtgcacacaaaattgacccaaaatattaaactaaaaatccgacgaaactaacaacattaacaaattaacacaactaacaaattaacaaaaccaacaaaactagcaaaatcaaagaacactcccccccccccccatacttaaacaacacattgtcctcaatgtagcacaattaaaagattaaaaagaattaaatcattcaagagaat

SEQ ID NO: 2973 - DNA, 434 bp, Glycine max
tgcctcaaagaggtccaggaaagacaaggcggccgaaggaactagtttcgccccggagtacgacagtcaccgctttaggagcgttgtacaccagcagcgtttcgaagccatcaagggatggtcgtttctccgagagcgacgcgtccagctcagggaggacgagtatactgatttccaggaggaaatagggcgccggcggtgggcaccactggttacacccatggccaagtttgatccagaaatagtccttgagttttacgccaatgcttggccaacggaggaaggcgtgcgtgacatgagatcctgggttaggggtcagtggatcccgttcgatgccgacgctatcagccagctcctgggatatccgatggtattggaagagggccaggaatgcgagtatggccagaggaggaaccggtctgatgggttcgatg

SEQ ID NO: 2974 - DNA, 782 bp, Glycine max
  unsure at all n locations
tgaatctccattggagttgtcggttgtagccactccataaccgactcaaacttgttcggatccaccgcaaccccgtccttagaaatcacgtgccccaagaactgcactttctccaaccaaaagtcacatttcgacaatttggcgaacaacttcctatccctcaggatatgcaacacaatcctcaagtgcttctcatgctcctccttattccttgaatacactaggatatcatcaatgaacacaaccacgaactgatccaagtaatcatggaatatacggttcatataatccatgaaaatagccggagcattagtcactccaaatggcatgactaagtactcgtagtgcccataccgagtccgaaacgtagtttttgggatatcttccttcttaactcgaattngatgataccccgatcgcagatcgatctttgaaaataccgttgctcccctcaattggtcaatcaaatcatctatccttggtagaggatatttgttcttgatagtgaccctgtttagcttgccgtagtctacacacactctcatactttcatgctttcttttaaccaacaagaccggtgctcccatggtgatgcgcttggacgaaacaatggttgctcaaaaggtctgcacttgtgctttacctttgtagtcttaccgagacatctatatgtgcgatcacactggatccccccggccccaagcataagggattccctctctttcagggggattacaaaatattccgaaaactctggaatttggcccaccggtaataaaaat

SEQ ID NO: 2975 - DNA, 578 bp, Glycine max
  unsure at all n locations
cataactacgtgtaagctttaggcaaattcacaagataaattctagaaaaagcattacttaactcgcgacggaaagcataaaaacataaaattaaagagcaaagtttagaaatactaggttgcctcctaggagcgcttctttaatgtctttatccagacgtggggttgtggttggggcttcgccgtctcatcctccctaccttctttccttgatcgtgagcaactctgatcatggacctagcacctgttggcacctgccctaatgctttgacaaagaaagtgttaacatgcaaatgtgaagaaatactacaggatgctcatgtagggttgtggntttctctttttcgttgtcattttcaattttacttaacgcttactgcaccctgctgaacatgccgaatggctccggaatatctgtcgtgagagtgagcaaaaacgagagtgtacgttcatgcccaacgacgatataagtacanaggaacaacactagaaggagagatgcacaatattacatcatatttattaatggtgagaatattggttacaaaaaaaacttacgacgtggagattctaatgag

SEQ ID NO: 2976 - DNA, 540 bp, Glycine max
  unsure at all n locations
acctttccaacatttggtccatgaatggcagatgaaaatgacatcattcaacttgcggtagtcaataaaaattcgccacccagtgattgtccgtgtaggaataagatcattcttatcattacagatcatcttcatatcgcctttctttggcaccacctggaccaaactcacccaagtgctatcagagttggataaattagtcttgcttcaagcaacttgaggacttttttgcacacctcctccttcatagatggntgagtctcctctatggatgtctatccagtctgaattcaccttccatcattatgctatgcatgaaataggatggactaatccccttaagatcaaatatgtgtcatcctattgttgtcttgtgcttcttaagaacctccaccaatagtgcttcctcaattgaagacaacgtattattgataaccactagtttaacatcatctgcttcctgggagacatacttaaggtgaggaggtagaacccttaactcaaccttaagtttttctgtaagagtgcctttttttagct

SEQ ID NO: 2977 - DNA, 452 bp, Glycine max
ttttatcgttttttaagccggtatctcgcctaataattgataaaatgaatttcaaccgatcatttgtggtggaatctcggttaatcactattaaaataaaatccaactgatcgttcacgctgtaacttcgggtaaataaaaaaaagcagaataatcataaaataatcagaatatttagaaaaaaataataataaaataatcagactaataaatcggacgcttttcttagaaagtttccttaaatgaattgactaataatcaaagtgaaactaaggctaaaatcaactcacaaaccaagttttgtgcgcaaaagtcactccaaaccgttttaaggtccaacaccttaaaacggctctctttgcttttattggttaaaatggaccattcaaagcataaaattaacacataactttctcacttttgcaagaatacgtacgtctgatttcctcatc

SEQ ID NO: 2978 - DNA, 441 bp, Glycine max
tgtagggttcaccccaaattccgtcgtcatatgctaaacttgatcccatatctacttgataattcaatggtaggcataaccctaaccaaggttcatcaacctccatttctgcgagaatacgactcgaacacaaggtgtgcttgtcacgaagaagccccggggcgttccattgagcattgtatggctctgaagtgtacggtgcgaggtctaattgatgctggctgaaatttgaggagaatcgtgtgtaaatcctgacattgacaagagatgccacacatggggcaattttgaaagctgttgttagatgtctctaatgactcaccaggattttcaactttcaccggaatgtgggtgtaagccattggtctgtttgctcaagcaacctgcgctcctgagtgttgacttccaagaccgttcaatcagagattactcatcttgcac

SEQ ID NO: 2979 - DNA, 493 bp, Glycine max
tctacttatgtggcagggcgggtttccttcactttcttgtttccaacgcgagctctgaccactgttcttccttcccgcgatgcttcttttcatgtccgcctgagtgggcttatatcctaaaccatactcccccctaacctctcgacgagagccgtcgaaggcccgacccaccattgaacttggttttaaatgggaagcattgaatggtaacttgtccaaagtgctcttatgcatcacgtttaaactggaaccattatcgatgaacaccttgggcacgatatgggccatacacttgactgatacgtgtaaagacatattatgccctctcccctcggcggggatttcttcttcggcgaaggcaaaaataaatgatggccgtgatattgttgaccactcctccgaaaccttctaccgaaatatattgggccacgtgagcctcgttcaccattgttactagcagagcccgatgagggctcgagcttataagtaactc

SEQ ID NO: 2980 - DNA, 478 bp, Glycine max
  unsure at all n locations
cccttcatgatgaatcaagattgattcaaagatgttttgatgataacaaaggggatgaaaaaaagctcaaaggtcaattcatgataatcaaagaatgagttcaagatgttcaaagatgtttaagatgatcaagatgatcaagattgaataaaaaacacttcaagaatcaagaatcaagattcaaggttcaagcttccaagaatcaatatcaagattcaagactcaatattcaagaatcaagagaagacttaaatgagataagtatgaaaaggttttttcaaaaacttagtagcacatggatgttttctcaaaaaatgtttaccaaagagtttttactctctggtaatcgattactagaatattgtaatcgattaccagtagcaaaaaatgattttgaaaaagttttcacatgaatttacaacgttccaattgatttcaaaaagttgtaatcgattacaatgttntggtaatcgattac

SEQ ID NO: 2981 - DNA, 334 bp, Glycine max
ttgctatccaacaatgttgcttcatgctttaggatttctatacattggttctctgataaataccttgtgttgtcttcaggagctcatataaagagtgtatgcacacaagccggtatgtatgctatccgtgcccggaggaagactgtaacaaacacagacttgctttatgcaccaaataaagtcatctaaggataccagaacatcactgcaactcccaagtatatggtctacaactgaggtattttttcatctttttccgagaccatagcagctttatctttattttcccctggaaattgaagggcatgcgattctatctaattaactctctgtt

SEQ ID NO: 2982 - DNA, 620 bp, Glycine max
  unsure at all n locations
tcttatccaaggctcatcttggtggtgaagctccttcttccatggcttattccttagtggatggcgcctcctctcacctcttctcctttgtcttctgttgcatctccatggtggaaaatcaccattaaaggacctcattgaagctcaaagatccagcctccatagaagccccacaagcaagcttccatcagagaccctcgaaggcaatacgaggtgtcgattccgtggcacgatccgactcacggctacttcgttggtacatccaaaggaaccagcacgcacgcttcagtgcactgtggagtggatcttacctacacctactccatatctactagtggagccagtccaagtgattgaggtgacgtcatctaaggaagaccctgaggaggacccagaggagctacctcctgagcctgctgtggatgctcttgactttctagagggtgatgaggacccactccctgaggtggattctcccgaggacgtcatgtcggcatctgaggcagactctaccgaggagagcggtcctcgagggatagcgactagcgaanggtcttattatagcagacggctccttagactaggattatatactttttgggggtgggtgtatctggtac

SEQ ID NO: 2983 - DNA, 563 bp, Glycine max
tgtaggattatggggtacccatcacatgtggtactaggtggcggtcgggcgatggtgcacaacaagttttccacatccacaatgcgcgcataaacccaccatcccctgttgcccacctccatctgagctcacgtactcccacgtagctcatatcctcgtttctctcaacaccgggtccccatcaatcctcccaagcttccacaacatccaagcgaaacaacattcaaacagcacaagctatcacaaccaagcaaaacagagcaaaggcagaaaactctgccaaaacaccaaccaaatcacagcttttctcacttaaagaccccagtaacaattccttcgatccaattcgttaaccgttggatcgactccaaaattttactggaagtctatagtgcataagcctacattttgaccgttgggatctactagcgaacatccagaactcattctacattactctttccacaaccagcaaatacacggatttttctgcacttgtgcaaaattctgctgcacaattttacagcaaaatctgcacaaagagcatatttcgaaaaccacac

SEQ ID NO: 2984 - DNA, 549 bp, Glycine max
  unsure at all n locations
ctagtcggatcgtaggagtatntagtgttgtaatggtttttgctttaagtagcaagtttgttcggcttttcacaggcattttttttttaatttagataacagaatttccaacccaaaaaaattgaagcttgtgaagatatgtcaatatctcgttacaaagtcaaaatcttaattatgatgattaaaaaaacatttataaacaaaaaagattaagaaaaaagtgggtatatttactcttacatagtagtcattatttatattctcttttttaatatatgcatttcacatataagtaaaaaaaaaatctctttcaatgatctcaaactatcctcctttatcaagggatttaactcatatgattgagtagtatgtataattaagttgttataaactctttgacgtcaagagttcgactctctcatttgaaaaaaattaatctctttttactttttatttgatcttcttaacccttgcctcattcaatnttttttcataaattgtataanagaatatataagataaattggtttaaagataataaaagaaata

SEQ ID NO: 2985 - DNA, 580 bp, Glycine max
  unsure at all n locations
tggttcaaggcaaatttgtaccaaatttggggtagttatatgtcaaaacaaatttgtcccaaatttgggggagacactgggtaacgaaataaaatggtcaaaacaaagcagcatatacacactgttttcttaaaaaaaaaaagaactataagcataaataaaaatgtataaaagtgtgtgtgctgcaaatcaaatcaatgaaagctaagtgcctaataaaaggcaagtatagggtaggaatgaatagaaaaagtaaaggtttatctatggatgaatgctctcctagaatctaagatttttaatccaagaaaaaccattatttgttggcagcctaacctcattacaagcctagaaagtccttcagattcattntgtggggttatttctctatggtatgagatgatatgcaaaagttgggacttgtgttagttgtttataatggaatgagcctaaacagttgagcttgagtgaaacaatgactgcgagggcttggntgatgattctttccttgatatctgccattctcactagcttatttcagttgtgactctaatgcatatgttcctatctttgaaaagct

SEQ ID NO: 2986 - DNA, 448 bp, Glycine max
tttaattaataaaattaattagaaaaataaggattttttttacgtaaaggctatagatacaaagcttcacactaaaaaagaaacatctcaactacgttgacaaccctcctcctagagatcacaagcaaaggcgtacaatttatttctataaaaagaagaaatagataaccgacactacgaaaagaagttttgtatgatgtctattttaagatggttatcggaaagctatcctcgtttaagtagaggcggcattttcgtaaacaattataacttttgaaagacggtcattgcagaaccgtctttaaaacaacttttcaaagatggtttttgctaaaaccgtccttgaaattagatcctcatcgtcgattatacaaagaaaccattgtgagtggatctttattatctcgtggttacaagcactctcgcactccattcctttcctctcttc

SEQ ID NO: 2987 - DNA, 1116 bp, Glycine max
  unsure at all n locations
cgttcgttcgagtcttactctctttaacactatactgtatgttctgtacatcactcttgtcctntatagcccnncaccagcnatgtgatgattcatgcctattctccagtgancctatanaatacttcagcgttggaaatggaacaaccggaagcctctctgagaaaacttcaatttggtcatatactttatttacacaagacctttctatttcaggtcgcatatatatctatccagacagctccgaaaatctgaacaccggttagaggttccaagaaattccaaatgggtcatcgactctggcacaaccgacagtcccgatttaaggggccataaaatatccagtacgcttctaaattgaacaaccgcaagcgtctccgagagaaatccaaatggtcattaactatgtcaacacggaaggccccgtattcttggcgcataagtattatctgacaacgccttgtaaatttgaaccaaccggaaagcctctcgtagaaaatccaaaatgggccatgtactctgttacaacgggaagcgctgatttcacgccgactatatatatcatacaaagctttgagcatttgtacaacacgaacgctctctcagaatatttaatacggctcatatactttcgtcccacggatcgccccgataatggccgccttactcatcttgggacggctccgaaatgtagcatattctgagcgtttctctagagatattcaatagtgcgcgattctctttcatcaccgaaacgccgcatctcctggcctcctacaaatcttctcagatcgcctctcaaattgtcatcactgagaagtcgttctcggtaaatattatatatgcacaatcaactgttgctccacgaacgtctcgaatccgatgcaactcactctcattcacgacctcctctagacttgtaccactcactatctctcgctcacatcttcacaatctggaatataatcatggactcaccgctgatgccgtcgactacatgcagtctacgtatatactcgattcttcgtgacaatgtattcgatctaatatatcttcgtaacaacaccncagaattgctactgactcatctgagctagcgttacgctcgatcaacgt

SEQ ID NO: 2988 - DNA, 489 bp, Glycine max
taacacacactttcactctattgttcgtgcgaaaaagcggcatctccgcaatgatttacataacatttttctgaacaatagttctatttctgaccatttctttcgaattcaaacaattattgattctctctcgtccattggagaacgtgtgtctaaatctgatcatgttgacattgttcttgatggtttaccagatgagtttgagttgctgtcacttttgtgagtggcaagtttgagtgctgtctattgatgaagtcgcaactctcctattggctcatgagactcgaatcgcttgcaagaaatcacttgcctcatctggagcttccattaatctctctgaaggagcagaacctaattttagccaaattcggcgcaccaggattctcatcctcaagcctatgttgctcaaggttctagctcatcgccgcattttggcatgaactataataattacaatggtggaaataggtacattaaccctggcgctgg

SEQ ID NO: 2989 - DNA, 407 bp, Glycine max
tctacttatgtggcagggcgggcttccttcactttcttgtcttcaacgcgagctttgaccactgctcttccttcccgcgatgcttcttttcatatccgcctgagtgggcttataacctaaaccatacttcccaccatttcctttggcatttatcatgctagttatgccgccgttgtccttgcctaaacccattccgggttcgtaaccgttccctaacataactcgggccatcattactgctgcatcggacaggcaaggctgcccagagaaggagtccacggaggaaatgctgaccacctcaaaagactggaaagcggtttctaacgattcttctgcggcttccacataaggcatagaagatgggcagctcaccaagatgtctttctcgcctgacacgatgaccaagt

SEQ ID NO: 2990 - DNA, 567 bp, Glycine max
tcagctttttatcaagtgaaaattatgtaaaggttttatagacattattagtcaaatgtataaggaggaaatgtgtatgtatgtatatagtcaaatgccaattaatgaccgcaaatttaaactgtgtaagccgttccatctaaggaagaaggagaaatcatttgtattcatggagaaaactcaacggattttcttaacctccaagcctcttcgagaaggaaaaactgttttcttaaagctctatatataaggacgaagagatgttgaaactcattgctagaaaggaaattacgatataaatgatatagatcaagaaattgtattgcacatatatatcttaagcttttgattcttgtattttacgccaaactgtccaagactttggagagccaaatccacttagccttagagtgtcgataaagatatatcaagggagacttgttaatggtgtaacattgtggctttttcataatgtatgttaagtgtttaattaacaccacacgaggaattaaatttaaatttatattatttaatgaactacttaataaaatagagtatgttggtcat

SEQ ID NO: 2991 - DNA, 935 bp, Glycine max
  unsure at all n locations
gcttcaatcctgtggtcgattattactacaattntantttgctgtaaagtgattctatttcaactactgngtgattgttcattccacctctctctctccgggccgccttgatgcgtctttccgcgacctagagaaactcaagatagttggagtatgggggacccctcacaagaggtactatgaggcggtcttgccattgtgtcccacaagttatccacatcctcgatgcgcgcataaaaaccccctcccctgttgtccagacacatatgtgctgactcgctgacccattgagcatctgcttatatctataagctccgggttcacatcaatagcttctagctttctcaacctacaatcacttcatccttctaacaccgcatgctatcccagctaaataaagacgggcgaaggcgaaaaactatgcccctagaccaacctaatgacagcttttttttatttgggacgccagattgcaattctttaaatcctattgatgcaccgaggtgacgactgcaacatgctacagggggtaaatacaacaacatcttacattgaggcccgggggaactactatcctaaatgcagaacgcgtattagataactggttcctctaacaccatattcacgggtatattctgttcttgtgcaagattcagtgtgtccacgttaaatcgaaactgctcaaatagcatatgtagagaaccaccatattcctcacctaatattgtcctaacttagatgtacaagtgcgccctctggtattttgataggctttaacaagataaaggtgctcctcaggaaccctaagacaggggttttaatcccgagtccaaggggttcctcgtattaagagggttgatatgaagaaaaacttgcagcctttccctcgcccatcttttcttttttgcactgtcgcccggatttatactaaatcc

SEQ ID NO: 2992 - DNA, 1234 bp, Glycine max
  unsure at all n locations
ctacgtcatccgtactanagtccgatcttcgtcacnantctcnttcactctcnacactcanntatcactccgttctntatatcacanctactntantcgtngctcgcacaccnacntnacctcancncntatcntntcacggcncactgggagttgattgntcgtgnctactctcatcgcgnataccacgcngnaanacnctatannaaatatcttctcaccgttctaaacaatatagactattcggagaccgcgtcacngagtaatactattacattgctacatcgtatattcactgaccntactccgatgtcaaaacaacgtctacctagatantgctcttgcacagatcttgatctcaggaggacatagctactcagtctcctaatacaccgaagtcgcatacatgtatactaatctaacggcggaccctcaaatcaataccagtncgacacgattacaaaacgtctaatagtngcgccttagaaatcaattctacactatgcatacccgttgatcctcggttatcctagccgtaatatatgtacttaccaggagctttatctagacaacacccgtatataatccacctgtcgccccgaaaattgcttcagagactaacataaaccaaatgtcccgtcggctgacgtaattatacgccaccccattcagacataccgttcaaaaaagcttttcgaagatagacattaccttaaaagcattaatcatataacaacccgactgtctcaccactaatacggtacgtcacactcacgagcacagcgctacatttagtaggtgtgttgaacatgaacaacactctccgactttaattttcagctccgaccgtcaaaaacaatgaacttcttccgacgccactgcccaaaatatttctagacgtgcccaactttggttactgccctatatgcgtccatttcaccagtcgtttctataacatgaacgatgaactcacttctcgatacacttggtccaaatagagaatgcagcagttcttaaaatatgtgcgctgatgctccatctctaacagctttcgtagcaccctacaatataatattctcgacagcgtcgtatcaacaaatacaacacaagacaaacactctctctctctattcacttaagctgtctaataacgcggtttttctcccacatactgtcatcatagataataatcgcgctctcttcaccttacatctctgtctgcacactaaatacc

SEQ ID NO: 2993 - DNA, 482 bp, Glycine max
tgtaggattatggggtacccatcacatgtggtactaggtggcggtcgggcgatggtgcacaacaagttttccacatccacaatgcgcgcataaacccaccatcccctgttgcccaccttcatctgagctcacgtactcccacgtagcccatatactcgtttctctcaacaccgggtccccatcaatcctttcaagcttccacaacattcaagcaaaacaacattcaaacagcacaagctatcacagccaaacaaaacagggcaaaggcagaaaactctgccaaaacaccaaccaaatcacagcttttctcacttaaagaccccagtaacaattctttcgatccaattcgttaaccgttggatcgactccaaaattctactggaggtctatagtacattatcctacattgtgacccgtgggatctactagcaaacatccagaacgcattttacattactcttttcacaaccagcaaatacatg

SEQ ID NO: 2994 - DNA, 489 bp, Glycine max
tcttatccaggcaattcttggtggtgaagctccttcttcttggcttattccctagtggatggtgcctcccctctcctcttctcctttgccttccgctgcatctccatggggtaaaatcaccattgaaggacctcattgaagctcaaagatccagcctccatagaagcccctcaagcaagcttccatcaaaagcccttggcaacaagcctagctttgtacttgttgactgaaccattaggattctcctttactcttaacattgacttactccaataacatttctaaaggataggagataaaccagagaccaagtggattcttgattaaagttgcatattcagtttgcatggctgagcgctaagagggattattcaaagctactttagtagacttaggttcaagatgagcaaggagaacggtagggttaattctatgtttgacaattctagattttgcacgagtgcaaatgggatgggtatctgtgggtct

SEQ ID NO: 2995 - DNA, 625 bp, Glycine max
caaaattggataggaatgggataaaaataagttaaattaatagataatatagaaaataacaatacctcaaattcaaaggagagggtctgttcctacagcatcaacattgtcgtaagaagcaattagcaaactagtcaggtcatacttcatagtaacatatttcataaagctaaaagcatgcatggcaatatcaagaaattggcctacccagacatattatgcgaaaacccttttcttcccgtaataaccaagattaaattaaaaaaaaaaaaacgaaatagcttgattgttggattaatgacacgattttgatcttatgtttcataagctttcttaagacatccgtcctttcgagcataatcatatacaacgttttttcaacttcttatatgttggactcactcaggtgcatgctttctttaagaagttatatcaacagaagaactccgacatattgatttttaattttgaaggttaaaatatatttattttcccaatgaatttccttattatagctaaaaataaaataatacatacgtaatattgttcactaacttatttttataagaattgataagcctcttaaaaaatgataaatagaaaagaacgatttaaatgggctttg

SEQ ID NO: 2996 - DNA, 528 bp, Glycine max
tcgcgctccatcgaccgctaccagcaggaacttacccaccgggagctacaaaagcgtcttcgccagggtccgcttttcttttattctttctttcttttctttttttgggacattgggtttgattgagccattcattttctagggttttgaatttttttcgttgttggggtaatttgtgttatttgttgcttttggtttagttgcttatgttttggttgatttttcattttcctttgtagaacaggaagatgacaaggaccggaagccgcaacccggacaagcttcaagcacagatgctgttactgagggtatgttttttttttttttttaaattataatatgtagtgattcctgttatgggtcaacattggagtatgtagggttctattttgttgcatggtaatggtaggattaaatgggcaacaaaggtatggatgggttgaaacttgaaaagcaagcttcttgctagtagggattttagtgatattttgtgactgctccaagaaagggctattaaactgatctata

SEQ ID NO: 2997 - DNA, 507 bp, Glycine max
tgcatttttaatttcatctctaaatatcacagcaagtggaagaagaagatagggaaaagaaacttaaggccatggctatgtaaagcttgttctgcattctgagtcgtgggttggtggcgatgcatatagccgccgggaacatgcaatgattgagactggactcattacaatgttcagaaatggctcttcacggtacatctttttttaacttaatcactcggatcaggtaaccggtaaacaatctacaccgtttattataataataatatatccaacgctaactttttgtgattcaccggtgcccaaggattttaagacttcaccctagaatccacccgaagtttaagggatttcctacaagcatttcttatgaagaaatatatactttaaacaggaaatagaaaagtatgtgaatgtgcttttttaaaaaaaaaaaaataataaaaatttgtgacattagactacgttgactgttgacatataccgaagcaagatcgacataaaatc

SEQ ID NO: 2998 - DNA, 503 bp, Glycine max
tgtaccaatataagaaacatcttcttcgaccttggtgattcttgactccatctcattgaagcgcatgtccacttgtaattccaaagtattaaacctttcaccaacaaaggtttgaagaccatcgaacctatccaaaatcttttgatgaagagaggaatcttctccaccatgtccttcttcatcaacaggccgagcaccctttttcacctaagagccatcatgctctttttgataaccaaaggatgcaatgacagcagcacctattagaaaggatctcttgattggaacataaggttcagaatcaagagggacgttaaagtgttgaaggaagagggtgagtagatgtggatatggcaatggagcatttaatcacaatgccttatgcatgcgatatcggactaagtgtgcccaatcaatttgtcggcctttatgaaaagcccacataacaataagatcttcttcaaaaacctgtgcaaggtgtgaagatcttggaagcaagatac

SEQ ID NO: 2999 - DNA, 488 bp, Glycine max
tgaaagctcaaaagaagactcaaagtgtccttggctgcatactgcaatgaaaaagtcaacatgctcacaggatgaagagaaaaaattgaagccatgagaagtaataaaaaattaaaggacaagaagaatgttgcacacatgaagatttgcacaatgaacatgacatgaagaataatattgttgcaacagacttagagagtaatttcatcaacatgatgagttcattctaaacattgtatctagagttcaagaaattcaattgagttgttcttggtgtctatgtaaatcttgaagaaatatcttcaagtttcatgaacaagtcgtggtttgatactatctagatcatggataaaattaagcctgaagttctagatgctgtgttgcctgggcaacttaatatgtgtgcattaatttgaagattccttgagctattaaagtgcatttgagaggatctcaatggaagggaaacctatgataaatatttcatg

SEQ ID NO: 3000 - DNA, 430 bp, Glycine max
tgtttaccccatgttgaatttgcttacaatagagttgttcataatgccactaattgttctccttttgaagttgtttatggttttaacccactaactcctcttgatcttttgcctatgcctaatgtttctgtttttaagcataaagaaggtcaagcaaaggcggactatgtgaagaagcttcatgagagagtcaaagatcaaattgagaggaaaaataaaagctatgctaaacaagccaacaaagggagaaagaaggttgtcttctaacccggagattgggtttgggtgcacatgagaaaagaaaggtttccaggacaaataaaatctaagcttcaaccaaggggagatggaccatttcaagtgcttgaaagaatcaatgacaatgcttacaaagttgagctgcccggtgagtataatgttaattccacct

SEQ ID NO: 3001 - DNA, 547 bp, Glycine max
tgcgatttttttatagaaaattataagttagaactacatctttttattaataaatattttaataccatattaaacaattttaattattgaaaaaataattattttttaatataataaatatttctatttgaatttctttctttttatttatctaaataataatgataataataataataataataataataataataataataatagtaattttgattataaatgatattttttttcaagtgatatatttatttatataaattttataattcaagcgatatttttttgtacaaattaatatgagtaaaatttaatttatattaacatagtttgaaggatttacagaccctctgtgtttttcatctaatatatttgcataattttaggaaactcttggttcaaactttaatttcatttatagatactcaagttatatttgctcttgatagggaaacatacatgttggacatttttttttttaaaatgcatcctcctgataatcaacttctaactggaaaaaaaaaaagccaaataaatatcttttttt

SEQ ID NO: 3002 - DNA, 61 bp, Glycine max
tggagaggatgcttcaatggaggaaaagaaagagggagagatatagagggggggggggggg

SEQ ID NO: 3003 - DNA, 207 bp, Glycine max
catgccctactttctagaatggcaatggtcttgcatggtatcaagagtggcgcacctcactccatattatatcttttgagcattatgcgacgccacgtgtgtgtgctaagactattgcttcatatggcagaagtctttaatctaatcgggaactaccttatcgaactcggttacacaagtggtttctggctagcaaagctatgactc

SEQ ID NO: 3004 - DNA, 229 bp, Glycine max
tttcactctgatgtccgattcaggcgcagaatatatcgagaagttcgaaaatgaacaaaggaagctcttgagcactatcaatgatcataacttttaactcggatgtccgatttacgcgcataatatatccacacatatcaaattgaacaatggaagctcttgagaaattcaaacggtcataactatttactcggagggccgagtcagtctcactatatattgagaccct

SEQ ID NO: 3005 - DNA, 528 bp, Glycine max
gaccttgaaactcagcttgtaaagtctctcgctcttagtgtctagaagacaaagaaggaataatcgtctagaccatcattaagaggtccgtccaaagcaccaagtgtagctagctcctctaatgaagacttcaaaggacaatctgatgaggacgacgagctagccttcatctcgagaaaaatctgaaagatgtggaagaacaagggtggatctaaatagaagaacttctccaagaaggtgttcaatgaaaagaaagacaaagataaaagctccatcattgctatgagtgcaaaaagcctgaacacttcaagtctaagtgcccagatctggagaagtccaagggaaagcatgaataatacaattccaagggtaagaaaagcctcatgagcacctgggaggacctggatggcacctcgtccaataaaggagaggaggaagccaacctatatctaatcgctgctacaacctctgaggaatctgaatcataacaaacttatcctgaactactctctaacttgttgattcttt

SEQ ID NO: 3006 - DNA, 525 bp, Glycine max
ttgagcaaattgaaatgacaataactttatacacggatgtccggttgagtcccgtaagatatcgagacgctcaaaatttagatccgaagctctgagaaaattgaattgacaataactttatacacggatgtccggttgagtcctgtaatatatcgagacgctgcaaattgaaaacggaagctcgtaggaaattcaaacgacaataactttttactcggatgttcgattgaatcgggtaatatatcgagacgctcaaaattgagactagaagctctgagcaaattgaaatgacaataactttatacacggatgtccggttgagtcccgtaatatatcgagacgctccaaattgagaacggaaactcttaggaaattcaaacgacaataactctttactcggatgcccgacagagtgtcgtaatatatcgagagacgctccatattgaaaacggaagctcgtatcaaattcaaacgacaataactttttactcggatgtctgattgagtcccgtaatatatcgagac

SEQ ID NO: 3007 - DNA, 480 bp, Glycine max
tgctacaagaaaggaaaagaaaacactgttgcagatgctttatctagagtgtagggttctgaattaatggtgattgcagtttccatcatttccagtgagttgatggctgaaattcaaggtagctgggagatggatccacatctatccgagcttatacctcaattgcatcaagggttgaagcctaaatctccatatatgtggattgaggggcaattaaccagaaggggtagaattgtggtaggccaggccaaggactttgttttctctacgaacgtagtaggcaatgagccaccagatggtggtggcggtggtcaaacacgagtctcttttaaagaaaaggctatggcaaatagggaagcactacctcagcgaccaaaagtggacctatcaaggaaaaattggccaaaatagtctttgaggatgataatcacttgaagcctattgttcatattgatgattctgttttcaatggcttatatg

SEQ ID NO: 3008 - DNA, 491 bp, Glycine max
ctataaaactaagcttatgctgcaacatttacatagacctcctcaacctcagcagcaaaatcaaccacagcagaacaattatgacctctccagcaacagatacaaccctggatgaaggaatcaccctaacctcaaatggtccagccctcagcaacaacaacagcagcctgctccttccttccaaaatgctgctggcccaagcagaccatacattcctccaccaatccaacaacagcaacaacctcagaaacagccaacagttgaggcccctccacaaccttccctcgaagaacttgtgaggaaaatgactatgcagaacatgcagtttcagcaagagaccagagcttccattcagagcttgactaatcagatgggacaattagctacacaattgaatcaacaacagtcccagaattctgacaagctaccttctcaagctgtccaaaatcccaaaaatgtcagtgccatttcattgaggtcgggaaagcagt

SEQ ID NO: 3009 - DNA, 474 bp, Glycine max
tgaaggactgtaaatattgcctatgtttgcctccccttggacttttgccacgtctgaaggagctttcaattgaagggtttgatgggattgtgagtattaatgctgattttttcgggagtcgctcttcttcatttgcatccttggaaacactggagttctgccagatgaaggaatgggaagaatgggaatgtaaaggtgtgacaggtgcttttccacgtcttcaacgtctttttatagtgcgttgtcccaagctgaaagggttgcctgcccttggacttttgccatttctgaaggagctttcaattaaagggcttgatgggattgtgagtattaatgctgattttttcgggagtagctcttgttcatttacatccttggaatctttgaagttctccgatatgaaggaatgggaagaatgggaatgtaaaggtgtgacaagtgctttttcacgtcttcaacgtctttctatggagt

SEQ ID NO: 3010 - DNA, 453 bp, Glycine max
  unsure at all n locations
tcttctgctggcaacaatggatttcaacttgcaagtagtgcagacaacagtacaccaaaatataaaagaccgcctgatgatacttcatccccctttggattatctgaaagtgaagaatctggagcgggggaaaacaaaataaaagaaaaagctgtgaatggaagtgactttgctatggccgcagataaggctggggcttctgtgtttcaaatgaggaagaataagatatcaactgatgaatctggagatagtgtgcatagacaaggaagaagtggaaggaatttatcattagtaaggccagacctcccttctgggagggagaagtcagagaatgtaccaacaatgaagccagtacaagacatgaagcctaatgataagagtaaaacgtaagctggatttattnttagatctagttcatcctttctacttctattttccaaaactgtcctcata

SEQ ID NO: 3011 - DNA, 422 bp, Glycine max
tctgaaatagtgaattttatcagtaacgatgaggacaaacaaattataaattatgtagtaatgatctataactcaaataaactaaaaagaattgtcttgaattgcttacatgccattcttcactgttttgacatctttatagaagcactgatagaattacacggcatttccccataaaacaaatacatggaaaatcattaaacaaacaaaaatagaaataacaactcatggatgcttttgttagcaaatagaacagagacaaacaacaaacagtggcaaatatttaaatttacaataaattactcattaccaagacactctcagcagtcaactgacaagagatataaggagttgagtcaatctgatggaacatttagacgtaaaaagcttcacggcccaatgatacaggcacccgaaaaaat

SEQ ID NO: 3012 - DNA, 473 bp, Glycine max
ttgagaaaattcaacaacaataaatttttactcggatgtctgattgagtcatgtaatatttcaagacgctcgaaattgaataccgaagctctgagcaaattcaaaccacaattactttttactcggatgtctgaatgagtcccgtaatatatcgacacgctcgaaaatgaatgtttatgctctgagcaaattcaaacgacaataactttttactcggatgtctgattaagtctcgtaatatatcgagacgctcgaaattgaatactaaagctctgagcaaattcaaacgacaataactttttactcggttgtctgagtgagtcccgtaatatatcgagacgctcaaaattgaatgtttatgctctgagcaaattcaaacgacaataactctttactcggacgtgtgactgagtcccctaatatatcgccacgctcgaaatagagtcttgatgctctgagcaaaatcaaacgac

SEQ ID NO: 3013 - DNA, 549 bp, Glycine max
ttcattgttgcacttttctgttacaccaatccttctttgtatgatgcaatcaaattttataatctctacaggctgatattactaatcaaggaaaaatagacattccttggtttctaatttcattcatttgttagaagtttttcccaatatctatgggggtgtttgttccaaggtttctaattacattccttggattcttatttttggtggcattactatgagcaagaactccattctctggtattttaggaaaaaaaaaccatttgcttagtgtaccgtccagatatgtcttgactaaccatgatgtggccctttatgaagctccatctgtgttcagagcttcaaggactgtgtaccatggtactcggatataactcagtcaatcctgatgtgcccccctatcaggctccattgcctctgttgagtgaacagcttgggcctttgcatcatctggatatagaatccaacatgttgtactcaacctcaacccatcccgttgacattcactttatacccctcagcctgataaatgttctgccctataaaaaa

SEQ ID NO: 3014 - DNA, 590 bp, Glycine max
  unsure at all n locations
gacactataaaactcagcttctacaagtgttctcgagtcttcttccctcaaagctttggtaagaggctcttgatcttcattctcttgattcctcaccatttttgtgcaaaactctcattcttggttccaaatttctttcttcatcctttgaagcttgggagcatccagatctgagttcttggttcatccaagcattttcatgcaagcttcatcaaggtagaggggtctttccacttcttgaaccctaaccttgttgtctttggaagctagccttcattgcctgttgttttgatgttcaaatattcgtagctattgtcttggctggaactggaggatacattactttctattnttatttttttgaaattttaaggttaaaaatgatttctttgggcgtcaaaacttatggttagcctttaaattcacttaaatcggagtttaaggatattttgtacgatcgaatctgtcacgaaatttaaatggtgcgtatgactatatggaattttttccctaaagatttgacttaaaaatgagtttgctaggtgtgaaaatatagggtagcatgctaaaattatgaaaaatcgattttc

SEQ ID NO: 3015 - DNA, 552 bp, Glycine max
  unsure at all n locations
tccatcaatatgtgtgcattttttgaactttgatcttttgaaaattaaacttcacatttcagagctcttttagagcacaaaatttcgngctcttctcttcctctcccttcattcatctgcttcttcctcccagctcttatacatgacctcttatggtggggagcttcttctagactcatcttctccttgaagtgcatctcctctctctctcttccttctccattccgctgccattcatcttccaagaagcaaaggaatccatagatgaagaagatcctaggcctacaagctccaatggagcttacatcatgtggtatcaagagcatcttcatctaggagatgctctttttcttcctctatctctttgctctatgaagtctctttaattccttggtcttcatcttattctccatgtatatcctacattgtcttgtgggttggcgctgcttagagaatatttcgaaaaaaataaaccaattaaatcttaaatctacacctggtttttgcatttctattggtcagaatttgtagatctactcttgaatcatgttt

SEQ ID NO: 3016 - DNA, 562 bp, Glycine max
  unsure at all n locations
tctcaaagaagccacgaggaagcctcttaatgaagcttctcaaggaagctacatgaagctgtctcgataaaaacgcttcccagccttcgttaaccgctggatcttctcaaaatttggtctgcagcttcacaagacaatttttcatgatcttaccgttgggatctttgagaagatgtctggagtatgcgcgaagtttccattcccgagagcatttctcacttgtgtgttttgagccttgtagtccaagtagcttaggaaaaatgtcatttcttctccttctttcttccaaaaccatttccaacattctaagctctttctccatcacccacagccaccattatccaccacataccaccattgttctccgttaagaccccacacggagaggaacccttcaaccgaagtgaaatctttcaacttgcctcgcggtttcggtagaaaacaaaaacctaatctgacctttcattttctttgaggtaaccatgcttctatgcttggtccttgtttgattcagcttgtctttgcatcttttctgactntggaaccgtcattgcatgtttta

SEQ ID NO: 3017 - DNA, 452 bp, Glycine max
  unsure at all n locations
attgaaccctttganctcgngatctctgagtcacctgcggcatgcaagctggctcggtagtgaagaaggctttcttattatatggaggtaaatactatggtcatttggcccacattcttgtggggacggcgacaaaagataagactcctctcagccgaatgacatgaactcacaagatgaaggaaaagcgggatgaaaacaatgatgcatgtaagtttattctatgactttatcaatntcaattttatgatgcaataagtgaaagaatggtatttcttttttaaatattgcaagtaatatataatttggttggttctatttttgcgctcacacaattctttgcttgtagcaagaaagataaagatcccctactcaagctgaaatattcatttgaactcgacanagtgcanatggtaaaaacccaatggatgtagaaacaaatgatgcatttn

SEQ ID NO: 3018 - DNA, 284 bp, Glycine max
tcaggactaaaacagcattttaactaaaacaaaatatataaaaaaaaaaacggcgtaaataatcaaatttgcccctaaaagtgtcatgggatgacaaattatttccggaaagatggaaaatacaaatttagtcccaaaatgtggaaaaaaaaattgacaaattaatattcaagaaccaattccacaataagttatattcttcaaggatcaattcgaatttgtcattaaattctctagagaactaatcacatcttcaggacggagttagcatcaccccccccccc

SEQ ID NO: 3019 - DNA, 260 bp, Glycine max
taatgtaatcacttactaacattgcattttgaaaaccccccttcaagaggtaaggaatagtggagcaacatatgtcaggcagtaaatccagacacatcttgctaccgaagttcaaatagatcctcgccccccaaaaaactttaacattcaagatatcaagtacaaaattgcatgaaggcatgaatgaataacacaggttgcaagtgatcaaaaatatttttcaataccttcctcacaatcgttaattttggatttagaac

SEQ ID NO: 3020 - DNA, 397 bp, Glycine max
  unsure at all n locations
ntacaaccatgaacattgtctaattcgttctttattaaaggaatcattaaattatttatataatattttttaaacactgttttttttatttcttttattactatcattcattatacgttttcactttttaataaaaaaaaaacatatgtttataaaatattatgcaattaacatgtctttggttaagaagaagattgagtaggcacctattttagatatgtggtgacaaaaaatatgtctttgcttcttggtgattgagtaggcacctatttgtaatttactgtgtgtgaattgtgagttaatgattaatgcttgtggtgagtggagaaaaagcaataagaaaagggggggaacaaaaacagctgtccggcgtacgggtacgggcgtattagacagc

SEQ ID NO: 3021 - DNA, 461 bp, Glycine max
agcttcacgagctgcaatagaaaaggtttgatttctgagtcatgtgttctctgtaactctcttggttattaaaatgagttttaatttgatgtcttttgtagatgacaagaaccgttgatatagaacataatatggagattattaaagaacttgaaagtttgagtggatgcacgctatcttataaggccgttggcggtagaaatggctacaaagttgcattggagacattggataaacatcagtttgagaacccatgggagcggcttggtttatttatcaaggaagacttcaccacagatcttgatgaggaggttttgaacggaggctttgaagaaggggaaatttttaactgaatgcaccttcatgcagttctgccagctctaagtgtttatatcccttttagacatggaaacagacaattattgtaaatgcacatattgtttggaatcaagtctttcgac

SEQ ID NO: 3022 - DNA, 361 bp, Glycine max
taacaatattgcatagtaattttgtaaaaaaatacaatattgcataatagtttaaattttgctaagttttacaagtgaaaaaaataggttaaatttcacttttgattctttatttttttattttattcaatttgatctcttatatttttaaaaatttattttagtcatttatatttaaaagtagtttgaaatgttccttttgttagtctagagttaaccatggtagtaattcaaagatatttcactacaaacaatattgtttatgagtgtaatctatattttataatcattagtaaagataattatccattctgatatacacattacttattcttaaattatcccttaatatatataatta

SEQ ID NO: 3023 - DNA, 378 bp, Glycine max
  unsure at all n locations
tcgaatgtctgattgagccccgaacatatcgagacgctcngaaatgaatggtgaacctttgagctaattcaaacgacaataacatttttctcggatgtctggatgagtcccgtagcataatcagacgctcgaaattgaatggtgaacctcttagctaattcaaacgacaataacttttttcacggatgtctgatagagtcccgtaacatatcgagacgctcgaaattgaatggtgaagctctgagccaattcaaacgacaataactttnttctcggatgtctgatagagtcccgtaatatatcgagacgctcgaaattgaatgttgaaactcttagccaattcaaacaacaataactttttactcggatgtctgattg

SEQ ID NO: 3024 - DNA, 322 bp, Glycine max
tctacattcaatttcgagcgtctcgatatgttacgggactcaatgatacatcccagtaaaaagttgttgtcgcttgaattggctcacagcttcaacattcaatttcgagcgtctcgttctattacgaggctcaatcagacatccgagtaaaaagttattgtcgtttgaattggctgacagcttcaacattcaatgtcgagcgtctcgatatgttactggactcgatccgacatgcgagcaaaaagttattgtcgtttgaattgtctcaaagcttcgacattcaatgacgagcctctcgatatattacgggactcaatcagac

SEQ ID NO: 3025 - DNA, 467 bp, Glycine max
  unsure at all n locations
gcaagcttatgcgttagctgactcanatcttgattcagagtcttcaaagtatgtgatctgtctcttggaggaagctcttagatgccctttagatggtcttcggaaaggacaagtgagtgctaagttttggattaaacattttatgctgatatcagtgctgaagtaatgtatttatatttgttattcttttaaattgtaggcactgaataatctagggagtgtctatgtagactgtgataaactggaccttgctgctgactgctacatgaatgcactcaacatcaagcatacacgagcacatcaggggttggcacgtgtatatcatcttaaaaatctccggaaagcagcatatgatgagatgacaaagctaatagaaaaggctcggagtaatgcatcagcttatgagaaacgttcagaatattgcgaccgtgacatggcaaagagtgatcttagtatggcatcacaat

SEQ ID NO: 3026 - DNA, 366 bp, Glycine max
ggaatgaatttgttttctagcaaaacaaattattatacctatagttcatattgctaaatggaccaatctaagttttgtgcttttatttgttttttgcttagctagtctcttcttaagtaatctcccttgtttttcttgaacaataggtggcagaacgtaacaatgatcctcaattggcagacttcattgagagcgagttcttgtatgagcaggtaaaacttgcagttgaattcatagtatggttggatttcataagatataagactccttgaccattgtatgtaatacaatactctgaactctttacgttctaaaataattggtgtcttttacacggatcaagaaaataataataaataaatgaat

SEQ ID NO: 3027 - DNA, 407 bp, Glycine max
  unsure at all n locations
tactttctgacagacatgattacagaatttatattttcatattggtaaatttgatctgtaaacctttatactttataaaatatgcaaatatagtcttctttttctaagaattcatcatggtttattagagttaaaaaaaaaaagagtaaatgcatatatattctaaagcttgaaaatcacattattaataaaattacaagatttcaattacaattatgttcggtgagatatttcagtaagtttctagtattttttattagctgaaaaaattatttgactattcgataaataaaccatntttaatagttcttaacattttttgaaacattatttagaataatattttttaaaacgttaatgtttaactttttatatnnttttattnttatctttgatatatttattca

SEQ ID NO: 3028 - DNA, 378 bp, Glycine max
tcaaggaacattcaaaccaagtgtatttaccccaaggtctacactccaaagagtcctttagagcctctatctcctgattcaggttcaacccataaaacattttatcatgcagactctatctatgaaatatacaaaatacacgactcctcaattattctcaaaataattttaacttgtcgtgcctcaaagtaattaaactcgtcaggttcccacaatgggtcctatcacaatactcgttgtgtattaactcgtcgcccttaaaaagtcttacaattgtgtgattatacgattcatagctcacaactcaatgcacataacatctcaatacacatgtgtgatatcataatttaacacatactcaacttgtcacttgcacat

SEQ ID NO: 3029 - DNA, 395 bp, Glycine max
  unsure at all n locations
ctcatttagtggatttcagggttgagaaatgaaaatgagaatggggtaaatttggagcaaactctcacctcacacaagtctataaccctaatctaaactttctcaaactggttttacgcctaaaattccaccaaatcaaaatttgactcctcaacacccaatttaccctagaaatggctcttgccttcactttggtcattcattntcctcctttgtacagcccaagctttcccgcagtcctaaatgaaatttcaaactgggatttactcactctaacctcccattaccactaaatccagaattggcttttcaaatcctcanagcatcatacttttccactcatatcactacattctcactttttaaccctagggtaattctacccttcacctcta

SEQ ID NO: 3030 - DNA, 390 bp, Glycine max
  unsure at all n locations
ttcatctagttctaccaaatataatcaagtgtctagctctgatggttgaataaaatacgtaagttcttattaaccctctagcatatattttttattctcatccataaaaaaataagaatagcttgatgtatatatactattaattaagaatttttattatttatactaattatatgcaattacttacaaaagttactttttgacagaatatctcatatattgaatctagttggaacgattcaaaacacaacttaaatatgttttcaaattatattgagattgacttttaaaattaaaatcatcaaattaattttatgccaaaaaaattagtgagatggaacaagtcataattactctgaaaaagagtngaactttatagttttaactttt

SEQ ID NO: 3031 - DNA, 430 bp, Glycine max
  unsure at all n locations
agcttatgcacggaaaatggtattatgaaattgtatatgcccgaagaaaacaccatttctagtaaccatgcattangtaccatgttcaattatttttgtttggtggtgtatggtttttttttttttaaaaatgggtttatgatcccatcatggttggctcatggtgcctaacacatgcaactaagaatgtagtgtgaagtttcacgcttccccttttttgtttttgttttgtagaggaaaacgcaaggatgagcaaacatgaaaacaaatggtatgcaattttgcagatcaaaaagcttggtgaactcatatgcatgatgatgccatgactcanaaatgtgaggctggaatatgataacggacaaatgcaggaacgatatgttcattatgatgttatgaagagatgcttatgcgatgcatgatatgaatg

SEQ ID NO: 3032 - DNA, 355 bp, Glycine max
tgccacccagctcgcccaggcgagttatgttgcttcctccagaaggcaccgccttctggagaacttcctggaaggtccaagtgggcctgattggtatttgcacccccctttttactaaacacacccccttgcctttttttgctgattccttttccgtaacgttacgaaaacttacgaattacgtaatgatacttgtttcctttccgtaatgttatggaaccttacggaatgcataatcatccctttttttgccttccggaatgttacggaactttacggattgcgcactaaaacttccttttaacttccggcatgtcacagaacttcacgaattgtgctacaatgctttcttttg

SEQ ID NO: 3033 - DNA, 448 bp, Glycine max
ggctgcagctttaattcaatctttgaagcatgacttacgcctaggatatctaagtttggttttgaatgtaaaaaggcatgaatattacgacatgttcgagaggctgttgttagaatttaaatttggctgccccatgaggaatactttgcatctaggtagcatggaaaatacctttcaacggtatgtatatatgtgaatatatatagcatgaaaatgccttgcataatatagcatgaagtgccttacaaagtgttggatgggtagcgtaaaagtgtttttttaaaaaatatgtgtatttgtgagtaggtaacaaaagaagccttccaaaaaaatgtgtgtatatatataggatgtagcatgaacaggttcgtcaaaaaatatgtacatggataggtgtctaaaatgctcacacaaaattttatgtggcaatacgtatgtgtataaaata

SEQ ID NO: 3034 - DNA, 357 bp, Glycine max
  unsure at all n locations
ttgcggatttggtctttgccagtgaaaggatcgatgtttttctgaaaaaaggcaaatttagtcatccagcttggacgaatgagaaaactggggcaaatgaagagggtgaggatgaaggagaagcccgtgctgtgactgccattccaatacagccaagtttcccaccaacccaacaatgtcattactcagccaataacaaaccttctccttacccatcgtccagttatccacaaaagccatccctaaaatcaaccacaaagcctacctaccgcacttccaatgacaaacaccacctttagcataaaccaaaacaccaaccaagaaatgaattntgcagtgaaaaagcctgtagaattc

SEQ ID NO: 3035 - DNA, 423 bp, Glycine max
  unsure at all n locations
agctggtgcttaatcattgtaatttcaaaattcatgttaaagatgaactgcccttctgttctgcttgttgtatgggcaagattcatagatttccttctaagctttctcaaactgtatacaattctcctttggaattaatatgcagtgatctgcagggtccttaaatagagtaaatctacaaaagctttctcaaacagagctttatttaaaatacgacaaatgattatatatcaggacttgaatagagtaaatcaacaaaagcactcataataactcaaggtgattgaaggattaagagtagaaagtaactagccttaccttgagagctgaaaagggtgcgccgacaaccaactttcttaaaatcttatgcggntagatgaaggttcgagactagttatatatctctaaccccctcacatcaat

SEQ ID NO: 3036 - DNA, 355 bp, Glycine max
tttaggggtatttgactaatgagggtttatgggtagtttattaattagggtttagtgttacttaaccaattagggtttatgggtatttgaaaaattaagctttagtgttacttcaccagttagggtttaggattatgagacaatttataattacttgattgatcactatttaggggtatttgaaatttgggattcataggttacttgataaattggagtttatgtgcgtttatctaactagggttatgaatacttgactaattagggtttagttttacttgatcgataattaagggttatcgtacttgagtaattaacgtctttgggtacttgacaaattatgatttatgattac

SEQ ID NO: 3037 - DNA, 436 bp, Glycine max
  unsure at all n locations
agcttcttatacctatgtaactttaacctacttctgttcctaggcatttcagntgtgtcaagaaatcttatataattaaaaatttctgtattggaagctgggtgcaaaaacttcattcccatcccagatatgacttagtctgtgacgtccaccaggacatattttatgttatagtaatcatactttacttttttttaccatagaagtacctaaatgttaccataaggattctttgntagccagatataataatacaatcatagtcagtagtgcctctcagcctctgttaatcaattatcagaatgttagtctaagtagcctcgatggaggttaataaaaaaatttataactatcaacagggcttggtgcatctagttttcttcactactgccaataacagaatcttgacatangcatgctgagaaactgtgacatg

SEQ ID NO: 3038 - DNA, 328 bp, Glycine max
tcacgcatttggggaacctcctttctccactcgctcatgctcctcgcgtgactcgtcaacgacgataccccttttctttctttcactctcgaactcatcatcatcgatcatcgatcatcgatcatcgtcaccaccatcttcaatctcttctttcaggtaccctctctcaacaccacacaacctaaccctcttccttgatttcttctcttggcgtttcaccatcattaatcaaatttatgctcatgtgtgtgtataactgtgtgagagagggacatgatgtgcgcaatgaagtagaaattggatcggaattggaaagagagtttgtatt

SEQ ID NO: 3039 - DNA, 437 bp, Glycine max
  unsure at all n locations
agcttgccacccagctcgcccaggcgagcaggtgtgcttcctccaaaagcaacagccttctggaggaatctttnggagggcccaagtgggcctggttgctatttgcacctctatttttactaaatacaccccctttgccctttntttggagattcttttttcgtanagttacgaaaacttacggatttcgcaacaatacttgttttctttccgtaatgttacggaaccttgtggattacataatcatccncttttttgacttacgaaatgttacggaaccttactaattgtgcaacgatgcttccttttgatttccggtgtgtcacggaaccttacggattgtgcatcaataccttcttttgatttctggcatgtcccggaacttcacaaatttcccaatgatgggtgccaagcacctcacaaggaccaaacaaaag

SEQ ID NO: 3040 - DNA, 351 bp, Glycine max
tagcccaattcaattcaatctgaattgggttaagcaatagtacattcgcttagcgcatcatgtttagtggctaagcatggtgcacttatgctaagccctattctttgcagccaaatcaatggtttaattgagctaagcgcaacgcatacgcactaagtgaacttccttgcggcctggatagcgctaagctagcaaccactcgctaagttcatgcccccttgtacacagggtgcagtatattcgctaagtcgactaagagtgcagcttaatgagagttgcaggttttcttatctgcacacgtcgcttagcgtgctgcttttcgctaagcgcagttttatgtgtaaaaaaaaa

SEQ ID NO: 3041 - DNA, 234 bp, Glycine max
  unsure at all n locations
gcttgactgagtcatcagagatatanattgtgaccatgggcatgagttcaatgaatgatctctcatctatcatctatctttcaatctatctttcaatatcttctttcatctctttcaacagatctttctaaantatttctcttcatttttctaaaaggttttttcaacactttctcttcccagaaaagttntttggtcaaaaacttgtgctattcatctttttcattcacttat

SEQ ID NO: 3042 - DNA, 255 bp, Glycine max
tgcccttggtttagacatgattggtacatgatttggtacttgtaggattcaatttgggcaaaattggatgagggaaagagtggttttcgaaatctgcactttatgcagaattttgctgttgaaatgtgcagcagaattttgtataagtgcagaaaaatacttgtgcatggctggttgtgaaaagggtagtacatatggggttgtggacattttctatcatagcccatcggtacaaatgtttacttttgtactata

SEQ ID NO: 3043 - DNA, 310 bp, Glycine max
  unsure at all n locations
aacacacttcaatcaaaatgggtttggccctaggtgcacaagatatggaatggaacaacttgatgtgaggatactttcttacatggtaagctngaaaaaaaatccatatgactcatgcagaaagttntctcccaaaaggtgaagaaaggcaggtatgcttgctaaaaatgtcactttatggccttaagcaatcacctcgctagtggtacaaaagggttgatactttcatttttaataatggctttaaaaggtgcgagtatgatggttatgtttacttganngacaatgagcatgatgctattgtctactt

SEQ ID NO: 3044 - DNA, 396 bp, Glycine max
  unsure at all n locations
tgttgattntaacgttaaggatgaaatgggaattgaatggaagacgcatagcaaacaaacaaacagatctttaattatataagagtaaaaaatcaagaatatttttgagttgcttcggttccacattgagcagtctttgcataagagggacaaatacagcaaactagaagcaacaaataacgcatcacgtacctttttctgacttgatcccggaggagtgcaaagcaacgtcggtggtgccggtgccggaagagtggaggtggcgtccatagttgatggttggagttagaatgttgcaattacaactggaaagaacccatgtgcaagtagaagaagagtctcataaggtaaagctcattaataaataaagcatctatcttttgtgatcattgcatt

SEQ ID NO: 3045 - DNA, 446 bp, Glycine max
  unsure at all n locations
agatggaccatttcatgtgcttgaaagaatctttgaaaatgcttacaaagttgagctgcccggtgagtataatgttagttccaccttcaatgtctctgatttatctctttttgatgcagaaggagaatccgattngaggacaaatccttctcaagagggagagaatgatgaggacatgaccaagagcaagggcaaggatccacttgaaggacttggaggacctatgacaagggctagagcaaggaaagccaaggaagctcttcaacaagtgttgtccatactgtttgattacaagcccaagtttcaaggagaaaagtccaaggttgtgagttgtatcatggcccanatggaggaggactaaatgacaccactttgtttcaattttagagtgtttagtttggctaaataatggcccaatccttgtaaagttggctaaccaaaaatat

SEQ ID NO: 3046 - DNA, 359 bp, Glycine max
  unsure at all n locations
tgacacagcttttaaactttcaactttgcttttagctattatgctttgtcaaccagctcgggcatatgttcagttagataaaattcaatttaaccttgtgtttggattatgaatttcaaaatttcaaggaatttgaattgctttgattttaattttcttcatttttcaaatgctttgtttggataaatcaattcaaatttaatttcttccattttaaattctttgtttggatagggtaatttaattttctccatatgcaaaattttaattttatattttaaatagatgaaattttaatattaaactttatagaaaataaacacaatctaattntgaaatattaattaaaaaatattttc

SEQ ID NO: 3047 - DNA, 418 bp, Glycine max
  unsure at all n locations
atggacataacanacacatccttattatgtagatcatgacagttgtgatgagntttaaggagatgaaaggaaagggaatcaatatctagaacttacaatggaaggcagttaatcaagaaaaaaactatagacaaagcttcaaaacaaaaataaaaggggaaaatgcttgaagaatgaatgtcctggtcacatcaagcagatcttgattcttttgctcatcaatgccattnttgttgtggcatataaggacaagagtattgagatataatacctttttgttgcaggtatntttgaaaatcatgagaaagatactcatttctagagtcagtgcacaagatcctagtgcttgtgagaaattaattctcaacatatgccatcaaattccgaaacattgtgaaaaccctaactatagagcaaa

SEQ ID NO: 3048 - DNA, 289 bp, Glycine max
  unsure at all n locations
tgngaggattgatggggacccggtgttgagagaaacgatgatatgggctacgtgggagtacgtgagctcagttggaggtgggcaacaggggatggtgggtttatgcgcgcattgtggatgtggaaaacttgttgtgcaccatcgcccgaccgccacctagtaccacatgtgatgggtaccccataatcctacaagcttgagatgaggaagtgttgaagggtgaaacttcctgcttttattgttgaccacagagtggtacttggagatatgtcgtgggggtcaggagacc

SEQ ID NO: 3049 - DNA, 458 bp, Glycine max
  unsure at all n locations
agctntctttggctatctctaagactcanagcatgatagcacgcagatactaatgttgtcttctacaccctttgtcaatcgcggccaacaaacccgttgacacatggagatttacgtcatcttccgcgcagacaaattttgtcaaactgatactggagtcacgtgacatgcggagatacccgagtggttatccgtaacaacttttgctatctctaagactcgaagcatgatagcaagctgagtgggtaaacgcgcagatacaaattttgcgccctttataattcatgaatgacaagctgagtgggtaaacgcatagatacagattctacgccctttatcattcaggaacgacaagctgagtgggtaaacatgcagatacagattctacgccttttatcatttaggaacgacaagctgagtgggtaaacgcatagatacagactttgcgccctttatca

SEQ ID NO: 3050 - DNA, 382 bp, Glycine max
tctttgtttcagatgaggcagatgagtttgtagctacctcatgctgtgagttttaagccatcttctcaatcaagtttctggcttcagtaggagtcatgtctccaagggctccaccaccggcagcatctatcatacttctctccatattactgagtccttcataaaaatattggagaagaagctgctccgaaatctgatggtgagggcaactggcacatagttttttaaatctctcccagtattcatatatgctctctccactgagttgtctaatacctgagatatccttcctgatggccgaggtcctggaagcatggaaattttttttctaaaaatactctcttaaggttatcccagctcgtgatgaaccttggagcaaggt

SEQ ID NO: 3051 - DNA, 393 bp, Glycine max
  unsure at all n locations
tgatctcttttaaaatgtagatctaccaaaatcctgagactaatttacatggcaccaaaacactgtcacaaacaggctttaatgacagaaatggattgcctaaccccctgcctgagaaaacaactgccacatatagaatataactgtctcgtacatgcctataaaaaaaaactgtcgtacacaaattatgactgctttttatttttactttttgacatgaaccttcaattagaaatatttgcttaccaaaaaaaaactctactttagaaatatcttacactttngcaattaatgatttagctatccctaagattaacttcaacatgcctttggactaacaaaaatgaagntactcattatctatatccatttctgactagaccaagttctaat

SEQ ID NO: 3052 - DNA, 413 bp, Glycine max
  unsure at all n locations
gacactatgaaactatgcatctcagctttnagagcagctccacacctacatttctccatgatagaagaaaaataaaatgtcttgatgaggaatgtcctcttaactggtagctagttcttgtttgaacctgagtctactgttctcttaactgatatggtatatttaaaattatgcttttgtgattataacattatttttttgggcatgctggctttttttttttttatctaattatgtgatatgagaaaaacattctactgaaaaagaaatttgttcttaaggtgattataatttctgtagatttttcttacaatcacattttgtttactatactaactttaaaatttttgttttatagattttattgtagtggtttacattatagattctttacaggcttgggacatctcatg

SEQ ID NO: 3053 - DNA, 209 bp, Glycine max
  unsure at all n locations
agaagatggtgagaggactaccctctattaaccaccttgatcaactctgtgaaggatgtttattggcaagcaatttagaatgagttttccagaggagtcaaacgcaagagctaagaagccacttgagctaatacatgctgacgttngtgggccaatcaagccaagctcactaagtaaaaataactatttcgggcttttcattaatgatt

SEQ ID NO: 3054 - DNA, 364 bp, Glycine max
tgcacaataagtaattaattctatttttttaaaaggaagtaactaactaactaacttccactaatatatagagtgactactcataagaaagggatgagaattgattaggcccatctaatctacctaataaaactaacaaagctcaaacttgcagcccaattattcaagtgtagaggttacaacttccaagctcaatttgaccctcgaaatgacagaattggccgaaacttatttgtgacttaattgaatctctttttcttaaatttccatagactactcacatgctccatttgtagttttgtagtgtcctataggccctacataaagcagataggtcaagtaagcacaaaatctaaaaaatagc

SEQ ID NO: 3055 - DNA, 457 bp, Glycine max
  unsure at all n locations
agtcatttatgatcaggcttggaaagggattgatganaataagtggtccaagatattttgagaatggccaaaccaaaggtccttgcgttttaataagaacctcttcatggtctaaatccaggaaggaccactttcagaaagaaaattattaactnntttaagaaaaacttataaacccctatttgaaaaaaggtaaaaacctttntaaaagagttacatcttttgatattttnttttcagaaacagtcactggtaatcgattaccaaattagtgtaatcaattacacaaagcttttgagtgaaagaatgtgactcttcacattntaaattgaattccaacgttcaaggacactgggtaatcgataccaaaacattgtanntcgatacaaccttttgaaaataattggaacattgtaaattcagtttgaaaactttntcaaactcattttgctactgg

SEQ ID NO: 3056 - DNA, 199 bp, Glycine max
tagggatggaatacttacttgttggtgattatacaaaatctcaaaacggaatcaaaaaatgcgaaaaaggatgaccctaaggctgcaaattcgtcaatcccgcgggtatggcttttgaaaggggggaaaagaggtttttgaatgtaaaaacgccccccctttcgtcatttttataatttggtgcacgggtggctcaata

SEQ ID NO: 3057 - DNA, 332 bp, Glycine max
  unsure at all n locations
agcttcgtcattcacctatatgntgtagcaagtttgataatgatgtcggttnttccctttttatacattacgttttaaatttaaagatattctatatacttctcaatacgaacataattcttattactnttttacttctacttttggttaaactaaatcactttttatatattttattacttacgttgggggggcggngtgttataaaggatgaaacttgatcataagttntgatttattgctagactcggtcgcagatggccagatggtagtattggagtacctccacacactgataatatattatgatcataggatctaaactcttcatt

SEQ ID NO: 3058 - DNA, 350 bp, Glycine max
tttattagccagtattatttataaaattattacaaaatttaaacatatttattataggaaaacgtataaaatatgataaataacataattagctgtctcttgataaataacaatattctcaagagtatttaatttttaattaaagaaaaagttagttgcggagaggcccaagcctcttggtcattggtcctccctcccctatctatctctattcttacacgcttatttcttattttattttaagaaaagttaaaaaaggatccacggtgggacctgaatgaaaagaaggaccgaatcttcgttaaagcgtagatacagataagccttgtggggttgacgcgttcatcacg

SEQ ID NO: 3059 - DNA, 386 bp, Glycine max
  unsure at all n locations
agcttttaccagtgcattaaaaaatctccactctatctcanaaagatctcacctctattggcaacctccatgcataaatgtatgtgaaagatcaagtcactgcctacccacctggattgcacatctcaagggccactaatgttaagattgttgctgacaaggggtgtccatgactacctatatgggatgctttaagttgtactacaatgaagagatgccttcttcaaggcagatgaagatggaattggtcaactaccctagaaattggagttcattgttcaataggaagaagctggttcgtgatcttgatgcttacaatgtatgactttctggaatcaaatcttatggacgaacactcagnaagcctacacctctagttatgatgg

SEQ ID NO: 3060 - DNA, 384 bp, Glycine max
tgccagtgttgatgccaggggatgatgtgccaaagtttatagccatgccgtgtccgtgccagccttcaagaccagacagcatcgttgtcaccgtcgaaatggagaagccaccgcccaaaccgccgcaactaccagtccctttctatttgtaattagctgcttccaaggtttcaaaatgggccaagattcttctccacaaccacaattttcaaaatatcaattatcaaagatcacagcgaatcttctggaaccacagtatcatagatcacgacaaaacttctgaaacctaaatttaaaaatcttggctagttgtgctactgcttctcatcacatgtttctatttcccaccatttgttgtactaatgtatattcattttgttcacc

SEQ ID NO: 3061 - DNA, 420 bp, Glycine max
  unsure at all n locations
agcttgtcacccagctcgcccatgcgagcatttatgctttctacancagcaacagccttctggaggaatcttttggagggcccaagagggcctggatgctatttgcacctctattgttactacatacaccccctttgccctttatttggagattcttttttcgtaaagctaccaaaacttacggatattcgaacaatacttgttttctttccgtaatcgtacggaaccttgtggattacataatcatcccctttattgacttacgacatgatacggaaccttaactaatgtgcaacgatgcttgcttgtgatttccggtgtgtcactgaaccttacggattgtgcatcaatacctttcttagatttctggcatgtcccggaacttcacacatcttccaatgatgggtgccaagcacctca

SEQ ID NO: 3062 - DNA, 355 bp, Glycine max
tagcccaattcaactcaatctgtattgggttaagcatgagtacattcgcttagcgcatcatgtttagtggctaagcatggtgcacttatgctaaaccctattctttgcacccaaatcaatgggttaattgagctaagctcaacgcatacgcgctaagtgaacttccttgcggactggatagcgctaagctatcaaccactcgctaagatcatgcccccttgaacacagggtgcagaatattcgctgagtcgactaagagtgcagattaatgagagatgcaggttatcttatctgcacacgtcgcttagcgtgctgctattcgctgagcgcagttttatgtgcaaaaaaaaaattg

SEQ ID NO: 3063 - DNA, 400 bp, Glycine max
  unsure at all n locations
agcttttatcaagagncttctttataaccattatgaagcagaaaactaactaaactacccatcatatctnccaaaaccccatacccacgaaaatcaaaggagaaagaagtccacccaaacctgaaatttcgaagtccctctcgtagacacgcacttcacgaccccgaaaatgctctcctttcacgatttggggcagaaatgatggccaaaggttgaagctttgcttggagcttcaatggagaatgaagaagaagaaaatggaaacgtgagggagagagagagctgtctgaaaaatgtggggctgagtgaagagagagagagctgctttttggctttaaataaaaagggggttctctttttctattattttatttaagcaatgccacatgtctccatttga

SEQ ID NO: 3064 - DNA, 330 bp, Glycine max
ttcattggtgaaatcaggagcagtcatttcccttatatttctctcatggggtggaggttgtgccatgttctcataatgttcaaaatcagaatgttcaaaattagaatgttcaaaactataatactaaaaatcaagatgttcaaaattaccaaccatagaatgcttatactcaccaataacagaatgctcacgatgctcataaggtacaaaatgatgcctaactaatctatgaaatgtcctatctatctcaggatcaaagggttgtaagtcagatgcatagcctctagtcatacactacattcagcatgcacaactagtttccttcttatg

SEQ ID NO: 3065 - DNA, 418 bp, Glycine max
  unsure at all n locations
atcttagagataaaatcctatatactggttactaaaaagataagaggtttcctagaaataagctattaaagatataaatcatatcccttaaatctccacactatcataacaaattcatatcatatgtcaacaacatgaaaggaatgttagtttttaattttaagttgtattgaaatattttttactccactnttttctaatttgggttactctntctgataacattatctttctttcacctttcttactacttgatcctttctttgtgcttgtctaattaaattagtaaatattactggttgatgcatatctttgttgtactttgccattgacattgatacatctttagggcatacccatgtggcagaggcacttataaatccaattcatattntnttcacaatgccatggacgtaag

SEQ ID NO: 3066 - DNA, 397 bp, Glycine max
tcatgcaactggaacatggaaagaagacagtatatactatgcattgaagatttctcaaaccttatcacccatatcggcaattaaagaaagcttttaatggaagccaagagaatgaaagtacaccaaaaagccttaggctgaaataaagtttatgattgggtaaaggacatcgtaagtatctttgggaagaacccaaagaaggaatcatttgagaagaacatatggaagaaaaggtcaatattctttgatctttcatactggtctgatctagatgtacgacaatgtatagacataatgcatgtcatgaaaaatgtttgtgatagtttaattggcaccattaacattaaagacaagacaaaggatggtttgaaatgtcatcaatatttgattgacatgg

SEQ ID NO: 3067 - DNA, 467 bp, Glycine max
  unsure at all n locations
ttaagtcacctgcggctgcagcttaagaaaagatggctaganattcttattttccgaagggaattctatcaatagacctccaatctttaatggagagggtaccactactggaaaacccgaatgcaaatttttatcgaggcaatagatctaaatatctgggaagccatagaaatagggccttatatacccaccatagtagaaagagtttcaatagatggtagttcatcaagtgaaagcataaccatagaaaaacctatagatagatggtccgaagaggatagaaaacgagtacaatacaacttataagccaaaaacataataacatctgccctaggaatggatgaatatttcaaggtttcaaattgtaagagtgctaaggaaatgtgggacactcttcgataacacatgaaggaactacagatgttaaaagatctaggataaatgcactaactcatgagtatgaatta

SEQ ID NO: 3068 - DNA, 393 bp, Glycine max
taaagggtgtgcagtgttgtaacaatgatttacatttatagaaacatattcatccaaaagcagtaagaaaccacagatttgcaaaaagcatgttattgcttctttttcttttatgctttttgattaactagaaacaacattaattgaatccttactgccaggttgcttttcaggttcagttgtattgcttatttccctttaggaaaacttataaccaaaatgcttcaggaaggtctttgggccgagatgtctatttttttttttaagtgatgtgctctagttatacatgtatgcattcattagtaatattgattatttaccaccttccaaaaaataaattgattatttaccatcagcatactaatagctacatacaaaaaagtgtttgatgca

SEQ ID NO: 3069 - DNA, 459 bp, Glycine max
  unsure at all n locations
gctttattgtcggtcgaaaacagaatatnattattgagaanaactgtagcttgcatttgagaataaaattatcactaccatacatatttaaaatggacctcaaaggccaacttgcatggatatctactataaactanagctaaagaaccaccccataataccctctacaacaacatgtcagggacagtacctaataacttctagggtatctattacactggttagtttatacaattaaaaaaaaatatacactatgaagaataatgttacatagatgaaaaggacccaatattttccttcccatgcaaaccagaaatctctattggatgtgttgtttaaatgctagagccagtcatgacatgatgatttgcagcatgaaagaatacaagcatatatacatatgtcatatgtataccactactgtatgtacatatacatatgcatatgggctttcatatg

SEQ ID NO: 3070 - DNA, 369 bp, Glycine max
actcaagctttagtcggatcgtaggagtatttagtgttgtaatggtttttgctttatttatcaagtttggtcggctgttcacaggcattatttttttaatttacataagcagaatttccaacccaaaaaaattgaagcttgtgaagatatgtcaatatctggttacacagtctaaatcttaattatgatgattaaaaaaacatttatttaccatttagattaagaaaaaagtgggtatatttactcttacataggaggcattatttatattctcttttttaatatatgcatttcacatataagtaaaaaaaaaatctctttcaatgatctccaactatcctcctttatcaagggatttaactcatatga

SEQ ID NO: 3071 - DNA, 446 bp, Glycine max
taagtcacctgcggcatgcaagcttgtttcttgatttgacatataaggatctatgtgctctttttatcttcctcagatggaacaataactgctttatagccatcaagtatctctgcccacaagattgcagaaaaccatacaatcagctattcttggtagataactattcttttgtcatacataacgaatttcatataagtgacagttatgtataaaccatggcctaggatttgaaaaggctatagatgatatgcctgccatttccacagtatcaactagactaaggtaaatagctcatgttaaaaggaaatcttatttaccctgttcatttgccatatcaagaaaagcctgaagcttaatagcccgccggtagtacatcattccccttactgcattaatgtataagtacaataggaacaatattaatccaccaaaccctgtctgtg

SEQ ID NO: 3072 - DNA, 360 bp, Glycine max
tgggaaagtccttctgattctgtttatacatttttgactttatggctttatatgaagtacaaagattagagcttttgctagttgttattaatgaatagcttaaacacttgtgcgtgagtgaaacaatggccgtgagactgtggttttagctactttccttgatatttgtcttatgcctaacttcatctaattggtcaggttacattttattcttctctttggataactgcatgtcttgtaaaagacaagtgatgagggcattttgcttcattctcttatcatgcaatcaataacttttgttgcatacacctttgtacatagtaactgcatgttattgtcacttggggaccaatgaactgt

SEQ ID NO: 3073 - DNA, 434 bp, Glycine max
  unsure at all n locations
agcttgcctaattaacctaaanatgagaganatatattattgaacacacaaattgaaaggaggtcctactgagcgacttccgtttcttcttggtgcggcttcatctctcggtcctactgagcgaccatcctttctagcttagggggaaattccataccttcgtcttcttcaacctcaggccgattcacatctcattcaaaatcgatggtagggtcctcagtattagtaccttcacaggactcgtgatctgatctgtatcgtttaaacgcaacagaaaataaacatgcaaatgaatgagaatgggtgaaggccaagaatagatgaaggaaagatctttatattatattttttaatagcgaaagacataacaccttaacaaggagagaaaccctaaagcctatgcccagctgtagggttaaagctaaagcattaca

SEQ ID NO: 3074 - DNA, 385 bp, Glycine max
  unsure at all n locations
ntaacctcatcgtctctcacagtctttagatttgggagccaatccagtccttgtgttcggactcttagccacttatgatagccgccgatgatctcattactgcttcccctaagctctctgtcctttcttcacgccgcatcccatgccttgcgaactccttggagtaccctcgcgttgtggtcactgaaacctcgtgcgatgaaaggcgtgatgctttcgtctgatggcactcctctcatgggacatccttcgccgctcttttcacatccccggtcgaacgtgtcatacatggccaaaatggcgacgaccgggcttttcttgccatgatgaaaggcgaggaaagcgtctatcgctgctatgtacactaaccccttccatattcgga

SEQ ID NO: 3075 - DNA, 410 bp, Glycine max
  unsure at all n locations
agcttgcttggggngcttctatggagactagatctttgagcttaaatgagggccttcaatggtgattttccaccatggagatgcagcggaagacaaaagagaagaggtgagaggaggcgtcatccactacggaataagccatggaagaaggagcttcaccaccaagatgagccttggataagaagcttggagaggatgctttaatggaggaaaagaaagaggggggagcatgatattgaaggaagaaaaaaaagggagagaagttgaactttgagttgtgtctcacaagactctcattcatcagagttataacaagtgttacacatgcttctatctatagactaggtagcttccttgagaagctttcttaagaaaacttccttgagaagcctctttgagaaaacttcctt

SEQ ID NO: 3076 - DNA, 385 bp, Glycine max
  unsure at all n locations
tcagactaaagcaacacaaaatctatgtatccaaaacccctcaatttaatggattttcaaggtttgagaagtgaaattgagaatggggtaaatttggagcaaactctcacctcacacaagtctataacatcaatttaacttgttcaaactggatttacacctaaaatttcaccgaaccaaaatttgactcctcaacacccaattttaccctagaaatggctctttgttcactttggtcatttgtttttctctctagcacagcccaagctttctcataagtcctaaatgacatttcaaactaggattaactcactntaacctccaaataccactaaatccagaattgggctttcaactctcaaagactcactctttttccactcat

SEQ ID NO: 3077 - DNA, 402 bp, Glycine max
  unsure at all n locations
catgggtggaatatagattangagtttcaaactaatgaattggataaattttttgaattgaaatggataatcattaatccatttatgatccattaaaaatgtactacaaaaatctaatccatccataacttatttcataaaaaaaaagggtccaatccatccattatattttatttttctaaaacaaagtttaatatttatacacattcttacacccaaataccatagaatccaatatttgtctcataaagacaaacggttcattgtctatccaatagcaaatggtgatccaattcaactaatctattaaggtttatttttataattgaatagattgattggttgatttatacgtgatggatcggacggttagtggataaacagatngaatntccacatatg

SEQ ID NO: 3078 - DNA, 355 bp, Glycine max
ttacatgtcaaattcttgttcccaccacattatgagtttttaagtttaatgggcagcatgttgatatactgaaagattcaatgttccaaatgaataataatcaagtggcctagtgcatctgaatttttgataatcaaatcaatgcataagccctttaagcatgttttgatgtcctagaaatagtagatttttaacatttgagcaagaaaatcaaaacatacagtcatcactcctgttgctgcactgacaccagcttcaccaaacatagcagttgctgcttcagtgacaagagcagttgccccaatattgaccaccctgcatacaacaaaatactagcatgagaaacattctatac

SEQ ID NO: 3079 - DNA, 430 bp, Glycine max
  unsure at all n locations
agcttatgaacccatactagtcgcttcaatgctttgaaacangttcttttttggctctagagctagaaaaacatgacaactacgactttcttgtgagagatcttgctccaatttgggtagccccatgtatgatactttacatagaggtagcatggaaaacaccttgcaatagtgtgtatacataggtgaatattagaagtatgaaatccctagcaaagtgtgaatgattgtcttcctatatgaatgtctgatagtgtggaatgccttttttgaatgcaaatatgtgcaggatgtaattattttctcattatgcatataaataaataggagtgaaacactaaagacttgtatggtgtacttcacctgtatgtaatgtagttgttgatacagatgtctatgatataaattaggtgtgaagtttgacgcaaca

SEQ ID NO: 3080 - DNA, 354 bp, Glycine max
tctgttgttcaatttcgaacgtgtcgatatattatgcgtcttgaatcgtacctccgagttaaaagttatgaccatttgaatttctcgagagcttccgttgttcaattacgaccgtctctatatattatgcgccttaatcggacctccgagtgaaaagttatgaccatttgaattggtcaagagcttccattgttcaatttcgagcgtctcgatatattatgcgcccgaatcggacatccgagtgaaaagttatgaccatttcaatttcttgagagcttccgttgttaaatttcgagcgtctcgatatattatgtgcctgaatcggaccttcgagttaaaagttatgaccatttg

SEQ ID NO: 3081 - DNA, 168 bp, Glycine max
  unsure at all n locations
agctntgagttggtatctggtcttagaattaattttgctaagagccaattcggtgtggtaggcaaatctcaagattggtgtagtcgtgctgctgattacttgcactggagccctctgcagtttcctttcttgtacctagggatgcctataggtgttaatcctaggagg

SEQ ID NO: 3082 - DNA, 387 bp, Glycine max
tgtcccctgctctaacggcactatcccactaatcccttttctacccttacgcataatcttgaaggtaagctggcctcattactctccttttgggcttttccatattctgcacctctgctgaatgttctctttgtacccctactctgtgatctgtgttttccctatcatcccgcggcccttgggaaatcaccttgtcctcaaggtgatagtcattaagcaaagcagaccaatcctcccaagacgtatcatctggggataagccatgccattgaaccaagacttcccaagcttctgaaggggttctgcgataatccacaattgctgccggagtgagaaggggttgatcattatgaaattgagcacgtagaggcgcgaaggaagtgatgt

SEQ ID NO: 3083 - DNA, 337 bp, Glycine max
tggcctagcccacatcacatgttatgtgcaatgcaattgcatacaaatgctgacttttccttttaaaaaaataataaaacaaagatatttgcgggtcccatgttgctcaaaacgtttcgttatcagttttcacatcttctgtaggtacatgaacatgtcctgcaagggcgagagctggcccatttgatactgaacagtgccaaaaaggtaatcatccacggaaaggttattatcgtccaagtaattaaactgacaatcaaacgcgttttctagctttaggtccagatcatcgttccacttggggtcgctctgcacctccctctcgcacgtgacatcg

SEQ ID NO: 3084 - DNA, 426 bp, Glycine max
  unsure at all n locations
agcttgtataaagcttcaagtggatcatcatcttattaaggggcgaaacacgattcaagggcttgcaaccatggttgtcaaattctagagtcaacttgtagactcttacgagattaagagtttaattggtccctatgaatgaaattggaagtaaactcatttttttatcaaactcagagcagactcggtgaactcgtgttagactcatgtaaactcgcgagtctatcccgagtcacacgggtttagttgggaattattttttttggcaataaaatcgaaagtaaacttgttttgtgcccactgcatcgtgaaaaaagttgatcgcgtttagggattattcttcttttgttccactcttgattgtcccaatttgtccctgttcttcattcatgacgagttggaggcttaaagctgntcagcagcagc

SEQ ID NO: 3085 - DNA, 347 bp, Glycine max
tctgcatgtttagagatttctagttagagaatgttttattcgggttgcttggggactggacgtaggcacaagggtgtggccgaacctgtataaatttgagtttgcactttcttttcccttaatctcctttatttattattgctttatattcatattcaaattgttttatttgaatcaatatttaagaagattgtcattaagggaattcataacttgaataaaaagtgaaatacatttttaattggggaagtagtttggaatatcttaattcaaccccccccccttcttaagatatctgaggccgcttgtctaacaagtggtatcacagctttattcttgtataaagt

SEQ ID NO: 3086 - DNA, 389 bp, Glycine max
  unsure at all n locations
attggcaattccaactgcatcaatgcatctttaacaagcataccacgaaccagagcagcaaccaagttgaccttctttggactctaaaataccatagaaaacaaggtatgtaaaatgtgcaactagtcagatattaatcagatccttcttaaaccataaattaagggcatttccacagcanaccagggaaggcatttcaatggctaaaaaattagatgccaacttttctgcaaaataacatgttggttaaaacacagaaatttcttagcatgtagctaggcagtggcaccacatanatgtaacaaaacattgtaatttttcaatatttatgttatggctaagctgaacatacttgtgataatacttatgttcactttagcatgcatact

SEQ ID NO: 3087 - DNA, 360 bp, Glycine max
  unsure at all n locations
aactaagcttcataacatttagctagagggagtgtgctagaaaatctttaaaacattttaatatcatagacaatagactttattctttgctatatcaaatgatgaccaccttcaaggtcacatcaactatatttgtttggaacttttcacaatatggaagatgacgaaaaaatgctgatagtgaccacaacaatgcaaaattttataatagtatgttacaacggcctatggggagaggaaaagaaggaatataccacggcccgggcccacgatgcaacatactaccttaatcacaaaataaacattattttgtcactcactatggaattntgcaatccacaaacaacaacatatggggag

SEQ ID NO: 3088 - DNA, 428 bp, Glycine max
  unsure at all n locations
attttcttgttttctaagtcttgacaaacaacaattcattcaccagttttttcaaattcaaaaaggacgaaccaaaagtatatcatttggatctatggtacgatagatgccagcaaggtcccttagagtgatgttcttcaagctaggaatctaatctatggcagagtctagatgaccatttgtcaaatagtttgcatttgaaaaagaagatcataatagaaaaatattaatacatagatatcataatcataagggacttgctaattagtatacttggttattagttaaagaactaaaagaagaaaatgatattgcttattgaattacatactacactgctatngtaagacatagtctgcttttccacaattatgttacatggtaggtagagtattaatgacaactgagcaataatagattgaaccctt

SEQ ID NO: 3089 - DNA, 395 bp, Glycine max
  unsure at all n locations
gcttgtgcattcaatatcctgatgagggtgttccatatgttctcaagactgttctaatacattcgctgcccaagcatcatggtcttgcaggtgaagatcctcataagcatcttaaggagttccatattgtttgttccaccatgaagccccctgatgtccaggaagatcatatctttctaaaggcttttcctcattctctggagggagtggcaaaagattggctttactaccttgctcccaagtccattttcagctgggatgaccttaagagggtgttcttggagaaattcttccctgcatccaggaccattgccatcagaaaagacatttcaggcatcangcaacttagtggagaaagcctgtataagtactgggaaagattcaagaaattatgt

SEQ ID NO: 3090 - DNA, 456 bp, Glycine max
  unsure at all n locations
gcttgtgactgtaatagtatgacataaccacctataactctaccattctctgatgatttctgacatagntctctgtacaggttttctaaacaagcaaaaccccaactatatttttttatgttgtcaaagtcatgtaataggttcaaatacattagatgaactctatttccagatttatcaagtattaaaaagccaccaattatgtacattatgtaagctctacacctacattgtagttggggtattgttggttctttaggtaatggtgtgcacaagatgttaagcaaccatgtcagcttcagtgtggctcccttacatgcattatttggaggcacttcaccgagtaactcgtcgcataactaatcccaatgtaagaagctaggtcctgtcacaacacaaccatcgaccctaatgcctagatgcagtgcaacatcttcaagtgtgatagtgcactca

SEQ ID NO: 3091 - DNA, 360 bp, Glycine max
tgccacccagctcgcccaggcgagcaaggttgcttccttcagaagctttagtcttctggaggaaggatttggaaggcccaagtgggccagattgctatttgtaccccctttttactaaatgcacccccttctatttttttggtaattctttttccgtaacgttacgaaactgtacgaattttgtaacgatacttattttccttccgcaaggttacgaatccttacggattacatatttactcttttttagctttcgaagaagttacggaaacttacggattgcgcaaaaatacctcttttcgacttccgccacattacagaatttcacggatagtgcaagcttgctatcttttgatttct

SEQ ID NO: 3092 - DNA, 396 bp, Glycine max
  unsure at all n locations
gcttgagatgaggaagtgctgaagggngaaacttcctgcttttatggttgaccacagagnggnacctggagatatgtcgcggtggtcaggagaccttggggacgtcaggtggggtgctattgcccaaaaccaagcttgaccaatcccgacccaacccgggcatagtcggtcagtgagaacctgtgatgtacctaagcaggcgagctccttgcagtcaaccgataaaaggaaaacaaagaccacaaagcaaggaggcttgtggtggctgaccagctgtgaatttgtgtgatatgtggagtatagtctctggtaatcgattaccaagggtgggtaatagattacaaggcttanaaatgaagacaggaggctaagatggtctctggtaatctattacca

SEQ ID NO: 3093 - DNA, 364 bp, Glycine max
tgtccacaaaaataggtttttgaaagtttatcatttcatcttcttactatagtaaaaggatcatttttaaggtccaacgccttaaaatgatcacctttcaagtaaaaaagagtcacttgattcacgcataagaaagaactatgtaggtatgatttcctcatcccaattgaggaatacgtagcagtaaagggaaatacccttgtcgaccccaaaaagagaaaaaatataaaaagggtataaaggatataaggacgtaaaagggaacataaaaatctaagtcatgtttgcacatttgattataggctgccgtctcttatgacggacgtgtggggtgctaataccttccccatgcgtaaatacaact

SEQ ID NO: 3094 - DNA, 466 bp, Glycine max
agcttgtctcagcgttggtgcgagacggagactaacatgctagctatcatcgccaagtaccaagaagagttaggtctagccgcggcccacgagcataggattgcggacgaatatgcccaagtatacgcggaaaaagaggctagaggaagggtgatcgactctttacaccaagaggcaaccatgtggatggatcggtttgctcttaccttgaacgggagtcaagaacttccccgtttgttagccaaggccaaagcgatggcagacacctactccgcccccgaagagattcacgggcttctcggctattgtcagcatatgatagacttaatggcccacataattagaaatcgttaggaaacttgtatggtctctcagaccttgactagatatgacttcctttttgaaataaaatgagttggtcccatgtttctactccaaaaaacttgtgcaaatcaaatcacttcta

SEQ ID NO: 3095 - DNA, 397 bp, Glycine max
tctagctctataatattatattctatcttactttcctttctcctcctcccccatgttctcttcactttccttcctcctcccccatgttttgtctttctttcttttctgattacgcactcactcacatgcatgtgtaacaactaaaataattaatataactattttaaaaccattactaaagctttttttcataatagcgtttttagcacttttattaagacaaccctaacactacaatctatatcccgtgcatgtcatcccatatgtggctagaggtttgtattgtgttgtggtcaaggctgcttacgcactagtgttcctgatgaaacactacaatttctacagttgccactttagaattttggaaaatcaactaatgttgttagcactctaaatt

SEQ ID NO: 3096 - DNA, 451 bp, Glycine max
aggctgcagctgcccagagaagagtcacggagatttcttaccacctcacaagactggaaagcggtttctaatgactcctctacggcctccacataaggcatagaggatgggcagctcaccaagatgtcttcctcgcctgatatgatgaccagatgcccttccactacgaatttcaacttttggtggagtgtagagggaacaactcccactgagtggatccacggccgccccaacagacagctgtagggggggttaatatccattatttggaaggtaacttgacaggtgtgagggcctatctgtaccgggagatcgatctcccccctaacctctcggcgggtgccgtcgaaggcacgaaccaccattgaactcggctttaggtgggaagcattgaatggtaatttctccaaagtgctcttaagcatcacgtttaaactggaaccattatcga

SEQ ID NO: 3097 - DNA, 378 bp, Glycine max
tgagtcacagccgaaatgtaaaagaaatctacattatttaaacactgaatgtggaccccatccacttgatggggctaaaaccacattcgaactgagaatcacaagacaagacaaaaagcaactaaaatatccagctaatgcaaccaaacaaacctaaccgaaagctacagtttcaaaggtatccaaaagcaaatttaaaccagaaagcagcagaagaaactatatgaaaaagagaacaccaaatccatcatgcacaatattgcatcttaagcttttctatagatcatctccatgagatccatttccttcttcatctgaacctccggcgccatctccatcgcaacatcataaccccatgtgccatcttccacagcagca

SEQ ID NO: 3098 - DNA, 412 bp, Glycine max
  unsure at all n locations
agcttggagttgttatcttcgtgagtctaggtttcaactctctcatccacccaaaacacatgtcanttgaaccattcaagagtatcaacataaggcgattccaaaagtttcctgagaccctaacacacaacaacacattcacattaaccctaatccagttcaattcaattgaatcaatcactattaggttcaaacaaaaaaaaaggaacatttaaaaccctcaccggagatatcggcaaacaataaaagcccctctttcgaaagtgaatntgttggagagatcgaagacttatgcggctagggacacgacaagaatccttttttcgaagacctcgacaaaaaacattattgatgctttcacttagggggcaggtcttttgggattgacgatgctaacactnttgaatctact

SEQ ID NO: 3099 - DNA, 386 bp, Glycine max
  unsure at all n locations
acctatgcaagactcaagctttagccctttaccatcctccatatgaactttccaatttatcgagtagttacatttatatattcattttttttcacaaaagtgacagtaaggtttgatcataaaactttgtataaactatttaattctcctatcactagactgatttagtggacatatatttactctttctttcatcttaattttactgcacttttttattntattttttatcataccacttattagttattacatctataactttctttataacaatcaaatccgcccccaaaatgtgtttatgtttatatttttcgtttactcttgtttgtaggtttttattctttccgatgtaatgctcttttttttaaagatggaatggaaaa

SEQ ID NO: 3100 - DNA, 231 bp, Glycine max
tgcaacaatgcataaccagctaatgggcattagcaatttgtgtataacaaacgagggctgaagcctcactctatacttaaccactcaagacagcttatttaccaataacagtgcattaactcgcatataagaaaaagcaacgctatctctcattagagagaaacaagttgacctgtagcttagccaccaaaacagaaccatcacgatatctgaaagcgaaaccgccataac

SEQ ID NO: 3101 - DNA, 439 bp, Glycine max
  unsure at all n locations
agcttcgtatccaagacattctctngggggtgtatcttcttcttccatggcttattccctaggggatggtgcctcctctcacctcttttcctttatcttccgctgcaactccaaggctganaatcaccattgaaggacctcattgaagcttaaagatccagcctctatagaagcttctcaagcaaacttccatcattccttaactcctttgttaatgaactacttttcattatcggagatcanagtgttaggaatttccaaatggcaaacaatgttnttccaaatgaatttttgaacattngttgctgaaatggtgctataggctcaggctcgatctattttgtgaaatgatcaatgccaactaggagaaactntacttgtccttttgcangggaaaaggtccaagtatgtctactacccaagaggcgagaggccatga

SEQ ID NO: 3102 - DNA, 353 bp, Glycine max
tggagaaaatgccaactaaaaagtgaaatgaaggaagtttcttaaagataagagataaaagaaaaagaggaaacgattgaggaagagaaagagaaagatgaagaaagaaaagatttacgaatagaaagagaaagatggagaaagaagagtgaacaataaataggggctgtggaaatatcataaatgcccccgtttatactacgtgtcaatgctgaagacaggggcaaagtcgactacttttagagtgaaaaagacaataaaaccaataaatgtgtaatatgtcaacaaagtatccagtgcaaaaaaggattattgctaaactattcttttcatatagatatattagatagata

SEQ ID NO: 3103 - DNA, 434 bp, Glycine max
  unsure at all n locations
tgcccctttgaccactgaatgactgcattgcacnncccnnccgaanacncacgcttcagcgagcgctnaaaangagaggggttttgtaaatgttgattttttttcagacatccgaggaaaagatattgtcgtttgaattttgcacgaccattaacattcaatttcgagcctctcgattattacgcgactaatagacatcgagtaaaagttattggcgcttgaatttgcaacgaccatcaacattcaatttcgagcgtgtggatatatacgcgactcaattagacatcagaggtaaaagggtattgtccgttgaatttgcaaccaccaataacattccatttcgagcgtttcgatatatttcgcgactcaatcagacataccgagttaaagttattggcgtttgcatttgctcagagctttagcatgtagtttcg

SEQ ID NO: 3104 - DNA, 194 bp, Glycine max
ggaatgagaggaaacggcttgcctcagttcttgattatgcacatgaactattgaggacctttcctggatccacagttaagatcaacacagtgccaaaatcacaaggtacaccacacttttagaagcgatatatttgacctgccgcctgtcatatcgggattggtgctggacgcctaccattcatacgtctagat

SEQ ID NO: 3105 - DNA, 286 bp, Glycine max
tgtactccatcgcctgctacgtttgaatacgctttcctattcctttccctttagaggggcacaggtgtcctcatcattgtgccaaacattacagtcaatgctggaaagataatgtaagctgctgcttttaattcattatatctactgttcctttaataaaaactactcaaaaaatgttattactctctattgttgtacgaacaaaaaaccatactgattactatgtgacaagacaccaaacgcatacaaagtactaggagtataaaaaattgaaatcttaccttat

SEQ ID NO: 3106 - DNA, 473 bp, Glycine max
  unsure at all n locations
cggatccttaagcacctgcggctgcaagcttgaatatttaagcaagagtntggagtgcacattgaagttactaagatgtggagagccatgaaagaagcaaagcaactagtggaagggaatgagaggaaacaatatgccaaagtatttgattatgcacatgaattattgatgagcaatcctggatcaacagttaaaatcaacacagtgccaagtccagaaggtccaccacaattttagaggctatatatttgtcttgctggctgtaagaaggggtttggtgctggatgtaaaccattcataggtctagatggatgtttactaaagagtgcatttggaggaaacttgctttcttgctgtgggcttgatgacaataaccacatctttgttattgcttatgctgntgnggacattgagaacaaagacaattggaaatggttttaactttgntgcatgaagatcttggggattacata

SEQ ID NO: 3107 - DNA, 393 bp, Glycine max
  unsure at all n locations
tccaagattattttgatgacgccaaagattgttnnaggattcattcacgactagagtaattcaatccgnaanattcaatgaaaattcaagaaaaactcaagatatgcaagaacttcaagaaaaacatcaagataagtataaaaagaatttttcaaagaaaaaattgaatatcacaaattttccaaaagaannngcgggggaaaaatcttttaccaaaatttttactctctggtaattccattaccaaaangccctaatctattaccanaancccaaaacagttttatacgggatttacaaagtagtaatcgatttccatgggcatgtaatcgattacaaatatttttgaacattgaatttcaaatttcaagagtcacaacttgtgataaaaca

SEQ ID NO: 3108 - DNA, 307 bp, Glycine max
agcttccattggttgaatttgagcacctcgatatatatgcgcctgattctaatctccgagtgaaaagttacgaccatttgaattcctccagagcttccattgttgaatttcgagcgtctcgatatattatgcacaagaatcggacctctgagtgaaaagttatgaccatttcaatttctcgagagcttccgttgctcaatttctagcacctcgatatattatgcgcctgaatcggacctccaagttaaaagctatgaccatttgagattctcgagagcttccgttgttcaatctggagcgtctcgat

SEQ ID NO: 3109 - DNA, 357 bp, Glycine max
agcttctatataagctgaaccattatatcaataaacacaagttgagttttattcagaaaattagagtttatctcttttatcttagtgagagtgattctcctaaattcttgagtgattcaagaacaccttgcctgtatcaaaggactttcacaacctttgtgtgttgccctcactggaaagagtgattctttccttcctttcatgatcacccttgttctttcaaaccacaattccagaaaatccacctctgcccagaattatctcgtggccataactcccattttacgcactcaaattaagtgattcttgagcctaaattgaatttcaaaacgagacctttcaccttcgtttggaatc

SEQ ID NO: 3110 - DNA, 442 bp, Glycine max
  unsure at all n locations
gcttgctaacccatggaagctcctaatatctcccacactntntaggttgtgccattcttggatggccttgattntcttagggtccacttggaccccatttctaccaactacaaaacctaagaaaactatattatctatacaaaaggtacacttctctatattttcatagagggtgttnttcctaaggactgaaagaacttgtctgagatgtcctaagtgatcatctagcctcctactatacactaaaatatcatcaaaataaaaaactacaaatctacctatgaaatcccttaagacatgatgcataagcctcataaaggtgcttggtgcattagtgagcccaaaaggcatcactagccattcatacaaaccanacttggtcttgaaagcagntttccactcatcaccctttttcatcctgatttggtgataaccactttta

SEQ ID NO: 3111 - DNA, 363 bp, Glycine max
tgttgaattaccgaaaggaaataaggtagttgtagcataatggatatttcataacaaattggacgaaaatggtgaggttgtgagaaacaaggcaatattagtctctaaaggtgactcacaataggaaggtataaactacatagaaacttttgcacatattgcacgtttagaagcaatacgcatcttactttcatttgcaacctatagtaatatgaagttgtattaaatggatctaaaaaacacatttttaaatggattaatccaagaagaagtttctattgaacaatctcctggatttcaaagtgaaacccttcttcaacatgtttttaaactcaacaaagcatcatatggacttaaacaagc

SEQ ID NO: 3112 - DNA, 463 bp, Glycine max
  unsure at all n locations
gcttatgctgcanacacttataatagacctccttaacagcaaaaccttcttcaatagaataattatgacctttcaagcaatagatacaatccaggttggaggaatcatccaaatctgagatagacaagtcctccacaacaacatcagcctgtccctcctttccaaaatgctactggtccaagcaagccatatgttcctcctccaatgcaacaacaacagtagcagtcacaacaaagacaacaagcaactgaggctcctcctcaaccttccttagaggatttagtgaggcaaatgaccatccagaatatgcaatttcagcaagagacaagagcctccattcagagtctgacaaattagatggggcagatggctactcagttgaaccaagctcaatcccaaaattctgacaaattgccttcacaaactatgcagaatccgaaaaatatgagtgccatcaccttga

SEQ ID NO: 3113 - DNA, 366 bp, Glycine max
  unsure at all n locations
ntgtgggagtcagagttgtactggttagatatgtgttgaatgtttactgtttagggtttgatttttactgcttttagcacaagaataataaaatcattcaaaaatattattttctgagttctggtttggtcatttgaaagaatgccataatcggtcatcctatgcccttattgagaatttgagaaattggatggagaaagggtcaaggctcaaaatatggaagcagtctgatataactcgaaacattcattaacttagctctctgttggttttccagttttcatcatgtcatcatttatgtgtgatctgtccattcctagaaaatcggtcacacacacacacaacactnttagaaaatcatatatt

SEQ ID NO: 3114 - DNA, 430 bp, Glycine max
  unsure at all n locations
agctntgagctaattcaaacgacaataatgttttgctcggatgtctgattgagtcccgtaatacatcgagacgctcgaaattgaatgttgaagctctcagcaaattcaaacgataataactttttactcggatgtttgattgagtcccgtaatacatcgagacgctcgaaattgaatgttgaagctctcagcaaattcaaacgacaataacttttttactcagatgtctgatagagtcccgtaatatatcgagatgatcgaaattgaattctgaagctctgagctaatccaaacgacaataactttttgctcggatgtctgattgagtcccgttatctattgagacgctcgaaattgaattctgaacctcagagctaattcaaacgacgaataacttttactcggatgtgtgattgagtcccgtaataca

SEQ ID NO: 3115 - DNA, 360 bp, Glycine max
tcagaattcaatttcgagcgtctcaatatattacgggactcaatcatatattcgtgcaaaaagttattgtcgtttgaattagctcagagcttcagaattcaatttcgatcatctcgatatattacgagactcaatcagacatctgagtaaaaaagttattgtcgtttgaattagctcagagcttcaaaattcaatttcgatcgtcttgatatattacaggactcaatcagacatctgagtaaaaaagttatggtcgtttgaatatgctgagagcttcaacattcaatttcgagcgtctcgatgtattacgggaatcaatcagacatccgagtaaaaagttattgccgttggaattagctc

SEQ ID NO: 3116 - DNA, 383 bp, Glycine max
  unsure at all n locations
aatcgattacacagntatattntgaagggtcatgacttttgaatttgaatttcaagagttccgttgctggtaatcgattacaaatatttgatcatcgattacaagttcaaaattcacattcagaaccctttttaacattacccagaggcttggatgtctcggaaacactttgttttgaggcaaggcttgatctttagtgaatcttgaaacaaggctttntttgttgaagcaatcttgtattaatcttgaagcattgcttatcctttgaagcaaccttatttgattcttctttggcatcatcaaaatcatgtatgcatacattcacattctccccttttttgatggtgactctcattatcaagcaaattctttctgacatcatc

SEQ ID NO: 3117 - DNA, 388 bp, Glycine max
tgacacttcgagacttatacaatactcaagcttcccgccaatggtatttgaggtttaatgataccattatttcctttagatttaaggaaaatactgtttatcggtgtatgtatctgaaggtcagtgggagtaaggttattttctaattttgtatattgatgatatcttgcttacaactaacgatcttggtcttcttcgtgagactaagaaatttctctctagaaactttgaagtgaaagatatgggtgaggtaagctatgtgatagggataaaaatattccataatagatcacaaggattgttaggtttatctcagacagtatatatatcgataaagtgctagagagattcaagatggaaaggtgtttaacattgcctactctaattt

SEQ ID NO: 3118 - DNA, 449 bp, Glycine max
  unsure at all n locations
agctntaaggtgtgcaactccaccattttcatattagaacactggtaatgggtctactatcattgttatcatttatttctccatcattgaggtgccacttgagctgccaggtctctccacctttgggtgtattctttgaaacatttgtgcccctttttgcacatgttctgtagttgcatcctatctggagccatatcagaattgtactgacactgcctaacgaaagcaactattaggtccttccaagaatggactcgggaaggttccaagttagtgtaccaggtaacagctaccccagtaagactttcttgggagaaatgtatcagtagttcctcatcttttgcgtatgcccccaccttccgacaatacatctttagatggttcttggggaaagtagtccccttgtacttgtcaaagtccggcaccttgaacttgggaggggtaatgat

SEQ ID NO: 3119 - DNA, 364 bp, Glycine max
tttctttctcaatcaacctgtctattgtctaacaattctaattgcaagttcaactttttgttctttttatgtctaacatacatatttgctcaaacttatgaaaagaaacacaaactccatcacaatcatgcatttaatccaaaatcaaatcataacaccaatgaaacatatttgctagcgcttattacaggatcaacaaatttcaaaacttgtaggctaatgaaacttgaaagaaagtttggagaatcaaagctccacaaagaatgagagtctttattttgcagcctagacatgataggctatctttcaaattctctaatctgagaaccgaaccaaacacaaatgttttttttaatttctattt

SEQ ID NO: 3120 - DNA, 435 bp, Glycine max
  unsure at all n locations
agctntgagccaattcatacgacaataactntttactcggatgcctgattgaggcccgtaatatatcgagacgctcgaaattgaatgtggaagctctgagccaattcaaacgacaataactttttactcggatgtctgattgacgccccgaatatatcgacacgctcgaaattgaatgttgaagctctgagcaaattcaaacgacaataactttttactcggatgtctgattgagtcctgtcatatatcgagacgctcgaaatngaatgttgaagctctgagccaattcaaacgacaataactttttactcggatgtctgattgagtcccgtaatatatcgagacgctcaaaattgaatgttgaagctctgagccaantcaaacgacaataactntttactcggatgtctgattgagtcccgtcatatatcgaga

SEQ ID NO: 3121 - DNA, 358 bp, Glycine max
tcaacattcaatttttagcgtctcgatgtatgacgggactcaatcagacatccgagtaaaaagttattgtcgtttgaattagctcagagcttcaacattcaattttgagagtctcgttatattacgggacacaatcagacatccgagtaaaaagttattgtcttttggattggctcagagatttaacattcaatttcgagcgtctcgatatatgacgggactcaatcagacatccgagtaaaaagttattgtcgtttgaatttgctcagagcttcaacattcaatttcgagcgtctcgatatatgacgggactcaatcagacatcccgagtaaaagttattgtcgtttgaattagctc

SEQ ID NO: 3122 - DNA, 428 bp, Glycine max
  unsure at all n locations
agcttgcaaccattagaagaaaaagaacatgttattagaagtatgactganaatgttagtcagtttgtcagattgattgcgaagaaatgcattgatcgtatcctggtgagagtgtgatccttaaattntgagagaaacgactatcatttagtactaattnttgcatgaatctctgaagtatggactgaatgcatgaattgaggatgatgaaggccatgctttgattgtgatagctacttagccaaaaagctgaccttgtgcttgaatgatttatcccttgcacccagtttgagttgaatgaattattgattgattgaaccttgagcctatacagtgttatctcctgctaccttgttntaggttgtaggagagcatcatccacagaaagcttgattcatagtaaatttgtcccannattgggggagtaa

SEQ ID NO: 3123 - DNA, 351 bp, Glycine max
tcaaaccacagcaacacaaaatctaggtgtccaaaacccctcaattcaatgggttttctaggtttgaaaagtgaaatttagaatgaggtaaatttgaggcaaactctcacctcacaccagtccataacatccatttagacttgttcaaactggatttacacctaaaatctcaccgaatcaaaatttgactcttcaacacccaaatttgccctagcaatggctctttgttcactttggtcttttgtttttctctctagctcagcctaacctttctcacatgttctaaatgacatttcaagctagtattaactcactctaacctccatttaccacagaattcagacttagcct

SEQ ID NO: 3124 - DNA, 446 bp, Glycine max
  unsure at all n locations
agcnttgaccaaacctcatcagtagttgtttccttagagacttgccttaacaccttgtctctgacactaaggataattgcactgtgtgccttctgcagtagtgctttcttatccccatcatccatcatcttttcgagtttggcttttccatcaagtgcttccaccaggccctgctgaacaagaagggctctcatcttcaatcgccataacccaaaatcatttttccctttgaatttttcaacctcatacttggccaagcccattgcttgaatcgagcccaaaatcatccacgctcacaaaaatatgagtttcttgtttgaacaagaatgagcaaaaatgtagaanaagatgaacaaaagaacttcaaagaatcgtgattngactagagtaaaaaatcaactctcaatctcctcacaataaccactnttatttaaactctgaataat

SEQ ID NO: 3125 - DNA, 388 bp, Glycine max
tgacgtacgctaagcctcgcatctcaggtaagcgcatgttgcagaaagatttttggtgttgcagaaagcgctaagcaccgctgctgcgctaagccccaaatacttactggaagttacaacttcaagttgggcttagtgtgaggctaggctaagtgccagtgttttaaacttaaacgtcacgttggcacgctaagcgcgccatatgaaatttagtttttaaaaagtagaggcagagacacttgggttgctaccttggcacccaaacctctacactctcacatccttgagcattctcttttttctgttgtgtgctactgaccctctgcatcatttgcttcttcattctctgcgttacacaatccaagtaagtctattgatttcttttact

SEQ ID NO: 3126 - DNA, 427 bp, Glycine max
  unsure at all n locations
agcttctagtcgtccatagacctcctctgtgttacggtctagcaaacgttgcatctgtgcattcatcgcatccactaacagacgttgagcgccgtccaactgatggtactcgtcaccaccaccacctgctccagccataattcaacaggaaaaaaaaatgtgcaataaaaattattaaggtttcaggacctcacaacactctactcacgtctcttagatggtagtacactcgtgtttaatgctctcaataggcttttgtgtaatgtattccctcttgccttttaccactcgtgtttcctcttaagttcctggatggaccanattagacacacaaggtaatataaaataaaaggaaagacaatataatgatcacaaacagatttgatttgggataacaacttggactngattnggataataatatatt

SEQ ID NO: 3127 - DNA, 310 bp, Glycine max
tcattgcctaacaagccaacttacaacagcaagcccctttagactcagcataaggatgcacaggtcaaagttgagtatgtgaaaagattgtatgaccaagtgaaagtgcaaattgcaaagaagaatgaaagttatactaagcaagccaacaagaaaaggaaggaagtggtacttgaaccccgtgatgatcctggacatttgaggacaaatgtttttcaagaaagagggaatgatgagaatcatgaaacaggccaaatacagtctaaaggcccaagtggagaaagacgaatgcccaagtggagaaggacaa

SEQ ID NO: 3128 - DNA, 435 bp, Glycine max
agcttgtatttctctcccatggttgatataatatctatgatggtatcaaagctcttcctttgaagagccctgctgcgctacttatattcttcctctcgattatcatatccttcattcttacatcatgagtgaacaacaacaagatcaatcacttaatgtacacagtccttattacctttatctgggagaaaatccagcgatagctttggtttcttcggttcttgattcatccaattataattcatggagtcgatctatgcttattgcattaagtgcaaagaacaaatctgagtttgtcgatggttttattcaaagacctgcatcagatcatgcacttcatgcagcttggaagaggtgaataatatggtgatttcgtggttggttcattcaatctctctttcaattaggcaaacatactatggatggataatgcac

SEQ ID NO: 3129 - DNA, 354 bp, Glycine max
ttatattttatattagtcctttctcacgtgatcgttttcttcaaagccttcagatccatgacactagcactgcgttcacacttcacgcaggcacaataaaaagctaaagtatccaccaaaactgtctttcttcttctaagtgcaattaaatatggagataatcaaatcaaatttgactacaatttttgtttcctaagctgtttgagaagccaaaataattggttcgttgcgtagttatgtcacatcaagctgaaccagcttatacatcttctaagacgaatacaataaataaattaaccaaaggtggacctaagaataattaagataagctctttgcaatagaccgtgaacccc

SEQ ID NO: 3130 - DNA, 526 bp, Glycine max
  unsure at all n locations
ntgaacnacccgtnncactttgancccttttattatgnccttcgtannnaccgcggcannctnaaagaatagctggaggcatgccagcttctaggctccatatatctctctcgnggttctgtcancanacgatgcatctgtgcatgtcatctgatacacttacagacgttgagcgccggccanatgatggtactcgtcaccaccaccacctgcttcagccataattcaacaggaaaaaaaaatgtgcaataaaaaatattaagggttcaggacctcacaacactctacttacgtctcttaaatgggagtacactcgtggttaaagctctcaataggcttttgtgtaaagtattccctcttgcctcttaccacctcgtgttcctcttaaggtcttggatggacccaattagacacaccagggtttatataatacaagcgaagacaatattatgatcccccaccgatttggtttgggataccacctggacttgatttcgaatataanatattacatatggagttggcn

SEQ ID NO: 3131 - DNA, 281 bp, Glycine max
  unsure at all n locations
aagcttgcttgcggngcttcaatggaggaaaagaaagagggatataaagatatagggggggagcacgaaattgaaggaataaaagagggagagaagtggaactntgaagtgtgtctcataaaactttcattcatcaaagatacaaccaagtgttacacatgcttctatttataaactaggtagctgtcttgagacgctttcttgagataactctcttgagacgcttgtttgacaaaaagtacgtgagaagctagagcttaactacgcacacccctctcata

SEQ ID NO: 3132 - DNA, 461 bp, Glycine max
  unsure at all n locations
agcttatgctacanacatctacaatagacctcctcatcctcagcggctatataagccacaacagaacaattatgacctctncagcaacaggtacaaatccgggtggaggaatcatccaaccttagatggtcgaatccttcacaacagtagcaacaacaataacaggcttattttagaatgttgctggcccaagcagaccatacgttcctccaccaatccagcagcaacaacagcaacagccccagaaacaacaaatagttaaggctcctccgcaaccttcctttgaagaactngggaggcaaatgactatgcaaaacatgtagtttcaacaagagaccagagcctccattcagagcttaactaatcagatggaacaattggccacacagttaaatcaacaacagtcccagaattctgacagaataccttctcaatctgtccagaatcccacaaatgtgagt

SEQ ID NO: 3133 - DNA, 391 bp, Glycine max
  unsure at all n locations
acactcgaaactaagcttaatttttggaaaattttcatgcagaagattttatttatccctttatgctttattgagacattcttagtcaattccaagtgtgtacataatagtttgtgaattataaagaagaagtgaagttgatttttataatgagataatgaaattcactttcatataagaatttggtgtggtgaaagtaagaattcaaggtgttgaaatatcttactatgctatttgaactatagttgggtccataagtgtaatgaacatataaatggtgaatttatgatatggtatcctctttttggtgttgaatgggtgaatatgattatgatggtgtatgttgattgttgaatgaactancatatcatgcatatatggataaatgaca

SEQ ID NO: 3134 - DNA, 300 bp, Glycine max
  unsure at all n locations
gcaagcttgagcagantcanacgacaataactnttaatcggacggcatttgttcccctaaatatcaaactgctccaaattgaaaatggaagctcgtagcaaatttaaacgagaataactttttactcaaatgtgcgattgagtcacgtaatatatcgagacgctctaaattgaaaacggaagctcatagcaaatgtaaaccgtaataacctttaactcggatgtccgattgagtcctgtgatatattgagacgctcaaatatgaaaacagaagctctgcgcaaattctaacaacaataac

SEQ ID NO: 3135 - DNA, 346 bp, Glycine max
tgtaggattatggggtacccatcacatgtggtactatgtggcggtcgttcgatggtgcacaacaagttttccacatccacaatgcgcgcataaacccaccatcccctgttgcccacctccaactgagctcacgtactcccacgtagcccatatcctcgtttctctcaacaccgggtccccatcaatcctcccaagcttccccaacatcaaagtaatacaacattcacacagcacaagctatcacagccaagcaaaacagggcaaaggcagaaaactctgctcaaaacaccaaccaaaatcacagcttttctcacttaaagaccccagtaacaattccttcgatcca

SEQ ID NO: 3136 - DNA, 215 bp, Glycine max
agcttagatcaggcatccgagtcaaacgttatgttcgtccgaatatgcatgggcattccatttcaacttttaatcgtgatgatatattacgggcctcagtcggacatgcgagtcaaaactttatcccgccagaattcacccgagtcttccatgttaaattttgagcgtggcgataggctacttcgcttattcgaagatgcggaggataagttatg

SEQ ID NO: 3137 - DNA, 399 bp, Glycine max
ctaagcttaagaaaaagatggcctcagcaaattccttatttccagtaaggaattctatcaatagacctccaatctttaatggagagggttaccactactggaaaacccgaatgcaaatttttatcgaggcaatagatctaaatatctgggaagccattgaaataaggccttatatacccaccacagtagaaagagtttcaatagatggtagttcatcaagtgaaagcataaccatagaaaaacctagagatagatggtctgaagaggatagaaaacgagtacaatacaacctaaaagccaaaaacataataacatctgccctaggaatggatgaatatttcagagtttcaaattgcaagagtgctaaggaaatgtgggacactcttcgattaacacatg

SEQ ID NO: 3138 - DNA, 391 bp, Glycine max
aattcaatcaatagacctccaatctttaatggagagggttatcactattggtaatcccgaatgcagatccttattgaagccatagatttaaatatatgggaagccattgaagttggtccctttattccttcaaaggtagtgggaaatgcaactatagaaaaaccaagagaggaatggaatgatgatgaaagaagaaaggttcaatacaatttacaggccaaaaatataatcacttctgcattaggcatgtgtcgcaacctacccttttgcgggcgagcgaggcgaggctcatcgggtgcttcttccaaaggaggaacatgcgcggagtcgccacaaacgtttatttgtggaaaacgtcggaaaaatcgaaggaaaccggtcatgaagaata

SEQ ID NO: 3139 - DNA, 380 bp, Glycine max
aagacttgacgcttctataatgggacaactagagaatcttgttacgagacatgcaagggaggtagagctggacaaaaataaagtgtgggtaaaaccttataaatcacactacattgaacatttgtatatgatattaacaatgacatctattttgtaacctagaatatctaataaaagacacatttaatagcatgtgcaagcaacttatcttaaccaggagcaaggtcacgaaccaaaccaatacacccaaatgcacatagaggagcatggtataatggacctttgaggaaataagttgatagggaattgatcaaataataagcaggtaaaacaacttcaccacaaaattataaaatgatattttcatgtaacaataaatg

SEQ ID NO: 3140 - DNA, 167 bp, Glycine max
  unsure at all n locations
cagattatccgctgatgtttacataggatgcatttgtaaacagatacaattctcttctctctctctctctctctctattattttctcatataacatacacatgtgatgtgaggttgaatttgtggtcaaggagaggtgacctangctgtacggggcaaatggcattg

SEQ ID NO: 3141 - DNA, 306 bp, Glycine max
tcatattcatcaaagcaggataatcaaatttgcctcttcttatatccagatcgatcctttcccaggcgaaaaccaaatttgcaaagcttgaaggcatgtaacccaccatcttttcatagtagaacaccggtaatgtgtctactatcattgtaatcatctccctttcaatcattggggcgctacttgagctgccagatccctacacctttgggcgtattctttgaaagattcatgctccttcttgcacatgttctgtagctgcattctatttggaaccatatcagaattgtactgatactgcctaat

SEQ ID NO: 3142 - DNA, 234 bp, Glycine max
tctcatgatgaaaaatcaccattgaaggacctcattgaagatcaaagatccagcctccatagaagctccacaagcaagcttccatcaagttatgaccatttgaatttctcgagatcttccgtggttcaatttcgggcgtctccatatgtcatgtgcctgaatcggacctccgtaagaaaatatatgaccatttgaacttctctagagctttcgttgtttaatttcgagcttctc

SEQ ID NO: 3143 - DNA, 354 bp, Glycine max
tcattgcctaacaagccaacttacaacagttagcccctatagactcagcataaggatgcacagaccaaagttgcgtatgtaaaaaaattgtatgaccaagtgaaggtgcaaattgcaaagaagaatgaaagctatgccaagcaagcccaaaagaaaaggaaggaagtggtacttgaacccggtgatgatcttggacatttgaggacaaatgttttccaagaaggagggaatgatgagaatcatgaaacaggccaaatacagtctaaaggcccaagtggagaaggacgaaggcccaagtggagaaggacaaagcccccgagtggagaaggatgaaggcccaagtggagaaggatg

SEQ ID NO: 3144 - DNA, 300 bp, Glycine max
agcttgcctcatagatgtccaggaaggacaattctgcagaatgttctagttccgctccggagtatgatagtcaccgctttatgagcgcggtacaccagcagcgcttcgaagccatcaaggggtggtcgtttctccgggagcgacgcgttcagctcatggacgacgagtatactgatttccaggaggaaatagggcgccggcggtgggcaccactggttactcccatggccaagtttgatccacaaatagtccttgagttttatgccaatgcttggccaacagaggagggcgtgcgtgaca

SEQ ID NO: 3145 - DNA, 346 bp, Glycine max
ttttaaagtagaaacatgggaccaactcattttattttataaagtcgtatctagtgaaggtctgagagaccatacaagttttctagcgatttctaattatgtgggccattaagtctatcatatgctgacaatagccgagaagcccatgaatttcttcaagggcggagtaagtgtccgccattgccttggccttggctaacaatcggggaagttcttgactcccgttcaaggtaagagcaaaccgatccatccacatggttgcctcttggtgtaaagagtcgatcacctttcctctagcctctttttccgcgtatacttgggcatactcgtccacgaccctatgctc

SEQ ID NO: 3146 - DNA, 235 bp, Glycine max
agctggagatgaggaagtgtagaagggtgaatctttctgcttttattgttgaccacagagtggtacctggagatatgtcgcgggggtcaggagaccttggggacgtcaggtggggtgctattgcccaaaaccaagcttgaccaatcccgacccaacccgggcatagtcggtcagtgagaacctgtgatgtacctaagcaggcgagctcctggtagtctacagataatatgaaaac

SEQ ID NO: 3147 - DNA, 389 bp, Glycine max
tttctcagtcgtctgtaaggatgattgtgtgttagaaagcgacgatccctactgtagactgtttttctgccatgtttaagttgtatgtaacttgtattttcttcacagatggggcatgcatgatgacccttaacactgtaaccgctgagattcccatatgctggaaagtcattaatggtacaaaaaagcattgcacgcatttcaaaggtctccttgtgaaacacatcaaacactacaaccccctcgtcccacaactttctcagatcttcaaccaacagacttagataaacatcaatgtcatttcctggctgtcttgggctcgatatcatcatagacaacatcatgtattttcgcttcatgcataaccaaggaggcaaattgtaaattac

SEQ ID NO: 3148 - DNA, 490 bp, Glycine max
  unsure at all n locations
atgaccccttganttgannctttgagccttgangcgcgatcttaagcgactgagcatgcactttctaagcgccatcttgtgacttgttttggcgatttcgtctgagctatcatgagtaaagaatcgttacccactcattaatacaactagcttattgctagcaacaacgagccatattcatagctctgatgctctcaatggtaattccttattatggcaatgcttcctccgatgatgagatggcttttgatctgacgatgaatccttctccaccccaaaaaggatcctgcagtgcacgattgagcaaagatgaccaaaaaaaagccatctgagtccatctttttacaaaggagtacactctttccaacggaaacgaccctctaaagagactgcattccctactaacaatgtgttgactgatactttagaccaaatctattggctaaggcacaaactgcatcttatcttattgcgtttaaccaatgcatcg

SEQ ID NO: 3149 - DNA, 350 bp, Glycine max
tgtaggattatggggtacccatcacatgtggtactatgtggcggtcgggcgatggtgcacaacaagttttccacatccacaaagcgtgcataaacccaccatcccctgttgcccacctccaactgagctcacgtcctcccacgtagcccatatcctcatttctctcaacaccgggtccccatcaatcctcccaagcttccacaacatccaagcaaaacaacattcaaacagcacaagctatcacagccaagcaaaacagggcaaaggcagaaaactctgctcaacacaccaaccaaaatcacagcttttctcacttaaagaccccaataacaattccttcgatccaattc

SEQ ID NO: 3150 - DNA, 379 bp, Glycine max
  unsure at all n locations
acctctgagacacctgcggcatgcagctttataaaaaaaaccttccatanatagtgcgcgaatcctgaatagaantactaactatgcatatgtcaacatacaatctcttcattaacagactcagacttctcgccacagncatcagtttttccttttgagtttgacttgtcgtctccagcttgtctgtcatagaacagttggcagaattccaaaatgaaagacaataatgtcatatatctgtattcctaacacattctctagcgagtgcaaattctcgtattacgatcatggtagtcaaactctagattctactttgactcagacaggagccatagaatcctaataatgtgaaatcatcactcacagcgtaagactctac

SEQ ID NO: 3151 - DNA, 354 bp, Glycine max
gttaatggtagttatagtatctattatgaaactttcttgttctaggtctatagcctttttgtatgagtaactggacatgtaggtacaataattggtaatgaagatatcgatagtattaggtggcctggttctgaatgtagatgactcaaggtaatcagattcttttcaagtctttagatttatgcacttacacatgaagacttgtcaattagaagctcaaacctaagattggtttgatctatatttgcttctgattctattttgcgctgtactacttttgagaatttcttaatagcttggttttaactttatctaggcacctactttgctgtagaatttagtgtttgctttggg

SEQ ID NO: 3152 - DNA, 482 bp, Glycine max
ttaagcacctgagctgcagctatgctgaaacattataatagacctctctagcagcaaaaccatctacaatagaataatcatgacctttcaagcaatagatacaatccaggttggaggaatcatccaaatctaggatggacaagtcctccacaacaacaacagtctatccctccttttcagaatgctgctggtccaagcaagccatatgttcctcctccaatgcagcaatagcagcaacaacaacaaagacaacaagcaactgaggcccctcctcaaccttccttaaaagagttagtgaggcaaatgaccatccagaatatgcaatttcagcaagagacaagagcctccattcaaagtctgacaaatcagatagggcagatggctacttagatgaatcaagctcaatcccaaaattctgacaaattgccttcacaaactgtgcagaatccaaaaaatgtgagtgccatcaccttgaggtctgg

SEQ ID NO: 3153 - DNA, 344 bp, Glycine max
tgtaactctcggcagtttcttagtcacttaaaaagatattactttagaaatatatcttcagaaacaagtcacttgaagaattgtgacttttggaaatgtatttttcgaaatcagtcactgggaatcgattaccattgacgtgtaattgattacacatcaacgtatgtgactcttcattctgaattttgaaaatcttaaagttttaaaacactagtaatcgattacagctttgtaaatcagtttgaaaaacaatgcgcgctactagtaatcgattactaccttctggtaatcgattaccagagagtaaaactctttggttgaagattttgtgaaaacgtcatgtg

SEQ ID NO: 3154 - DNA, 290 bp, Glycine max
  unsure at all n locations
agcttcaccagatgatgccgatcngaacattctcttaatcgacatcatttatttgtattcagggatngactagaatanacaatggccggtgtcggtcgttattatggccccgactgatatctttcagccgacattgcgcaatntcttttacaaacgctggccgataatgtttttttatttacggtagaggaagttttttgtttggtggtgcctaaaaaattacaacgtaggacggctaggtttttccgtgcgagctcaaccgagggttcgttccgaccgacactggcatg

SEQ ID NO: 3155 - DNA, 349 bp, Glycine max
  unsure at all n locations
tctatataagctgaaccattttatcaataaagacaagtttagttttatttataaaattagagnttatctcttttatcttagtgagagtgattctcctaaattcttgagtgattcaagaacaccctggctgtatcaaaagactttcacaacctttgtgtgttgccctcgctggaaagaaggaatcttttcttcctttcatcttcacccttggtctttcaaaccacaattcccgaaaattcacctctgcccaaaattatctcgtggccataactcccattttacgcactcaaattaagtgattcttgagcctaaattgaatttcgaaacgagacctttcacctcgctttgg

SEQ ID NO: 3156 - DNA, 407 bp, Glycine max
  unsure at all n locations
gcttgtgcagctgactatgctgcattgttttaatattactttgttaaatattatatacaagnatgaaatgagattattggtttgtatcacggcatcactattatgcatgagaatcaatttcccaaacaattacaagtgtattatggaacgaagaatgataagggaaattagttttaaaaggcggcaattagaagaattagctcgctaactgttagtgtgggggttctctattataaataggcatgtcaatactgacgcacgagtatgctttgtaagaacttggatatacaactgggattatccagtgtgagaggtgagcgctcctcttggtataactgcgtacatctgtttgtccttattgaacacaattctgacaatgcttttagacatctttctctttgactcta

SEQ ID NO: 3157 - DNA, 374 bp, Glycine max
  unsure at all n locations
ntaagttcaagttttgcaaacttctttccctgctttcattttaaattatacaagaaaaagagtcagtcatttttacaaaaagtatgcatgagcaacaaaaacataattaccttgttcagtatgttcctgaaatggtccataacagaatcctctgacaagacatgttcataggacttaaataactctattagttttttcatccctttttcagtaaacgataactgagagagacaataagatatatattcccattgtctaacatctgcagagaaataaaatcatgatcactattagcaataaactacaaacttctcttggttttgaattgatttcaagcccttcagaattacaagaatataactcatgctttaact

SEQ ID NO: 3158 - DNA, 303 bp, Glycine max
atctagtcaaggtctgagagaccatacaagtttcctagcgatttctaattatgtgggccattaagtctatcatatgttgacaatagccgagaagcccatgaatctctttcggggcggagtaggtgtccgccatcgcctttggcttggctaacaagcggtgaagttcttgactcccgttcaagggaagagcaaaccgatccatccacatggttgcctcttggtgtaaagagtcgatcacccttcctctagcctctttttccgcgtatacttgggcatactcgtccgcgatcctatgctcgtgag

SEQ ID NO: 3159 - DNA, 377 bp, Glycine max
tttcgattcaatctatgtacccgtagtggtccacattgtgtttcgtgtatttttattctcgttttgtttactttttataccccctcttgacgtgcttgagccattttacttaagtcatttctcgcttaacttaaaaataaaataaatttccaccgaacttttgaattgtattatccattaacttcggttaaaataaattccgaccgttcggtcgtgccgtaaccacgttggaaatcaaaaagaggtaaaaaataatataataatcaaaaagacatctttagtaaaataaagcgaaaaatcaatcgggcgttttctctttgggatttctcattcttaatcgaattgattaataactaaagtgaaactaaaggctaaaa

SEQ ID NO: 3160 - DNA, 343 bp, Glycine max
  unsure at all n locations
gatggcatcctactagcatcatacgatttagtgttgcaaaatagttatatcgcaatttatcatgaattctgggtgtcctaaggtgatatatgagtaatcttggtatgcaacactggaaagtagtaaaatgtattatgtgctaatttaatagaacaagaaatcgcatgttttcatatcgaaattctacaagtttagagatcattgngtattctaacttcattntttacagaatatcttaatagcaatcactctacataagaagccatcaggtgtttattgggacaatattttagcagtctcattaaggattaaaccaagtaaaagtttgttgacataaagtatt

SEQ ID NO: 3161 - DNA, 255 bp, Glycine max
cttgatgtgagaaagtgtggaagagtcagtcttcctacttttgtttgttgaccatagagcggtacctggagatatgtcgcgggggtcaggagaccttggggatgtcaggtggggtgctattgcccaaaaccaagcttgaccaatcccgacctaacccgggcatagtcagtcagtgagaacctgtgacgtacctaaacaggtgagctcttggcagtcaaccaataaaagaacaaagaccacaaagcaaggaggttt

SEQ ID NO: 3162 - DNA, 418 bp, Glycine max
gttatactgagaccacatgactgatgcgtaatcaaacatcttatgcacgcagtgtcactctaacaaggctttgcaacctactgctacttgatagaccatcgatcgtactgaactgtggcaatactgtctatagatggctatcgagacattactacatgatgatcgaaatgaccaccatttgacactcttccttctcttaacttcacagccagtaatacttgctactgcgaagagtgtatattcttgaagcctaacatactttaccactcttcttgagacatcaccactctaatccgtgcactcctagaatggccatcgcttcctctctcaccttaataaccactatcataatatatgagtcgtgaacctcaccttctctttgatgctatgatccatccctggtgcttcttccatcttg

SEQ ID NO: 3163 - DNA, 259 bp, Glycine max
tgaacgggatatatccgcaatgacatatatggcatggtattaaagacttggaactcattgaactgagatggtgctgggacatcacgctcaactatgtgcgattcacactgagagtacattgatttcatctacgctattatcatagtgctacgacatttacttagcacgtgatagatacatcctgagaggtgcgtagaaatgcgcgcatattaacgaacttctgtatcgtatgccaacggccattgtttcttagagacgc

SEQ ID NO: 3164 - DNA, 409 bp, Glycine max
  unsure at all n locations
agctntagatctaaattttcttccaaaatattgtttagaaaaataacacacaatctaagtgtaaatcacttaaaccatgttgtcttagaatcatgtttagtcatagtaattgtcacattatgttctaagtttgtgttgaatttttattttggttattgaattctagataaatttgttaagacaaagttctcaggcggttagtcctttgaaactttgtgaaggggaaacaaaagatatatcaggcggttagtcctttgaaatcttttgttttagggaaagggaagaatcaaaagaattctcaaactgtgtcattttgaattctttgacaagggagaagggagacacaaaagaattcaagcagttagtcctttgttcttttggaaaaggcgagaaagagacaaanagaatt

SEQ ID NO: 3165 - DNA, 343 bp, Glycine max
  unsure at all n locations
ttcataagtgaaattaggtgcatccatctctcttatagtcttctcacgaggnggaggttgagccatgttctcagtatgaaaattaatagccgaatgctcaaaatcagaatattcagaatcaccagcaacaaaatgctcaaaatgctcaggatgctcaaaatgctcaaaatgatcaagatgcacactatgcctaactaatctatganaggttctatctatttcaggatcaaagggttgtaaatcatctagatttcccctagtaatgcactatatgcaacaaataatgtgtttctcaacaagcacctaacaagggggtaaaactacaactatactcaaacaatat

SEQ ID NO: 3166 - DNA, 426 bp, Glycine max
  unsure at all n locations
cagatgatataccttcaggttggttcatataaacctcctcctctaaatcaccattaagaaaagctgttttcacatcccattgttgcaactcaaggtcaaaatgagcaactaatgccaagattatacgaagagaatctttcttagatactagagaaaaagtctctttgtaatctattccttccttttgagtaaatcccttagcaacaagtcttgccttatatctctcaatgttgcccaatgaatcccttttggtcttaaagacccatttacatccaatggcctttgccccattaggcaactctacaaggttccaaactttgttactctgcatagaattcatctcatccttcatggcatcataccatanattngactctttacaactcatggcttgatcaaaagtttcaggatcattttcagctccan

SEQ ID NO: 3167 - DNA, 372 bp, Glycine max
agcttcggttaatctcaaagctacaaaaacataacctcgttttaggattaccaagtatgtcatacaaagatgatttactttatgaggcatgtgaaaagggaaaaaaattaaaaaactcttttttcaagaaaaaacattgtttccacctcaagaccttacatattgatctgtttagtccaaccaaaagacatctatcaggggaaaaaaggtattgactcatcagagccgatgactactctaaatggacatgggttaacttcctagcctagaagaatgaatcttttagtgtcttctttaaattttgtaaaagaattcaaaatgaaaagaattatgcattaccttaatcaaaagtgatcatatgggagaatttga

SEQ ID NO: 3168 - DNA, 433 bp, Glycine max
  unsure at all n locations
agctgtgctttgtgccaaaattgaactgtactgngaatgccaaagttgccgatttaggaattcctccttaagattnaatgtgttttcccaaatgaattgatccttcctctggntactaatagggaaaacacacaaggataagtgtaagaagaggcttcatgagcaccgaanatcccctgaagaccttccaacccattgttctaagagattgcaatagtaaacccaaaactttagttctgtcgattccctagttcctttcccctcataatgggtggaggattnttctccaagaatttgaattcgtagaatatgattggtcatggtgacgtttctgttgtcgtccaagacatcatgggtaatgtcaaccccactcctaattgggtttgctactccgagctgtaacaccctgaaatattactaattataaattgat

SEQ ID NO: 3169 - DNA, 370 bp, Glycine max
tatagcttacttattatccacaaaaagcttcactccattactttccttgatttttaattcttgtaataatgtgtccaacgagacagcttggcaagcactcattgtagctggaacatacttagcttcacatgttgataaagccactatggattgcttcttagaactccatgatattggtgttgcaccatacatgaatatgtaacctatagtactctttctgtcatctctgtctcctccccaatccgcatcagtatatcccactaattcctctgagttgttgttgtctttatttggaaatagaattccagtattgatggtcccttttatgaaccttagaatcctcttagcagttaggagatgaggaattctg

SEQ ID NO: 3170 - DNA, 412 bp, Glycine max
  unsure at all n locations
gctttttgttcggattgcctaaaaatttgtttgtagttcggctaggtttcttcgtgcgagctcaaccgaagttgtatttcggccgacgccggcattttgtcggccaggataacattagcccacctcggcaaaaaaaaaacatgattcaccggtattgacagaaaaaaatgctggccttagtcggccaggaaagatgaccgatcgaggtctaaaaaagaagcatgaccggattacgccgatcgaacgtttcctaatagatatcctccaagtattattcagggattgaatggaaaaaacaatagccgacatcggtagttaaatagccgtgactggatattnttcagccaacattgcgcaacttctttcacaaacgctggccgataatatttctttacggtaaaggatgctttcg

SEQ ID NO: 3171 - DNA, 341 bp, Glycine max
  unsure at all n locations
tcggttntcaatttcgagtgtctcgatatattacgatacttaatcagacatccgagtaaaaagttattgtcgtttgaatttgcaacgaccatcaacattcaatttcgagcctctcgatatattacgcgactcaatcagacatcagagtaaaaagttattgtcgtttgaatttgcaacgaccatcaacattcaatttcgagcgtgtcgatatattacgcgactcaatcagacatcagagtaaaaagttattgtcgtttgaatttgcaacgaccatcaacattcaatttcgagcgtctcgatatatttcgcgactcaatcagacatccgagttaaaagttatt

SEQ ID NO: 3172 - DNA, 405 bp, Glycine max
  unsure at all n locations
agctnttgattctatggccatatacaaccagtctatcccctcgcgggcaatgattttgagcagaaaataccggacattagtgagctcatggattgaaccattacaagaggaggctgaacttggctatgagattgattatcattctaggtattgtttctatttcagcaatagatgcatttcttntattttgctgttggtgtttctgctattaatttattattattttatttgtttgcatatatgattgttatctattctcggctatggagaattgaaattattataatgatttgacttggcttttatttatttaatttatttctattggctttttttctcgaatgtacttatgctgtacaagagcagtgtgcataccaaatgcatgttattctagctcttgatcgt

SEQ ID NO: 3173 - DNA, 356 bp, Glycine max
  unsure at all n locations
ttgaggatcgccacaagaatngaacaattntttataatatcaaatggntcaaggaagaatcctaacaaagacaattctcacacttcaatgtcaaaggttcctttccattcacttcacaattgatttatacaaatcaattcttctgtatttgatagaaaataaaagaaaaataaaatctcaacattgtaagcataactaaaatacctttgtgattaagtaaggcataattaagtttgaggtctaaatctcaaaactagctctctcatacaattagattgtcctcatattagtcactatttgttgtaaaacctcttgggtctttttagcccttactcttgtcatggccctcttatgtc

SEQ ID NO: 3174 - DNA, 433 bp, Glycine max
  unsure at all n locations
agcttctagaaggagatcaacttgatgttctatgcttcttgaagggggcagtccatgaggaatctccttgngaaagacatctttaaattcctgcaataagggttgaacactatgagaaacataaatagttaactgattagaattatcactctctctctcttgngtatcactcttttcctcgggtgtatcactcttctttttcatattcctttgtggtgcctcactattttctttctcttgttctctcttttctctcattctgattgggtcatcacacactcttctaggggatagaggtttaagagtaaacgaggaagatttggctattcgtctgtagggctcttctttgttacggntcaacaaacgtttgcattgtgtagtccacgcgttcaaaaataagcgctgagattcgtccaattgatgatatacacca

SEQ ID NO: 3175 - DNA, 369 bp, Glycine max
ttcactcgcatgtccgattcaggcgcatagcgtatttatacgctagaaatctaacaaaggaagctctcgagaaattcaaatggtcataacttttcactcgcatgtccgattcaggcgcataacatatcgagacgcttgaaattgaacaactgattttctcgagaaattcaaatggtcataacttttaactcgcatgtccgattcaggcgcataacatatcgagacgctcgaaattgaacaacggatgttctcgagaaattcaaatggtcataacttttcactctcatgtgcgattcaggcgcataacttatcgagacgctcgaaattgaacaacggaagctctcgagatattcaaatagtcataacttt

SEQ ID NO: 3176 - DNA, 437 bp, Glycine max
  unsure at all n locations
tgtgggttctattaagaaggcaaatttgatcattcctacnntaggacgactgcagaaaactgggggccaaatganagaagggtgaagaaaagagnnggagaaacnnccatgcgtgttgactgccattctctaattacggccaagtttcnnccaccaaacccaaccaatgtcanttacttcagtcaataacaaaccttcctccttacccaccacccagttatccacaaaggtcatccctaaatcaaccacaaagcctgtctaccgcacttccaatgacgaagaccacctttagcacaaaccaaaaaaacaccaacaaaaaggaattttgcagcaaaaagcctgtagggttctccccaaattccgttgtcatatgctaaacttgatcccatatccactcaataattcaatggtagccataaccccaaccaaggtttctc

SEQ ID NO: 3177 - DNA, 369 bp, Glycine max
tcattaagaggcttcctctagaagcttcctcgtggcttctttgagaatctacatccttatctatccacccctctattaactaaattaacttccttaaaaataattacggatgaaaataacgcaacaaataatcaaacatcaaacataattactaataatatatagatatatatatatcagggtgttacaattatcactcagatcttgactagttaaactttctgaataaaatgagtttatcccgcgtttttactccaaagatcagtgcgaatcaaatcactcccacattttatctctagcatgcattcatatcatgcatcgcataagcatctcttcatggcatcataatgaacatattattcctgcatt

SEQ ID NO: 3178 - DNA, 459 bp, Glycine max
  unsure at all n locations
gtcacctgcggcatgcaagcttgtgttctanatatgttngaatttgttattctttaggtgtacatgtttgtaggttataatattgnttagaacttttcttagtatagatcaggtcatgtgggttaactagtgactcactaggttgacccatgactcaatggcctagcaccctgactgtgtcaatcaccatctgagtctaataacatggaacacatcctatctacaccactcaaatccctcatgatcaatatgattcattacaggcccaattactagctgtataatcatcctgctatagatgatgtttgatagcattgtacgaattgtagattgttcaagtcgaaagattactatctcataatggttgccatgagaaacaattatgacacttacataactattatgaagccttctcatagagagcttgccttttataaatgttactcctaatatntatac

SEQ ID NO: 3179 - DNA, 383 bp, Glycine max
  unsure at all n locations
gcttctatataagctgaaccattctatcaataaagacaagttgagttttattcatataattagagnttatctcttttatcttagtgagagtgattctcctaaattcttgagtgattcaagaacaccctggctgtatcaaaggactttcacaacctttgtgtgttgccctcgctggaaagagtgattctttccttcctttcatcttcacccttgttctttcaaaccacaattccagaaaattcacctctgcccagaattatctcgtggccataactcccattttacgcactcaaattaagtgattcttgagcctaaattgaatttcaaaacgagacctttcacctcgttttggaatcacctcatttggagccctgtagcttcag

SEQ ID NO: 3180 - DNA, 311 bp, Glycine max
tacttcgggcgtgtattatagagcaacaaggtagcttgatggattgtttgccattgattgagtttacttacaacaatagctaccaagccagtattggtatggctccttttgaagctttatatggacgaaagtgcaaaactcctaattgttggtatgatgatggagaagcagtacttcttggacctgaaatgctacaacagattaacgaacaagtgaagttgatttgagagaagataaaggcatctcacgataggcaggagagctattatgatagaaggaggaagccactatattctcaggaaggagaacat

SEQ ID NO: 3181 - DNA, 399 bp, Glycine max
gcactatcgaagacactatacaatgctcttgctatgaaggataaaattttgtgcaatacacgcgctattgtgcattcaataacgggctaaaatatgttttcgttctttctgtagaatattcaaagtttatttttagtctctgcaaaaaaaaaattatccatttttcatcattgtaaaattaaaatatgcgactttttgattaagaactaagtttgaacgaatataaatctacatggcactttttaatttaatttttaaaatacaattttgggaattaaaaaccacaacaaattatagaaaagaataagaaaaatataatttgtggcagttaaaaagcgcccaagtttaatgaaaattcaagagtcaccatggcttttaactaaacaccacccctccaat

SEQ ID NO: 3182 - DNA, 399 bp, Glycine max
  unsure at all n locations
agcttgagaaagtccttctgattttgtttatacttttctgacttgatggcatgagatgaaatgcaaagattggacctcttgttagttgttatcaatgaatagcttaaacacttgtgcttgagtgaaacagtagccgtgagattgtggtttgagctactttccttgatatttgtcttatgattaacttcatataactgtatagttcacattttgttctcctatatgtctagctgcatgttctgtgaaaacaagtgataggtacacatttcttcatctttctcatcatngcaatcaataaatttgatgcatacacctttgtacataaacactgcatgttntaccacttgaggacaagtgagttgttctcttttgcttgaggacaagcaaaactgtaaattt

SEQ ID NO: 3183 - DNA, 244 bp, Glycine max
tgtgctttgaaaattatgtgcatggaatatttttgagtttagaatgctgaactgggatcatccatttctattttctagtttagttattaattcatgaagctgcggtaaaactggtttaccttacagtttacattggaggttaaaaaaagataatgacatttatattatgggttatttaaggctcatttaaagttaagcatagggtttggttatgagcttctctctctctcccggatttagggag

SEQ ID NO: 3184 - DNA, 433 bp, Glycine max
  unsure at all n locations
agcttgatcttttagttttttatctntaatctttaatccctgaacgaactattcaagtttgtaattcgaactttaattatcttttaattcgttcctaaagatagatcgccaaatctgttgctaactgcacattaatctgttaaagatataacagatttatgtgtccagtattttcgggcaagatgtcctggacatcgtatccgacatcgtggatcctgcagcttcaattcttcatttgacattntatcttgccttgtgcattgtgcagcccaatctgattccttgacataacgttggacatcatgtgcagcaactctagctttccttcattatctaagtgcttatggtttaacaaaattttagccaatcttttaaaactcagtaaagctaagcactaacaatctccccctttggcanatttgtctaaacatac

SEQ ID NO: 3185 - DNA, 321 bp, Glycine max
tctcgatatacaatagggcttaatcggacatccgagttattagatattgtcgttagatttttctcagagcttccattttcaattacgagcgcctcgatattcaacgggactcaatcggacatccgagtcaaaagttattgtcggttgaatttacttagaagttctgttttcaatttcgagcgtctcgaaatattatagggctcaatcggacatccgaattaaaagttattgtcgtttgaatatacttagagcttttgtattcaattacgagcgtctcgatattctacaggacacaatcggacatccgagtcaaagatattg

SEQ ID NO: 3186 - DNA, 423 bp, Glycine max
  unsure at all n locations
cacttcttacaaaactttgattggaatgtctctattatgattgggttggtaagtcttgtcatcttctagttgagcttgagcacaaagctttgtgagtagtgaagcttctcaattatgacatgaaggtagctggtgagaaaaggaagctcgattagaatgaagtggatgaaattcgtttgaatgcatacganaatgccataatttacaaggaacagaccaagagatggcatgaccaactcattcactggaggcaattcatagaaggagacattgttctcctttataattctaggttgaaactatctcttggaaagttaaattcaaggtggcctggaccttttaaggttcagaaggtgtttcttaatggagctatggagattgaaagcccanaaaactagctcactcaccgttagccggcatacg

SEQ ID NO: 3187 - DNA, 95 bp, Glycine max
tctcccctaattttctataaataggggaggaagtgatgtatatataggttcagccccatagacactgctctctatttcgaattcgcttgcaaaaa

SEQ ID NO: 3188 - DNA, 445 bp, Glycine max
  unsure at all n locations
agcttatgctgcanatatttacaacagaccttcttatcctcagcagcagaatcaaccacagcagaacaattatgacctttccagcaacagatacaaccctggatggaggaatcaccctaacctcagatggtccagccctcagcaacaacagcagcctgctccttccttccaaaatgctgctggcccaagcagaccatacattcctccaccaatccaacaacaacaacaaccccagaaacagccaacagttgaggcccctccacaaccttccctcgaagaacttgtgaggcaaatgactatgcagaacatgcagtttcagcaagagaccagagcctccattcagagcttaaccaatcagatgggacaattagctactcaattgaatcaacaacagtcccagaattctgacaagctgccttctcaagctgtccaaaaccccaaaaat

SEQ ID NO: 3189 - DNA, 332 bp, Glycine max
  unsure at all n locations
tcgatacagatcaactgaattttgcactagtgtatattctccaaattgtagaagcgtaagaatctacaacaatatatcaaagcattacaaataatctcatagtcaaatattgcaatgcctttttccgttaaacagcagaaggaaagacacttgcagtctatattaatcatgttattgaagcttgcgaagtatagtgaattagtgattaggacttangagaatggcttcaactagaattacaactttattggtagagcatatatatgtatcttggcatagacagcaacatctggcactatccatctttagctatcaataagaaataatttatg

SEQ ID NO: 3190 - DNA, 434 bp, Glycine max
  unsure at all n locations
agctntacagcagattttagtaatgacccactatctctataataanataacttaatgccattaacctagggaattaanaaaaacttaatggctgagtgtaactgaaattgtggcaaccaaaagtcacccncaatagccaacaagtcagccaccatttggtctcccaaaaggctgatgcctaggttgccaattgggcccttattacaacttgaactaaacctaactaaagcccttttagttgattaacccaaaacatatttttggtcagccaactntacaaggattgggccattatttagacagactaaacactctaaaattgaaacaaagtggtgtcatttagtcctcctccattngggccatgatacaactcacaaccttggacttttctccttgaaacttgngcttgtattcaaatagtatggacagcactt

SEQ ID NO: 3191 - DNA, 374 bp, Glycine max
tagtgaaaaaattccttcgaataattttttatatttattatactcaattttaaaactttatttgagttctattcaacttgaccatcaacacattggtaaatattttacttaaatgggttaagtagatttttagtctttaaatttttcaaaatttaaattttaatccttgaataaaagcttaactagtcaagtctcaacttcttttttgttaaaattttagtctttcaacaaaagcttgaccagatccttaaactttttaaaaattttattttaaatttttaaataaaagtttaaatttcattattttatttatttatttatttaataagattttagaaattaaaaattaaaattttaaaaaccttgatgaatac

SEQ ID NO: 3192 - DNA, 239 bp, Glycine max
acacgatgcttaaccactcaagacagcatcaaaccaataacagcgcttaacccccatatattgtagaatcaacataccttaaccatccagagtagaagcttaacatggtgcttaaccacttagactgaagcaaaacaatatttgaatgcttacccaccataaaggcagaagcaacacaccaatgcttaaccacaggcagaaatgtgacatccatacttaaccaccatggacagaagcta

SEQ ID NO: 3193 - DNA, 277 bp, Glycine max
accttcttcgaacgaaaattacaacatcctgcttcgttgtttcctttgctgccactaccacctccttcaatgagcgaaaattctcaaaattctcctcatttcatatcctatttgccactccctccaccaccagtaacttataatcaatccccttctaccgaaaattctcagagatctcaaacttttcttcaatgtcacaaaacacctctatcgcatttcataagcctcccaatagttatattcgagcacaaactccttcatatgaggaagttgatat

SEQ ID NO: 3194 - DNA, 403 bp, Glycine max
agcttagcaagcaacaaaatgctcattttatttgtatcccaatcaaaacccagttgcagatatctctgtaaaaggccaagagaatgcttgatcaaaatcatgaatatctagtaatatatcaatatttaaaggaaacagcatatagtaatagacctaaagaaaattgaagggcgaagaagcaaactaccttagaagcaatggtaatagaagtaggaaaatcaaatataatcatttaggtagcatttggtgaggctgtacaaaaggttcatagattcattaattatgatcttttgaatgtttaatttgtaagtaaagctttagtggccacttgctcctatagatcacaaaagtagtggtagtagaagaggagagggcaacaaaagcagcagaagtaccagctcct

SEQ ID NO: 3195 - DNA, 403 bp, Glycine max
  unsure at all n locations
agcttaacaaccataaattcctattntacatttaacaactatcaaaatttgactatggttcaattatacattntatacgcgtctttatttcacttttacaaattgagctcagatccattatgataactattacataggcccagaaaaaatggggatcatttaagaaaaagggagataaaagaaaataatagcaaatcgtgtatggtacctaatagagcttcttccttcatcaaactcttcttccatatacaaattattctcaaaattatgtcaccaaaaaattcatttccttcttttctctttcaaatcaatttttaaaattatttaatgtaaagaaaaaatgggcatcattttggaaaaaagggtgagaaaagaacataataacaaggaaattcatgttatg

SEQ ID NO: 3196 - DNA, 396 bp, Glycine max
agcttgatgtcaacaacaaccaccttgaagggaatcttctaaatgaattttctaatcttaacaatctgacccttatggaccttaggaataataggttcactggagggttgacccttatgccaccactacacatggctttgctctctggttgatgttttgagcaaacaccactgaagcaaatagaaacaaaaaaaaaaacaaaacaagacagaacatgagcacccttctgaaaccaaggtacaagagtggagccaatttgttcctccaagatctaaagggccaggttgctagctagcttcaatcaaaattatgaccaggatatataatactaatacagattgggtctgagcctaactggcaaagttatgaatcaatcagggaagagagagagacaca

SEQ ID NO: 3197 - DNA, 334 bp, Glycine max
gcatgtatgaaaatgtacaggtaaaggtgacttaaaggaattcattggtactacctataccaacaatgtgcatatactttttcgtagcccatcacttaagaacttcatagttaagtgtgtttggcataaaacaattgaggattaggtgaccttttgagaaattcctcgagaaatgtgtgagtaagaacaaagtatactaaaaattctttgctagtttatgaggacaatcaacaattccaaaagcaatcatgcgttacaatagtatcctagacatttatatttcttttgctcaatagtcaggaggttatgagagagtacaatttgaaaagaagaa

SEQ ID NO: 3198 - DNA, 348 bp, Glycine max
attatcgatgtttctatcacaatccagtgattggtgacatctccatgtgtgtgtacaatgtgattatggtttcatttctaggattcatttggaatatttgttggtgattatgaataagtgaccaatcttttttttatttaaaatttttgtctcctagtcaatcgactattaatcttttgatgtgctgattatcttccaatcatgccttgttaaactgcttgataacctatcatgtttttacttctgttatgaatagagagagactttgcccttgccaatcacgttaaggtgtttcgagaggaaatacttgagtaggcattatccttgctacttgtaaatgaaagtcaa

SEQ ID NO: 3199 - DNA, 393 bp, Glycine max
agcttcttctgcttccgtttttgttttctctgccaattcaaattcctcctttctcgggaaaatcttcacgctgcgttttcccgggatttctcgttccccgttcccgctaatcgtttcagagatcgaaaccaccgtttcaatctctgctcaattccctcgcctttccgtttccccgtgagttcgcaaaaggtaaacagaagaaaaaaaaaacaacatcaatccacacataccttcgttcattcattctcttacgacttcattgttcaatttagggtttcaaaacttccttctgcggttctcgtgcgttgcaggatccaaaacacgtgacaataacaggatatattacgaatttgcttaagcgtcgtgaggaattgcgcgatttttggcaacggc

SEQ ID NO: 3200 - DNA, 388 bp, Glycine max
  unsure at all n locations
agcttgtggagaatgaagttagggtcatttccaggcatgtcggatgtgctccaagcgaacaattgacattgctcaagagcacttgttctactttttttcgtattgcatccttcatttgcttaccgattttggtgcattcatgtgactccgttctgatttggaaattctcaacaatgtcttcaattgggggtggtcatcgatcttcagaatctaatcgggggttaagatcctttaatgagttgacaacaacattgatattggagattggcgccttggtgtntttattgtctctcactatattgtatggttcaatcttgcaactctttacatagcattcacaagcatccgtctgatcaactttgacaatgacaatttcccttgtggatga

SEQ ID NO: 3201 - DNA, 385 bp, Glycine max
  unsure at all n locations
ttggcattttcctactaatcatgaggaagaagagcagaatgatgctgcaggatcaagtggagtcatagccattgaacaacaacaacagcaacagcagcagcagcagcaacaacaacaacaacaacaacaacaacaacaacatcaacagcaacaatcagagtcttgtggttacaactttcagctccaaaggcaattgggagccttcatttcaacacatgttgacactgaccacatcaatttccaaaccaacaacaacaactnctcagaagatctggcctatccttcattggtttcaaagacacccttgccttaattaatggcaaacaccacaaaaagggtggaataaaacaccttctttcaatggacaaccaattccaccaaaccc

SEQ ID NO: 3202 - DNA, 379 bp, Glycine max
atcagcttggtacatgtaaaattattccccaccaaaaaaaactaagaattgagctccgcttaaaaagacaataggtggaatggcaaatcagtgatcttgatgaaatcggggagcattgctagaaagagagaattggaatattcatcaacctaagaaaagcaagttctgactctattaaaagcattgtatcgaaacttcagaccaatattttgaagatgactcagggatctttttgatatcggggaatattgctaggaagagagagctcgagtatccatcagcctaagaaaattcaaagcaagttcagatcttcttaaaaccaagatttggaagcttcaaacaaatattagtgaatacccaaaattattttaaacttgaa

SEQ ID NO: 3203 - DNA, 378 bp, Glycine max
agcttgccacccagctcgtccaggcgagcatggttgcttcctccagaagcaacagccttctggaggaatcttctggagggcccaagtgggcctggttgctatttgcactcccatttttactaagtacaccccctgccttttttttggtgattcttttttcgtaaagttacggaaacttacgaatttcgtaacgatacttgttttctttccgtaatgttacggaaccttgcggattacataatcatcccctttttgacttacggaatgttacggaacctcactaattgtgcaacgatgcttccatttgatttctggtgtgtcacggaaccttacggattgtgcaatcaatatttcttttgttttccggcatgtcccgga

SEQ ID NO: 3204 - DNA, 267 bp, Glycine max
acttttatgctgaacaaatgatggcttgaatgtgaaaagcatgttgaaatgagaaactttgaaaattttaaaattggaaaaatttcagaaaatggtttctttagacatgaaggctttctttttaaaaaaaacaaattgtgtgtgcctaaatgttctactaaaaatttgcttgtttgtgaagcacatgaggaggtttaatggggcattttggggtccaaaagactctataaacattacaagaacagttttattggcctcatatgaaaa

SEQ ID NO: 3205 - DNA, 408 bp, Glycine max
  unsure at all n locations
agcttgtaatatcacatcggcgtgagtcattgcattcccatctaatgtcttttggtttcaatgctattcttaactcaccaaatgaactcttggaaattaattttttgtatgtatgtttaccaattttcctagatttaaaaatgtgttttttcttgagtctgataaattataaggtgttttacctgaatgagttacggaatttttgtgacaatcctatatatgaagaagcatgtgaacaacatgaacatcgctgataaaaactaagtttctccttttctcattttgtttatcttctttctatgataacattgatgtcttttttaatgaatttgctctgataaacaaaacatatttttgaaaaacagagttaanagaaacttcttttgcgcggatcgtatcacanacttt

SEQ ID NO: 3206 - DNA, 398 bp, Glycine max
  unsure at all n locations
agcttagccagttgcccatacgtgcttattctacacatgtgcacttagcctgcacttgtgcgcttactccaaatacgaaatattttanaacatggaattctttgggcttatcgcagcgtgcaagcttagcgcaacaaaacaacatgtgcttgctaagcgaacacatgcacattgagcgcatagcataatcagacaacaaacaacaacaaacatttgcacttaaatcaactaacacaaatattcatagagtcatgagcataaccaaaatcaacctaacatcaacacacaaaccaactaacacaattattaaacaagttacagaaaagaggagaaagacacaaaccaactaacacaattattaaacaagttacaaaaaagaggagaaaaagggtataaat

SEQ ID NO: 3207 - DNA, 405 bp, Glycine max
agcttatgctgcaaacatttacaatagatctcctcaacctcagcagcaaaatcaaccatagcaaaaaaattatgacctctccagcaacagatacaaccctggatggaggaatcaccctaatctcagatggtctagccctcaacaacaacaacagcagcctgctccttccttccaaaatgttgctggcccaagcagaccatacattcctccaccaatccaacaacaacaacagccccagaaacaacaaacagttgacgctcctccgcaaccttccctcgaagaacttgtgaggcaaatgactatgcagaacatgcagtttcaacaagagaccagagcctccattcagagcttaactaatcagatgggacaattggctacacaattaaatcaacaacagtccctgaa

SEQ ID NO: 3208 - DNA, 300 bp, Glycine max
  unsure at all n locations
agctntgataccaattgagaagaacatcttcaaaatcacattacaagttagttttgtaattggccttattataaacactagaccagaatcccatgctttcaatgtaggacccaagtctcatacctagcaattggatcctacaagagttgcttgattcattattgccgctattgtcactgtagaagcactttctcaccagtcatgccattacagtgtttctaaaggtagccatataatgcttcattntgctattgatacttgtttttattatattgactcatgatgtttacatttaaatgg

SEQ ID NO: 3209 - DNA, 390 bp, Glycine max
agcttcaggatgttcaattgcttcagattgttgcacagaagggcaaaggtctgtgtggtggtcgacagacgagcataaaccacagagtctggcgacaggtgcagatttttgattcatggccaggtgggttaccaggttaaccaaggcatctagtttacctttaagctttttagtctcagctgatgaagatgaatttgtggctactttatgcactcctctaatgacaatagcatcacttctggcactaaattgctgggagtttgaagctgtcttctcaattaaatttctggcttcagcaggggtcatgtctcgaagggctccaccactggcagcatctatcatacttctctccatgttgctgagtccttcataaaaatattggatgagaag

SEQ ID NO: 3210 - DNA, 400 bp, Glycine max
  unsure at all n locations
agctttgcggatttggtcttcgccagtgaaaggatcgatgtgggntccgaaagaggcaaatttgatcatcctactaggacgactgaaaaaactggggcaaataaagagggtgaggataagggagaaacccatgttgtgactgccattcctgtacgaccaagtttcccaccaacccaacaatatctttactcagccaataacaaaccttctccttacccaccacccaggtatccacaaaggccatccctaaatctaccacaaagtctgtctaccgcacttccaatgacgaacaccacctttagcacaaacccaaaaacaccaaccaagaagtgaattttgcagcgagaaagcctgtagaaatcaccccaattccagtgtcctatgctgacttgctcccata

SEQ ID NO: 3211 - DNA, 389 bp, Glycine max
agctttgaaaaatgttgtttttcaccttctcgctaagtcaatctgttggcttagtgagcgtccactaagtgcaacactcatgggctaagcgcgaggaagactctggaagaagatgagctatacaggttcgctaagcacaccgcttcatctcactaagcgcaccgcttcaattcatccgctaagcgagaaaggcacgcactaagccaaaattcactaatgtgcgctaagcggtccataattgtgctaagcgcacgagcacgaacaaggccacctatttaagcttgaaatcatattttagagggagagtttggactaggattcagagctttgcatgtctagagtttctagagagagaggggtccaagttccagagagttttgagagatttt

SEQ ID NO: 3212 - DNA, 388 bp, Glycine max
agctttgatgcaacatttggagaggttaatgaaacaacgagatgatgcgctccatgagaggttggatcaaatggagaatagagatcataatgaagaagaaaggaggagaagagggaatgatggtgttcctagacaaaaccgaattgatggtattaaactcaacattcctccatttaaaggaaaaaatgatccggaggcctacttggagtgggagatgaaaatagagcatgttttctcatgcaacaactatgaagaggaccagaaggtgaagcttgccgccacagagttttccgattatgctcttgtgtggtggaacaagctacaaaaggagagagcaagaaatgaagagccaatggttgatacatggacggagatgtaaaagatcatg

SEQ ID NO: 3213 - DNA, 290 bp, Glycine max
agcttctatcttcgagtattcaattcattataactgctacatagtattgaacagttttgaacgaattgcacgaaaacaggttgcggctgttttatagaataactcaatttcaagttggtgtttttacggaaaacatgttgtgccatttagaattttccttactttaatacagttacatattgatctgttgggtgtgcagttggcctggagccgtggatttatagtttcatgtgggatctgattctcaaatttcgattgacttggtaagcaaaggttattccaaaacgcat

SEQ ID NO: 3214 - DNA, 387 bp, Glycine max
agcttctatagaaggttcgttcctaatttctctacaatcgcatcacctctcaatgagctggtgaagaagaatgtggcatttacctggggggaaaaacaagagcaagcctttgctttgctcaagaaaagcttactaaggcacctgttctagctcttcctgacttttctaaaacttttgagctagaatgtgatgcctctggagtgggagttggagctgtattgttcaaggtgggcaccctattgcttattttagtgaaaaacttcatagtgccaccctcaactaccccacctatgataaagagctttatgccttaataagagccctccaaacttgggaacattaccttgtttccaaggaatttgtcattcatagtgatcatcaatcact

SEQ ID NO: 3215 - DNA, 386 bp, Glycine max
  unsure at all n locations
agcttgtcaaagaatccaacctctcatggtagaagcaaacacatagaaacaagatttcactatcttagggatcaagtgaacaaagagaaactgaaagtggagtactgctacacatttgatcaacttgctgatattttaaccaaacccctcaaaggggagaggtttaaaatgttaaggggcataattggcttgatgaacttaggagatcagaattaagggaaggtgtgagagtttaattttgttttgtgtggggtagatttgtttgtgctttgaatataagagagagtaacagaattttaaaattctgttataagtactagcctaagtgtgaagggttattactctgtntttgcttgtataaaagggcatacatacatcttaataaa

SEQ ID NO: 3216 - DNA, 366 bp, Glycine max
  unsure at all n locations
acatattgtcctttcatggtgattttcagccttggagttgcagcgtaagataaaggaaaatagganatatgatacgccatccactatagaataacccattgtatgagaagcttcaccatcaagagagtgccttggataaaatgcttaaaaaagaagcttcaatggtggaagagaatgacatagagagaggggggggggggcttatctcattccatcctattctcgttattgctgtctctctctctcccctactcatctgtacattccttattatatacaccctgttactctacaccagtgtcacaatctcctatgtttattatcctatcatcatcatgtaactattagttgtgtactttctctacg

SEQ ID NO: 3217 - DNA, 406 bp, Glycine max
  unsure at all n locations
agctttcntcaccactagatttctgagcaactccttcttccatatttctatgagggacttaacaaaatggagaggagtatgattgatgctggcaatggtggaacccttggtgatatgactcatgctgaggctaggaatttgattgaaaagatggcttccaactcccaacaattcagtgcaagaaatgaagctattgttcttagaggaagccatgaggtggccacagattcatcttcatctacagaaaataaaaagctttgaggaaaacttgatgccttggtccacctaataactcagcttgccatgaatcagaaatctacacttgttgcaagagtttttggtctatgttcttttgcagatcaccatacagaactatgtccttctttgctgcaatctggaatcaatg

SEQ ID NO: 3218 - DNA, 400 bp, Glycine max
  unsure at all n locations
agcttgtaatgagcttcanaacaaagattggggaacgtatgctcanaggtgatatcanagggaaataattcaagggtaggtccaatttggtaagaagtttataagaacaaaattggcctaatcatttccaaatatgcatgtgaattaggaagcatcaacaagaatcaagccaaggctattgtgcaagcaatcaatggggcaaaacacaccaaaagattatgatgatggatggctcanattctcaaaaaggtaaacttatcactttcaaattgagcttccaaaactatcatgacatgtagaggaaaaacatggatttcaaatcacaaaatgtcaagagacttttattttcagaacaattacccatttcttgaacatatcctataattcaaagaanaatatg

SEQ ID NO: 3219 - DNA, 107 bp, Glycine max
  unsure at all n locations
tgcttgagatgaggaagtgcgaaggattaaacttcctgcttttattgccgaccacagagtggtacctgtagatatgtcgcggnggtcaggagaccttgtggacgtta

SEQ ID NO: 3220 - DNA, 358 bp, Glycine max
aatttctcccacacttttggggagggccattgctggatggccttgaatatactagggtacacttggaccctatttctaccacctacaaaacctaagaaaactattttatctacacataaggtactcttctctatatttgcatagagggtgtttttcctaaggactgaaagaacttgcctgagatgtcctaagtgatcatctacgctcctactatacactaaaatatcatcaaaataaacaactacaaatctacctatgatatcccttaagacatgatgcataagcctcataaagtgcttggtgcattatggagcccaaaaggcattactatccttcttacaaaccacacttggtcttg

SEQ ID NO: 3221 - DNA, 249 bp, Glycine max
agctacaatataaagatggcctcaacatattccttatttccagaaggaaactctatcaataaacctccaatctttaatggagagggttaccactactggaaaacccgaatgcaaatttttatcgaggcaataaatctaaatatctgggaagccattgaaataaggccttatatacccaccacagtagaaagagtttcaatagatggtagttcatcaagtgaaagcataaccatagaaaaacctaaagat

SEQ ID NO: 3222 - DNA, 394 bp, Glycine max
  unsure at all n locations
agcttatttctagaatgttttatgtttcttaaaataaaaaagagaatacgttatgtcaattttaatacttttttcggtctttttacatgaagaaaaaaaaaacatgagtccattttgttggtcttaattcacattaaatattgcagtattatggttactacgtaaatcatttaattctgagtattttttaaataattttttaatttctgacattattaaaattaagtaagttgcctatttgtaaggacgggaaggaatatgtattgaaatgacccgaagtataatccaaaacctacctaanaataaactgtctaatttctcaaacataaacctgtcaaaagtttctttgaagcatatcgaatcaatgagatggattgggtcaaaaacaccccta

SEQ ID NO: 3223 - DNA, 266 bp, Glycine max
agcttcaacacctccctttcgatgttattgtgctccctactctttagattgaattttggagtttttctcattgaacagcgttttccagtttagtgatttttgaattgtgaggttcgatgatgttgatatgagcatgaattgaagggataaatgaataacttggttgtgtgttgaagtgggaatattgattaattacgttttttttgttggtgagtttatgcatatgatgcttcgagattgcatatttctgatgcggatggagaggc

SEQ ID NO: 3224 - DNA, 403 bp, Glycine max
agcttgataacccattcttctttccttattacatgatgcataagcctcataaaggcgcttggtgcattagtgagcccaaaaggcatcactagccattcatacaaaccaaacttggtcttgaaagcggttttccactcatcaccctttttcatcctgatttggtgataaccacttttaagatcaatttttgaaaaggtattggcaccatgcaactcatcaagaaaatcatcaagtctaggaatggggtgcctatactttacagtgatgttgttgatggccctgcaatctgtacacattctccatgtaccatcctttttgggcaccaacaacactggcacaacacatgggcttaggctctcttggacccaacccttctccaacaattctttaacctgagactcta

SEQ ID NO: 3225 - DNA, 389 bp, Glycine max
  unsure at all n locations
agctntagtgactgtgtgcaaccacatattttacattgagtgttctctttgatatgttctacagttgattttgcacaaatttctaattgtcataacatatgattcatgaaaacaatggaggactttcccaaaaactagatgagttcagatgtttttgcatggacttgataaaaaaaacatttgaaacactgatttgatttgaatatggaaacaagccttaagttttagtgattgtgtgcaaccatagattttacattgagtgttctctttgatatgttctacagctgattttgcacaaatttctaattgtcataacatatgattcatggatatcatttaggttttcttgctttctttacattttaagccactggccaaaaagttatccc

SEQ ID NO: 3226 - DNA, 362 bp, Glycine max
  unsure at all n locations
agcttgataggaagatctgctgagagcttttgcttttgtaaaagttntaaaaaaataaccaaacactcttaaaaaataaaaaagatcttttttcagtagataagataataaaagatcttttgggccacatccaaacgggcccgatatatgatcagattgtatatatacattaacgttgtatttcatctcattttcattttattttattgttcgattctttttattacatcacttattatatttataaactttttagtttaaatatattttttccctatattatgatgatattattgtgtatcacattagcacaaaagtcatatcattgaccgacatatcatcattacaaaaaaaaattaaaa

SEQ ID NO: 3227 - DNA, 405 bp, Glycine max
  unsure at all n locations
agcttcaacgctcatataagaaacatctataanatttatctctgatttgtaactcttaagcaaacattctaaaatgacaaggaatagacataagtaaaaaaagtatagatggattcacacatttcaccttaaaccttctatattgtttatttccattataataagtaatcatcaatcttccacttaagattccccaaatttaagaagatttacacactactatgcttccaatcctacaataaacttattcattttgacttaccacctaagaagcaaaaacaatggacacaagcacaaacaactcatttaccagattcaaaagtaatacaaaattgaaattttaattgaacttacaatggtaaaggaaatttgaagcatgcatagttattaaattagatgcaacta

SEQ ID NO: 3228 - DNA, 400 bp, Glycine max
  unsure at all n locations
agctttctgaagttttctggttttctaatcattgaaaacttgtgctattcatcctttttattctcttctccctttgccaaaaagaattcgccaaagactaatcgcctgaattctttttgtgcctctcttctcccttttccaaaaggacgaaggactaactgcctgaattcttttgggtctcccttctcccttctcccttgtcaaagaattcaaaacgacatagtccgagaattcttttgattcttcccattccctaatacaaaagcgttcanaggtttaaccgcatgagaattcttttgtatccccattcacaaagtatcaaaggtttaacagcctgagatctttgtcttaacacattggagggtacatcctttgtggtacaagtagagggtacatattc

SEQ ID NO: 3229 - DNA, 336 bp, Glycine max
  unsure at all n locations
agcttgcactaagatttctgattcaggttcctaatgtatcgagacattggttattgaacaatggaaactcccgagaaattaaaatcgtcattacttttcactcggatgtccgattcaggcacttcagatatcgagacgctcgaaattgaacaacggaagctctcgagaatttaaaatggtcattactttacacatggaggtccgattcataaacatcacatgtcgagatgctcgaaattgaacaacggaagctgaagagaatttcaaatggtcataacttttcacttggatgtccgatncaggcgcatcatttatcgaggcattggttattgaaaa

SEQ ID NO: 3230 - DNA, 130 bp, Glycine max
agcttcttgaacgggatcaatatattcattggcatagattaaaggatgattatgtggtacgtgatatcttttggtgtcaccctgatgcagggaagttataccacgcatgtaaattgaagttttgatagat

SEQ ID NO: 3231 - DNA, 389 bp, Glycine max
  unsure at all n locations
agctnttgcaagctggaatcatttatcctatctccgatagccaatgggtgagtcccgtccaggtagttccaaagaaaatcggcctcaccgtgataaaaaatgagaaggaggagttgattcctactcgagtgcagaacaattggagagtatgcatcgactataagaggctgaaccaggttaccaaaaagaaccattttccactgcctttcattgaccagatgcttgaacgcctggcaggtaaatctcactactatttccttaatggtttttttggttatatgcaaatcactattactcctgaggatcaggaaaagaccacattcacctgccccttcggcacttttgcctataggaggatgtctttcggcctgtgcaatgcccctggtacc

SEQ ID NO: 3232 - DNA, 389 bp, Glycine max
agcttgccacccagctcgcccaggcgagcaaggtggcttcctccagaagcaaccgccttctggaggaatcttctggagggcccaagtgggcctggttgctatttgcacccccatttttactaaatacaccccctacctttttttttggtgattcttttttcgtaaagttacggaaatttacgaattttgtaatgatacttgttttatttccgtaatgttacggaaccttgcggattacataatgatcccttttttgacttacggaatgttacggaacctcactaattgtgcaacgatgcttccttttgacttccggtgtgtcacggaaccttacggattgtgcatcaatactttcttttgatttccggcacgtcacggaacttcacaaa

SEQ ID NO: 3233 - DNA, 389 bp, Glycine max
  unsure at all n locations
agcttattatgatacaatattgagcttatttaacaagggcgaatgttattggagctaaatcttgtatcctaaccagcctgctctatggtcgaatctgcagtcacacatttaacttaaaggtgtggaggctttgaaagcccaatatttgaccacaatcagtctttgcaaagactaaaacaactcacaatcttgtaaacatcacgcataaaattatgaaggctttggaaactcaacctctaaccataattaatatttacgaagatcgaataacctacaaagcattttgtacaacctcataacaaaacattgtgttngggtttaccccatagttgatttcattattattagtgtaatattaaatgcttacagagaacttgataataataaaa

SEQ ID NO: 3234 - DNA, 299 bp, Glycine max
agcttgcctcctatagtagtcgtaactcttgcacgagccttagtgaagaacttcatgactattacgaaggaatgcataggtcacatcttacacctcactcccatagaggagagaaggaaagaaagcctcaagaggctaacattaacctcccatacttccaggggaaggacaatctacaggctaacttagttttggaaaaagggcccagcaccttcttaaaaagagagccccgcccagatctatgggctctcactcttatccaaagaaataccaaggtcaaggcatcttaagggtgacac

SEQ ID NO: 3235 - DNA, 286 bp, Glycine max
agcttctaagaatcaagatcaagattcatgactcaagattcaagaatcaagagaagacttaatcaagataagtatgaaaaagttttttcaaaaactgagtagcacatggatttttctcaaaacttgtttaccaaagagtttttactctctggtaatcgattaccagattattgcaatcgattaccagtagcaaaatggttttcaaaaagctttcaactgaatttacaacgttccaattgatttcaaaaagctgtaattgattacaatggtttggtaatcgaatacc

SEQ ID NO: 3236 - DNA, 390 bp, Glycine max
  unsure at all n locations
agcttataagaaanaaattgcctaaattatttccaaatatgcatgtgaattaggaagcatcaacaagaataaagctaaggctattgtgcaagcaatcaatggggcaaaacacaccaaaagattatgatgatggatggctcaaattctcacaaaggtaaacttatcactttcaaatcgagttttcaaaactatcatgacatgtagaggaaaaacaaggatttcaaatcacaaaatgtcaagagacttttattttcagaacaattacccattacttgaacatttcctatatttcaaagacaaacatgcaaatttaacacaacaaaactaacaaaattaaactagaacccaacaaaactaacaaaattaaacttatttaacacaactaacaaa

SEQ ID NO: 3237 - DNA, 377 bp, Glycine max
agcttcacataatttttttttcacaaactttagttttggaagaccaattactaaatctttcctaactagatgattgagatgatgcatgtttatgtgtgcagtcctacaatgccacaaccaagaatcatctttcttacttaccaaacaactcagttcatgaaacgatgcatgttcaatgtttaacatatagatattacctatccttttaccaatatggacaacctcactggatatggcttcactagtaaggcaacaattcttgttgaatttgattttgaagcctttgtcacatagttggctaatgctcaggaggttatgctttagtctatcaacatatagaacattctttgtttgtgttttgtactaatttccaatat

SEQ ID NO: 3238 - DNA, 287 bp, Glycine max
  unsure at all n locations
caatgggttttgactttttcaaaattgggttcaaggttttctaaagtcatactcttctaaatggtccctcttgacccagacatgaaagagtctataaaagcaaggcttttgtttgcattntaagacaatctaatcaatccaatacaatcttttacaagccttgaatctctttgaacttcttcatcttttttgtgccaaaagctttccaaaagtttctggttttttaaaccttgaaaacttgngttattcatccttttcattctcttctccattttccaaaatgaatt

SEQ ID NO: 3239 - DNA, 406 bp, Glycine max
agcttcttatccaacgctcatcttggtggtgaagctccttcttccatggcttattccctagtggatggcgcctcctctcccctcttctcctttgtcttccgctgcatctccatggtggaaaaccaccattaaaggacctcattgaagctcaaagatccagcctccatagaagctccacaagcaagcttccatcaatagttgcgtgatagcctccctctcggttgttctcgcacagttggtcacccttcaatatcagggggtggcccaggaactgataaaaggaaacggtggccccataaccaggagcgcaagtcttggttaagcatttaaaggcaaaggaccttaaattctcttaaggtgcagatgtggagccctctgaaagcgaggatgcgtagccctctaaagg

SEQ ID NO: 3240 - DNA, 393 bp, Glycine max
  unsure at all n locations
agctntatcaaatggatgttaaaagggtttttctaaatggcttaattcatgaagaagtatatgttgaacaacctccataatttgaaataacagataagccaaatcatgtttatagattgaaaaagactttatatggtttgaaacaagccccaagggcatggtatgaacgtctaagtaaatttcttttagaaaaagatttttctagaggaaaagtggataccacactattcataaagagaaagtatgatgatattatgttagttcaaatatatgttgatgatataatatttggatccactaacgattcattgtgcaaggagttctctcttgatatgcaaagcgaacttgagatgtcaatgatgggagaactaaattacttcctgtggttacaaa

SEQ ID NO: 3241 - DNA, 402 bp, Glycine max
agctttgcggatttggtcttcgccagtgaaaggatcgatgtgggtccgaaaagaggcaaatttgatcatcctactaggacgactgagaaaactggggcaaatgaagagggtgagaaagagggagaaacccatgctgtgactgccattcctatacggccaagtttcccaccaaacccaacagtgtcattactcagtcaataacaaacctcctccttacccaccacccagttatccacaaaggccatccctaaatcaaccacaaagcctgtctaccgcacttccaatgacgaagaccacctttagcacaaaccaaaaaaacaccaacaaaaaggaattttgcagcaaaaagcctgtagggttcaccccaaattccgttgtcatatgctaaacttgatcccatat

SEQ ID NO: 3242 - DNA, 322 bp, Glycine max
agcttcttgaacggcatcaatatattcattggcatagttttaaggatgaacatgtggtacgtgatatcttttggtgacaccctgatgcaatgaagttatacaacgcatgtaatatgatgtttttgatagataatacctacaaaataaacaggttctaactcccactacttgactttgttggtgtgacaccaacggggatgacattgcttgctggatttgcatatctggaggctgaacgtgttaataatgtggtataagctttataacagtttgaggtttttttttaaaacgcgatgtctttcctggagttattgtgattgac

SEQ ID NO: 3243 - DNA, 396 bp, Glycine max
  unsure at all n locations
agcttgtctccctaagggagaaaggaagctcgtctcctttttcttctctttgctgcgtggatgggtttctttttgtggcttcattgcggattcttagggtttgaaggtggaaaaaagctctatctcgatcaatggaggccgaggcagagaacaacgacgtgaagaaggaagaaaacatctttgataaccacaacgacaacaacaacaacaacaacaatgaaagtgacaacaaaattaggaattcgagcgagggtctgagcaagcccaagcgtcaaatgaagatgtcgtttcagcttgaaatgctcgagaaagcttatgtgggtttgttatcgctaacctttcttattttattttttttcttggtcaatttctagggntttttattgctcatttttt

SEQ ID NO: 3244 - DNA, 391 bp, Glycine max
agcttgcattatggtatttattgtggtttcaaatatatttttgcctgaggtctggttattaccatgagacaagagatgttgcccaatcatcacatcaatttgctcctttggtacatactgtggtcactacttatttactaatttatgatgtagtctttcttaataatttacttatttctgacagttgacagagtggattaataaaggagggatggtaccagaagagattgcagctgccgcagcatctgaggaatgtgaaagaatattgattctcattacccattgacttatgaaattcaagtacataaaaaatttatacaaaaaatatagaaaataatgtttaatttccaactatcaaagggtataaattgttggtggttccttatatttt

SEQ ID NO: 3245 - DNA, 395 bp, Glycine max
agctttaaaatttgaattaaaacgttcataaactgctggtaatcgattactatatatgtgtaatcgattacacagtgcaaattttgaatttaaattttaatagctgttgtaaatcagttttggccaccggtaatcgattacatcctctggtaatcgattaccagagagtaaatttgttgaaaaagacttttttaacttaaaattcttggccaaaccttttgcaatttcaattggaattcccttcctatttaatatcctttctaagactctatagactgtcttgatcatccatcttgaatatctttaatttctttgtcttgaataaagctttgagacgcatgtgaaactttggcatcatcaaaacattcagctttatcctttgtctacaaatttgg

SEQ ID NO: 3246 - DNA, 389 bp, Glycine max
  unsure at all n locations
agctnttaactgggaaagtctctcatatactttntgagatgtttaaggatgtctgaaatgaaaataaaaggtcatattggattggaagatttgtctaaaacaatttgttaccacattggaatgcacctgggtatcgttccaagtgtgcgcaagcaacaaataaaaataaaaaaattgggcatctgaagaagggtgggtgtatgcgcataagtggttctattagcttggagtatcacaccattcgctttgtatgtacgttaaaaatataatacatacttctttgtacttggttaatttaccacttatttttttattttataatgtttgttaatagtcagagacgctgggtcgattggcatacacatatgagctctttcagcaaactcatt

SEQ ID NO: 3247 - DNA, 357 bp, Glycine max
agcttcttttggaccttgaacaagcaattaactcctctttcagaaccatgctatgtgctcgcgactggtctctttcttcccttcgcaacttgagttcactattgctaccccatagagctccgcgaaatttgttccggccatactcttccttgcgagccctcttggtctcttgttcaagggctcttgcggtaattgcattctcttcccgtaacctggcacactccttccgaacgtgtgtagcggccaacttgaacttctcctttgcaagttttgcttttcctaactcgctattgagagcttggacttcttcgtcctcttccggtgcttcaaaactctcttcgctgacgacttttaact

SEQ ID NO: 3248 - DNA, 385 bp, Glycine max
agcttttgtcgtttgaatttgctatgagcttctggtttctattacgagtaactcgaaatactacggaacgcagtcaaacatccgagtaaaaagttattgtcatttggatttgctcaaagattctgttttcaatttgaagcgtctcgatatattacaggactcaattggacatccgagttaaatgttattgccgttttaatttgttacgagcttccattttcaattacgagcgtctcaatatattacgggactcaatcggatatcctagttaaaagttattgtcatttgaatttgctcagagcatctattttgaatttcgagtgtctcgacatactacgggactcaatcatacatccgagtaacaagttattgtcggttggatttg

SEQ ID NO: 3249 - DNA, 386 bp, Glycine max
  unsure at all n locations
agcttatggcggcaaaggataagctactctacctgaagcatgttgatgttggtgtttaagaacactgtatccttgaaaagcaaaaaaaggtcagcttctcaagggcaggtaagactcctaaagttgaanagctagaattggtgcacacaaatgtttgggggccagccccagtgaaatctgttggaaactcacgctattatgtcacttttatcaacgagtctaccagaaaggtatgggtttattttcttaaaaataaatctgatgtgttttctgtgtttaaaaggtggaaaatagaagttgaaaatcaaacaggtctaaaggttaaaagtctgaaatctgacaatggtagggagtatgatagtcaggagtttaaagacttctgttca

SEQ ID NO: 3250 - DNA, 406 bp, Glycine max
  unsure at all n locations
tgcaagctngaaatgaggaagtgtagaagggtgagacttcctgcttttattcgttgaccacagagtggtacctggagatatgtcgcgggggtcaggggccttggggacgtcaggtggggtgctattgcccaaaaccaagcttgaccaatcccgacccaacccgagcatagtcagtcagtgagaacctgtgatgtacctaagcaggcgagctccgggcagtcaacagataaaaggaacaaagaccacaaagcaaggaagcttgtgtggtggctggccagctgtgaatcttatgtgatatgggttatggcctctggtaatcgattaccaagggtgggtaatcaattacaaggcttaaaaatgaagacaagaggctaagatggtctctgataatcnattaccaaggggt

SEQ ID NO: 3251 - DNA, 409 bp, Glycine max
  unsure at all n locations
tgcaagcttgcagaattggtcttcgccagtgttatgatcaatgtgggtccgaaaagaggcaaatntgatcatcctactaggacgactgataaaactggggcaaataaagagggtgaggatgagggagaaacccatgctgtgattgccattcctgtacggccaagtttcccaccaacccaacaatatctttactcagccaataacaaactttttccttacccaccacccagttatccacaaaggccatccctaaatataccacaaagtttgtctaccgcacttccaatgacgaacaccacctttagcacaaaccaaaaacaccaaccaagaagtgaattttgcagcgagaaagcctgtagaattcaccccaattccagtgtcctatgctgacttgctcccatatctactt

SEQ ID NO: 3252 - DNA, 457 bp, Glycine max
aggccggagatatatcggtgtaacgatacctaatcactcattctattttctctcctccggcaccagtgcacgtgaactttggaccggttatcctatgaccgagctgcatctattgacaagggaacggggtttagggagcgcaatcgttctcacgaatcgcggccggagactacatcacgtggacactcaaggcgaaataatcgccggggggccaacacttgaacaattgggtaatttgaggggacagaaggtcatatccacgctcggtcgcactccacattgcaatgcccggcctggaagcgaggaactgctcagctgagtgctggaatattgaatgggcctcaaacattctccattgctaagaccagcgatcatgccttgtggtggatccaaaccaatggcccttacaatttaagggcctaaggaaccttaattgattgctaaatagaccttcaac

SEQ ID NO: 3253 - DNA, 362 bp, Glycine max
  unsure at all n locations
agctntgtgagcttcaaaagctcagcatgttcactaccctgaagaacattgcaagttgagttctgcaaggtaagaacagggattgcaaagattgagtgtgcagttcttccctcagacaacaataaggatgttatgccacttgatgcaactgttaaaataatatgtccctttgaacgaaatgcagaggctagtgtcttccgcatgaaagtttttcaatccccctataaccataaaggaagaaaatgccaccatattgcatattaacatcattcattactatatcaaagatactttnttgctcatctgcaccaaggaaagttgaaaatattcttaattacttaagatatataaataattgaatt

SEQ ID NO: 3254 - DNA, 244 bp, Glycine max
agcttatttgggctgtggccaggttagatgaagtatttgtagagggaagctcattctcgatagggtttgagtttgcggccgcattctcggcttcaacgatgagaatgaaaaacttagaggagcaccggtgccctcgagagaacttctcattgcagttgaagcacaaacccttttcctggcgtatcggcatttctttaagtgacaggcgtttaaaagggaggggatgtggtttggctggaagcga

SEQ ID NO: 3255 - DNA, 394 bp, Glycine max
agcttgacaccattgcttggtgctttcattgctgattcttatgctggaaagttctggactggtactgttgcttccattttataccagatagtaaagatcctctcccgactctttttcttatgattgacaagtattacttatatatcaaattttaacttcttggtgttccaatcatgtattttgtattcttaccattcgagaaaagtagaatgttatctgcagtgatatggatattattattagggtaatggagctagaggatcaagggaaccctttccctaaccctaattttattgaaaattgtatcggaatattttggtttttattgggtagctattatgaatatttttattaggttttaatagtgagagaaatttaaatttagtatctcttt

SEQ ID NO: 3256 - DNA, 391 bp, Glycine max
agctttgcagatttggtcttcgccagtgaaaggatcgatgtgggtctgaaaaaaaaaggcaaatttgatcatcctactaggacgactgagaaaactggggcaaataaagagggtgaggataaaggagaaacccatgctgtgactgccattcctgtacgaccaagtttcccaccaacccaacaatatctttactcagccaataacaaaccttctccttacccaccacccaggtatccacaaaggccatccctaaatctaccacaaagtctgtctaccgcacttccaatgacgaacaccacctttagcacaaaccaaaaacaccaaccaagaagtgaattttgcagcgagaaagcctgtagaattcaccccaattccagtgtcctatgctgac

SEQ ID NO: 3257 - DNA, 280 bp, Glycine max
tcaagcttctttatatatatatatatatatatatatatccctttggcggatcaaaatacataaaaaatattctgagccttgtggacgagaatctagagggtaattcgaagaaaaagatcatcgtaaagcagttcgtagctattctgttgcttagagaaaatgattaatttggacttaccatgttcactagagcagacttggctttaacttttttagacaggctcaaattaattccatgttttattatcaaattgatatgaagcacatgatcaaatctttt

SEQ ID NO: 3258 - DNA, 367 bp, Glycine max
agcttatgcgcatacttcttcacgaacgttcacttacactagacattcttataactaagagaaatgcacccatatacaatcaaggcaccttcgttacctagattatttacatgtacttccaaggagtatttgttacctacatcacacacatttcctttgctaaattcacatacatgcatactctaagcactttggctatcgaagattgcatatgcgcacattcctggtatttttataacctatcatacccaaacttatgataatcttgactattacacaaaagggctactttatgctctcttttttttttttcaagggtttactactaaagcccattcaaattaagtattttttctttggtactaaa

SEQ ID NO: 3259 - DNA, 383 bp, Glycine max
  unsure at all n locations
agctntgaattcattctatgcacccttatgggtccattcttgctttgtatgttttcatcttcattcttctactttcagtatttcttttcttcgttttaagcgagttttgaccgatcgtttaagccgtaatttcacttaatcgatgtttaaaggaatttcaatcgatcgtttgtgtggtaatctcgtttaatcccccttaaaataaaatccaactgatcattcatgtcgtaacctcggttaaataaaaaaagcaaaaataataataaaataatcaaaatatctgaaaataatattataataatagaataataaaaaaaccccaatcggacattttacttttgaaagttcctttaaatgagctgatnnatataaagtgaaattaa

SEQ ID NO: 3260 - DNA, 166 bp, Glycine max
agcttcttttggaccttggacaggcgattaactcctcttacagaaccatgctatgtgcacgcgacaggaaccttactttccttagaaacacgagataactatagctaccccatagagctacgccataaatgttacggccatactctttcttgcgaaccctcttggt

SEQ ID NO: 3261 - DNA, 175 bp, Glycine max
  unsure at all n locations
agcttgaagaaattnttagaggaagaacaagtcatcaagtgtatgaaaatccaattctcctcaagagaaagaagaacttagagaggaagggagatgagtatgaaaagaatgggaggaaagggaggctgttacgctttacatttgggaaagaagggatggttgctatttgcatgtt

SEQ ID NO: 3262 - DNA, 402 bp, Glycine max
  unsure at all n locations
ggctgcagctgtcgttgaatctagacctgtgttttgttgaaactaaagatatatttgaacaagctgaaatgattattatggatgaaaatgttgtcttatttaactttcttatgttaatagatattgtatggtgttataataatttgttttctgattattacctttggactatgatttttgttcttgcaggttgacaagattcatgtccttataagaaaagaggagttaaagacatggaaattgactctaaaggagaacaacacttatatgatgcacaactntaaaatttttaacaacgagggccagtataagctatgtttgcatccatataagttgattnttactggtgtcactattgtcatagaagtggaccttcctaatatccctttaaaggcatatgag

SEQ ID NO: 3263 - DNA, 405 bp, Glycine max
agcttccatcacctcggttttctttaacttcgtgggacacccttttcagcacaaggtccccctcattcaacttgtgggggcgcaccttcttgttgaacgcgttctttatcctttgttgatacaggcgcctatggctcatgggcgtcaaacgcttaccttcaataaggttgagttggtcgtagcgtgtttgagcccactctgattcttctaggcccgattctgctagtatcctctgggaagggacctctaccttaaacgggagcactgcttccatcccataaaccaaggagtacagtgttgccccagtagaatttcgtaccaaggttcggtacccatgcagggcaaaaggcaacatttcatgccaatctttgtacgacactgtcataccctaatttcgtccaagga

SEQ ID NO: 3264 - DNA, 300 bp, Glycine max
agcttgccgccacggagtttttcgactatgctcttgtgtggtggaacaagctacaaaaggagagaacaagaaatgaagagccaatggttggtacatggatggagatgaaaaagatcatgaggaagcggtatgtgccggctagttactcaagggacttgaaattcaagcttcaaaaactaaccccaggcaacaaggggttgaggagtatttcaggaaattgatgtgctcatgattcaagcaaagattgaagaagatgaggtgatcaagatataaccaagggcaaggaccatgaagcacttg

SEQ ID NO: 3265 - DNA, 242 bp, Glycine max
agcttgcatgattcacataagtctattatcaaacggtttaattcagttggttgaataaagtgtgagtgttataatatcgtatttgtcgcaacctaacatcacaacgggacgacgaaagacaataaaagagattttttttcctaagaaggaaacgagagggagtcgccactaacatttatttaggggaaacgttagaaaaacaaaaaagaaagtctgtgaaatttgaaaagagaggttcgcga

SEQ ID NO: 3266 - DNA, 395 bp, Glycine max
  unsure at all n locations
agctntggaaaatgatntgtatacaaaagttagtcgtatgaagcgactaacacacctcatgcattatagcctcaaaaccaacgacaggcaatgtaaacaagggagaattttcctaaaatatttagacaaagttatgttgtgaaactcaaagtagaaaaaaataggcaatgcatgtcttttaagttttgggaaggctatgtaaacaagggagactttgcccaaattttcctaaaatttttagacaaatttatgttgtgaaactagaagtagaacaaaataggtaatgcatgtcttttaattttagtgtgagcatatgctattgcctttagtgttttggaaaatctaaccattttatttttgtgaaacttgtcttaaattaaattgacacacaatga

SEQ ID NO: 3267 - DNA, 387 bp, Glycine max
agcttgtcataggctcaataggttccttcaattcaatgaaggtcctagtcaccattattgacaatcaactccttttcaaaagaatcataatatatgaaaatttaacttaccaacttgggcgtaacaaatgcaacacaccttctccgaataaaaccaaaacttaataaagcattcataaatcaatattagttccttccattccacaattaccaacaataatcaccactctcattatgaacttgtacaaagtacaaacaaaccaagaatacctgatcttagcatctgcacaaaaagactcaatgcttgagaggcataccctctctgggaataagctgatatcatagccgtccacgacaccacattcctctgcggcattacatcaaacac

SEQ ID NO: 3268 - DNA, 288 bp, Glycine max
agcttgttgttcggcatgttttttatgtattccattgccatgcatgctatgatggaacaaagatgattcgcctttgttttgtttctgtgccaatctttaatgttagatgcataattcttttcttcaaatcattagtttttaatgtaactacaatacctatgtaagtcttcatctacctttaattattggatcatcatccttttggtgaactctacatgaaaccataaaaaaaggaattctatgtgaatggaaatttcaagattgtccttgaaagacattatggatgct

SEQ ID NO: 3269 - DNA, 124 bp, Glycine max
agcttgactaacaccaatatgacaggttttacaggctttcatcaaagctcttaacaaataacttggataagccataaccctagtaaaactaccactcttatttccaaaacccatcccttgaaat

SEQ ID NO: 3270 - DNA, 159 bp, Glycine max
agcttcttttggaccttgtacaggcaactaactcctctttcagaaccatgctatgcgctcgcgactggtccctttcttcctttcgcaacttgagttcactattgctaccccatagagctccgcgaaattgttccggccatactcttccttgcgagccct

SEQ ID NO: 3271 - DNA, 297 bp, Glycine max
agcttcccgtatccgtacttggaaggatctgattactgccttcctaaggcaatatcagtacaattccgatatggctcccgaccgcactcaactgcataatatgttcaagaaagagggtgaaacctttaaagaatacgcgcagcggtggagagatttggcggcacaagtagctcctcccatggttgagagagagatgatcaccatgacggtagacactctgccagtgttctactatgagaagctagtaggttatacgccatccagctttgcggacctagtattcgccggggaaagaat

SEQ ID NO: 3272 - DNA, 272 bp, Glycine max
cccgacgaagacactgacaaaaacttatcttctcctttttggacaaagtatgacaagcagggggcaagtaaattttcttcccatcagaccttggatgcaagtgtgatcgtatccccatctcatctagatcttgacgggtattcaagtcatccttcatcttgccttgaatgttaaggagcatcccaatcacattgtcacatacatttttctccacatgcataacatcaatacaatgtctaacgtctagattagaccagtccgaaagatcaaag

SEQ ID NO: 3273 - DNA, 258 bp, Glycine max
aacaacatcttactaaagaattgaaaccttgagaaagcggctaacacctgaccaaatctttgcctctataatcttcttgattgaagtatgacttcctcactatcatagatcaagcgaaacttggggaggaagcatgttactctccgagggatcacctaatggaagaatgcttactctaacgattgattacattgacttacgggcagaaaaaggagcaaaatcaccatcaaaggaactcatagtggataacacattcct

SEQ ID NO: 3274 - DNA, 395 bp, Glycine max
agcttttcctcccagtcttgtcaatgatgtaaatgcttcagaattgaaccaaatgcattgaggccagctgtgatgagtgacaaaaacaatgctgtcctgttagatgcaaaaccagccaactgaacaatggtgggactataatacatcacagtgttgattcccacaaactgctggaagattaagaggcccacaccagcatataaacctcttctcacagctgaagttcttaaaagtttgactatgttgatcttctctgatgattctgcttccttaatttccatgtcaactgattctttcaaggcctgaatttcgccttcaacttcatgtggtggataaatctttttcagaatcgattttgcttcctcttccttaccctgtgggaacaaaaatggaac

SEQ ID NO: 3275 - DNA, 382 bp, Glycine max
  unsure at all n locations
agctntgagggtgcgtagcccaccatcttttcatagtagagtatcgataatgtgtctaccatcacgattatcgtctccctttccatcattgngggtaccacctgggccgccagatccctccaccctttgggcgtgttctttgaaagatctgtccccctttttgcacatgttccgtagttgcatcctatccggaaccatatcaaaattatactgatactgcctaacgaaggcaaccattaagtccttccaagtatggactcgggaaggttccaagttagtgtaccaggtaacagctaccccagcaagactttcttagaagaaatgtattagcagttcctcatcttttgcgatgcccttatcttccgacaatacatctttggga

SEQ ID NO: 3276 - DNA, 408 bp, Glycine max
  unsure at all n locations
agctttgatggagaacaaccttaggatgtagagggtacacgcatggagaagaagaaagcgcgagcaaaataggtggcgtctaatataatttaaattgtaagttcaacatcaattttcaataaaaaaaaccaatgttaacaaattcatgttaacgttaacatcggttttattcaataaaccgatgttaactgatcatacgttaacatcggttttcagaaaactgatgttaacgaactaaggctaacatcggttttctgaaaacccgatgttaactaattaatgttaacatcggtttttccagaaccgatgttaaagtcactttgttaacatcgattntattcaaacccgatgttaaagtatacacaatattcacaattatgccacgacgtttatcttaacattggtttt

SEQ ID NO: 3277 - DNA, 274 bp, Glycine max
agcttttaaaatggcccaggtttagatttctctaaatgccattgaagtaatttttttataattttccatgttaatcgagcacccgattttcattcttcggttttttttcaccaaaaaatttcatttcctgttttttatttatcatagaactaatacaaagtagtttccattgagaacggtaccggtaaaaattaattaatcacatttaataatattaattttaaataaaaataataatttttaaaataatttatcattaaatcttgatatcaaa

SEQ ID NO: 3278 - DNA, 339 bp, Glycine max
  unsure at all n locations
agctttagctntcttgttgttcatgttgctccccttatctctaaaaaattcattgttacatacatccatcatccttagagtatgtgaccggttaacgtattctattattcatggattagatgcccagaagtcctatgtattcccttgcactctattacatgttgaaaaatcctttggaagacaatcccttattgcagagctttgtggatggagatgatgcttataagaacctaggatttaagttgataccatatatttctaaggttcatttatactaaaatgtgacatgtaataaacaccaacaaaaaaaatgcaggatcaggataataagcgtatcta

SEQ ID NO: 3279 - DNA, 388 bp, Glycine max
agcttcatgtcttcattgtaacttacctgtgttgttatattgaaaacctaggtctgtttcgggaactcgtggttaacccaaggaccttttttggtttatgctgcaaggattgaggaactcgtgacctgaggtaccaggtaagcttcatgtctttgtgtcattgtcactgatctcactgccaatcttgttgccattgtcactgttgggttcaaggtaagctttgtgcctccgcgtacgtgctaaatttgagaagcaatgctacctttttctaactcatgagggatacatagacaataatatatttagaaatgttgcagtagttttgtttgtttcactcgctcaattttaattcaaataaatttctttagtaccaaattactacacttta

SEQ ID NO: 3280 - DNA, 358 bp, Glycine max
  unsure at all n locations
agcttattaatgtatgattaaataacatttaagacaatttgatcagttaattcatatttaaatatttttataactgttaatttgtttattaatttcaaaaattattttaacaaataaattaattcaaacattttgtatattttaatgaggaaagtatatgattcgatattatcattttagtgatgtattcaagtttctttgaaatatatgattagataacattattttatcacgtattcacataatttaaataaaaagttacaataacgtgaggaatagtgaaattttgttacgcaagataatgaaatttgatatattcttattaaattgatatagaatgaaatataanaatttaaaa

SEQ ID NO: 3281 - DNA, 339 bp, Glycine max
agcttgaaggggtgctctggacagaaactcaaatagcaaagtgaaagcttcctcaataaaattacttgcccacattatgcaattcctacaaaggttagtcagattctttgtgatatggaaatactatcataatttgcaattgtcattaacactggtttggaaagaataccgcgcttttcaatttgtcatttgattgtcttttctttggaattatgttacatacatagcagttttgcttctaatgtttgatctaacaacttagtcatgtcataacttttggtctgaaatattattcctcattgtgggtttgcatacactactaaatactggacattctat

SEQ ID NO: 3282 - DNA, 482 bp, Glycine max
cccccccatctacccctaccccgacctcatattccctaactcccagccggctcatgatcttgaaccttgatcctgccgccccggatcttaagaagactgcagcatgcaacctgttataacacttctagttgcacccgaagatgttagtcaatgctgacaacaattctgacgtacatgccgttataacacactgatagccctaatgacagagggaaggtagaagaaacccaacccataatcttaaactatatcaccccaaccgtgggcgacatccaggccccactttaatcggtgagaattacacctacccaacccaaaacattctggatttttacaactggaaccatttttgaacttcaaacatttccaactcagttttggttaaagaaaaccatctcccccgcacaccctgggaaaaaacatccaggtatcttccccctttgggacgcgtaaccccaacagaatttccctcctcatggacg

SEQ ID NO: 3283 - DNA, 355 bp, Glycine max
  unsure at all n locations
agcttgcaaccccatcaccccacaaacttcacatatacaacacgacaaaggagggggaaaacccatacacgtgtaaaaaaatattttttgtgtgcatatagcaagcatctttcaaggaaataatttgggttgaataagattgttatgcatataagaatttttattacgagtatttaacacatttatatatttaattaaaacttaaacttaattaataattcagttgacagaatttcgtgttagtctataagaagttattaaataatctaaaatcactacatatccatggtgtcaacttactaatggtggatacanggaacattggataggattcgaggcattttaattccaacaa

SEQ ID NO: 3284 - DNA, 224 bp, Glycine max
agcttattagtcggtcttttccatttatttgtaattttgcattgccattgttttttcattaactcttcttgtatctcctttataatgtaaagattttgctaatcagtatctctaagacactgattaagaattcaaaatgaagggtttaataaaaaacgacattaatgcatatatactatgatttccaacacactttcaacgtgaattttttttaaaaatatttt

SEQ ID NO: 3285 - DNA, 169 bp, Glycine max
agcttatgctaaattaggctaaactttcgtaagctgcttgagcagagtctagtcttacaaaagggatatgcggaccaaactcagtataagttagtctaaacctaatagggccgtctaaattgggcctagtccaacaagaaggatctgaggatgaagcttagattgattc

SEQ ID NO: 3286 - DNA, 478 bp, Glycine max
tgtagtgaggcttggctacaacaatttattgggttttctaggattcaaatgtttagattttaagagagcacaaatcatagacttatcccaatgatcttgtatcatacaagtagcttactcactatcttttcctcttaagttgcttttgaccttattgtaacaacacaatttattctttttttttaacatacaacttatttgttgtgtgtgctgatgcttaacctttttcttttcattctaattgacttcccttccccaaatttagagtaactttgccttgaaccatatgctctcctaaaatctaaacaaggtattaggagataattatttaagtttagggttcaattcatgacaaaatcatttagcttatacagggagcaaaggatgcaattatcattcaaggtaagcttttttgtcaaaaggcttgtgtatgtacaatcatggccttcatcatgtcctcatttatacatttcattct

SEQ ID NO: 3287 - DNA, 182 bp, Glycine max
  unsure at all n locations
tgaactcctgcaatgttgngctattccaagttcatttaccatacctttattttcgattgcttccttcactccttcagctaggcccatgtatcctacttcaaatgttgacaaaacatcaactgattgttgatttgctttccaactgattgttgtaccaaacaaagtgaacacatattctgtta

SEQ ID NO: 3288 - DNA, 291 bp, Glycine max
  unsure at all n locations
aaagatgatgacggaggtgatgacttaaagctcaaagatttaccaaagaacaactcaagtgcattatgaataattctggagttcaagattagaatcaagaagaattcaagacttgagaagaacgtttagagtcaagaatcaagattcaaggttgcagatctcaagaattaagagcaagattctagactcaagattgaagaatgaagagaagacttcatcaagataaggattaaaaaggtttttaaaactttgaatagcacatgagtttntgacaaaaccctttacccaaga

SEQ ID NO: 3289 - DNA, 176 bp, Glycine max
  unsure at all n locations
agctttttaaataattcttgtcatcttattactatttgttttattattctaatggntgactataaatgggttgttaggagggaaaatctgcactatcacccgagactctgttgaaatacatagatgaacttccattgtgtgcaaggtattacgggttacaaatttttttgttctaa

SEQ ID NO: 3290 - DNA, 482 bp, Glycine max
agcttgctctaaatttacattgatgtttgtatttattggaggaggttgtatgccatttttgttttaagagtagcattccttggtaaaactaactttccaaatgtttgccttcgcaggaaatcggcccgaggaagcttgcctcaaagaggtctaggaaggataaggcggccgaagggactagttccgctcctgagtatgacagtcaccgctttaggagcgctgtacaccagcagcgcttcgaggccatcaagggatggtcatttctccgggagcgacgcgtccagctcagagacgacgagtatactaatttccaggaggagatagggcgccagcggtggacatcactggttactcccatggccaagttcgatccagaaatagtcctcgaattttatgccaatgcttggccaacagaggaaggcgtgtgtgacatgaagtcctgtgtaagaggtcagtggatccccgttcgatgcaaatgctat

SEQ ID NO: 3291 - DNA, 185 bp, Glycine max
catgcaagctttcacaagaaccaagatttactctttcaagtttttttgtatttgaataagtctagcatctcaaattaagtcttggaagcaataaagaatcaattgccattcaacatggaaggttttggaataaaaaaaatacatcaaaatactaaaaaatcattaaattcttacgcgttactttt

SEQ ID NO: 3292 - DNA, 656 bp, Glycine max
tcagactataacacaactggatctacaaatgatgaggtgtctcttttgtccaaaaatttgaaatagatcctaaaaaagaaaggcaagttcaagcaatcctccaaaaagaaagatacttcattcaaaaagagaaaaaaaaaaggaaaacaataacatcatctgcttcaaattttgaaaacttggacacatgaaagttgaatgtcacaagcataagaagaaaaggcattctggaggtaaaaaaaatagtttgatggccgcgtgggatgatatacacaatgaaagaagcaacaacaatttagataaggaataagccaatatttgtctgatgcttaatacagatgaaaaaattgaggtaaaaacatgctcaaaatttgatactttattagattcctaataagaagatgaagtagggatgccatatgatatttttcttcaaaattgtcatatgatttctttacaatgtgaaaaatataaagaaaaataccaaccatctatctgcgaaaacaattctgttaagaatacaatgcatattaataggaaaaaatctgactctagaagagagtgtaagcaaaccaattctcctgaaaattagacgaaccattttagttttataactaagaatgaaagagttgtataactaagatttgggaagtttt

SEQ ID NO: 3293 - DNA, 173 bp, Glycine max
agcttgtgttggcaaaacaggtcggcgattttggtctttcacgtcttaaacatgaaacatatctcactactaagacaggaaaggggacggtaggctctcatttgttgtggtcccttagatgatttgttttctgcttcttcagtgtcagaatatgtttctgactctccagtttt

SEQ ID NO: 3294 - DNA, 506 bp, Glycine max
ttgaagatctatacagtgtaatagagggggcctttgatcactcattctgattttgcttatgattaattttacttgcaaaagcttatatggaacaagctgagatgactaaagcggtcctggatttgttctgggggaaaaatgaatgtggagaaaaccaagatattcttctcagaaaacatcaactggcatataaaggaggatcttactgcaaagattggttctcaatgtactttggggaaatatcttggagtgccgatattccataaaaaggtgaagaaagaatcctttgagttccttctacataaagttaatcacatattaagtggttggaaaagtaaaatgttatccatggcgggtagattaaatcttgcaaagtatgtgaacaaagctcttccctcatatgtgatgcaaattgtgaaaattccggcctacatttgtggtgaaatttatagaaatgtagagcatttttatttgggggatgatgagaatacgacgagagtgcatat

SEQ ID NO: 3295 - DNA, 171 bp, Glycine max
agcttgtttttggatgcaagagaacacaagagtgggtgcatattaggtgaagctaccctttttggccagcaatcagctatgggctacgccataaatagtttccttacacctagatgtttagaaattttgttcatcatgaacatgtaggtgtaggataggtagcaaaatacc

SEQ ID NO: 3296 - DNA, 538 bp, Glycine max
aattgcctgaatcatttccaaatatgcatgttaattttgacgcatcaacaagaatcaagccaaggctattgtgcaagcaatccatggggcaaaacacaccaaatgattatgatgatggatggctcaaattctcacaaaggtaaactcatcactttcgaatcgagctttcaaaactatcatgacatgtagagaagaatcaaggatttcaagtcacaaaatgtcaagaacttttattttcaaaacaattacccatttcttgaacatatcctataattcaaagaaaaacatgcaaattcgtacgtgcacacaaaattgacccaaaatattaaactgaaaatccgactaaactaacaacatttacaaattaacacaactaacaaattaacaaaaccaacaaaactagcataaccaaagaacactctccccccatacttaaacaacacattgtcctcaatgtagcacaattaaaagattaaaaacaattaaatcatcaaagagaatcggacaagtgtattaaagcaaagaacgagataggaaa

SEQ ID NO: 3297 - DNA, 167 bp, Glycine max
agctttggcattttagattaggtcatttatctggtaatcgtcttaatgtcttaaatcaacaattcccttttatttcaaaagattctaatgaaatttgtgacatttgtcatttagctaaacaaaaacgattgccatattctcttagttcgagtagaagctctaaaatt

SEQ ID NO: 3298 - DNA, 566 bp, Glycine max
catagagagaagaagcataacagttgaaaataagatatttgttctgttgattttatccataaaagagcattccaaattttaaacaaaatcaaagttggctttcgcatgatatggaagttattagcaccttgactaacagaatcaaacttgaagaaaagtttgtttttgctatttataaaagtactcacaacaatatagatcaacatggatgctaaatataattcaggtttcatactctattcatgaaggcatacagtagctctactctactacagggcgactcaatcatgaccctaagtccctaacccttgtgataaaatttgcctcatagttcattctagcacaatactaacatttagtatgttttggagaaactctaacttgcattcccaaaactagtaattcaggataaatttctttttgattgacttggcatatatggaactagtccttttttgtatgctttggtaactatgagttagattaaccccacccccaagttcatggatattggttctaacttctgggctttgttgcatctcactagcacttgtttgcccctatgt

SEQ ID NO: 3299 - DNA, 174 bp, Glycine max
agctttcataagtgaaatcaggtgcagccatcttcctaagagtcctctcacgaggtgtaggttggagccatgttctcagtatgaaaattattagtagaatgctcaaaatcagaatgttcaaaattaccagcaacagaatactcagaatgctcaaaatgcacagaatgatcagga

SEQ ID NO: 3300 - DNA, 656 bp, Glycine max
tgtaggattatggggtacccatcacatgtggtactaggtggcggtcgggcgatggtgcacaacaaattttccacatccacaaatcgcgcataaacctaccatcccctgttgcccacctccaactgagctcatgtactcccatgtagcccaaatcctcgtttctctcaacaccgggtccccatcaatcctcccaagcttccccaacatccaagtaattcaacattcaaacaacacaaactatcacagccaagaaaacagggcaaaggcagaaaactctgcccaaaacaccaaccaaaatcacagcttttctcacttaaagaccccagtaacaattccttcgttctagttcgttaaccgttggatcggctcaaaaatttcactggaagtctctagtacataaacctacattttgaccgttgggatctactagtaagcacccagaactcattctgcatcactctttccataaccagaaaatacatagcattttcttctgcacttatgcaaaattctgctgcacaatttcacagcacaaatctgcataaagtgcagatttcgaaaccacacttcccctcatccaatcttgctcaaataaatccttcaagtccaaaacatgtatcaatcatgtctaaaccaaagtcaagcttcaaaacaca

SEQ ID NO: 3301 - DNA, 172 bp, Glycine max
agcttcagaccaaagcaactcaaaatctatgtatctataaacccctcaatttagtggattttcaaggtttgagaagtgaaaatgagaatggggtaaatttggagcaaactctcacctcacacaagtctataaacttaatctaaacttgctcaaactggtttttcacctaaaa

SEQ ID NO: 3302 - DNA, 533 bp, Glycine max
gcttcctccaatattgatgcaaaaagtcttttcaagctttaccttttattctctaagcttttgcatgctctactcaagatatcattcaaaaagccttcatgcttcacactattggtagcgaactgctattggatacacacaacacttattgtgttcctgttgaccttcagaagcacctgttccttgactacccttttgagttatttccctctaaacctatggtgtgcactcacaatttttcagatttggcattactgactccacctaaagtgttatgactaaagaatctccaaaggggtttgtcaacctgacatttaccctatcttttggcaacactttcttgcaagttactccattgaatttgctcaatgcatacagtgagcttggagctagtcattattggggctgctggaggctgaatataacttttgaatgttgcatgagttgtccaagttcttatagctagccactctttacatcttcaacctctatcatacaactcattttgacttcgcatcttcatttctaccctt

SEQ ID NO: 3303 - DNA, 172 bp, Glycine max
agcttgaaggcatgtaacccaccatcttctcatagtagaacaccagtaacgtgtctactatcattgttatcatcttcttctccatcattgggggcgctacttgagctgtcagatccctccacctttgggcgtattctttgaaagattcatgctccttcttacacatgttctg

SEQ ID NO: 3304 - DNA, 516 bp, Glycine max
tcttatccaaggcaattcttggtggtgaagctccttcttccttggcttattccctagtggatggtgcctcccctctcctcttctcctttgcctttcgctgcatctccatggtgaaaaatcaccattgaaggacctcattgaagctcaaagatccagcctccatagaagccccacaagcaagcttccatcacctttcaagtgttggacctttcagaacaaactcagaattgtcatttctcaagttatcatgcaatttatttattcatgcataaatttaaactactgaaattaaattgctgaaatcaaaatgcataaaaataacacaactatcctaaaaaaaaaacaaaatgcgattaactaaaagaaagataaagtaagaaatcctgggttgcctcccagtaagcgcttctttaatgtcattagcttgacgagtcaaatgccttcaaggtggcatgaaggtcacgtagaacacatcttccttgcattctcgcctcttagttagagacgccatgaaac

SEQ ID NO: 3305 - DNA, 395 bp, Glycine max
gatgggctaatggattaaacaaccatcgacgcttttcttgcttatgacctcaacaagtaaagcccagtcattgttgttttggctgatgcctatggcacattcgacctgagatgcgaaaaagagtagtgcaagaattgtctgttgtacacctgctctttatgtatggttggtctcccacattttttgtcatgaaggtaggcctatatgttccctacaaagtcatcacatgtgtgccaagaaaggaaaagcaaattgggaggaacttttggcaggtatggtaagagcgttcgttaattggtttccccgatggaaagaaggacgggcccaacttttttgctcatgtgaatgattcccaacatccccctgattggaacaaggggtgggttaattataat

SEQ ID NO: 3306 - DNA, 160 bp, Glycine max
agcttatggtatttgttaatgttttcttaccaattatggctatttaatttttgtattaatttcttttataataaactcatccttggaatttttgtaccgtgtggttgatacctgtgatgatcgcgaacctttgtttgtggaagcagaatgacgactgtag

SEQ ID NO: 3307 - DNA, 519 bp, Glycine max
ttgagtctgtgtagcatcgtagcctcttggcttcgacttctcttgctagcttctgacctgcaatgagctcctcgtactctaaagttgagctttagggatttctctagagtgatattgttagggccttcgaggatgatccttgccctatttccttttacgttggatgcgccgtcaatgtaaaaggtccaccaatctaggtggttgtgttgtttcctgtgaattctgccagaaaatcaaccatgaattatgtcttcttggggtcgtgtggttcgtactaaatgtcaaactctaatagttcgatagaccaagccaccatccttcctgggagttcagtctttctcaaaacctgcttgatagggtagttcatcttgactaccacctgatgactctagaaatagggcttgagtcatcaggctgagtttatgagtgctaatgccacattttcgatcatttggtagttcttctcgatgtcatggagtatgcggctggtgaagtaaatattgagctagctgctttcct

SEQ ID NO: 3308 - DNA, 173 bp, Glycine max
aagctttgtgtaatagattacagtaatttggaaatcgattatcagtgtttgtttctgaataaaaaaaaagatgtaagtctttaaaaaggttttgaattttttaaattggttttaaggttttttttgtaaaaaatataacttttttaaatagggattttggttatgatatgaaa

SEQ ID NO: 3309 - DNA, 479 bp, Glycine max
taactccttactgtctttaagttgtgagtacgattatgtttcaggatggatgcatgaagaccagggtgctatgcttaatgaagaaaccgatcaagatcagccgaattgggtgcccgcatgtcccctagactttgaattgagaaattggcagatcataaagcaacccgagatttatgatttgatgtaattaaacattcccagatcctattgctatgcctaaggctttaggattcacatgttgttgagcgtacttttcttttcaattctagtgatcggtaataaaatgcatttcaaagacatatttccttctgcatctcttaacatatttattttcgttgcgattaaatgagttgctgcatatctaataatgagttttgcgaagacattgatatcgagatccctaatgtcaattttgagatgcccatcaaccggagtgaggaaaatgaagagaatgattgggaattgccctctgatttgtg

SEQ ID NO: 3310 - DNA, 858 bp, Glycine max
  unsure at all n locations
gcgcgcttgattgcattcattgacananccnatncnttatgataccccaccctcctggttcaataattntatttccctangggcggggcctttttctgttctgggggagcgcctcttccggtggggggttttttttatatatcttccctactctcacttattccggttgttatacactntatagggggtttacggagacgacgtgcagtgtctttactccttttaatctggactcggtgttaatcaatcattgaccgggcttactatcttcggagacttgaactggtaatgtacctctcccatcgggctgaattctatttatgtactctcgggggggcctcttttctgttaaggagttcgaccttctctgctttcatcgctatcgtacacccgctcgattaccgtggtcatactcattcgtttagagacatttcccggctcacgccgcccgatcatatattcattggcctgctgcgtctgaactctaccattcggtaattttacttataacgctatcctccactgttcgtcctgcgttcagcctcgtggcgagtttcagtaagggtctattgtttatacgttcggtcaatcctctctctttattcgttccttccacattctaatctcaatttgctctttgcgctatccactctctacggggtttcacccgtcctcaggtcgcaatttctgtgttgcccgactctactaggtgtgctctcccccgaattggtgttgcaattatctatggtcctgccttccccgtacttagtgtcatcattaaagtgcgcatcgcctctaaggttatgtgcgcatgagatataggtacggtgcgtcttcctgtgacacatctactcatca

SEQ ID NO: 3311 - DNA, 169 bp, Glycine max
gcagcttaaatagaccactttcaggtgctggaactacttcacatggacttgatggggcctatgcaagttgaaagccttggaggaaagaggtatgcctatgttgttggggatgatttctccagatttacctgggtcaactttatcagagagaaatcagacacctttgaag

SEQ ID NO: 3312 - DNA, 225 bp, Glycine max
gcttgttggattatggggtacccgtcatatgtgggactatgtggtttttatgtgatggtgcaaatcaactctgccacattcacaaatcaaacatgaacccaccatccccaattgtccaccttcaactgagctcaagtactcctacgaatcccttatactcgaacctctcagcaaccggttcccatcaacccctccaagcttccacaatagttcattgtatacaat

SEQ ID NO: 3313 - DNA, 168 bp, Glycine max
agcttaactccttcactgtcttttaagatttgttttattaccaggctgcacgaaggatgcctgaagaccaggttgctatgctaaatgaagaaaccgatcaagatcagccgaaattgggtgcagccatgtcccctagactttgaattgagaaattggcagatcatagag

SEQ ID NO: 3314 - DNA, 406 bp, Glycine max
tatttagtactcaagctctaaagtttgaattaaaacgttcaatagctgctggtaatcgttttcacagtgcaaattttgaattcaaatggtaatagttgttgtaaatctgttctggccactggtaatcgattacatcctctggtaatcgattaccagagagtaaatctcttgaaaaagattttttaacttaaatttcttggtcaaaccttttgctacttcaattggaattcccttcctatttaatatactcttcctaagactctagagactgtcttgatcctccatcttgaatatctttgattctttgtcttgaaaaagcttgagaaacatgcgatcttttggcttatcaaacatcagcttggccctttgctactcatggactcttcatcaattattttacaaactg

SEQ ID NO: 3315 - DNA, 176 bp, Glycine max
agcagaagaagcaagtatccttctgtcacctttacaacaagattcttcatcaaagtctactcaaagtcgagtaagatctttggtggatatatatgaatcttgcaacacagatatggttgagcctaaatgctatgaaaaatccttaaagaagcaaaggcaactaattaagcaaatca

SEQ ID NO: 3316 - DNA, 620 bp, Glycine max
tatcccatgcctccttagcgtatgtttcataagaaactatctttaactcttcatcacctaatgcttgatagatgaggaagaaagctttcttgtctctctttcttgaatcctttaaagtctccttttgtgcttgggatagtgaagtctcatcttgcggctccttataacctttttcaaccatttttcaaacatcatgtgctccaagaaggaccttcatttcgatgctctaattgtcatatgcgctcccctttagaaatgaaacttggaaggatgccgctcaattgcttgccataactatagaggaatttcttatcaaaacctaagctctaataccactttgttggaaaggagataggaagtatttgagagaaatggaggaggagagaatatttgaaaaaaggctagtttttatcacttgagatacgctttgggcttgactcctttttgtgtctttggatgctttacaaataacaacctctccccctattataggcttcaatgagggattctaaatacctcaagaaagatccacacaccttaattgagagtttacacattttttccaactacttagttctacacacctctttccatgcaaatatttttttcacttatttcta

SEQ ID NO: 3317 - DNA, 170 bp, Glycine max
agcttggttacctccttcttcactacattttgtatcaccgggttgagtcttctctggggctggtgtcgcaacctacccttcggcgggagggtgacgcatgactcgcgggtgcatgttccaagaaaggaatatgcgcggagtcgccaccaacgtttatttgaggaaaacgt

SEQ ID NO: 3318 - DNA, 868 bp, Glycine max
  unsure at all n locations
cggccatgattgcattgcatgcccgaccncttnggnatagaagctcgccaccctaagaaaagatccatgtcacagtagacggagagatgcattttgtatatatatccggcagcatcaagcatagaatgaagggaggcggatcgagtctattgaatagaaancatacacactctacaccccattcaaatctgggcaatttaatatagactacaatcttggaacacgaatatatagatagttcantgttagactgcgtcgaagggactgaataaatctattttgccctaagtcgctaatacctaaacgaagtggtgcaacaaagacaacgaagtccttgtcatataatgataaatccttaaaccagcactaggcctttatatctcttggattcaatccaaaagaaatcaaatttatgaagactagcaaaggcttttttattttcctgtttagctagctctctgacgaggtatattgatttactaaaataagggcaataaacaacttccaatggtaaaaaatgtgcttatttacacaaataatgaagacagattgaactaccaaaactaacaaccccaacaaatctggctagagccaacctaagtcgacggcccaacttataactcggccaaaacctaatcaaagtaaatattagttcaaaagcttccaacgaaacaaaagaaaaaaaatcgggaatcggccgaaacttgccccctaccacaaaaggctggacagaacttgtctgggccaacgctctacaaatgaatagaagggctcaaactaagaacacaaccttcattacacaatatatggtgcactcagggggacaccaaaccgaggtccattgggcgccacgcagaccggttacact

SEQ ID NO: 3319 - DNA, 605 bp, Glycine max
  unsure at all n locations
tctcccccaattntctataaatagggggagaagggttgtattttagggtttagccccttaggcacttctgtgtttctcgaaatagctgaggaaaattagttccgtggaggaaattctagccgaggcacttccgtaacgtttccgtgagtaattacgcgaagatcctcgaccgttcttaaagattcatcgctcgttcttcattttcttcgggcttcaacgggtaattacctcaaaccaagcttttcaattcattctatgtacccgtggtggtccacattttgtttcatgtatttttattctcgttttcatttactttttatacccccttttgacgtgcttaagccatttatttaagtcatttctcgcttaatctaaaaataaaataaatttccaccgatccgttgaattgtatcattcgttaattttgggtaaaatgaattccgaccgttcggtcgtgcccgaaccacgtttggaatcaacaaaagaggtggaataattaaataataattaaacataccttttagttaaataaagcgaaaaacaacggccatttctctttgggattctcattcttaatcgaaattgactataactacagggaacta

SEQ ID NO: 3320 - DNA, 176 bp, Glycine max
  unsure at all n locations
gcatgcaagcttctccgaaaggcatggggatttctattnttccgaaaatatctaagaatctcgccaaaggaggggccttcttctttttggaaggcacccccggatatggtactttcgcaccttctttcacaactttttctcttttcttctctctaaattggtcacttttactcctt

SEQ ID NO: 3321 - DNA, 121 bp, Glycine max
actgggaccactcatttaggcaatttgtttttttcctggtaaggtctgagagagcgggggagattgctaacaagatccaatcatgtaggccattaaatttctcatatgcttgacatatata

SEQ ID NO: 3322 - DNA, 167 bp, Glycine max
agcttatactatttccatgcactatgatatcatgaaacatgggaaccatcaatgcactgataatggataattaaatattctaagccatcccccaccaaaaatgcttaaagctctttaaccattctatttcccctactagggatattcaacttggtcactgcaccccc

SEQ ID NO: 3323 - DNA, 785 bp, Glycine max
  unsure at all n locations
cgggcaatgatgcatagcactgncacacccnctnggtaactaaacttcgcccttntggtcaaanctggctaaatgagcgaggcgagtctaataatatgcgggtgggatcaacatacggggaggaatgcctaacaaaaaaaccgcgccagcgcgaaaggtggaaaatctcaacgcaaccaagaggtaaacataattacactacagtcttgcctcacaacccccctggtggactaaaactaataccaaagcaacattggtgtaagtancctatacgagagcaacacttaatgcgcaaaactcctcaaataacacaaaattcaaggccgcttgtataaggtctaaggcaaaaaaccattcccaaggtcaagccaccaccagtactcccaggggggggacacaccacgacatgcaatccgagccttgaaggggcgatgaccccccgaaccccccagttgaagttagagggctacctcaggcggttttcaaaactccaccagggggggtagccggcgattcaaacaacccgtgctaaggggaacgaaagagaaaataccggttctacaaaaaaggggaacgagcgaagtgttcgaaggcccacgactcggaccgaaaaagctcactcaaaaaaaaaacctaggcttatagcaaacgaccactccgccggtctgaaaccattttcggaatagggagcggaggcgctggaaaagctgggaaaacctttatggggacgggtgcagacctagctcgccagcacagatcaaggggtccgagccagcgggcgcggt

SEQ ID NO: 3324 - DNA, 1017 bp, Glycine max
  unsure at all n locations
cgcagtcgttgattatgaattagcanttagcnananancnatctnnaatataatgagaacatgacccgcgcagagggnactgtgcatgnagcgcatctgtacagagcgggaccgatgtttatatattttttttgtcggcgtcaagagacncgatctcaataggtcggtgtgggatgtttctttagtaacatacatactccaccaccnacgatctcgataatggaattatatacgcgtggttatatacacgacgtctctgtagatgtatctacatcgaaggtcggtaacactaatatactggtgatgatattgtcctgtgtcagcttaattatgtatgttagatgagtctacgagaatactatctgttcactgtaattttctctcaagcccttcactcaatatatcattctgaaggctcgtattttcattgtgtagtggcgacagcttcctgtagcgatttagtataatcatagcttctattttaagttatttatttgacaacaagaaatgacatttgtaataattattgtcaatagtgtactatgtgaacatatcatatcggtacaatgcagtatatgttgcttgtattctaagatgattaattgcaagtaatgatcatgtccatgatacggcattatgatcctactataggtagacatgatgatagatgacgtatgctgtagaatgttgattacatgagagacagtaacttagtatagtgctgaagcagttgatatacctttatcaatatcaggctagtcggttctgatttttcggtaatatgataaatcgttacgaactgtgtcatatatgaactcgactgataatgctaagtgcgtatcgtatattatgatttctgcacattattcgcaggatattcgtttagaagtagattaattaggaagatggattatctaatgagttgtctagggtcgagtacgttctataagtatagtcaaataccgattatatatacaggcatcagttgtcgagatggcatattgcactagtatatag

SEQ ID NO: 3325 - DNA, 489 bp, Glycine max
ttatcctcagatccctcttgttggactaggcttaatttatactaccctcgtaggtttagactaacttaaactaagctttgtcgtcagatccctcttgttggactaggctcaacttaaatagcttacgaaagtttagactaatttaacctaagttttttcctcagatccctcttgttggactagacttagaccaaacaacattgttgtaacatcatatttaaaaccaaaacttaatccgcaaatccctcatttaagactaagtttcaatcctgcttctatcaagttctaaggcaacaatacatttcccaatgctaaagtcacctaacagtacacacaagtgggtgatcagaccaagagcatgcaatctttaagcattgaaaggagcattgaacacaataaacacaaccaattagatattaaagtgattacatcagctgttctttagaaatccccaacaagggtgtttagccaggcattacagaaaaaccc

SEQ ID NO: 3326 - DNA, 886 bp, Glycine max
  unsure at all n locations
aggcctgtgtagaaatcgatgtannaacccctnngntaggaaaccaaccgcggggggaacgaanaggtgcgggggaggcggcaaacttttgtttctatttcgccggacccactaacaaggggggagcgggttatataaaaagaatcctcccgcacgataagcagaatgtgttataaaagcaagagaatagcaaaccgggtagagggcaacggaatggcaattccacctcacaaattatgctaacgagcgaacgtggaactatggctataactgactcaaagaagttaaacaaatgagtgaagaaggtgtggaggatagacaagagaggaaaaccaccagtgccaatggccactacacaccatcaacaaacgttcctttggataccttatactcaatcgttgttgtcgtcaacgcagtaacgtagaacaaatccaactcccacgttaagaaatcaaccatccgagcaacacgatcgacacacccctacatgtatcaacgtaacatatctataagagtagacgcaccacagcctccactcacaggacgcagcaccacggacgtcagcgggacgaaactaacgacaccgggcgtaagagccgcctgaccacaaagagcgacaggggcccttatccaaaaaagacctgagggaggactaagttagcatgttctgagaaacagatacacagggcaaacccactagatactatcctatcacgcacacacgaaaccgaccaagaactggcgaagagagcaaacacgtcaccgaaagcagcaacggacccacagcgaatcagacacgcgtcacacagaaataaagaaatctgcattttcacatgcccgagcaatgtaacgtattggtaaataccaaaagcgacgttccgacgct

SEQ ID NO: 3327 - DNA, 276 bp, Glycine max
  unsure at all n locations
tggttcgaggtacttacctgttgaagatcgaagaacgatgattaacgaatgaagaacgtcgaagaacggtcgaaaccttcgcgaaattcttcacggaaaatgttacggaaacgtttccgaagcgcctcggcttaaattttcttcacggaaacaatttttccaagcaaattcgaaagagagagaagtgcctaaggggctgaacccttttcttcttcacttcctcccctatttatagcaaaataggggaggtggttgncgcccagctcgcccattcga

SEQ ID NO: 3328 - DNA, 392 bp, Glycine max
tgaaattgaacaacagaagctcttgagaaactcaaatgttcatatacttgtcacacggaagtccgatgcaggcgcataatatattgagatgctcgaaattgaacaacgaatgctctcccgaaattcaaatggccataacttgtcacacagaagtccgattcaagtgcataatatatcgagacactcgaaattggacaaccaaagctcttgataaattcaaatggtcataacttttcaaacggaagtctgattcagccacataatatatcgagaagcttgaaattgaacaacggaagctctcgggaaacaaaaatggtcataacttatcacacggacgttcgatttaggcgcataaaatatggagacgcttgaaattgaacagcgaatgctct

SEQ ID NO: 3329 - DNA, 176 bp, Glycine max
agcttaagagcctacttttgtggcaaaacaatatagttggaacaatcccataagagcttggaagctgcatagagatcaaagtcctagacttatcagaaaaccttctcacaagtagcataccaaggagctttggcaacatttcaaatatccaggagcttcaactaagtgtcaataag

SEQ ID NO: 3330 - DNA, 478 bp, Glycine max
tcctcaatttttatggattgatgctcttaagatggttgcgtatatattaaactgagttccaaccaaggcaatctcaaagacaccttttgagttattcaagggttggaaaccaagttgtgacctatacgcgtttggggatgcccgtctaaagtaagaatttatatccacaagagaagaaactagaccttaggactattactgggtatttcattggatatgctaaaaggtctaaagggtataggttttattgtccatcccacaacactaggattgtggaatcagggaatgcaaagtttcttgaaaatgatttgatcagtgggagtaatcaatttcagaacatttcttctaaaagggatcactatgaagctgaaccttctgggacaagtaataggttggtagtcattcccacccctcaaggtaaaatgggtgttagacaactagtgattgaagttccacacgctgctgaaagtgatcatgt

SEQ ID NO: 3331 - DNA, 172 bp, Glycine max
catgcaagcttcccactgcagcagttaagtgaacaaatgatgtgtccacagtcagtggatgattgcttggtagaagtacatgctaataactaataagatttcttgtgtagggtatcattgtttttgcatcaatgatggctaccttggggctggagattttgattgaatttgc

SEQ ID NO: 3332 - DNA, 617 bp, Glycine max
  unsure at all n locations
aaggatttgagtttgagagctacatattgtattttttgttatagnaccaaacgatcctaatggctcatgatttagctaaaacatctaaataaacccgagtatgtctttataaataaattaaaaagttattgaataaaattactctatcataatctcctctcacacattttctaacataaactacatcagtatatttaaaggtaattattaattataaattactaacgcactttgacaaaaaaaaaaaagaagaaagaatttaatgtacactaacaaattctactggctttttgttaacgcatatttactgtttctatggttggaaaacataagatataggaacacattttcattacaaacttctcattaacagttcaacacccatttttttttatatctctatttttattatattataatacctatcatatttacatttgtctctcttgtatctttttatctctctagatatccaacgttcattaaactttttttataaagcaaaatgtacccttaataaaaataattatattgagactttttctatattcttaagaataattaaaatgggtttaggttatgataaatctcttagatggatataataatctgctaaa

SEQ ID NO: 3333 - DNA, 306 bp, Glycine max
tagaaactaagcttgtgctaaaaaaaactgatgttgaatttcaaacatcggtttgcgcgcggatccgctaagcaagcctattgagaaacaagcgctctctggcttgcttagcgagaggtccactagcaagagtgtcgaaaactgcttaagtgagtgtaatggcagcacactcacaattccagatttgaaacttcgcctgtgattctctctcccaaaatttacacatgttgcatattgctttctttttacattataacttcatgcaataaccattcagcatccaggtaagttccttggttccttttc

SEQ ID NO: 3334 - DNA, 172 bp, Glycine max
agctttaaaaactaattacttcttgtacacacgtacaagaagtaactagcttttggtttatttttcgtatctctaccatcaaaggaatcttcaagctatgaaaaaatctaaaagacaataaccaattattttatgcattttgaaaatggcagagcactatgataacagtgga

SEQ ID NO: 3335 - DNA, 538 bp, Glycine max
ttgacttgagtcatcaagagattataaatatgtgaccatggtatgagtttcaataatcatcaatcatctttgaatcatctatctttctatcttttttcaacatcatctctaaaacatctttcaatcaatctttctacacaattttctaattcatttctctttatctttctaaaagttttttatcaacactttctctttcaagaaaagttctttgttcaaaaacttgtgttattcagctttttcattctcttctcccgttgccaaaagaacgaaggactaaccgcctaaattcttttgtgtctctcttctcccttacaaaagattcaaaggactaaccgcctgagaattcttttgattcttcccttccccttaagcaaaagatttcaaaggactaactgcctgagatatcttttgtttccccttacaaagattcaaaggactaaccgcttgagaattctttgtcccaacacatcggagggtacatcctttgtggtacaagtaaagggtacctctacttggcgattgttatactgagaac

SEQ ID NO: 3336 - DNA, 661 bp, Glycine max
  unsure at all n locations
tcgtccatagatccatcttgtaaggctaggcttaagtttaacagcattatcatcacagcatattcagaaaaccaaaaccccaacaatccatccctggtaatatggttattcagtcctgcttctgtcataccttaatttcgtgcgggaactattgcttgatggcatgcaaccttttgattggccgcttcaaggtacttggcacccgttgttgcacaatatgtgaagtcccgagacatgccagaaatcaaaaggaagcgttgttacgcagtccgtgaaattctgtaacgtgacggaaatcaaaaggaagtattgttacgcaatccgtgagtttccgtaactcttcgaaagctaaaaaaggagtaattatgtgatccctaaggtttcgtagccttacgaaaagaaaacaagtatcgttacgaaatttgtaaagtttcgtaacgttacgaaaaaagaatcaccaaaaaaagcaaaggggtgtatttagtaaaaaagggggtgcaaacagtaaccaggcccacttgtgccttccagattctttctccagaaagcgattgcttctggaggaagcaacctgactccgctgggcgagctcggtggcaagcttctcccctaatttgctattaataaggggaggagtgaagacngaaagggtcagccttct

SEQ ID NO: 3337 - DNA, 799 bp, Glycine max
  unsure at all n locations
ggtgcacgcgcgcgccaaggccgganagtannacccctcgtgtggcgggcgcgcggcgcggttttcgtcttntnccgncgccgcancncgcgcgccgggcgggcggcggcgtgggcgcgggggtgggccccccgcggcgcgcggggcggaaaaatcgcgccccggccgcgccggcgccgcctccccgcggcgcgccgggccgcggcgggcgggctactccgnnngcgcggggngcggncgggggggggcgcgcnggggggggggggggggggggcggggcggcnccccggggggggnncggggggggggggccgnccncgggggggggggggggggggnnggggcngcgggggggggggcnncgggggcggggggccggggggggcgggggcggggcccggggggggggggngcgggngngggggggncggggggggggggggggggggggggncggggnnccggcgggggggggggggggggcgnnnncgggcgggggggggggccggcggggncgngcgggcggggggggccgcgggcggnnncgggggggggggcggggggcggcggggcgcgggggggggggcgcggggggnggggggggggggggcnggggcgggcgcgnncgggggcgcgggggggccggcgggggcgncgggggcgggncgcgcggggggcgggggggcggncggggggggggggggcgggcgcgcggggnctggggcggcgcggggncgcggggggcggggggcgncngcgcggggcgggggggcgncggggggggggggcgggggcgggt

SEQ ID NO: 3338 - DNA, 911 bp, Glycine max
  unsure at all n locations
caccaggacaccggcggacgcagaagnactctacaagaccgtagnagtgccaaacaaactgaggaaccagcgaccatccaactacacnnnccacaccnnnnnagcgggttgatgcctgcatgacccaaccnttnaataaaanaccccgcccgcgaaaaanagaccactgaaacgacagcggacttttcatttgcctgagcgccaaacaccggcgggcgggggcggaccacaaagagaaaccacaccggtacgaacccaaaatacataccagccaacaagaaggaaccaccgcccacacgccaaggaacacaccccaacaaaaacaagcgcccacccagaacaaccacaggaaacaacgccggagaagaccaccaccatacaagacttcaggtgcaatacccgacacgcgacactccaagtgacgaaccccaccaaagcaaggtgacacacagaaaagccggacaccgagagaaccacaccgcgaaaccccttaacaaaagcacccacaacggaaatcagccgcacaagaaacactcaaagggccgagaaactcaccaaacccccgagaaaaaggggacccaagacacccacacatacagagccccaacaccgccaagcgaacgagaccaaccaacgaaccgcacgacaaaaccaaaacccactcaacagacaaccgacaacaccaaaccaatgcacccaaccaacgagcctcaccgactccgagcgcataacagaccacacaaccgacgccgaaccaacaatacatgaacacaaaaaacaccagccccaccagtcaaaaaggcaacaaccggaccccaccaggaaacaaaaacacacacaaatgccacaagcagcactacaaccgggcgaccgaatagatgctacggccacgtagataaaaacgccacacg

SEQ ID NO: 3339 - DNA, 168 bp, Glycine max
agcttccttagcaacatgcttttccttatgtcttcagaccaattttctctaaagtatcacaaagttatgaaatgttacacaattagcaaaatacaaattttacaatttcatatcaaataaaacaaaatcagcattactatccatttcaaccattgaactaaattcatt

SEQ ID NO: 3340 - DNA, 910 bp, Glycine max
  unsure at all n locations
cgcatgatgcatgcatgacaanncncatagtaaagaaaacccacgctcgctgcacaaaaaagggaagccgagaaggcaaattttttttttatcgcgcggagccgctaaacagggggggtttgaaaaaaaaaaaagccctcttaacgcatggttatcagtaatggatctctgtattacgatgtgtagaataactgtctaagcggatgtttaaatggaaaacttcacttcacaatgtaaccacaattaaggaaaaattctagctactggatttggtatatcgttcatgaaatgcaacaccatttgcgtaataggggactattttttttacattattcaacttccattgcgataaacccctctacatcccgtttcaggaccctggggtagtttacctctatttcatgcgggaagactttctgttggcacaaaacacattgtgctgccatgggtatcaaaccacacgaaagactcatcgagacctattcctactgcttagctgaccaacaccatattccattcatctcattacaagaatcttacgcaatccaggttagatcccataagatttaactacttataagctacattacaaaatcaatcgcccaccgcctcacacgacgtcaccgcatgcaatgatcgaatgagctgctacactcgctaactcgtacgtacatactaatattacaacaagtgattactgacatgatatcaagttatcacctgatttgtctctccacctcccntccgaacacggcattcactctcctctatcttacctcatatccttaccaccacataatacatattctcgcaacatanacgatcattacaacacggaaagaaatattgtaggagtaacacatcgacctgactgactacttactactcactcaccgctcaactttcaccc

SEQ ID NO: 3341 - DNA, 163 bp, Glycine max
  unsure at all n locations
agcttgaaacttgcagaaacacactanataaataggggtgaatagtgtgtgtatcaaaaataaaaccttttcgtaataacatggatagtatggataatatagagataagcactggtgatccatgagagtagatagattgtgtaataaagaaaagagtgatcat

SEQ ID NO: 3342 - DNA, 819 bp, Glycine max
  unsure at all n locations
ngagcagagtgtttgattcacnnncnatagtanaaanacnacgcgggncnccanaaanccttcttgcccgccaggccctattattttttttatcagaacaagaaggagagggatttaaatactaaaaacccctccctggcaatatggatatttatnctggtttttggcctccttaatttcttgcggcaaatattgattgatgtgatgtaatcttttgaatggatgctatatagtaataggcaaccgttgttgaacaatttgtgtagtactcgagaaatgcctgaaattaaaacgaatctgtgttatgcaatacaagaaaatttgtttcgtggctgatattataacgaagttatggataacatatccgtaaaattcgaaactttttgaaaggttaaaaaagaataaatattttatcctatgggttggtaacctttcaaaaagaatcaagatctgaactataatttaatattagaactttactaataataatattattatagtaaatgggtgtatttattaaaaaaggggtggaaatggattaaggtcaattttggcttataaaattttcttccaaaagagattgtttttggtgaaataacattgaatctttgggtaacttagggggaaatatcttccttttttttgtatacaagtgggtgggtgtggaaatagaaggtataactttcttatgacactctatacatatgtaaacttattaacaataaacgttcttcgaaaaaaataagtaacaagtagtatttcataatgatttctattgtgttgagactaaatataatttataactacatcagtactctt

SEQ ID NO: 3343 - DNA, 589 bp, Glycine max
  unsure at all n locations
gaatacccaagcttgtacttttgaacacttgcttatcttatccagagctttcagtttctaaactaagtgcttttaaactatttgcataacttttgttgattttgttacttatggtgtgtgtcaggtatttgtgttccattccttgtttagttatgatgcattttttgatgatactcaagtcatgtgtaacttttgaacatctacctagcccttgactggagatatctttcaagcatgcttttgatcatacaaaacttttcatttctattgcactttgatatgggaaaagcaagattttcctttcatgattctagctagtaaactctattctagtagtcctacttctattgtggctgatcctatgtctggaaggttgacatacttcaagttgattcttcgtacctttcttgatgcttattgatcaagtcctatatcataaacacatcattaaaagagaccattagcaaccaaagcttgataacttaaaaattaactcttataaagtaattattaataaagctcaagcattanaaggagttattcttcaaagatttcaatatcatcatattagttcttgtatttttttttc

SEQ ID NO: 3344 - DNA, 554 bp, Glycine max
  unsure at all n locations
ttataaattcttgctcacttgatacactccatggatgaacagtttggacttttgccgaataaagagtggtggaatttgcaggaggattttgcttgtagatcattgtatcaagaacggtgtcaaaattctgaggagaatctagggagacaaagaacataggaattgcaaccttctgatggatttctaggtcgcccacaaggttaacaagctcaacaaaatcactgataaggcgctgaggaacatagaacacctcagaactgcatattaggaggtttttatcgttgtcgcttggttctttgtaactgacttgaaagtgcgctggcatcgtgctaacaaccttctgtaccattcttgcttgttgtgataaccaatctgagtcctcaccatttgttaatatagaagaccaagactcggatacctgaattcccagtaatgtgtaaattgtcagagaaaagagctatacgaccttctaagagctatatgaccttttaagagttaaagctatgctgtanaatattttcagtgacattgtcctgaatgattgaatatgatct

SEQ ID NO: 3345 - DNA, 595 bp, Glycine max
tgtaactcttggcaatttgtttaaaactagtcacttatttatgttatgacttttgaaataatcttcagaaaaaagtcacttgaagaattatgacttttggaaatgtatttttcgaaatcagtcactggtaatcgattaccattaaggtgtagccgattacacatcaacagatgtgactcttcattttgaattttgaaaatcttaacgttttaaaatactggtaattgattacatgattatggtaattgattacaactttgtaaatcagtttgaaaaacaatgctggctactggtaatcgattactacctttggtaaaagattttgtgaaaacttcatgtgctactcaatgttttgaaaaactttttagtacttatcttgattgagtcttctcttgattcttgaatcttgagtcttgaatcttgatcttgattcttgaatcttgagtcttgaatcttgatcttgattcttgaatcttgaaacttgaaacttgattcttgaatcttgaatcttgaaacttgaaacttgattcttgaatctttgcttgaaactttgcttaactcttgattctttgaatcatcaaaataaccttggaag

SEQ ID NO: 3346 - DNA, 531 bp, Glycine max
ttataagcgcaggtctggaagacaaaggtcaagtggtcgcattatgcgaagatgatgttccgagtacattggatttggtacgaccatgccctcctgatttctagctgggaaattggccagtggaggaacgcctcggcatttatgcaacgagcataatgtaaacctttacggttttaaaagctctatagttgggcctaggctttagagtttttccttttgttaaggctttgtgtcttttgtttttgaatttataatacaaggatctttcttcatctgttcctacgtctctacccattctcattcatttgcatgtttacttctttttctgaaacggcagatccgatgacgagtcccccgaaggtactaatacctgggacccgcctatcgacttcgagcaagaaatgagtcatacggaagatgaaagaaatgaggatgtgggacttcccccagattagaaagaatggtcggccatgacgaccaagaaatgggacctcatcaagaagaaacagagcttgtagacttaggaattgg

SEQ ID NO: 3347 - DNA, 179 bp, Glycine max
gcatgcaagctttggaggcattacctttatggaactaaatttaagggggttaatgaccataagagccttagatatatgtttgatcaaagagagcttaacatgaggcagaggagatggttagaggtccttaaggattacgaattttagcttaactatcacccaggtaaagccaatgtagt

SEQ ID NO: 3348 - DNA, 609 bp, Glycine max
tgaaggacatgcacaaagtgtgactatatgatgtggcaatggtgtgtattaagcaaatgctcacctcccctctaaaatttaattggattgggcttctaccaattcaattaaatttatttcccaccatacacatcaaatattcacttagtgcgtgtgaaattacaaaactacccctaatacaaaaactagtcttggtgccctaaaatacaaggactgaaaaatcccatatttctagggtaccctacctacattatggagccctaaatacaaggaccaaaattaatgaaaccttaatctaatatgtacaaagataagtgggctcatacttagcccttgggcccgaaatctatcctaaggctcatgagaaccctagggccttctcttgcatctttggcccaatcttcttggaatcttctatccaatgcccttgcggggtaggattgcatcactaatgtacccaaccctagggtattttatgaataagagcctaagagaaacctacctttagcccaaactagaaaaactattattgcatgccttccgaaattcatgcataagctaacatggtaaacacacgaaaaaatcgagtcaacgagagacacaactttg

SEQ ID NO: 3349 - DNA, 178 bp, Glycine max
catgcaagcttgctcatgcgtttggagctgaattcctgtatagaggcgccccacggattcgaatgcgaccttggagacggcgtcggagcggtcgagcatgttggagccgacgcgggcccaccaggcaaagacgcggtcgaggaggttgacgttgttttcgcagagggtaacgagatcg

SEQ ID NO: 3350 - DNA, 641 bp, Glycine max
aaaatttgaattaaaacgttcagaaactgctggtaatcgattactatatatgtgtaatcgattacacagtgcaaattttgaattcaaattttaatagctgttgtaaatcaattttggcccctggtaatcgattacatcctctggtaatcgattaccagagagtaaatttgttgaaaaagactttttaacttaaatttcttggccaaactttttgctacttcaattggatttcccttcctatttaatataccctttctaagactctagagactgtcttgatcatccatcttgaatatctttaatttctttgtcttgaataaagctttgagacgcatgtgaaactttggcatcatcaaaacattcagcttgatcctttttctacataggaaaaccttcttttcctgagggtcaggtatgaaatttattgcttcaaacaaaagattctgctcttttgtcaaagtggtgacctcttggatctcatcatctttcgaagatgatacctgatcatcttgctagaatttggttgctggttgacggttatccagttttttgtacttgaaaatccttttaagaacatatttggtcttttgaacttctttatggggggtgattttttttttctttggacagatgacaattta

SEQ ID NO: 3351 - DNA, 182 bp, Glycine max
tgcaggcacgcaagcttggaaggatgcttcaatggaggaaaagaatgagggtgtagaaagaaagaggggggagcacgaaattgaaggaataaaagagggagagaagtggaactttgaagtatgtctcacaagactctcaatcatcaaagttacaaccagtgttacacatgcttctatttata

SEQ ID NO: 3352 - DNA, 154 bp, Glycine max
  unsure at all n locations
agctttattaagcatatacttgagtttcnnttcctaaacatattcttacttgagcgtcagagtcctttgttttgaaagtcccctctctttcaaaagtacccctccaagccaacgcgctaagtttgggaccccactcaaccatgtccaccttgat

SEQ ID NO: 3353 - DNA, 1106 bp, Glycine max
  unsure at all n locations
gggctgacacgacgtngttgattgcatgcatcgncacaccncntnaggtatcaaacttcagcaccctactacacagaaatctaggtaatacgagaccctcttttttttttattacaaggttgagacggcggggtggttttgtgttgataaattacccaaccttcactcatatgcttggaaaatagactattggatggatctcacggcgtcctttaagcgggggggcactcctgcaacatcttaccgggagtcaaataatgcgacttatacgcatggtgcgccgaaggtcttacatccatatctaaacaacttcctcgtgtaaagatgacctttcgacgctccattattgtctgttacgtaatattattcaaccactaacgggaagccttctcttgcgatatagtctacctgacgggcatctatgcgcatctactgcaatacacatcctgctattggtctcacctacttcgttctcatagagaacacgcagagaagctcggggtgattgaagtcccgtctcagaaagaggttcacaacatacttgttgcggccgtcggtgcactatccgtatcttctcgtatctcactagaaatcgacgtacagactcggcgatatatcgtcaccgcactagcgtacgtatgtatgggactcttccacccgacgtaccttgctagacataatgggtgcgcgacctaggaagaacgtctgtaaactggggactgctccgtgaacgtaatataaaactattagacctgggttgcacatctatgatactcttcgcatgctggtaactattggatacattgtcaagtatactgtcatctgtctgtctacatcgaagcctcatctctctcatgggagtcgcaaagatgctctcgcgtaatcgtatcttacccgcgctatgcttctcgcttgcgacantaaacataactgtaacctcggccgtcgtagtcccgtgagtatgganaacacgtcctgtcttcttcctgaattctctntgattgttctcgctgtggtatctacgtcaacgtcgaaatcgcgtatatactccaaacgttcctctgctatatcacactagtaatcgctatgtcttcctgttctcttcg

SEQ ID NO: 3354 - DNA, 171 bp, Glycine max
agcttcaggctgctcaattgctccaggttgtttcatggaagggcaaaagtctgtatggtggtcagcataggagcacaaaccacaaacccttgcgataggtacatatttctgattcaaggccagctgggttaccaagttaaccaatgcatccagtttgccttcaagcttctt

SEQ ID NO: 3355 - DNA, 756 bp, Glycine max
  unsure at all n locations
aggagctgtganttatggttgacatgcagaaacntcnnnattgggccnccnncccgggagatgttatttagtgagggaggggtttcttgtctttttcacataataacaaggggccggggggtttttatattaaaaaccctctccttatgaagaatattccaatgaaatgtaggttaagaggtccaggtaggtaaggagatggaagaaaaagaacggactcgtgatcatgatcttcgtttaaataacgttagactagactgtttgaaacaaactggagtgtggttatccggagcgaacggtcagctatggactagtagattcatgattataggaagaaattggcactggttgttgcaatatggatacttatatgtcacgtgtgaccagaaatataattggatttaagcctagtttggcgaaaaaagagggcggtagagaattaaaccttggttacggggtatggaatcattcgaatgcgagcttactagtaaactctgtgattactaggtgagtaaaatttgtctatccgatatggttcatgtggaacctcttagggtatgattagcagatctcttcattatgatatatctgatgagatattagacgagattatattaactgtaatgtttatgatttacataatcaatactcggatataattgtaatctggtctgatattacagctgatggacataaataaatgtatagaattatatgcgcaacggagtaaccggatgatacattgttaaatgttag

SEQ ID NO: 3356 - DNA, 173 bp, Glycine max
agcttgacaagccggtctctttaactaacaatattatataataactttattttatcaaatcttatcttatacagattttatttcgtccagattttatttcatccaatcttatcttattttgcccagattttattttatttcgtttatgggcttggacttaaaatagatttgta

SEQ ID NO: 3357 - DNA, 607 bp, Glycine max
taaagtaaaaattgagagaaaccatttttactttaaataaatatgtgatatgtgaggttttatagacatcaagtatgatcttttttagtttaaaaaactaataacaaatattgatagggctaaagctattttatttttggaccgatcatgcactcactcgtaaccagtaaggttttcttcaccaaatcttgtaaagaggaccatgaagtccatgacctcaaaggtcttgagggaaattatattggagttttgaggatacctaagttgttgtaaaataaacgtaacttacaaaattacgggagatgactgcgcacacttttttttattgaatgataatctatttaaatacaaatttattgtacagaaagaaacaatgattacttattttctaaataataaccaatcactaacataaccgctagtaggtaatagaaaataaaacaaataatcctaaagaccttgtccaacgatttatagaaaataacaaactaacagacaactgctgatacacgttcaacactcctcctagtagctcaagatttactgtagttgaatctatggctatcttaatgctctctttttcaacacacaatgactttgctttaat

SEQ ID NO: 3358 - DNA, 362 bp, Glycine max
tgagcaaattcaaacgacaataacttttgactcgaatgtcctattgtgttccgtaggatatcgagacactagtaattgaaaacggaagctctgagaaaaatcaaatgacaataacatttaactcggatgtccgattgagccctgtaatatatcgagacgctcgaaatttaaaacggaagctctaagaaaagtcaaacgacaataacttttaactcggatgtccgattgagtcccgtaagatatcgagacgctcgtaattgaaaacggaagctctgagaaaaatcaaacgacaataacttttaactcgaatgtccgattgagccttgtaatatatctagacgctcgtaatttaaaacggaagc

SEQ ID NO: 3359 - DNA, 777 bp, Glycine max
  unsure at all n locations
aaagcgcgtggggacccccccaagattttacaaaatgaagcagtgttttttttttttggtaaaggggcgtcagggggggtattaagggggggtttgatattaaaaccttcccgattgtattcaaattagagatccgggttttagttttacccaagaacctatgagttcttttaaggacgaactcgttgtctgcnnngggggggggggnggtnggggnnttntnggggtggggttgggggggtggggtggnngtgggggggtgggtggggggggggtggggggggggnntgggggtggggggaggggnagggggagttntttnttggggttgtggggggtgnntaggtggtggggggggtggggggggtgggggggggtgaggggttttgggggntggggggaagggtggggggggggatgggggaagaggggggggggggggggngaaggggggggggggtgggnntggggggtgggggggggggggggggtgnnnnnttgggtggggggggggtnnngngggggggggggggggaaatgggggggggggggtgtgggtggggggtaatggggagaggggggagtggggggtggtggggggaagagggggagtgggggtggggggggtgggggggggggggggnttgggggtgggggggggggtgnttnntgggtggtggtggggggggganantgagattggggggggggaggtggttgtgtggggaagaggggggggggtgggnnnctgccgggggggtgggtgggggggnagtg

SEQ ID NO: 3360 - DNA, 643 bp, Glycine max
  unsure at all n locations
gctctaaatttacattgatgtttgtattgatgggaggaggttacatgccatttttgctttaagagtaacgtcccactggtaaaactaactttccaaatgtttgccttcgcaggaatggccccgaggaagcttgcctcaaagaggtccaggaaggacaaggcggctgaaggaactagttccgccccggagtacgacagtcaccgctttaggagcgttttacaccagcagcgcttcgaagccatcaagggatggtcgtttctccgggagcgacgcgtccagctcagggacgacgagtatactgattttcaggaggaaatagggcgccggcggtgggcaccactggttactcctatggccaagtttgatccagaaatagtccttgaattttatgccaatgcttggccaacagaggagggcgtgcgtgacatgagatcctgngttaggggtcagtggatcccgttcgatgccgacgctatcagccagctcctgggatatccgatggtgttggaagagggccaggaatgcgagtatggccagaggaggaaccggtctgatggattcgatgaggaggccatcgcccagctgctatgtatanccgggcaggattttcccggactgctgcatggaggcgagtgcgaatcat

SEQ ID NO: 3361 - DNA, 178 bp, Glycine max
atgcaagcttcagttttcaactacgagcgtctcgatatattacgggactctatcagatatccgaattgaaaggttttggcatttgacttttcatagagcttctgttttcaatttcgagcgtctcgatatattaaagggctcaatcagacattcgaattaaaagttattgtcgtttgat

SEQ ID NO: 3362 - DNA, 524 bp, Glycine max
cttctacttatgtggcagggcgggcttccttcaccttcttgtcttcaacgcgaactttgaccattgttcttccttcccgcgatgcttcttttcatgtccgcctgagtgggcttatagcctaaaccatacttcccacgatttccttgggtatttatcaggctagttatgccgccgttgttttttcctaaacccatcccgggttcataaccgttccccaacataactcgggccatcattaccgctgcatcggacagacaaggctgcccaaagagggagtccacggaggaaatgctgaccacctcaaaagactggaaagcagtttctaacgattcttctgcggcttccacataaggcatggaggatgggcagcttaccaagatatcttcctcgcctgacacgatgaccaagtgcccctccactacgaatttcagcttttggtggagtgtagaaggcacaactcccactgagtggatccacgggcgccccaacaggcagctgtaggggggggtaatatccattatttg

SEQ ID NO: 3363 - DNA, 174 bp, Glycine max
gcttcagaactttactactgctattttttttttcgatcgctaaacaaatatatttattaataaaagggcacgagaaattcatacaccataatttcagtgggcgcacgcacaccataaacataaaatgatgagtgtacgttttaattatcaagcaaattataatataatagtaag

SEQ ID NO: 3364 - DNA, 610 bp, Glycine max
  unsure at all n locations
ctttaaagctctcttctattaagctctcgcagccaaccaaagcttcaattgtgacccaacatggcacaacttaacctcacattgctagccattttcctctctctcctcttttcaattctggccaccccggctagttgaaccgtcaaggcacaagaattctcaaacaatgacctgttggaattttaagggatccttataaaatattaataaccactatgaacacattacattatattatcaagaagagttttaggaatatctgaatacataatgattggtcaaacaaacgcaacgaaatttgaatttgtaggtgatttctgatctatgtgttttttttaagatctgttacgaaatattgtagagataatgaataaccgactaacagcgtaatcggggacttcatgattcttcctcaaccaaattttttttatttctctttagatgaggaaaagagaaactatgtgtgtgacgaactcgtatattggggaccataacattctcatagcgtgttaacataggtttctcattatcccctaatggncaacactgacattngttcagttaaatctatattatctaatttatttggctaacaaacttactttaattg

SEQ ID NO: 3365 - DNA, 179 bp, Glycine max
catgcaagcttctaaactttatacaagaatgaagctctgataccacttgttggacaagtggcctcagatatcttaagaagggggggttgaattaagatataacagactattccccaattaaaaattctacttttaatttaacccaacaacctatgattccttttaaacaagaactccaa

SEQ ID NO: 3366 - DNA, 416 bp, Glycine max
gcttagtgaagtggttgtgaggtttatttccagcattcatttcttgtatgcacactttcaacataatctgagtatttttataacaccattctgctttctttctttttacaagaacttgaccgagagacatttgacaagcttaacgaaacaaacgacagcgttccaaggaggaagaaaatgtgaccaaggaagaagaaaaagaatgacgaagaaaaaaacctgtgatgctaacaaaggaagaacaaaaaatgacgaatgatgatcggaagagatgaccaaggatgatcggaagagatgaccaaggagatcggaagcatgggagaaaaatttcgaggaaggcacagcaacggtcgttctcacgaacgagagacaaatttagggttcagaaaaatgacgagggtttgcttgcattttga

SEQ ID NO: 3367 - DNA, 169 bp, Glycine max
gcttggttggctttaccagatttatattataaaaattaattttataggtttattgaaaattaatcatattttattttttaatttattttttataactcttttattagcttctactatatatagagagagagtaaattatactagaatgagagttgaataatatgttact

SEQ ID NO: 3368 - DNA, 580 bp, Glycine max
taatgaccttgttcatgttcgttacaacttgaggttacaacttatgtattactatattgattatgctttgattgtttacttattttgcttggatttttttttattgatgatatataaccattttgatcaatttttctttgaaaacccttgatgaccattctaattgggtggtggaggagtctccaccattcttaacttgtgaagaggtggaggctttacgtaatgatcttgctaacatgcccatccaatcaactttagacgatattaatatgtgtctttataacattagtatttataaggtaccacttatgtacttatattaattgctaatttgcatctacaatgatgttgccacagataaattaaatctggatgaagatgacgatgatgatgtgccacaaccactacatcacactatggaagatgttaatccaaatgaaagcaatattggtgaagagcctccttcttttgatggagaaagattacttgaagttgactcaatattggctccttggatataattatggatggtgtcatatttaagctatttgtgtctctttatttatggacttatgttatt

SEQ ID NO: 3369 - DNA, 179 bp, Glycine max
agcttatttgaaaagctttcttgaagaagcctagatcttatctacacacacccctttaataactaagggcacctccttgagaagcttccttgagaagattcctagagaagctagagcttagctacacacacctctctaatagctaggctcacctccttgagatgagaagctagagctta

SEQ ID NO: 3370 - DNA, 599 bp, Glycine max
  unsure at all n locations
taagctctttcttaagctttttctacaaccttttctccccctttggcttcatttaaaagccaaatatgacaatggagtaaaaaatatatataaatatcaaagtataaaacacaagaagccaaactcacaaagaagaaataatcaaaccagaatccaaataactgaaaatgtcaacaaccacaaaacatccaagactgaaatttaaaaccacaagataaataagcaaagtacttagcataataatgtaaattctaagaaactaaaagccaaaatacacggcttataaaagataaataatcagaaactaaaatctaagaagacggaggtggtggtggaagatcgaaactctgacgaatgtatccgacatcctcttcaatctgtgtaagacgaatgtccatactggcaaagcgtgaatctaacgagtcgaaacggtcaccaacataagaacgaagaccccgtaattcggagaggacttcattcatgagtgcggaatcttcacgttgagggggaggtgaatgagtacgtccatcttgaggagggagtgcatncttcttcagccattgtccattccgatctttactatagccaaaggaggccac

SEQ ID NO: 3371 - DNA, 172 bp, Glycine max
agcttatactctgcttccccttttctttaacatttgcttcttgcactttctggaaactcttcgaattttttgaagcttcaaatgctttagcagtcgacttgtcaaacacgacgttacaacaaagacaaagcataacctctttctcaactttttgtttcttcaatagaaattc

SEQ ID NO: 3372 - DNA, 533 bp, Glycine max
  unsure at all n locations
attagtgtaccatacaactgcagctccagccaagctatcttgtaaaaaagtgtatgaacaactttgcatccctagagtgtgcccccatcttgcgacaatacatcttgagatggttcttaggacaagtcgtccctttatacttgtcaaaatcaagcactttgaattttggggggatgacaacatccggtaccaagcaaagatctgtcatgtccacgaatggatagtcaccaaatccttcaacagctctcaatctctcctcgaggagatcgagtttccttctttcttcggccgccgggggtggtccttctatggacaagaatattggttgtgctgtgaggttgggctgaggcaacgtgttgggcaccggcccctcgacgaggatcggagggtagaaatcgacatccncttgggcatactctcgatgatcttcatggaccgcgtttaggggaggatggtgcgcggtagctaggatagatgggtctgcttcggcaccccaactaacagcggcagcggtggccgtgttattctccatg

SEQ ID NO: 3373 - DNA, 167 bp, Glycine max
agcttatcaacacttttatatataacaattactggatttggtttatgttgatgaaggtatatggtagcatatacttcagatcatctttcttcaagtgagtttgaaccccaaccgtaagaaaggcagtaaggcacatgttgtgagtctagaccactcacaagtatttt

SEQ ID NO: 3374 - DNA, 439 bp, Glycine max
tggcaagtttgtattgtacaaatggtcccagagtgccccttttattatgtactcataaaccagtatattctcgaaccttttattgcaaggtgcctgtgacgaatcttatacaaaatcatgatctctctctgaaattctggaaggccttgacctgacctgttaagaattattgattaaatttattatttattatattataaccaggtaagaactaagatcattattaatatatatatatatatatatatttagatatattgatatcttaaagattggacgaaccataactcccatatatgaaatgataagaggttggtgagataaatggagattttaagatgtgtattaaaacattgtactaaaaaagaataaccgaataacagagtactcggggactttaagattatttctcatgcgaattttttttatttctctttta

SEQ ID NO: 3375 - DNA, 175 bp, Glycine max
ggcatgcaagcttcttctcaacaggatgataaaacctatatttctattcattctcaccatagccaatgaagatacactgccttgactttgcatccaacttggatctcttatcctttggaacatgcacaaaagccttgcagtcaaaaactcttaagtgactatacttcacattctt

SEQ ID NO: 3376 - DNA, 627 bp, Glycine max
  unsure at all n locations
tgcattcgatagtggagctcatccaatggagttattaatgctaagaaaattcaggttttaaagaaggagctgaatgctttggaggctggtatctctgacagaattctgaatcaatttgaagtggagctcaagaagtctcttcaggagcaattgtggcatgctgctaatgcctatgaatgtatgctgaagcaaaaggctatagtgaaatggttaaaggaaggggacagaaattcagcttacttccacaagctgataaatcatagaagaagacataatgctattcaaggattgatcattgatggggaatgggttcaggaccctagtagagtcaaaactgaggccttcaatcatttcaaagatagattttctgagcagaattttaatagaccaaccctggatggtgtgcagctaccttcccttggtcaaagtgagaatgaagcccttgtggccagattttctgatgctgatacagtttggttaccaaaagccatcaagaatgataacaaagcagtaatttaaattaaattcatcttagctnttctattttatgatcactctcgattgctggaatggtgaaggaaatgggcttctttatacgaggaccctatacagctgcaatgtgacatc

SEQ ID NO: 3377 - DNA, 171 bp, Glycine max
agcttgaagagtcgagactcgtattggtttaattgattaccaatatctcataatcgattacactgttatttgatttattcaggagtctctactttaatcgattaccaagtggtttaattgagtacttctctcttatttagctgtgcataagtgaataggaacactttaatc

SEQ ID NO: 3378 - DNA, 639 bp, Glycine max
  unsure at all n locations
ttgaaatggaggattgggggaattttctccaccgaatccttgaggaggattctaaggattccactccgattaagatgttcctcttggtgtggtggttcggcgaaaagcaacggcggctcatggcggccattggtggtcgtgggtggcagagaagaaggtgttaaggtttgggtggcgttttggagaagaggagagtgaaaaatcgtgtttttcacgctgaggaacatatttataatctgcaaatctcgcttagcgaggtcgtctcgctaagcgggagtccacttttctcactcaacgtgcaaattctcacttagcgcaacttcctctgcattatgacttgcccaacaggccaattctcactcaacgcaattccctctcaggttggaattgcgcttagcgcacccttcacgcttagcgagacatcaaaagttgttattttcaaaatcccaatagtcagactgtgcaaaaagtgtctttggaagctccagacaaaatttgaagatgatccaacgggtaacgactctaggatcgcgattttactaanataggttttgggtaaaatctgaaatctcataatttcaacttagttaaacaaaactccacataactcagcatccacatcaagaaatcacacatgac

SEQ ID NO: 3379 - DNA, 155 bp, Glycine max
agcttttatgactacaaccacaacttgcgttggacttgaccccagctaagacgattgaccaccgtgtgaatgccgtgcaccctgaacacagcggcgtctttgaaatacattttatgttatcatacatacgtgcatgaggtgagcatcataccaac

SEQ ID NO: 3380 - DNA, 384 bp, Glycine max
tcaagcttgcaacaggactgatctaggtgatctgagtacccgcctttatgtactataccctgaggacactcccgatggtagagatactgtcactgttatcagatacacacggaaatgcctctatgtgaaaatgctgatatatgccattctacgcttgggcatatatcaaaccctgttttcagtcgtttgactaataataatggaacacaaatctctgcgaaatgatcttcgtctaagagatctatctgcccactctctaagattgggagatcaaactttgctaactctaacaatagatatgatataccttttgattgactccattgcgatctatggggtctagtgcccaccttacatatgaggggaataatatactccttaaaa

SEQ ID NO: 3381 - DNA, 311 bp, Glycine max
aaaaatcccaaaaacaatcctttttaattctaactaatttgaattccttagttcctgaatgtacaaaccttaaactggagcccgttccccccatttctttctacaaaaaagaaaattaataccgacaaaaacatggatgaaaccctaaggatgccaagttcatgtggatttctgaagaaataggatctatattccatcaaacatagaatgaccattgattacatgtaatatactttttaaaacatgggtgccccaaatcacaactaaaaagcacaactaccacatcttcagaggcctttggtaaatgggct

SEQ ID NO: 3382 - DNA, 165 bp, Glycine max
agcttcaattgtagttacccattaaagtggattgcttgggtagagcaattctttgacctgcaacatacaaaaacattggcaaacaagttcttcaaagagaaaaaatagaacttggcacaagaaggtctaccaacaaggcaactagtaacaacaggggggcttcaa

SEQ ID NO: 3383 - DNA, 393 bp, Glycine max
gctcatggcggccattggtggtcctgggtggcaaagaaaaaagtgttaaagcttgggtggcgctttggagaacaagagagagaaaaatcgtgtttttacccttgaggaacatatttataatcttgaaatctcgcttaccgaggtcgtctttctaaacgggagtccacttttctcactcaacgtgcaaattctaacttaacgcaacctttctctgcattattacttgcccaacaggccaattcttactcaacgcaatttcctttcaaggtggaaattgcgcttaacgcacccttcacgcttagcgagacatcaaaaggttgttattttgaaaatcccaataatcagactgtgcacaaagagtcctttggaagctccagacaaaatttgaagatg

SEQ ID NO: 3384 - DNA, 179 bp, Glycine max
  unsure at all n locations
gcaagcttntatagaagggtcgntcctaatttctctacaattgtctcacctctcaatgagctggggaagaagaatgtggcatttacttaaggtgaaagataagagcaagcctttgctttgataaaagaaaagcttactaaggcacatgttctagctcttcctgaattttttaaaacttt

SEQ ID NO: 3385 - DNA, 1081 bp, Glycine max
  unsure at all n locations
cgccgtcatacactattacactgcgttacaatagcttattaatacactctctaatgtaagtactaaatttcaaaatatatggcctattatctataccccattaagataccgccaatcaaatacgctcactacgacgctaatttcccttcggaacatgcaacagtcttagaaaataataaaaactcaaataagggaaaaagaggtaagttggtctgaaatctaaaatatcgacgaaaggggcacagaggagggtttcatactatgaaatctccgatatgagacgcgatgggttgtccgaagacacataaagcagagggggtctatattattactatcgataagaaaacaatagtggaatgatggcccgctatgagatcgactagtgcagaaaaccactggtgtactagaccgaaggagcccttgcttatgacttcttcgaaaaagggaaataaagtgagaccatctctaatatgggcatacctaagccgaacttggcgagaatgtgaggacctttaggcacctaacatacggtgctgcgggagactccgttgtcaagacatataacttcagactcgctgactnaacaacatcaacaccacatgctgtgaactataccaacgcacgaagagatcgacgactcacgtaaccgcacatccacattatcctgtgtggagagacactctcacctctacgagacaaactcnactgactagtgtggatgtaatcgctagacttgagatacatacgagtacatgactcgaggacatagggcgaatctcttaacttcgcatngtcgtcgtctggatcgcgcaatcgcggttgatgcgagactacttcagacaatatatatatacccagtaagaggcgtctcgcttcntcgcgctcactcatatgatatgatcagtangatagtgctgcgaaagccacttgtgatcttcgcgactggtactgcagtatatatcaattgacgctcaccagtttcgagaatatagctatatcgngtctgcacactgcgatcactattgcagatcatgacgttttgataaggcgaaacgtctacgcgtatcacgtttcactccat

SEQ ID NO: 3386 - DNA, 1126 bp, Glycine max
  unsure at all n locations
ggcggaggtcaagatactgtactatacctataagtgtattggtccatgagagaactagactgtatcagactttaacactctccactacgcgagggantttatgcatcctttgctgaccttacaatataggctaacaccctcggacaaactaacaagtcgataccaagcactgttctaacatcgacctatagttacacgccggagaatatactggccgactgtttaccgctccgagactgtgatattcctcgtcaataccccaactctaaatcgcgcattgcagactcattaccccatttccgccgagactggcagtaaatagcggcaagaatggaccacattccgatacgcgctctttgactaacaagtttgtctcatgcctcgaaataggcgaagtggtggccatgtaagcagcttattttgctacctattacgcaatcttggtgtcgagatttgtacagcaaatgtcataagttggttgtcaactactgtagattcacaacttaggatcgtgtgtggccgagactatcgcttaattctgatgatcctgactacaccgtaccgacaaccgcgcatatatgacgattgatacttgtgtgacccggtacagtaatatagttactctctacaacacctttatcagctcataactccttaatatactgagtagtctagatgtcgaccaactctctatacgtgtacagcgaactcctatatagattcaataattgtactcgcgtcgacattatatctacatttaactttacattgctagttggtatctcatgcatcatatatcggcatcacgctcatatactaagtcacaattgaaattatacgtgacgactcatctgtaactactcacttataacacatacgcatgacgttctagccgacctaccgctcattatagcgactattacggacctgtatcgnggtgaaccctaactagtcatatcgtaccaattcatggtggtgcactatgctactctacaacacacatacatcatgaacgaactacagatgtctatctccacgacagacgtatcaacgtttactctcgagtgtgtagtcaattaggtatcatctgtcgacgtcacgtatacatgtagtaatcttaagcacg

SEQ ID NO: 3387 - DNA, 940 bp, Glycine max
  unsure at all n locations
ccgcggcggtattacactacccctctatttcctgagttcctcattggtacatctcctcacttcgntgcccaaccaagcctagtgtggtgttgaatcatccatatacagacccatacataaacataccttactattggcatacactggctcagagtgatacctgccaaactgtattgttagaaaatgtacaaacacctattgcgactcgataatactctccatatcttttggcaagagcaataccaacataattttctctagtgtagatgattcgtcatgagaatagtcaaggggtggcgtactttacacctggtacgagaagaactttatgaggccggaccacatttaatctgttcgacgttgagagtgtcggaaaaaggtgaacgacactttccatgggctatcaaccgtatcttcttagcgtccgaatttgtatgcccttagggttacttctaagggaaccacgactgtattacgaggaggggagtgatgaccggtcatatcggcgtcacttcgtctcgatggggttcgtcatgaaggggacggtcatgtatcgcgtagcctggggcccacaaacgtaactttcctatgcgcctgatgctcgatgaacgggttcatcgacgattactatcccaaagcaatcagtggctgggatcaaagtttctcgacgcatcgtagcgaatatatctgaagtaaaccacgagctagggcaacgcactatactgtagaccatagcgggcgaggtgccactctcgaccctagtggctgtggtgaccgaccgaggtctatcgccatgcggactagaggctgaactatctactctaatcgatcgaggatagataacacttacgggtaagccggaaggatgttctgtctccgatctgtgatttcaatgacactggggtcgtgccacgatctttgccgatttagtgccgtaacg

SEQ ID NO: 3388 - DNA, 1054 bp, Glycine max
  unsure at all n locations
acacgctaatcagcacagtcnataccgcgcgnacgacactaatcactaaacctcgcgcagcccncgttanacccacgtntanatctaatatntanccaatcccgccctcantcacaaccacancccccaaaaggggnnnnaccgggcgcggattgaattccagatngcanatngancanacanccnnnntnannanntanagnnanagccancnacccccgccnacgangancacccacgaaaancggnnccggnagcagaggagacacagaccgctatcttttttgtaaccggaagacaacctcgtgcggactccactcagtcacgcggaggagagtactaactcggctcgcaccatacgcagtacccaagaccgcgaaaccaagtaactagccgacaatacgccggagacccgaccacgcccagggacgggaacccacagcaggacagacgtacgcaacctcgacgggcaacaccaggaccaaggcacacacagcccatgcacaccacgcccaacggcacacaccaaatgcacctgacccacgacgaaggggccgacgacccccacacgccaagacacagccatagagacacaccaacccaccggccgcatccagcgcgcccaacggagcacccagaccagatcaacaccgaagcggcggcccaaactacagcaccaggcaccccaaccggaaggaaaaacagcgcaaagacccgccaaccacaaactgcagcgcgaaccagcggaacacacaggcggacacgcgcccacaccaccggcgctggcacggacccctacgaacccaaacacaaacccacgccgcgcgcgcaagcagctccagcaagagccacacgcccaccaccgcgccgaacaaccaaccacaggcacccgcgacgcaacccaaccacgcccaacaaaacacgccccacccaaccaaggaaacccccactcccccccgggccaacgaccccccacccaacggcacccccaccaaaccactacctaacaaaataacacacagcactcgacacacacgtccaccgcccccacccc

SEQ ID NO: 3389 - DNA, 1085 bp, Glycine max
ctgctagtccagtaggtgacgcgtgtctcactcactcacatgtccatttcttaccgtattactccttctcttcttgcgcgtcatatcatcttccctagtatcatatcagtgctagtgacaactgtcatttagcgcacccctaatccacatccttcactcatctcacccgacgtggtaccaactcacattctccacctttgtatttcattggaagccaatggataccataatactcctgcaggaaacttctgtccaacaacgctttattgggctggtcaaggagaaaaccatcccaatacacctctttgccttcagtgcaaagctctactaggccctcaaccctggcaccaataaaataacgactacaatgggcatgcccaaatcttcttctaacagtagaattgtctatccactgtcttaatctattctcaggacaagtgggattatgtgtaaccatttaggtcgtaacacatacccgcctaaggtttagccccttaaatctaacgaaaaacaccgctttaactatccttcataatgctagtatgccctatcccttgaccataaggctttaaccattcctagtgaagtaacgctggatgtcaaggttttacccacctctgattctgccgaacaaacatggtttaactcacgcttattattggtataatggaaccaagggttgaacctctccaagaagtgtgaacttctgatcattgattgccttaatccactttaacgacaggaacgcaatatccaaggccaattgggataacatcacttatattaggctcgacatccatataagcgttaaatattgcaacaggtcacaagctacacactagggtggctataacaacctatgtgggacacgccaaacacactgtacgtggaatgctatatcctccctttaagggcctagaccatctacccacatggttataccggtcttagaacaatgagttgactctcactgttatatccacctacggttacgataaaaacatactgtttaagcgaagtgagtgtccttgctatggtaaacacaatagaccaggcgcaatgattgctttgtcagttatataaca

SEQ ID NO: 3390 - DNA, 172 bp, Glycine max
tgccagcttaaagaataattaagaataatggtagaatatcttattttatattccggaaatatattctaatcaaaatacaaactgattaagtaggctaaaaaaactgatataatatcttatcatatattctaataacttcgaaattaccccacaaaaattatttacttcgaaa

SEQ ID NO: 3391 - DNA, 1422 bp, Glycine max
  unsure at all n locations
cgccgcagtaactcagcgtgtacactgcgncacactatacnactaccctctctaccctacaccgttcntntcacactntcacactaccatttataatantacataaantctcancgcaantcagctagaacacngagtcggggancnttaattcgattgcccttgtcgcctncaccgtctatgatattaataaataccttcgaagcntcgtcctacgaatgaccaactatctcctggactatatgagaactacacatatatgagttctgagtctagtactcccatcacatgcncgtgcacgacacactacctgcactaagtagggtactcatcggtactcccgtgtctctcacacactcctctcaccacacgctattcataaagaacgacgacacacgataagaatgcgacgcacgacggctgtaacaattggcgcatgagacggatccatcgacgcaaacatcaggactgactgctcgtaagaggagacgtccggcatgtcagaacttcacaagaccattggtcctgctgcgcatggcgaacggactaggcaggcacaggggattacacgtccacgacaaggggtaacacacgcaacgcggacgatagcgtcgcaaccaagtgtcgcagtcacgtcaccgtccaagagcgacctactacttagggctcagagagtagaataactaccgcccgcaacaggcctgaagaggcgtttacgcgcagggntcacacacaatacggcgcaccatccacgcgtcgggcatatcgggaacacgctgacgaccctctggacacgcatgcaaccatcagtactcacgcatatggaacgagctcaccatgcggcaaaacgcagacgcagccctctatcactcagacttcttcgttcgtagatgcgcacaaactattcggtgcttcacccgaatgtctccacgagcactgcacagtacaccatctgagcgttcgtacgcagaccgcgcgccgatcgcatccgatcatacgtgacgaacgcaacatangcgcatacacacgcgcacgattacgctgcatgctcatctgcgcagtctgtcgcatgtccagacccacgactgacgagattatggtactgacagaggagacagtcgccgtaccatcaacggacgacgttgagnctaaccgtgacatacgactactgtcgnacgctgttgcaatacngatcgatatgtcacatatcgacatgatcgancgcgctacgcatgtggagtcagtgtactgcacgtcntccagagacgacacctcgactgtacacgttgagtagcactgagtgcgacgactgcgncntgncatgacacgtgtcatgtgngtgcacgcgtagcgaggaccgatcagagacgatgaagaggcncacgtcgagcaccgtgactanagacgcgatacgtcncgcgt

SEQ ID NO: 3392 - DNA, 381 bp, Glycine max
ttgatggctttgtgaaaaagttatttaatggagggcttcccattctaatcttggcatggacgagaaacatcctgtgttaccacatgtatgacttgttggaaacctaataaatattcctttaaatattactaccatataactttggatggattattaaaaaatatggtcaactaagtctatagatcttgaactgtatcaaataatggatttcaggtcttaaacacaagtgtgattaatcaaaatctctaaacattgtttcgctaaaattttagatcctgtgcttatttacaacattaaatcatgatattgatgtgacactcaaactattattattaaacttgggtacattttgcagcggctaaaaattgtcaaaaatttact

SEQ ID NO: 3393 - DNA, 170 bp, Glycine max
  unsure at all n locations
tgcaagcttgagatgaggaagngntgaagggagaaacttcctacttttattcggtgaccacagagtggtacctggagatatgtcgcgggggtcaggagaccttggggacgtcaggtggggtgctattgcccaaaaccaagcttgaccaatcccgaaccaacccgggcata

SEQ ID NO: 3394 - DNA, 632 bp, Glycine max
  unsure at all n locations
agcttcaagttgctcggatagcaacttgttttgggccaacaaagtgttctatgatgaaagcttcaacaggcttcttttggttgggatgtgtgctctatcacacaagattgaatggtcactagcaaccatattgtcaatcaattccatggcttcttcaggggccttcaattttatttttcccctgcagaagcatctaaaagctgcttggattgtggccttaacccgtcaatgaaaatattgagcaggattggttctaaaaatccatgagtaggcgtctttcttagtaacccacaaaatctttccaaagcctcactcaaggactcgtttggaaattgataaaaggatgagatggcagcttttccttcagcagtcttggactctaggaagtatttcttcaagaatttttcaaccacttcatcctaagtcttaagactgttacctttaaatgaatggagccatctttttgtctctccaaacatagaaaatgaaaacaagctcaatctaacagcatcctcaggcatgccaaccagtctaacagtggtgcaaatctcaatataagtggctaaatatgcatatgggtcttcatttggcagaccatgaaacaanatgttctgaatcaactgaattaatga

SEQ ID NO: 3395 - DNA, 167 bp, Glycine max
gcatgcaagcttcaagtaggagcttcctaaaccttcattatatttttaactttaccttctcctccattggtggttcttcatttttcttcatgtatctcctcacatgtcttgttttgaatattgttaacatgattttttttaaaatttccaccaattaaacttgctat

SEQ ID NO: 3396 - DNA, 1106 bp, Glycine max
  unsure at all n locations
gatcgtgcactctccatngtcatacctctctctctatccacgtattctcctctatctctgntagtctatantatatcatctatatctgaagatnanacatttaccnacacacnctcntcncgtacgtgntttgaatcgatgcatttaccgacactctataattctcangacctgtcgtcgcaccatccgacccgaacgtccacactatgtgaccgacatggtgtttggtgttcttcccaatacatctctaacaaaggcttcgaggattgaggggaagatgtcttgaagagggtgacaaccttccctcgcactgctaagtggcttgacacaccaccactggggtttctccttgagagaatattgtcagcatgggggttcatcagaaaaccatttgggggaccgtccatgtcgtgggttgcctatatgtgcctaaacaccgaatgcgtaggacccaatacctcgaccccaaaccccgggcaatagtactggttcaggatgagacaccttgtagactgttaccataattctaggactaagctgtcctgcgccgtcataccgcatctatagtgaaaagcatagaaccaccatagtcacggaaggcgttgtggagggattggccacacttgccaattctagcgtaataagatagagtggtaggcgtctgctcacccccccactctatggcttttagaggagaccataattcatcataaaacgcaaacttgaatgatccttttggtcttaatgtggagtgggcaagaaacaatctctacaaatctcatacaattcggcaatcttttatctgtcgtgaaatttagactctttttactacacttttgatcatgctttagattattaatcctttggtcatatgtcgtcaagtaggtagcaatactgctggttgggatacatcttatcatatctaaattgagacctatcacctttattggggaggcagggtgttttcgtggtcttcacccttcattcgtctcccacatatattaacactggtgccgccatctgactctcgtataccactttgtccacacctactctccttgcattttcagacgactcgtgattttcatcttattatgtcattccca

SEQ ID NO: 3397 - DNA, 319 bp, Glycine max
tacctaatattctgttaacactctatcttcaaaagtggtggctttttacttttcttgaagaatataacttgagtccacagatttttacccaccatgtgtttgtggaaaaatcgtatttcttcatcagtctcggtgtatgggaacttttgctggtaccacaagctcttgcatatataaacactatattgtatggatacagcaaagcttaatccggtgcattataaaagtatctatacgtacacatggtccaagactaagatgacagtttatatttataaaacaccttataagttcccgctatgtgacctcccatgtgaac

SEQ ID NO: 3398 - DNA, 525 bp, Glycine max
tgcatgttagagtagtaccacaggaagttgataaaactaaattctaaagacacataattgggacattttactcaactatctttgataacttttcctatcccgaggatatgataatggagcatctcaataacaaataataatggcatatgaaagacataagtgcatgcatgctaataatttaataatttcatgttttaatttgcatattgataattttgtgattagtaaaatcagatacagttgtaaactttcacactctgactcatgagcaccctcattcccactatttaattgatagatcccctctaacaaactgtctataactatttgtcacttcccttctatcttaaatgagatggctcatcgtctccccccccccccttcatgctctagaagatacaaatttcacataacacccaacttaatgatccatcaatttaaattgagtgggaagacaaagtttacaaattcagaaatttgcaatcttttacttgggtgaagttgaactcttttacaaactctgac

SEQ ID NO: 3399 - DNA, 172 bp, Glycine max
agcttaacaaactctgattttgtaatattccttgtgctctaaaagataagaattatgttactaaggaatagtatatataactatgtaaataagccagcaagaagaatgaaaaattacctttatctaatttctcttctcttgtccatggaggccatggtcctcgaaaccagtt

SEQ ID NO: 3400 - DNA, 431 bp, Glycine max
tttaatatattaaaagttttgttctgaatgtttattattagcttttgataacatgacaccatcttaatagttcttctaatgtatatcagctgtttggatggtctcacgtgattaccctgcctgacatcatagactaaaaacaatttttttaatatattaaacaattttttttaatagtgattcaaccaaaatcggatatatattatatacgtaaaagttatttaagattaaaataaaaactatatatacttgcacattaagtagtaaaaatatatgagagctgcacactaaccaattaaatttaatgtgagctgaataaatttaaatttaatgtgaaccgactaaattcaaacaccctaagcattataggaccgattttgtattttttattttcttgggcaattaatttaattttaatgtaacacttaact

SEQ ID NO: 3401 - DNA, 176 bp, Glycine max
agcttgttcttgattttttcaaagttctttaacaaccttataacaatatactcgtccttcatttaattatctttgggcttgtcgaccacgatcaacaaagtactttcgacagctactatatgttgatttcaccaacgctgttatcggtatgctgcgacaatccttcaataccttat

SEQ ID NO: 3402 - DNA, 546 bp, Glycine max
ttcttatgtctttacccattttcctctaaggtagccaaacttcgttgaaggatgaccttggcaacattggtcgagttttgtaccttgactgaccaaatgaggttttggtcaaaacgggacacaaagtatgtaggaatcctcatcttaggtctatagcacaagcttcatattgaatttgtatcatgagaagtgtatacatggtttagtgagacacttggatgtgaaaaagaggaagacattgtcgaaggtaagataattggagctgaaggttgcaaggccggggaagaaggaggcaggctcgccaagacatttgctatcatcacaccaacacttagcaatgccaagggagttgatgcaaccagagtagtggaagaaggggcagcaattgcctgaatcaaacgagaagaaggcccaaaagaataaaaaataattgcaaaagcaacaacagcttgagtagccaacaaggttgaaggtggaccttgggacctggtaggggaaggacggctcgagccggacatcaacccagtagcctgctttagagcttga

SEQ ID NO: 3403 - DNA, 177 bp, Glycine max
agcttctcccccaattttctataaatagggggagaagtgaattgaaaaagggttcagccccttaggcacttctttctctttcgaatttgcttaaaaaaattgtttccgtgaagaaaatccaagccgaggcgcttccgtaacgtttccgtgaagaatttcgcgaaggttttcgaccgt

SEQ ID NO: 3404 - DNA, 602 bp, Glycine max
taaggttagcgaagggccgaggctttggtgtaaaggtagcacccattttgcctcaacctttggttttaaaaactgaaattcatatggcacgcttagtgcacagctgcgcttagcgcgtcaatgcaacgtttgggttttgagcaaccctgtgcttagcctaacctagtgctaagcctaacttgaggtttcaaattccagtgagcatttggggcttagcgcagaaggtggtgcttagcgctttctgcaacacaaaattttctgccatatgcgcttagcctgagatgtaaggcttagcgcgcaatcaagcttcaacttacagagagtagttcaggcttagtgcaacaggcgcactaagcgcacttccaagaattcaaaaacagtaagagattggcgcttagcgcatcctgccccgctaagcccaagtcatggagttcaattacagaatggatatggggcttaactcaggacagcgtgcttagtgctgctacaataaattttttccagagaaaaagtggcgcttagcgcatcatctccgctaagcccactgcttgaagtctaattctagtgaagatgttgggcttaacgcgatgatgtgcacttag

SEQ ID NO: 3405 - DNA, 173 bp, Glycine max
  unsure at all n locations
agctttanaacaagctaaacatgcaaactaaaatttgaatcaaaaatataaacccaaattataaaatgttctaaaagcaggaaatgataataaaagtgttcaaaagacaggaaaatagaatataaatcctgtcatgagtcctatgatgctttagatgggtcatcatatggagc

SEQ ID NO: 3406 - DNA, 601 bp, Glycine max
gctgaatattccaatgtagaatatcggttgtataaaaaaaatgttttttaacaatggagaggaagtattgaagtaacactaactaataaatatttcttgagcaccattgcagatactcccaagtcccaccatagatgttggtcaatcttgttgctttctaactagtctcaaataacatcactcagtcaaataatcaaatgaaaaatcaactcatatctcatgcatattaatttttcacttcaccgtatacaattataaaatccttttttttcataagctataaatcaaatacttatatatcaattgaaaatatctcataaggtaaaatctaatccaacctttaccataagctttgtttaagcaagccagacacaaatatatacttgttttgtgctctgcattattacacattattcctatcggttgttaataacatagcaccacacatacacaccactcatatctcattgattaactatcaacactgcgaccatataatatcactcaatatttcaggtgagtaactgagctggtaatttaatatgaccactgcatataagaagaaaaataaagcaattttccacatcataatagctagcat

SEQ ID NO: 3407 - DNA, 171 bp, Glycine max
agcttgtttctaagcagggatccattattagtgattgtagaactacccttgccacttatccaaacttttcggtcaagtttattaggtgacgagctaatatagctgcaaatagcttaactaaaacagttattgcatatgttagtcgggcctgttttaatcatatttcacatt

SEQ ID NO: 3408 - DNA, 700 bp, Glycine max
  unsure at all n locations
aaccgatgcactgataccattctcggctggaatatcctttcggtgagaaatgttaaactatatcacacagagtttgatgaatttaaagtggagttggagaggcgtaatctacacaaacacctcactaatctttaggaaggaagcattgatgtggcgattgtcaaagaattttatgccaatctgtacagccctaaggatcagtcacccaagcaagcacgagtaagaggacatttgataagtattgatgcaaacagcctcaatgattttcttcagacaccagttgtgctagaggatggggagaccctacccacctactctagattttgcaggttgaggtctaatcctcaagagatagaggctagactgtgtattccctgcaagggttttgttttgaacgccgaaggccaaccatggaagctcctcagaaaggacttgaccacattggcccagacatggagtgtcttatcttactccaacctagctcccacatcctacacatcagacttaaacacagatagagctagggtggtttacaagctcntaactcacatggatatgaacattggcgcccttatcttaggtcaaatttcttctattgctcaantcaactcctgtaggcttgtgattccagcattgaatattgctctctgcagagctagaggaggtacttatgataggttgacctacgagagcctgagcc

SEQ ID NO: 3409 - DNA, 151 bp, Glycine max
gcaagcttccaataatcgatgcgaaagggaccccatattaagctttactaacttctagtaatggggggtcctcattcggggccagtaatctatctaaacgaactactctactcaacatacacaaccatatattttgggcctaaacaaattt

SEQ ID NO: 3410 - DNA, 909 bp, Glycine max
  unsure at all n locations
caccgaacacaccacactgccgcaaacacaacacaacccacaacngcgcacgataaatatatcaaacgcacacacanacaacacaaacacacacnnnnncccgggtgatgagtgcatggcaanccnttngnataaaaaccaacccatatgacaaggacaaaacagcaagcagaaatttaattttattaccaccactgcaccaaccggaaggggaaaggaaaaacagaaaacacacagctcacgaagaggacaaacgcagaagaaaccatataacagagacaaggacccaaggtggaaacacaaagactacacacacgagaaggaaccgaagaggaagataaagagacgaccccaaagcaagaacacaaaaaaaaccgacaaaagaaacccacacgaagaaggaaacccagagacggagggcgctaaccgaacaacgggatcgaatgcgaacagaagaataaaaaacacaaggagggccgacaagaatgcaggaacccaacgatcaagggagacgggagagaaagtggcaaaccgagggcaaaagaacaaaggaccgaacgaccaacggagcggacgggaacgcaaggggcacacgagacagaagggacagcgacaagcaaacgcaaagaacaaagaaaaatcacggcgcgaaaacaggacacgccccaaacaaacacgaaaaggccgaaccccaacggccatcagatgcaccaacacaaacacaaaccaaagggcgccggaaaaacaccacggaacaaaaaaacccaaaccggccaaccccaaaccacaaccaccacaggcaccacaggaaaaaaacgcacgcagcgagcgagagaaaaccggaaaaccccaccaccaacagcacgaccacacggacaaggagccaggacaagacagaaacgaaccccc

SEQ ID NO: 3411 - DNA, 527 bp, Glycine max
tcatagattaataaaggttttgaatgaaaaataaaatgccattagctgaattaatctattcattcatagaaaacaaaaaaaggtacatgaaccttacaattccaccacttgtgtttcttccccccttccaatcctacattggatctcatgacaaccttgagacatcttacatgacattcgcaccatgtttcagaatataatgcttcagctgtattcaaatttcaaaagcataacttgtggattacctctttgtaaacatcaattggaagaggcaatctaagatatgcaatccagtctttagtaaattttagcttcatctttttggcaactttggctgctgacaatacctatatatgtaaaatgaaaattaagtagacagtaaaaaaagaaaaactacacaaacaattacaagagtgtttaaatgagaagggccttcaatatataaattcattaaattgaagataagaaaactactatggaattggaaggcaagagttccttaataatgaaaaaacaaaaaaggagac

SEQ ID NO: 3412 - DNA, 385 bp, Glycine max
taaacattcaatttcgagagtctcgttatattacgggactcattcagacatccgagtaaaaagttattggcgtatgaattggcttaaagcataaacattcaactttgagcctctcggtatattacgggactcaatcagacatccgagtaaaaagttattgtcgtttgaatttgctcagaggttcaacattcaatttcgagcgtctcgatatattacgggactcaatcagacatccgagtaaaaagttattgtcttttgagttggctcagaggctcaacattcaagttcgagcggcccgatatattacgttaatgaagcggacatcacgctaaaaagttattgccgattgaattcgctcccaagatcaacattacattttcgagcg

SEQ ID NO: 3413 - DNA, 166 bp, Glycine max
agcttataagaacaaaattgcctaaatcatttccaaatatgcatgtgaattaggaagcatcaacaagaatcaagccaaggctattgggcaagcaatcaatggggcaaaacacaccaaaagattatgatgatggatggctcaaattctcagaaaggtaaacttatca

SEQ ID NO: 3414 - DNA, 536 bp, Glycine max
tgtttgttagaaagacccaacacttttacctatggctgttatctttaattacttgcaattttactgtttttaacatagactttagtttatttttgttttaaccattgattattaatgttgttcctacaatgccttacttctgaataaaactctgtctaataagcaagttccctgagtttgatactcggatcactccgttttaattttaaatacttaacgacctgatgcgctttccgacgaatcgaatttcccttgaacatatttgttgaagaaaaattggacaaaaagtaactctaggggaaatcccaacaaaaaccaatcataaaagatatctatgaggacactcaatataaaatttatggtcacacacagtcactaaagcttatccatgacaccttctttagtaggccagacatttgcataaaactccatgactactttaggatcatatttagccatgggctctgccatctgcgtccaatgcctccttgcaattttcgcctgaaattatgtatactcaccctcagctagctaga

SEQ ID NO: 3415 - DNA, 651 bp, Glycine max
ttagtgcctcctcaccaggtccataatgagcatttgcagatttattggcattccaagtactagaattcttattagctaatacgtcaaaaatatagttacttgtattaagatcaccacactgggcatacatttgaattagggagctttggacaaatgtttctaattcaaagcctgctacaactatatgtgcatggatgggcattccatgatccaaaaggtcatcaggagacaaaaaagcactgagaagattaacaatagtaatgtagtttacaggcacaccttcttctctcaacaaattgaaggcttcaatcgctgcattaggttctttgttatcagcatgtccacctattagtgcattccaagtcacttcatctctgtcaggcataattttgcacaccctttgtgcagcagccatggaaccaaatttcccatacatggtaaccaatgcattacctatgatcaaattgtgatggagaccaagaagaatcacaaaggcatgaacaatctttaatgtttctaaatatacatgcagataatgcagtagtgaaggtacatagtttgtcggctttcttgtttgaagcatctcaatcaaaagttctaagcacgtggataatttccattgtcacattgcttgccatatggaattcatga

SEQ ID NO: 3416 - DNA, 168 bp, Glycine max
agcttttaagtgaaaggaggcgactcttcacttttgaatttgaatttcaacggtcaagggcattggtaatcgattaccaaaacattgtaatcgattacagctttttgaaaaataattggaacgttgtaaattcagtttgaaaacttttttcaaactcattttgctact

SEQ ID NO: 3417 - DNA, 662 bp, Glycine max
tcagcttcttaaacagaggctgaaaatctgaagttactttgttttatgttattgtaaaacagttacaagcataataactaaatgcaatacaagaatatgagaattgacgaacccagttacttggaataggtaactgtttttaatatcaacagttacctatttttatagtccaaaacagttatcaacagttacctattttaatcctgcatcgtaaaataactaaatgcaataacctattttaatatcaacagttacctatttaaaatagttacaagcataatttgcaataacaggatatgagaacttttagaaactgccaatacgaggcaagtgaatagtttataaacagtctggaagcattcaacaattaagcgaataaaatagaaaagagagcaagcaacccagttccttaaatccatttgggtaaaaacattatctatacttaagcattacttgctcaagaaacaaaaaatatgttaaaacaacaatagtgaagccccctctgttggacagtaaaatgttatagcaattgcaggaaatttcaacaaccctgtggatctgtgtacagacatcatgggtgattctcttgtatagtgcagacagaataacacgttactataaatcatgcaacattacttattactacccagaaaaataaaata

SEQ ID NO: 3418 - DNA, 176 bp, Glycine max
agcttgtagggttaaagtctcacgattgtcacgtgctcatgcaacaattggtagccgcggctatatgagacatcttgccaaacaaagtcaggttcacgataactcgcctgtgctttttcttccatgctatatgtagcaaagtgaattgaatccagtaatgtttgatgagttggaaa

SEQ ID NO: 3419 - DNA, 330 bp, Glycine max
gcctaagatcctcttcatcaatggattccttatcttttttgaagatgaatggcagcggtatggagaatgaatatagagaagatactccacttctatgagaaaatgaatttagaaaaagcttaccaccataggaggtcttggataagagcctgtaggaagaacatgactgaacggagagggagagaatagcacgaaattttgtgctctaaaagagctctaaaatctgaagtcttattttcaaatgatcaaagttggaaaaaatgaacacaccttacctttatttattagcctgactgtttcacacaactggagggaaattttaattttaat

SEQ ID NO: 3420 - DNA, 178 bp, Glycine max
agcttatcaacttctgccagtggatacaaatatttaagtatccacaatcataaaaatatcaccaggcagagcactagcctaatctggttttcgcagataccaacaacttaattcaaagaacaagcatctataattggactcgaaccatccaattacatacatttaaaggatttttaac

SEQ ID NO: 3421 - DNA, 655 bp, Glycine max
  unsure at all n locations
cgggtgagtcctgacnacnctnnttggaaccacccggggctccgacggagaggagggagaattcctttacacnctagccacagggggggggctttgaagataactcccccgaaaaacctgagagatgagggacaggaggcgaaagtaagcaagtccgcaccgaggacgacaaaccgaaggtccagaggtgagagggacccatcgtgcatgaaaaacctgcacataagcgatggaaagaggtgggcgacaaatgaaggcatttacaacacaaaaacacagaaaagaagggcactcgtaaatatgagggaaaaagccactccgatcaacaaaattgacgattggcgggtagtaccacccgagcacctacggttgctcactcaggggagagtagcttcgccatctcaataagcgcgggatgacggctcctgcggaacgaaaacaactacccagggtgcggagacccatttgcagccaaaggtgattccctaacggacgaacggggacatgcaaaaggggggaaacaccgagggcaccgatatactgggtaacagacgagcttgggacacaacaaaaaagatcctctaaagaagtagccgaactcgataaataggcgacgcgacatcgggatcggtggtacctgctaagtatttcacgc

SEQ ID NO: 3422 - DNA, 171 bp, Glycine max
agcttaattaacatcctattctgtgttgcaactttttgaattggttcgtctcccacctacgccggggtacttttctagaccattaattcgaaccacaaaaatggttgaacaagttgataaaaaagaaatggttgaacaatttacacaacattaatattgtcgttgaaaatt

SEQ ID NO: 3423 - DNA, 631 bp, Glycine max
  unsure at all n locations
tgatccttgattcttgaattcatccttcttcttgaatcttgaagtgttcttcaacttttcctcttaagtcttgaattgttcttgattccttcttgaacatcttgaactcatcttttgattgacttttgagctttttgttatcacctttgtcatcatcttttgttatcgttattgttatcatcaaaacacctttgattcaccatgaagctttgcttctacaatctccccctttttgatgatgacaacttctgaaatcaagaaacacacacacactttttcctagtcgatcactcacataaattctccccttttgtttttgaatttatgcttatcttaaaattaagttgattactcatgtgaattcttgatttaatcccatttctctccccctttggcatcaacaaaaaagccaaagtgcgtatcaaacttaaagtatacaaatataacttacacatccatacaatattcatggaaaaatatcaaccaaatcatgaagcaagaagcaagaaccatgaagcaaccatcatgaatagattaattataatatccacatagtcaaataacatacttaatatttgttcaaacataccatgcaaantaaagaaatagtaaattggtcaaatatcataat

SEQ ID NO: 3424 - DNA, 95 bp, Glycine max
agagaaagattccatggaggaagaatttgccttagagacacagagagagagagagagcaccagagagatgagggagcctaggaattgaaggggat

SEQ ID NO: 3425 - DNA, 429 bp, Glycine max
tcatgatgatgaatcaagtatgattcaagtagttttgatgattacataaagcccaaaagaatgatgtcaagattgagtcaaaaagttcaagaaatcaagaagattcaagattcaagagaagttgatttcaagattcaagaaaagacatcaagaagaatcatgattcaagagaagatgaattcacaagggaagtattgaaacggatttttcaataaccaaacatagcatagttttgttttacaaaaagagttttctcaaaattttctaagttaccagagtatttactctctggtaattgattatcagtttcctgtaatcgattaccagtgataaagtttgatttcaaaagcttttaactaaatttgcaacgttccaaaagttttttaaatggtgtaatcgattacaatatattgtgtatcgattaccagc

SEQ ID NO: 3426 - DNA, 417 bp, Glycine max
ctgagtgcatggggaacacattactcgagtccccgtctgtgttgttagcgaaagagctcgacaggcttatcttggacggcatgtgtgctctatctcacctgaaaaatagctttcctcacatcgtcgacacacagtgcgtgagtgactatgttagtgtcgaccatgttctcgtgaatctggcgcacttggtactgtgttatgcgtttgtgcgcttacccccttgatggatatgttccaactgtaagcgaatcacaactcgatcttatgctgacaacaatacaaaccttgctgacgttgttctgaactttatgcttgaagggcctggtgagcgtctttactatcatgttgaggattgctcttggccctaattccactgctagtagccttatttaaagaattttatatccttctctattc

SEQ ID NO: 3427 - DNA, 151 bp, Glycine max
tttaatggaggattttatttagaagaagggggagcacgaaattgatggaatataatagggaaagaagtggaaatttgaaaagtattttataagattttcattcatgaaagttacaaaaagggttataaatgcttttatttatagagtaggt

SEQ ID NO: 3428 - DNA, 676 bp, Glycine max
  unsure at all n locations
tcaccttcttccctacaagacgagactcactatgtgatgaatcacccgtagagtcctcctgcctcgctgtcttcttgcccatctgtttgcttaattctgtcatgatcacactctgctgttgcctttgctgcgcatgttgttgcatttgcaaagcaagctcctgcagcgtcgtcacgttttcaacctgagtttccaaagcttcaagtcggtcacccatccttgtcatgaacaatctccgccacagagagcgatttgaaatccggtaggtcggaccaattgatgggttatataacagataacaaaataacacagcaaaagaatggataatctgtaattatattgatggaagaaatgacaaattacagataaaacaaagatagaatgtattgatagtgatagctatcaacccaaagcactaacggcttccctcacctcaaggtgatctcatttctctctcccaatctcaaattctatcgtgattattctctcttccctccgcacactaaatactaactacttcacgtgctcctcatcaccctttntgccagctcatcatctttcattccccttccatggtttctcttgtaaactctccacacctggggcgtataattctcctcacgcccacttcatatttttgttctataagcagcagtttaattgacagaaaccaaaa

SEQ ID NO: 3429 - DNA, 870 bp, Glycine max
  unsure at all n locations
aaaaaaggaaagagggggaaaaggagggggaagggaaaagaaaagggatattatcttgatagtgaagaggagaagaatggggcggggagggggagggggagagaaatataactgcaaaaaatatggagaggaaaaagattggganaggggaaggggaaatgggagaggtgggagataaaaaggagaaaaagggaaagagggagttagctagnnnnnnaggaggggagagggagggggagggnaggaggagggggaggagggggagggggggagaggagagggnnnnagagnagggaggggggaggggggagggaaagggaggggggggggagagagagggggngggaggagggaggggnagnnagggggggaagngggggnaggggggggagggggagggggggggnagggggagggagggggggagggggggnagaggggagaaggggagggggagggagggaggagggagggaagagnnaggggggggaggggaggggagnnagggggggagggagaggagggaaggagagaagggaggaggagggggagggaggaggaggaggggggggggggaggnaagggggggagggaggagggggggggaggggggggggggaggggggggggggggtgtgggggagggggggggggggggggagaagggggagaggggggagggggnaggaggggggggagggggaggnnagggaggaggggggnagnaggggggggagggagggggagaggggnagtaggaggggaggggggaggggaagggagannnagaggaagaggagaggggggaagnagagggaagggggaaggggaggggaggggagggagagaaggggaagnagaggagggggg

SEQ ID NO: 3430 - DNA, 316 bp, Glycine max
tttataagcacatttcttatttattgcgtcgagactatgctggtgtttttgttctgcgttttacagactggtttagacataatcctatacactattttttactgtgaccattttctgtcaccccttctctgtcaaacgtaattgggcgactctttgtggatgatcattctatcctgtccgggctcaacatacaaattagactgtgactttatatattgttaaacgcaaaggtctaaacatggctcagtctatatatagcgttagtgcgacataatgctccatcacacgaaacgaatgaaccctcactttctctttc

SEQ ID NO: 3431 - DNA, 169 bp, Glycine max
agcttttcctctggttgttctgctggggtttcctatgttagagagaaggagaagatattagagcctcaatttcaatgtctctgtgcgaggggcatatctctctttacagatattattttgcaaatcccaacgataggaatgcgccaaaataagttccaaaagtgttatc

SEQ ID NO: 3432 - DNA, 188 bp, Glycine max
tgtagccaaatggacttaccttgaattaattcctttttatttcttctttgagcctatgttcccctttctttggtctgaagctcattacaagcctcaagtgaaaaaccatgatatcaccctacccttaaggaattttggagctttggaattgttttgggaataactgtgtgtgtgggggggggggacct

SEQ ID NO: 3433 - DNA, 513 bp, Glycine max
ttgatgatgtggtcttcaccgatgaaaggatcaaagtatgtcttataagaggcaaatctgatcatcatgctttgatacatgccaaaaaaaactagggcaaatgaagagggtgagaatgagggagaagcccatgctgtggctgccattcctatacagccatgtttcccaccaacccaacaatgtcattactcagccaataacaaaccttctccttacccaccgcctagttatccacaaaggtcatccctaaatcaaccacaaagtctgtctaccgcacttccaatgacgaacaccacctttagcacaaacctaaaacaccaaccaagaaatgaattttgcagcaagaaagccttataattcaccccaattccagtgtcccatgcttacttgctcccatatctacttgataattcaatggtagccataaccctagccaaagttcatcaacctccatttctctgagaatacgactcgaacgcaacttgtgctttgcacggagaagtactggggcgt

SEQ ID NO: 3434 - DNA, 163 bp, Glycine max
  unsure at all n locations
agcttagtaagccttggtttgaagggacgtgctagaatataagaaaatatcaaaagtatcttatcatatcttagattatccgctaggattagnttccctatttcctcattatctcttactattagttcccatgtttccttatcttttcatgatttgtttcctt

SEQ ID NO: 3435 - DNA, 490 bp, Glycine max
tgcttagtccttatgaaaaggaagaagcttgaaacctatcctatcattgaaatacaactccaccatatgaaagtttgtaggtagcacttcctccccatgcacatggacatttcatgcagctgatttgcgggccttggtttcattgcattggaatcataaaccaaggctgcaagaaggccatagagacatgaacctaaaggaatgttagtgatgaggatattgtggttcacaccaacactgtttgggccaaatagctctgaggtaatagacactgctgcagaaaacacaaagcctgaactcagccctatcaaggcagtgcctatgtgtaatgcagctccactgccagatatggccagcaaaatgaatgcaattggtgttagcaccaagcctgctccaaaccatccagctcttgcaatgtgtatcttcctgcattgtcatacaacattagatgaatttacgtgcaatgttggtttcgtgacatgtcctccca

SEQ ID NO: 3436 - DNA, 1516 bp, Glycine max
  unsure at all n locations
ggctcttgttgcgcccgcgcgcgncctctgnntctanctcactctctcttttgtgctacgtgcnctccatcacccgtgttcgttttttattttctttatctctgtgtgctccccggggcgccgcatctcctcgtctcgcgcggaggtgcggttcgtgttgcgacgtcttgntganacatatantccacttcctccctctctctctcctctcacgcgggtgtgtttgccgtggtgtgtcgcatcctcgcccttcctccactacggcgcgcgtcttcttgtcttctcgtgcgtggctctcgctgtgtcttctctcctcgcgcgcgntgtgtctagctcccgttctctcttcttactctgtactgcttcacctcgnnnnnnnnngtntnnnnnnnntnctnngnctgtcgcgntcgccgcgtcgntgcgcgcgncgctgcgcgcgcgnnnnctcgggcctgcgccgcgccgggcccnnnnnttcctgcgccgcgnnncggcggcgcggcgcggctcgcggtgctgntcgcgnctgtcgcntcgcgcgcgnnncgncggcgtctcctgcgctgcgccgncctcncgcgcgccgnnnnnccggcgtcgntgcggcgcgccgcgcggtgcgcgccgcgcgncgcgntccnncgccgcggccgcgcgctgctgnnnnnctcgcgccgcgccgnccgcggcggncgncgcgcgcggcgcgcgcgtcgtgnncgcgtcgcgcgcgcgcgcgccgnnctggncgccgcgcggccgcgcgcgcgnnnncgcggcggcgccgcgcgcgcgcgcgctctccgcggcgncgtggtctnctgngcgcgtgctgcgnnnntgtgtgtgcgcgccgcgcgcgcgtggcgcgnccgncncgnctncncgcgcggcgcgcgccgcgcgcgncggcgtnctgttnccgcgtggttgcgcggcggncnncgnncgcgcggcgcgcgggcgcgcgcgcccgcgccgcccgcgcgtccgcgcgcgctggcggcgcgcgcgcgcgcggcgcggcgcgcncgnccgnccgcgcgcgtgntgggcgnntgcgccggtcctgggcgcgctcggcgcgcgcgnnnccgcgcgcggnnttcttctggtcggccgcgccgtgcgtcgtggcgcgccgccgcgcgcgcgcgcggcggtgcgcgcgtgncgctgtggcgtcggncgcgncgtcgtgcgcgcggttgtcgccgccgtgcttcggcgncgtgtcgctgccgccttctnnncgcgcgcggcgcggcgcgcgcgcgcgcctgtttnntntnnnctccgcgtgtgcgccgcgccgcgcgcgnnnncgcgcgcgcggcgcgcgnngnggcggcgccgccgcgcggcgcgtgcgnctgnnnncgcgcgtgccgcgcgcgcgcgcgcgcgcggcggcgcgcgcgnncctcncggcgccgcgtcgnncgncgnnncgncccgtcgtccgtgcgcgctgtcgtgcttcttcgccgtgcgctgtctgtgcgncgnnnnn

SEQ ID NO: 3437 - DNA, 568 bp, Glycine max
  unsure at all n locations
cttgatactaagctagacgactttgttgagtcgataatactttattatttatttggacaagtttgaatatgaagganaagaaaatgaatgtgagcctttttcccctttgaaagactttgttaaaaaaatgtttaaaaatacttttaattaatatttgaatttttttttattcttagtatatatgtgaggggtagaaggtgtcacaccatatgtatatttctctttgtttatatgcttttttgatcaaaatgaaatggttttatgtaggagttttagtggggttttttttacgatggagtcttagtgtttcggattaattgaagaggatggtactattgtaacatcttatttttcataaataagttaaaaaggttttttagtaaaaaaaaataaagttttataaaatagtgagatttattcatttgataagacataaaatagagtctttttattaaataataaaaataaataaatagagtaaataatagtttatgagtaccctatctataaatagcatcttaggttcagtttcagactgacgatactctctacacctnctctttctctc

SEQ ID NO: 3438 - DNA, 408 bp, Glycine max
tcataattcaatttcgatcatctcgatatattacgggactttatcatacatctgagtaaaaaagttatgggcgattgtttttgctgagagcttcaacattcaatttcgagcgtctccatgtattacgggactcaatcagacatccgaataaaatgtttgtctttcgaattagctctcagtgtcagaattcaatttttagcgtctcaatagattatgggactcaattagacatccaagcacaaagttatcgtcgtttgaatttgctgagagcttcaacattcaatttcgagcggctcgatgtattactggactcaatcagacatgcgagtaaaaagttattgtcattcgaattaactctcatcttcagaattcaatttcgagcgtcttaatagattatgggactcaatc

SEQ ID NO: 3439 - DNA, 102 bp, Glycine max
atctttaattaatcattcctagaattgatcttatcctttgacttaaattgatagatacggaatcattagggcattgacttacagcaaagaacatcttatgac

SEQ ID NO: 3440 - DNA, 365 bp, Glycine max
gcataatattataataatcacttccaaaaattgacaaacataatttaaaagaaatataataataaccataatattaattaacaatcataatttgtttatcacaatagaaattatccaaaataaacattctatcaatttacctaagtaaacattgtatcagtgtaccaatcattacaaatttatccaaattataataattagtcataatctactataaataaaagataaacatatatcatataccaagagtgtccgaccgccaaaattcgaagaagtgaaatatgagttaacatatttttatataatatttagcatattgttattataaataattaaaaaaaaactaaatatcatgtcaacaaaat

SEQ ID NO: 3441 - DNA, 458 bp, Glycine max
  unsure at all n locations
agcttganattgaacaacagaagctctcgagaaattcaaatggtcataacttatcacaccgaagtccgattcaggcgcataatataccgagacgctcgaaattgaacaacggaagctctcgagaaattcaaatggtcataactgatcacacgaaagtccgattccggcagatagtataccgagactcttgaaattgaacaacggaagctctcgagaaattctaatgggcataacttttcacatggaactccgattcaggcgcataatatatcgagacttttgaaatataacaacggaagctctcgagaaattcaaatggtcataaaatttcaaacgaaagtccgattcaggtgcataatatatcgagaggctggaaattgaacaacggaagctgtcgagaaattcaaatggtcataacttatcacaccgaagtccgattcaggcacataatatatcga

SEQ ID NO: 3442 - DNA, 460 bp, Glycine max
  unsure at all n locations
agcttgcttgtggagctnttatagaggttggatctttgagcttcaatgaggtccttcaacggtgtttttccaccatggagatgcagcggaaggaaaaggagaagaggagaaaggaggcaccatccactagggaataagccatggaagaaggagcttcgccaccaagaatgtgccttggataagaagcttggagaggatgattcaatggacgaaaagagggagagaaagagagagggggagcacaaaattgaagaaggaaaagggggagagaagttgaactttgagttgtgtctcacaagactctcattcatcaaagttacaacaagtgttacacatgcttctatttatagactaggtagcttccttgagaagctttcttgagaaaacttccttgagaagcttctttgagaaaacttccttgagaagctagagcttagctacacacacccctataataact

SEQ ID NO: 3443 - DNA, 456 bp, Glycine max
agcttctcgaatattatgcgtttgaatcggacttccgtgtgataagttatgaccatttgaatttctcgagagcatccattgtttaatttcaagcttctcgatatattatgcacctgaatcagacttccgtttgaaaagttatgaccattttaatttctcgagagcttccgttgttcaatttcgagcgtcttggtatattatgcgcttgaatcggacttccgtgtgataagttacgaccatttgaatttctcgagagctttcgttgttcaattccgagcttctcgatatactatctgccggaatcgaacctccgtgtgataagttatgaccatttgaatttctcgagagctctccgtggtcaatttcgagcatctcggtatattatgcgcctgaatcagacttccgtgtgacaagttatgacaattagaatttctcgagagcttccgttgttcaatt

SEQ ID NO: 3444 - DNA, 145 bp, Glycine max
ttaatcattcctacaatagatcttatccttcgacttaaattgatagatacgtaatcattatggcattgacttaatgcaaagaacatcttatgaccttgataatagactttagttaattttgggaattagaaattaatatggaaag

SEQ ID NO: 3445 - DNA, 211 bp, Glycine max
  unsure at all n locations
agcttgacaagggggtcatggggagtcattntctctatatctttctttcattcacaaataattaataaggttaattaaatttttaatcccttaaattttttagcctccaatttttaatctcttaaattttttttataaattttaatctttcattaatttttttatcactttacttcttctacattattttatctatttttaattcctcatt

SEQ ID NO: 3446 - DNA, 453 bp, Glycine max
  unsure at all n locations
agcttgacacattgcttaaccacctaaaaggcaaaagcaaaccaagcttaactatcaagagtagaagctacacacgatgcttaaccactcaagacagcagcaaaccaataacagtgcttaaccaccatataggtagaagcaacatagcttaaccatcgagagtagaagctaaacatggtgcttaaccactaagacagaagcaaaacaatatttgaatgcttaaccaccatanaggcagaggcaacacaccaatgcttaaccaaaggcagaaatttgacatcaatacttaaccaccatggacagaagcaaatgactgttttttttataaaaaaaaataaacacctaaaacctcttgatgaatggaggggacagcaatagtaaacagagaatatatatacagcagaggcaacacaccaatgcttaaccatccatggcagaaatctgacatcaatg

SEQ ID NO: 3447 - DNA, 445 bp, Glycine max
  unsure at all n locations
agctttntattctaaccttgaaattcaagaaagtaccttgatttctgaggtctttgggataaagatggtcattgaccaatccctcttctatgatttgacccaattgtctagtgacggtgtaccatttgaagttgcactggatgatgattggaagtttgatttttttgtgcatgatgcccaccggttggtttgcaccaaccaagcgaataggaccagaaggttgcttgccgattcattggctcttgaaagcggtatcctccattatctaattgtccgaatcttactccccagatctttaaaccttgcatgggtttctgaagaagatctaatagttatatgggcctttcataccggccgacaaattgattgggtacatctagtccgatatcgcatgcataaggcattgcgattaaatgctcctttgccttatcctcacttagttacc

SEQ ID NO: 3448 - DNA, 153 bp, Glycine max
agcttttcagaagggtaaaaggctcacattcactttcttctacatcatattcaaacttgtccaaataaataataaagtcatctcgactcaaagaaagacatataagtctcatacaactaatatagaacctatatgctaatgtcacatcctatc

SEQ ID NO: 3449 - DNA, 133 bp, Glycine max
  unsure at all n locations
agcttttgtaaacccatatcattttagtagacgcctatgcnatattttcttttgtgcaagaacaataccctctgtgagnatcgggcaaccttccaagccaagaaaaatattgaagcgcgcctaaatctttgat

SEQ ID NO: 3450 - DNA, 447 bp, Glycine max
  unsure at all n locations
agctttccacattgaattcagcacctaatgtcatattagatggaaattgtgtatcttaacataagagatttcagatggactttaatcctaatcccacagccgaccttttcacgagatctctacttaaccctttggttaaatgatcagccaaattatgctgagttctcacaaactccactgatatcacaccatgcatgattaactcccgaaccatgttgtgtctaacacccaagtgtctagacttcccattatacacttgactatatgccttagccaaagttaatatgggggaaccttattccttttgtaggaattcagttcaacaagtaacaggctgtcaacatagcctcaccccanaatccttcacttanacccgaataggataacatggaattcaccatttctttcaaggttttattcttcctttcagctacaccattctggttt

SEQ ID NO: 3451 - DNA, 458 bp, Glycine max
  unsure at all n locations
agcttgtcactatgtattntattngagtacctttcagagacttattgaaaatatctgctacgcaatcatttgaattggaggagtggtaatgacttcagattaaatcttctctctaatgaaataacaatcaatggcccactaaactgttaaaaccataatgctaaatcaatcaaaccaaaccctacgggattgtatatagatatgacaaactagtccaatagactccccttgagcaacaaatcaagtaagtttctccatataaacctcattgtcaagatcaccaaagagaaaagcattcttggatcatgaatatctagntggagtaacagccatggacaaaaacaagcaaactgaagccattttctccactggcaaggtgtccccttaatctaattcaaaaacctatagattcccttgggctattacacaagccttaagacaatcaagtcgaccattgg

SEQ ID NO: 3452 - DNA, 435 bp, Glycine max
  unsure at all n locations
agctntgaggattntcaaacgacaataactttttactcggatgtctgattaagtcccgtaatatatcgagacgctctaaattgaatgttgaagctctgaccaaattcaaacgacgataaatttttactcggatgtctgattgagtcctgtaatatatcgagacgctcgaaattaaatgttgaagctctaagcaaattcaaacgacaataactttttaactggatgtgtgattaagtcccgtaatacatcgagacgctcgaaattgaatgttgaagctctcagcatattcaaacgacaataactctttactcggatgtctgattagagtccgtaatacatcgagactctcgaaattgaatgttgaagctctgaccaaattcaaacgacgataactttttactcggatgtctgaatgaagtccgtaatacatcgaga

SEQ ID NO: 3453 - DNA, 458 bp, Glycine max
  unsure at all n locations
agcttcctttacacaaagagaagagnaaaatgaaggattgaagaaatacaagtagtggggatgtctcatccacctctaggacctcacaaccactcacaaactcatctcaagctctcgggacgacttcctcttcaagctccattctttgcaggtctttgcacaaaaaaatctctcaaaactctatggattcagacacttctctctcttgaatctctcacatgcagaagctcctcgagaaaatggccaaaatccctggaacttggacctttctctctagaaatctctaaacatgcagaagcttcgagaattgcccaaactcctctccaaaatctaatttcaggcttaaataggtggctntgtttgtgctagcgcgcttagcgtgactatggactgctcagcatgcataaaccaaaagaagaagacaagcaagaaaccaaaagatgaaacanaagctaaac

SEQ ID NO: 3454 - DNA, 432 bp, Glycine max
  unsure at all n locations
agcttctcaaggaggtgagcttagttattagaggggtgtgtgtatctaagctctagcttctcaaggaagcttctcaaagaagcttctcaaggaagtttctcaagaaagcttctcaaggaagcttctcaaggaagtttctcaaggaagctacctaggctataaatagaagcatgtgtaacacttgttgtaactttgatcatttgagaattacacttcanagttcagtacaattctgatatggctccagattgaatgtagctacagaacttgtgcaagaaggatcatgagtcgttcaaagaatacacccagaggtggagggacctggaagctcaagtagtgcccccaatgacggagaaggagatgataaaaatgatagtacacacattaccagtgttctactatgagaagttggtgggttacacgccttcaagc

SEQ ID NO: 3455 - DNA, 448 bp, Glycine max
  unsure at all n locations
agcttctacttatgtggcagggcgggcttacttcaccttcttgtctccaacgcgaactttgaccattgttcttccttcccgcgatgcttcttttcatgtctgcctgagtgggcttatagcctaaaccatacttcccacgattaccttgggtatttatcagtctagttatgccgccgctgttttttcctaaacccatcccgggctcataaccgttccccaacataactcgggccatcattaccgctgcatcggacagactangctgcccaaagagggagtccacggaggaaatgctgaccacctcataagactggaaagcagtttctaacgattcttctgcggcttccacataaggcatggaggatgggcagcttaccaagatatcttcctcgcctgacacaatgaccaagtgcccttctactacgaatttcagcttttggtggagcgg

SEQ ID NO: 3456 - DNA, 442 bp, Glycine max
  unsure at all n locations
agctnttaaccatgctgctnggaatctaatcactgaatcaatcatgtcactgagactcggaacataaatgaacttctcccttgctatcattctttttctctattttttctctctctctagctgccttgctatgttatatatctatcttcatatacaaatgatactctctttttacttcatggtgaataattaacctacctaggtctacaatgacggactgacacttccaagagaagagtttgaatccagagaatatcatctgtggcagcgactaaacttctatatttagctgcaggggccacttctatatcagttgtggctttgtatctattgatactgccatcagaattactaatgatcaagcacaccagagaaaagatgttatttcatatacatagacctaaacattgatctactaacccgtgtgcttaaggaccatata

SEQ ID NO: 3457 - DNA, 447 bp, Glycine max
agcttggatgatagaggtttgcggttataaacatattagggtgatagattggtggataaagcagcctggacccaagaatttgcgcacttttgtctatctgatttaagttttagttcctcttctggtatgcttctttcattatctggagaagaatcatctggaatggatttagatagcgagtcaacaatcatccgcgcactatttatgctagcatgaagagttaggaactgctctactgcaggctgtgggttttgttccttatcagaattacttagctctgcatatacactgccaaaaacatcacaaaataagagtcagaaacaatctgttatgctgtattgcaggagggtgacacaatataatgcctaccatcccatagaagaattgtggaagacgtggatgattaacataatatatgcgtaaaccccagtctgtctgtatgattga

SEQ ID NO: 3458 - DNA, 381 bp, Glycine max
ttgattgtacttccactttgacaagtggtcaacacaacagaccgctccgtattattttgcccctcttctagaacaataattgtgtcaccgtgtcaactatctaatctataaacctcacatagtggggagagctgaaaccaccctatctttattctattttaaaaatgatataacaatctaattcctaaccctctttcttttctacacaccacagtgatacttccccttaccccccatgcccaccacctgcgccgagacaccctctacatgcctccatgacacctcttttccatcatttgttcacatacacaaacatacatgatcccctccatcttaacttgtcccaagatatactaaccatttaaaaaactgcgggaaaac

SEQ ID NO: 3459 - DNA, 426 bp, Glycine max
  unsure at all n locations
agcttcttagcattgccaacaaagtaagattgcttggttctgaattntccaatttaagaatagttgaaaaaatactggtgactgtccctgaaagatttgaggctactattacagccttggagaatactaaggatctgtcaaaacttaccttggcagaacttgtaaatgctttgcaatcccaagagcaaagaagaagaatgagggctgatgattctgtggaaggagtattgcaagctaaattgcaaattaaccaaggagagaaaagcaagtggaagaaatacaacaagaagaatttcaatacacaagaagcagcgggtaacactagcaacaaaagtggagacaacaacaaaggatttcctccttgcaagcactgtggcagaatgggtcatcctcctttcaaatgttggagaagacccgatgttaagt

SEQ ID NO: 3460 - DNA, 421 bp, Glycine max
agctttgagaagataaaattctataatgatgtgattatttataaattctcattgacggaggaattgttggagaaaaattcaaattctaaaataaacaaagttggtgaagattcaaggagattcttttaggaatttgcgtttcaaacctttaggattttatctagatttaaatatattattaatttgttttaacttattctacatatttgtttcttgttttaaagactacaacatgataatattcggattctgtagcgctatttagctctatatagagagccaacagaataattctacagtatatttcatctaagatcccttgaacatgtggataaatctgttgtgtgaaagttttccaacagccttggcttcattagtgcatcactctagctgctcgctctttggacacatttcgagaaat

SEQ ID NO: 3461 - DNA, 313 bp, Glycine max
agcttcccaacatggtttgaatgtagcaagaacatgggcattcaacgatggaggttacaataatgcccttcaaatttctcctggttcttacaacgagaatgtcttcaaggtatcaatcgtatcttaattaatttactaccaaaatagttgtatgctattattgtgtgcacacatgagtagttttttttttcaaaaataattaaatatattaatttatatctcaataaaagaatgatattaattactccctttcttcttatatataagactcaattacctaattcattaaaattaagaaaaatggttaatttag

SEQ ID NO: 3462 - DNA, 165 bp, Glycine max
  unsure at all n locations
atgcaagtcaatnttcaagaggcatctctgagaggatctttttcgggcatatttgcacaaaaactcttgaactaggaaaaagatagccatcatctttctgttcttagtgaaggcagtttgaaggtccccaataatagactcaaacactggggctatgcgggtggc

SEQ ID NO: 3463 - DNA, 455 bp, Glycine max
  unsure at all n locations
agcttcattctgcactctgaaaaaaggatgagatagttgcacataagagaaagcttcctgatcatgagggagctaacaaaaattttcatggaggttgaccttcttcgagtagttttgacttccagcaccctcttatccctcttccatttccacctagagcaattccaaacaaaataatggaagaagtggaaaaggagatcttggagacctttaggaaagtagaggtgagcatacctctgctagatgccatcaagcagattccaagatatgccaagtttctaaaggagctttgcacccacaaaaggaagctcanaggcaatgaaaggattagcatgggcagaaatgtgtcagcattgataggtaaatatgttcctcacattcctgagaaatgtaaggacccaggtactttctatataccttgcattattggggaacagtaaattgagaatgtcatg

SEQ ID NO: 3464 - DNA, 472 bp, Glycine max
  unsure at all n locations
ntttgcncagtcggtcccgtgatcctctagagtcacctgcggcatgcaagcttanagtatgcccgagtcattcatccctaatgatgatgtgtgaagtnatggcgatcagaattgccattccttggattatatgggtgaaccaagctcatgcttttacaaaaaggttcatcaagtcaagttgaaatatggaaagaaccgtcttgccaaaatggggccaaagatgaatcgagacacatcactgcttcgtctacttgccaaacatattaggattattggatggctttgtactttcagttcaccttgcccaaaaggcataaccatggggaaatctaaatgattcaacccatatcttgacaaaacttaactgacatattcgatacatcatgttttcatggttgcatgtaatggcttcttcttgnaagaaatanattactattactaatttattaaagtgttttttcttgttcaaaaa

SEQ ID NO: 3465 - DNA, 362 bp, Glycine max
  unsure at all n locations
gcttggaaatgatttctatacaaaaattagttgtataaagcgactaacagtcgacaagggtgttgccctcgctcctacgtatcctcgggtgcgatgaggaaatcagacctacgtagttctttaagtttgaaattttgttggttaaattgtttttatcttttttgaaagattgattttaaccgagcaaaagtcgtttaaggtgttggacctcanaatgatcttttgatttttgaaaagaggagagagtcgttaaggcattggaccttgaaatgacatcttggtttttgaaaggagagaattgttaaggcattggaccttgaaacgacctcttgatttttcttgatgaaatgaagaagcttatg

SEQ ID NO: 3466 - DNA, 457 bp, Glycine max
  unsure at all n locations
agcttggtagtaactctatggacttaaactagctagccgcaaatggtatgagaagttgaatttcttgcttctccaacttgggtttcaacattctatagttgatcactccttttttatccatcacacagttgattcccttactactcgtgtatgtagatgacatagtcattgttggaaattctatggatatgataacttcattcaagcagaatttagataatcaatttgggcattcttaagttctttcttggtgctggtgttctcagtgccaaacctgcaagcaccccttctgaacctacctttgagacttcgccaagatgtcgctcctatacctgactttcacacgcccagatatatcccatgttgaccaacaacttagtcaattttcagccctcccaacagtgagtcattatcaataagcccaacgcgtactttgngtatttgaaaaggaatccca

SEQ ID NO: 3467 - DNA, 325 bp, Glycine max
  unsure at all n locations
acagcgtgcaagctgtatgcaagccagtacatangaggcgtctttgggaggatttttttctggcatacttgcacgatatctcttgaactaggaagatgatggccatcatctttctgttattagtgaacgccgtatgaggtttcccaagaatacccacactgactggtggtatgcaggagggctgaattataaacaccaatttctttatataaaataacatagcataagcacggagacggtgtacgagtcgaactaatatttatcggccaaggacacctacataaccccggatcatcatgattatttgattgaaaactgaaatatc

SEQ ID NO: 3468 - DNA, 445 bp, Glycine max
  unsure at all n locations
agcttcaggttgctcattgactccaaattgttgcaaagaaggacagagatctgtatggtgatctgcaaaaaaacatagaccacagactctttcaataggtgcagatgcagatttctgattcatggcaagctgagttactaggttgaccaaggcatcaagttttcccttaagctttttattttcaacagatgaagatgaatccgtggccacctcatggactcctctaaggacaatagcatcatttcttgcactgagttgttttggagttggaagccatcttctcaatcaaattcctagcctcaacaagagtcatatcacgaagagctccaccactggcagcatcaatcgtactcctctccatgttgctaagtccctcatagaaatattgcagaaggagttgctcagaaatctggtggtgaggacagcttgcacacaatntcttgaa

SEQ ID NO: 3469 - DNA, 448 bp, Glycine max
  unsure at all n locations
agctnttggaaggatcgagaagtgccttatgaatcctcccgtgcttatgccaccggtacctggaaggcctctcatcttatacatgacaatcttagacgagtcaatggggtgtatgctggggcaacatgacgaatccgaaaagaaagagcgcgctgtttactacctaagtaagaagttcacaacctgtgaaatgaactactccttgctcgaaagaacgtgttgtgctttagtatgggcatcccatcgtctaaggcagtacatgctgagccatactacctggttgatatccaagatggacccggttaagaacatctttgaaaagccagctctcacgggacgaatcgcccagtggcaagtcctgctatccgagtttgatatagtctacgtcacccanaaggcgataaaaggaagcgccttagcagaattattggctcaacagcctcttaac

SEQ ID NO: 3470 - DNA, 449 bp, Glycine max
  unsure at all n locations
agctntcatcaaatatatgcatgttttcaataatgcaattagtaagccaatcacacaaaccaatcatcaaatataaatgtggattaaatattaatcgatgtcaataatatgtttagtaggttatgtaacttaatgtgaaaattttcaaaaattttaataattgcagcattagtccaattcaacttaatgtgataaatacattggtcttcaaatttcacctcaataaattatatgacttatgtagaaaaatctagcaaatgaatctagcaaaatcaaatatataaatagaaaattacattagacgatgttaattaattctccttcatcatgatcattacgattagcatgaacgtgattagcttcttcttctccgacaacattaggagtgatttgtatggacagaggactaacataggtgtccatgtatgaatcatcatcttctacattaa

SEQ ID NO: 3471 - DNA, 442 bp, Glycine max
  unsure at all n locations
agcttcaccttaggccgctcttgatggatctattcatgcctaacacaatggaccctatagactgaagaaggaacaatcaactagacctcctttggatagaggtccaatgatcctaccagcagttggcctgactgtggctttggctctgcctactatcgaggctcatcatcacagcgctagcatgtcttccccttgctatgataggccttcatgggaggggtcgagaccaataatatatgatgtttgcttcatgcgaaccatctataaaagatgaaaaaaaaaagtcattataataaacaattatatttagctaagacattgaaatacataattgaacattctatctgtctaagagtaataaanaaatatacaacagaatgatttcgctgtgtgtctcatcataatgcacaatagaatcacgatttcattgggtattatttcg

SEQ ID NO: 3472 - DNA, 440 bp, Glycine max
  unsure at all n locations
agctatcactgcttcttccttccaatccttaattcatgaaccttagatctctcctttntactcgagaaaccttcttcacattcatctttactttcatcaatggcggcctcttctgaacataatatctctacaaaccaagacacttatgctaatactgagagaagcataccattgccaacaccaacaatggccttgaattagttcttattacaggtcgtgaagaagaatgtaggaaggtgtgggaaacccatgccttgaatgagttctctctgaacactaaaaacatttgctttgcaggtccttaccaccctaaactagattatgaagtcattaggagttggttcccaacttataagaatgaacacccataatccacaaggaaaccattaggagtgactttctaaaagagaagagtggaattntcaaagcctccctgccta

SEQ ID NO: 3473 - DNA, 350 bp, Glycine max
agcttggactatgactacgaagccattatactattggaatgcgatatatgtaatcacgctctcttttgatcctgtcgaacactacacgcagactctgtttctttccattaaaaaaccttcttccttcttttgtgcttattaacaaagactttgctgtgcaagataaatgagaatgatctattcaagcatgactggaggagcagatcatgagttcaagtgctgcagatatatcctagaaatggatactagcattccttgtcggacttctcactgagattatagccactctcatcaatcctgcagatgagaatattgctgggtataagcttctggctgagcttaaatacgtc

SEQ ID NO: 3474 - DNA, 405 bp, Glycine max
  unsure at all n locations
agctnttcaacatggcatgcanaatggtagacctgatccccacaactaggaccatttttaaacttgtttttctcactcacactgtccataggtctaagcttcagtcttctcaacacgaacctctactggggtttcaactgacttagctggtttgttctcttcctctgtggttgctggtggtgctactgctgctgattctgtttcagtagtttccttaagcctctctgcttcttctttcacttcttcagttttctcctctgatttctcttctgctggcttctcttcctctgtctcctttgccaccacctcctcggtctcaactggaacttctttaggctcctctggggctacttctgtagntgttttctctactggttctgttggngcctcgatggcttcttcctt

SEQ ID NO: 3475 - DNA, 435 bp, Glycine max
  unsure at all n locations
agcttccacaacatccaagcaaaacaacattcaaacagcacaagctatcacagccaagcaaaacagagcaaaggcagaaaactctgctcaacacatcaaccaaaatcacagcttttctcacttaaagaccacagtaacaattccttcgatccaattcgttaaccgttggatcgactccaaaattttactggaagtctatagtgcataagcctacattgtggccgttgggatctactagcaaatatccagaactcattctgtactactctttccacagccaaccacacacaagcattttctgcaccaagctaaaatcctggtgcacctaatttgacagcaaaattctgcataagtgcagatttcgaaaatcacancttccctcatccaatcttgctcaaatcanatcctacaagtcccaaatcaggtatcaaacat

SEQ ID NO: 3476 - DNA, 114 bp, Glycine max
agcttgcgcttgagttgctatattatcctctgatcgactctactttttattctcttagctaaaggctcaactctcaaggacacaagctcacattggccttattattattagctt

SEQ ID NO: 3477 - DNA, 328 bp, Glycine max
  unsure at all n locations
gttgaggatggagaattgcctaagcaatcactacgcatggctccaagctccagggtgaatgacgcatgaacgaaatcgccattcatggngctccgaaaaggggttgaggatggcgaattgcactaagcaatcactatgcaaagctccaaccttcctgngtggaggacgcatgaacggaacgcaattcatgtggctccgaaaagggttgggatggagaattgactaagcattacttcgatggctccaactcgtggtggaggacgcatgacgaaacgcactcatgggctccgaatagattggaatgagattgcctaacacatacgcacat

SEQ ID NO: 3478 - DNA, 434 bp, Glycine max
agcttagaccatgtgaactgctcttgcacttccatcgttcaatttcgagcggctcgatatattatgcgcttgaatcggacctccgagagaaaagctcagaccatcatgagcgctcaagagcttccattaatcaatttcgagggtctcgatatgttatgttcctaactcagagctccgaggcaaaagttatgtccatatgaatatgtcgagagctctcggtgtttaatttcgatcgtcttgtatatgtgatgctcctgcatcgcacctccgagtgaaaagttatgaccatttgaatacctagagagcgtccgatcttcaatttctagcgtctctatatgtgatgcgcctgaatcggacctcctaatgagaagcaatgaccatctgaatttatcaagagcttccgctgacaaattcgagcgcctctatatgagatg

SEQ ID NO: 3479 - DNA, 448 bp, Glycine max
  unsure at all n locations
agcttgctcgtcttgctgatatttatcatgcagacttttctgatgatgaccgaggaacaattagggatcaacttgaaacttatgtgcttcaagtgagaagaaatgcttctttttccacttgtgaagatgttcaaagtttggctatgaagatggttcaaactgagaaacatttggtatttccattggtttataaacttattgagctagctttgatattggccggtgtcgacaacatccgttgaaagagctttttcagcaatgaagattatcaagtctaaattgcgcaataagatcaacgatgtgtggttcaatgacttgatggtatgttacaccgagcgggagatattcaagtcacttgatgatattgatattattcgaacatctaccgcacagaagtctcggaaaggacacttgcctcgtaattntatttaacccgctattgtaagat

SEQ ID NO: 3480 - DNA, 282 bp, Glycine max
  unsure at all n locations
ggatactctcagtcacctgcngcatgcaagcttcaagaacccgatcaagagtaagccccattatatattcttaatgaaagcgatatcttggaacgcatggtgaatggcccatcagcctacccagaaatttctaaaaatgctatgttctactcaccattcagatttgctatttattacaaaacatttgacatatatcaccgatattcatgaattctattgacataaaaagcgttccctctaatctctaggcactcacaacatatagagacagatagaatagtc

SEQ ID NO: 3481 - DNA, 431 bp, Glycine max
  unsure at all n locations
agcttcttatccaaggctcatcttggtggngaagctccttcttccatggcttattcccgagtggatggcacctcctctcacctcttctcctttgtcttccgctgcatctccatgttggaaaatcaccattaaaggacctcattgaagctcaagatccagcctccatagaagccccacaagcaagcttccatcaagtggtatcggagcacaagagcttcaagtaggtgctccttanacctccattaattnttttttgctttaccttctcttccattgttgtttcttcattattatccatgtatctcttcacatgtcttgtgctanatgttgttaacatgattctttataatttccactgattgatcttgctatagaagcttgatttcattntctatggttcaaatttcttgttcatgttcttgaaccatgag

SEQ ID NO: 3482 - DNA, 392 bp, Glycine max
agctttcattgttgacaactaacattgttaattgatgaccgtgatgcatgtttgtgccagatcattgacaatgtttcataatgcagaataatttattcttttgcagcattgtgatttttcaatcacacttggatttggataggttccaattaaggcaaaaattatgatatttgcttgatcaactaaaatgttctttgtacatatttttctgtgtatataatattaatttatgtatatctaatttttaatatttctgttatttattgtgattgtatttttttatttatcatgtgatgtcttgggttttatttgttaggtttttttatcattctaatcacattggtgatgatgttaatttaactgtgatgctatacttgtgaccttgctacgaa

SEQ ID NO: 3483 - DNA, 442 bp, Glycine max
  unsure at all n locations
agcttgcttgtggagcttctatggaggctggatctttgagcttcaatggggtcctttaatggtgattttccaccatggagatgtagcggaagacaaaggagaagaggtgagaggaggcgccatccactagggaataagccatggaagaaggagcttcaccaccaagatgagccttggataagaagcttggaaggatgcttcaatggaggaaaagaaaggggagagaaagagagatgggggagctcgaaattgaaggaagaaaaagggagagaagttgaactttgagttgtgtctcacaagactctcattcatcanagttacaacaagtgttacacatgtttctatttatagactaggtggcttccttgagaagcttctttgagaaaacttccttgagaagctagagcttagctacacacacccctctaataactgagctcac

SEQ ID NO: 3484 - DNA, 443 bp, Glycine max
  unsure at all n locations
agctntaattgccagcaacttactttgttaatgacgttgagctagtaaggaaaaaagggttcagttagctagctagctaggttgtgctctctctatttaaatcaagagtttacctgtgtagtagggttggcagaaaatctagaagattgagaagccaagtgctgaagagcctgaacaaatgcagtttgtccaaatttggcacaatattgccagtaaatatgacataatcccatcctctagccttccactccattaatgttctgtcaatgtcattttcatgctttgatatgtaaggcctcaacagagtctggtaaacatatcccgtcccctgcatgatgcaacattttaagtaatatatttaaaagggtgcgttgttggattcctcacgttcacactattaaccataaacactattntagttatatacttttgtagagtatcat

SEQ ID NO: 3485 - DNA, 454 bp, Glycine max
  unsure at all n locations
agcttgccgcccagctcgcccaggcgagcaaggttgcttcctccagaagaaacaaccttctggaggaatcttttggagggcccaagtggacctggttgctatttacacccccctttttactaaatgcacccccttatatatttttctgtaattctttttccgtaacgttacgaaactttacgaatttcgtaacgatacttattttcctttccgcaagggtacgaatccttacggattgatgaatatactctttttggctttcaaagaagttacggaaactcacggattgcgcaaaaacacctcttttcgatttccgccacattacggaatttcacggattacgcaagcctgctttctttaggatttctgagacgtctcgggacttcatttattgcatgtcatcaatttataatcctcggacgaaattaagggatgacagtngcccctctctact

SEQ ID NO: 3486 - DNA, 456 bp, Glycine max
  unsure at all n locations
agcttgctattaaaaccaatcttgtgtatctatcaaaactcgtttgaactggagttggtttctccttttactgaggttaactagaataccatggtcgcgggtgtgaaaggaaaagtggtgctaaaaaatattcattgggattattattctataaattaataagactgtgtttggcaatgacatgacttgatttattcaatttatgatttataaaatcnaacaggaaaatggagcaatgaattacttatccagaatgttgaagcacctcaagtacaatgttgatgcccagatttaacactaatgtttaatcttgatatttaagtgtaatgggaaaatcacccattttcactgaattatgtttagttctcatattacaatgattattgcttttctgctaactattactaatttctaattgatcatatgatgctccatcccatgtacttacagtctcat

SEQ ID NO: 3487 - DNA, 456 bp, Glycine max
  unsure at all n locations
agctnttaagattaatatttgtcatgttttctctgagacaaaaagcctatcttcacttaatttatttaccaaaaaaaaaaagcatcctcacttaatttgataatcgagttattgtattgtatcattttgccgaggagaaaatcagataggacgggcctttttaggtccaaataggatatttttaaggatagataattttgatattatctttttaaacataagttntattttatatattttttaaatattatattatgtcacttgtatgttgatattatttgcaatttcctatttaatagagcatgctgtacaagaaattatcaaaatgaagaaatcataattntatcttggttatctttttatagnnttttttctagtcttttgtggcgttttcttaggaatagaattaagtagtgtagctcaaggttgggcgtttcctaaaaaacaccataaaat

SEQ ID NO: 3488 - DNA, 455 bp, Glycine max
  unsure at all n locations
agcttatatacatctgcaacttgaattctgttacaactganaagctaactaactaattcagccaactaactaactatttctgttaaagctgtttatactgctaagagcccccctcaagctgggaatggatattcatcattcccagcttgttacaaaggtgctgaaaggtggctggtcgtaaagctttggtgaatatgtccacaagttgcattganggatgagaccggaaggagcttgacgagacccgcagtgactttgtggcggataatatgacaatcgatctcgatatgcttggtgcgttcatggaaaacgggatttgttgctatctgaattgcagattggttatcacaatataaagtggctggctgaataaatgctacaccaatgtcttggagaatatacgttaaccattgcagctcacaggcagtagatgcgagagctcgatactcagcttc

SEQ ID NO: 3489 - DNA, 459 bp, Glycine max
  unsure at all n locations
agctntganatggtgctaaccaagcgacccgtgcgtatgcacgggttgcatactagttaacataaaatcacaatatctataaaccaatatggtcagtctagtttgcataaggtcattgaagcaaacactattaccattgttgcgcatgttctaaaaaacaaaaactaagcatataatgagtagctcactctatgattagttaaggctcgaattctcacaaaaggaaacgtatctgatcttctcttaaaagaaattgtatctataagataatatttgtgaaaacaatacattaactagtattttaacgtgaatttatatcatttaaagtgaactaaaatatgtaaatacatgataaccaaattattgatacatgttaattaattaataataaaattgtataaatattattttaattcttgaaagtacattnttagtatttattaatttcagtaattaaat

SEQ ID NO: 3490 - DNA, 403 bp, Glycine max
agcttcattgcctaacaagccaacttacaacagcaagccccaagagactcatcatatggatgcacagaccaaagttgcgtatgtaaaaaaattgtatgaccaagtgaaggtgctaattgcaaagaagaatgaaagctatgccaagcaagcccaaaagaaaaggaaggaagtggtacttgaacccggtgatgatcttggacatttgaggacaaatggtttccaagaaggagggaatgatgagaatcatgaaacaggccaaatacagtctaaaggcccaagtggagaaggacgaacgcccaagtggagaaggacaaagcccccgagtggagaaggatgaacgcccaagtggagaaggatgaacgcccacaggcagagacactatcaagactattaattgatgctg

SEQ ID NO: 3491 - DNA, 414 bp, Glycine max
agcttaacttaaataccttcaattttaacttatgtgcttatatgataagtccaaaccagttctgaagaagctattctaaatggccccaaattgtattcttgagtctttaatgctcgtgctgaccaagcttctgttcctggcctgtttattttcttcactgaaataatttgtgttctgtgctgacgagtgtgctgtaagaaactgactttggcgatcttaacctacctaatactctattttgaaaacaggaaaaaccgagtccatggatccaaattcaagaattatggttcctgaagataggcatggactccatgcaattgatattttggaccctgacttggtatgcttgttttaaagtttgttgaagtgcaatgcagatatccaagcaagttattcatgaatcctatataattc

SEQ ID NO: 3492 - DNA, 392 bp, Glycine max
agcttctagcacaatggacttaccttgaattaattcctttgataatccttttgagccttgtgtccctttgcttgattggacgctcactacacgccttaagtgataaaccagtcgatatcaccatatccttaaagaattttggagctttgcaattgatttgggaataagcgcggagggttataattcctattgacataaaagtgttccctctaatctctagtcatcacaaacatagagagacagaaagaatagtcgagggagtgaaatcttgtttttctcttatttcaaggaatcatagtacacaagagagaaacctcattatggagaaaggtacgcattgtctatctattatttgtgagaatcatatatttcaagaatttattgggtttcta

SEQ ID NO: 3493 - DNA, 440 bp, Glycine max
  unsure at all n locations
agcttaaacaaatccaaaagagaaagaagctacataacataactaattgtacctgtaggaattataagattgttttgagagtgaaagatcgtaacaactaacactgattaaaaaaaaaaaaaaaactaattgtacctgtattggagacatatccctttgcatataatcaagaggggtccaagaggcaagcttttcacaagttttagaacccanaatacagcctctaatagtgttccaatagcgaggatcctgaattctcttcctcaaccatggtgagtaatcttgaagacgatactccttgtaaacccttccaggcacttccacaccaccgcccttgctagtcacaccaaaaccaaatattgtgaagcccatgagtgctgctatgaggaacaacatgaccaccaagtacaaccatagtgcacatgccacatgaaaacatg

SEQ ID NO: 3494 - DNA, 439 bp, Glycine max
  unsure at all n locations
agcttccttaagaagattcctaaagaagctagagcttagctacacatacctctctaatagctaagctcacctccttgagatgagaagctagaacttagctacacaccccctataatagctaagctcacccctatgacaaaaaacatgaaaatacaaaaaaaaattccttactacaaagactactcaaaatgccccgaaatacaaggctaaaaccctatactactagaatgaccaaaatacaaggcccaaacgaaggaaaaacctattctaatatttacaaagataagcgggcttatacttagcccatgggctcgaaatctaccctaaggctcatgagaaccctagggccttcccttggatctctagcccaatctacttggagtattctacccaatgcccttgcggngtaggattgcatcacagcagagtttgaccttca

SEQ ID NO: 3495 - DNA, 436 bp, Glycine max
agcttccttaagaagattccaaaagaagttagagcttagctacacacacctttctaatggctaagctcaccaccttgagatgagaagctagagcttagctacacaccccctataatagctaagctcaccctcatgaccaaatacatgaaaatacaaaaaagtccctactacaaagactactcaaaatgcctcaaaatacaaggctaaaaccctatactactagaatgaccaaaatacaaggcccaaacgaaggaaaaacatattctaatatttacaaagataagcgggctcatacttagcccatgggctcgaaatctaccctaaggctcatgagaaccctagggccttcccttggatctctggcccaatctacttggagtcttctatccaatgcccttgtgggttaggattgcatcattccctccaccttggaaag

SEQ ID NO: 3496 - DNA, 413 bp, Glycine max
  unsure at all n locations
agcttgttgaaattgccatgtttggatgagttagacatacccattctgttttagggtttttgtgatgatgtttgtgatgtttatatgctgagatttcttatggaaaactgttagaggtgaagggtagagttaacttagggttagaaagtgagaatgtgatgttatgagtggaaaaagagtgaggctttgagagttggaaggttaagtctgaattttgtggtaaatggaggttaaagtgagttaatcctagcttgaaatgtcatttaggacttatgagaaaggttaggctgtgctagagagaaaaacaaatgaccaaagtgaacaaagagccatttctaggacaaatttgggtgttgaagagtcaaactttgattcggtgagattntaggtgtaaatccagttcgaacaagtct

SEQ ID NO: 3497 - DNA, 450 bp, Glycine max
  unsure at all n locations
agctnggagtcaacgaaatcaggatcctaatgagtgctgaaaatcactaaaggagtaatgatgggttaattgccagtggaggtagctggtaaaggcaagggcaaagtgaggtcctccttggtggaataatgaaacagtttgagcaaggaacaatagaatacaaggtgaatacatgcaccatcaggcagtttgagcttataagcagcctttgccaatgtgttccaagatttggtagggcccataatatcttttagcaagcttcgagtaaactactaaagttcanaagatagtggattgtcgatgaggtcatagttcaccatgacccagtccccttcgtgaaaattaacatcccttcgtttagtgtttgcaatttgtttcataagggcttgtgttttcaaaagcttctttcttatttaagtgaaaactgcctctctgttcgttagaagttca

SEQ ID NO: 3498 - DNA, 450 bp, Glycine max
  unsure at all n locations
agcttcagaccaaagcaattcanaatctaggtatctaaaacccctcaatttagtggattttcaaggtttgagaagtgaaaatgagaatggggtaaatttggagcaaactctcacctcacacaagtctataacattaatctaaacttgctcaaactggttttacgcctaaaattccaccgaatcaaaatttgactcctcaacacccaattttaccctagaaatggctcttgttttcactttggtcactcatattcctcatttgcacagtctaagctttctcttaagtcctaaatgacatttcaaactaggattaactcactttaacccccaattaccactgaattcagatttagccttccaactctcaaagcctcactctttttccactaataacaccacattctcactttctaaccctaggttaactctacccttcatctctagcagttt

SEQ ID NO: 3499 - DNA, 457 bp, Glycine max
  unsure at all n locations
agcttgtaaaggtcaaagagaagtttgtaccaattgagcaagacgaaagaaaacatgtgtgtgggccatcgttgaccaatacaaggagaatctaagtctagcggcaacccatgaacaaaggctagcagatgagtatgcaaaggtatcggtcctacaagaagaaagggaagccagagaaagagtgatcgattcattacacagagaagcaatgatgtggatggataggttcgctttcaccttgaatgggatttaagagcttccaagactgctagccaaagctaaggcgtagcaaacgtgtactcggcccccaaggaagttcatgggctcctcgattattgtcaacacatgatcaatttgatggcccacataattaggagccaataaggcggtcatattttcggntaattttgacaagataaacattnttgttccttaatgaaaaataagtttgtttcag

SEQ ID NO: 3500 - DNA, 445 bp, Glycine max
  unsure at all n locations
agcttgtctcagcgtttatgcgagacggagaccaacatgctagctatcatcgccaagtaccaagaagagttaggtctagccgcggcccacgagcataggattgcggacgaatatgcccaagtatacgcggaaaaagaggctagaggaagggtgattgactctttacaccaagaggcaaccatgtggatggatcggtttgctcttaccttgaacgggagtcaagaacttccccgattgttagccaaggccaaggcgatggcagacacctactccgcccccgaagagattcatgggcttctcggctattgtcagcatatgatagacttaatggcccacgtaattagaaatcgttaggaaacttgtatggtctctcagaccttgactagatacgacttcctttntgaaataaaatgagttggtcccatgtttctactccaaaaagctt

SEQ ID NO: 3501 - DNA, 472 bp, Glycine max
cctgcaagcatgcacgcttaccattaattgcgcacctgatgtggaaaatattttctttttatgtgtcatccaccggttatatctagcatatcaccttgcaaagcttcttccacaagctcttcttccacttcttcttcactgatttcagattcactggtgatctctccatctgccttcatgatcatggtcctccaggttggacagtcagaagcaatatgtactctgcctaagcattcgaagcatattatgtttctggtgtccgtgttggatgatgagacaaaattatgcttggtttcattaacttacattgcattaaatttcattacaaaaggcaaaataaatacataaatttgacaacttgatcttatcctgtaatgatatcaatataacacacatgttataaattaccacaaatctaacagataagataaaataagagatatacacatgatcttacatatctaggagagat

SEQ ID NO: 3502 - DNA, 443 bp, Glycine max
  unsure at all n locations
agcttangttgattcaataatgaagccattatgagtaattgaaccttagtcccaacaacaggaacccactaaacgaaggaaatagaattcaatagctgaagctctgtcacaagaaattgtgtcgaaaatgacatagcctaagcttttctcaacaacatcagaagaaaaaaaaataacattatactaaacttagtaagaacacacaaaatggatcaattacaaagtgaaaatgacattatactagatctaaacaaagtacttcccagataaagcataatttgatgccatgagtcagtcatacagttattttagcaaattatttttatgataaaactaactcactatgttggagacaagctgacaaaaatacataatagtggaaacagaaatgaatagactctattatcttacattagattgtggcacanatggagcagctagta

SEQ ID NO: 3503 - DNA, 439 bp, Glycine max
  unsure at all n locations
agctntctacatgatgaatcctgatagcaatggtgctcctgaactcagtgtttacttgcttagagtctagcaaccttgcaagcttgcaagatctctgtttattatacttaattttcctctttgttttgggttattggtatactacttgcttagctcttcaatcatgaacatggttgatctagtcttctccagatttttctttttttcatgtagtatattaaggtgggtttacttttttttttgttagaataggtgagtaggctaagtaaggaagacggcgggagatagtgggtaaccaatactttacagcattgtggtgtgtggggggtgggtcatgaaaggcgtatatgtgtaattttttttccctttccaatccttttaattaatgatatgagggatggaggttaatgcaagtcatcattgtcttggcatttttagt

SEQ ID NO: 3504 - DNA, 447 bp, Glycine max
  unsure at all n locations
agctntcatgtcntaataaattgttaattctactgaaattgattattttaaaaattatgtttattatgatttttgatcggatgattataaaactttttctattgatgatatatagaaattagattctatgttataacatttaaaatataaaactacattatgaaaaatgcaatggtaagtaaattaaatactttttcttgagagattcataactaataacgcgaagttgaaatagacataacgttttaagttgaaattctattaatttacaattagtattgtttgattgagtagaaagaaaagtaaaaaaagattaataaaattaaattaaaatagaatgtacaaatataaattctgcattattttactggttattattttttttattctctttttcttcaaacgaaaccttagtattcttataattgaatgagttttttatgtcca

SEQ ID NO: 3505 - DNA, 395 bp, Glycine max
agcttgagatgaggaagtgttgaagggtgaaacttcctgcttttattgatgaccacagagtggtacctggagatatgtcgcggcggtcaagagaccttggggacgtcaggtggggtgctattgcccaaaaccaagcttgaccaatcccgacccaacccgggcatagtcggtcagtgagaacctgtgatgtacctaagcaggcgagcttctggcagtcatcagataaaaggaacaaagaccacaaagcaaggaggcttgtggtggctggccagctgtgaaacttgattgatatgtgagatatggtctctggtaatcgattaccaacgcggggtaatcgattacaaggcttataaatgaagacaggaggctaagatggtctctggtaatcgattacc

SEQ ID NO: 3506 - DNA, 489 bp, Glycine max
  unsure at all n locations
atgaaccttgatgcggcatgtacagcacgcagatgcagctgctgggacttcatgatgctgatttaaccttttagatgaccttcaatggagagattcccacatggagaggggaggcgccattcaatacggaatatgcctgggtagatagagcttcatcacctataatgggtctttggtaatgaaccttaagaagacgctttaccggaagaacagaacggaatagaggggtgtacgagattcaaggacattcatagggagagaagtgaaccattgatgagcgcatcatacgacttctatctatgaaaattacatccagtgttacacatgctaatatttatctactcgttgctctcttgactaactttcttgagaaaactctcctgtgatacgtcatctaaaaaactcccttgctaaactatagcttacatacacacacgcctctaataactgaacctacctgcgtgagaagctcacttgtagagatctctn

SEQ ID NO: 3507 - DNA, 419 bp, Glycine max
agcttataatatattgatacgctcgaaattaaacgtcggaaactctcgagaaattcaaatggtcataacttttcacacggatgtccgattcgggcgcataatatgtcgagaggctcgaaattgaacaacggaagctcttgagaaattcaaatggtcataacttttcacacggatgtccgattcaggagcatcacatatagagacgctcgaaatttaaatgggcataatttttcacacggatgatcgattcaagcttataatatattgatacactcgagattatacatcggaaactctcgagaaattcaaatgggcataacttttcacacggatgatcgattcgagcgcataatatgtcgagaggctcgaaatcgaataacgtgagctctcgagaaattcaaatggcgatacatttatac

SEQ ID NO: 3508 - DNA, 432 bp, Glycine max
  unsure at all n locations
agcttggttcgaggcacttacccgttgaagatcgaagaacgatgaagaacgaatgaagaacgtcgaagaacggttcaaacctttgcgagattcctcacggaaaacgttacggaaacgtttcggaagcgcctcggcttagattttcttcacggaaacgatttttccaagcaaattcgaaggagagagaagtgcctaaggggctgggatccttttccacttcacttcctcccctatttatagcaaaataggggagatgcttgccgcccagctcgcccaggcgagctcagctcgcccaggcgagcagggttgcttcctccagaagcaaccgccttctggaggaatcttctggagggcccaagtgggcctgggtgctatttgcacccccattnttactaagtacanccccctctgctgtttttttggtgattcctt

SEQ ID NO: 3509 - DNA, 177 bp, Glycine max
ccactatgaccctgaagaccctccacttgctcggatgacttgtacaactagagtgcatcgttgatgcgttgtatgcatccttcattgccataaccacctttgagttgtcaatgcactatagggtttgggtattgttaggagggagagatctttatggggaaaaatttttaaaactta

SEQ ID NO: 3510 - DNA, 456 bp, Glycine max
agcttaagatctatatatatattagtatgtcacagatcataataatgaatcgtaatacctatgtttctacttgaaaaatatgagataaaatcttataattaagtgcatagtataatatcagatgaacacaatttggaaaaaattgaaaataaaggggaaatgcttgaaacaaattgaaaggaaaaatacacaaaatcatgaaagtaattatgagtttgaatttattaaaatttgcagagtttcaagtcataagataagttacatgcatattaaaaatttgatttttatcaccaaggtttaagtgacttaaatgcaaagtgaaagattgtattttattagatgaaccttagttgaatagatgcattgaaactatttttgtttcaactttcaagagaacttatttattatagttggtgacaatcttcacgataaatagagagtgtctgagaagagaga

SEQ ID NO: 3511 - DNA, 438 bp, Glycine max
  unsure at all n locations
gtcacctgcggcatgcacgctcgtanaatgcatctgtccattgaagtgattgagaaacagatctatatcttataggtgttaggttgaatgtgtatcctcttaagttgcatattttctgtcatcacatgataaattaatcttattctcaatcaatatgttcataaatctcattctcaatcaatatgtactatcggaactttcgtctaacaaaatgatacatacatattggaagactgattgtttttctctttntaaaggttagtcttgttatagatctgtaagcaatgcttgtactagtgagaattaaagcaataacagaagcagaaatacaaaagaaggtagaaaagggagattaggagagtaattcctataatctattttggcaatgattatgtgacaggagaggtgctgccaattgagctagttatggagaggaga

SEQ ID NO: 3512 - DNA, 455 bp, Glycine max
  unsure at all n locations
cgctcgtgaccatntgaataactcaagagcttccattgttcaattntgagcgtctcgatatattatgcgccttaatcggacctccgagtgaaaagttatgaccatttgaataactcaagagcttccattgttcaatttcgagcgtctcgatatcttatgtgcctgaatctgacctccgtgtgaaaagttatgaccatttgaatttcttcagagccttccgttgttcaatttcgagcgtctcgatatcttatgcgcctgaatcggacctccgagtgaaaagttatgaccatttgaataactcaagagcttccattgttcaattacgagcgtctcaataaattatgtgcctggatcgacctccgagtgaaaggttatgaccatttgaattgctcaagagcttccattggtcaatttcgagcgtctcgatatattatgcgcctgaaccggacctccga

SEQ ID NO: 3513 - DNA, 432 bp, Glycine max
  unsure at all n locations
agcttgcttgtggagcttctatggaggctggatctttgagcttcaatgaggtccttcaatggtgattttccaccatggagaggggaggcaccatccactagggaataagccatggaagaaggagcttcaccaccaagaatgtgtcttggataagaagctttaagaggatgctttaatggaggaaaagaaggaaatagggaggagaacgaaattcanggaataaaagagggagagaagtgaaactttgaagtgtgtctcataagactttcattcatgaaagttacaacaagtgttacacatgcttctatttatagactaggtagcttccttgagaagctntcttgagaaacacttcttgagaagcttctttgagaaaacttccttgagaaactagagcttacctacacacacccctctaataactaagctcac

SEQ ID NO: 3514 - DNA, 446 bp, Glycine max
agcttctatagaaggttcgttcctaatttctctacaattgcatcacctctcaatgagctggtgaagaagaatgtggcatttacctggggtgaaaaacaagagcaagcctttgctttgctcaaagaaaagcttactaaggcacctgttctagctcttcctgacttttctaaaacttttgagctagaatgtgatgcctctggagtgggagttggagctgtattgtacaaggtgggcaccctattgcttattttagtgaaaaacttcatagtgccaccctcaactaccccacctatgataaagagctttatgccttaataagagccctccaaacttgggaacattaccttgtttccaaggaatttgtcattcatagtgatcatcaatcacttaagtacattagagggcaaagcaagttaaacaagaggcatgcaaaatgggtagagtac

SEQ ID NO: 3515 - DNA, 447 bp, Glycine max
  unsure at all n locations
agctnntgaaaatgttgtttttcaccttctcgctaagccaatctgttggcttagtgagtgtccgctaagcgcaacactcatgggctaagcacgaggaagactctggaagaagatgagttgtacaggtttgctaagcgcacagcttcatcccactaagcgcactgcttcagttcatctactaagcaagaaaggcacgcactaagccaaaattcaataatgtgcgctaagcggtccataagtgcgctaagcgcacgagcacgaacaaggccacctatttaagcctgaaatcagattttagaaggattttggactgggattcaaagctttgcatgtctaaggtttctagagagagaaaggtctaagttccagagagttttgagagattntactgtgggaagatctgtagagaccagagcttgaagcaggagcccggttgagagcttgaga

SEQ ID NO: 3516 - DNA, 449 bp, Glycine max
gcttatagatcaacttgatccgtagtcttcaatatattgttgaaaaatacatatatttttataatttgatttgctttcccagttgaatatattgcctatcaaggatcaactctcctgaaagccatcattggagtgcatattaaaatttaaatgaggacaatgcgcaggcttattgtgcctcattttaaaattcaaatttaattagtagaatctagctgacaagaataaagctcttgagtcttgaccgcttagtgatgcagatgttttaatattatgtccaagacctacacttaaaagttaagctgaaggttcaagattagtcttatatcttctattattaccaatgtcttttgtagttgttgttgtcatttagagtaagtagtgaagcaacctaattgagtagcaagttaggaaaattgtttttgatccaaagattaaagttagctcac

SEQ ID NO: 3517 - DNA, 436 bp, Glycine max
  unsure at all n locations
agcttgaacgtatgtaagacacatcttcttcaaccttggtgattcttgactccatttcattaaagtgcatgtctacttgtagttccaaagtgtcaaacctttcaccaacaaaggtttgaagaccatcaaacctgtccaaaatctttgaaagaagagatgaatcttcttcatcatgtccttcttcaccaacatgtcgagcacccttctttacccaagagccatcatgttctttttgataaccaaaggatgctatgactgaagcgcctataaagaaggatctcttgattgaaacatagggttcaaaatcaagagggatgttgaagtgttgaaggaaaagggtaacaagatgaggataaggcaatggagcattcaatcgcaatgccttatgcatgcgatatctaacaagatgtgcccaatncaatttgaaacctttatg

SEQ ID NO: 3518 - DNA, 446 bp, Glycine max
  unsure at all n locations
agcttattatggttagatgtagagaatgaaactagtacagatttttcaaatttcaaattttcatttgttataaaaagaaaaaataaaagagaaaaataaatttaaaaattaaaaagtattttttttccttttttctaatttaaatttaactttcttctttttcttcatcccaataaattgtgaatgattagttctttgttctaaaaattcaaagtcaggaatttatgtatttatttagaagcgggaaaggaataaaaaaaaggtgccagctatttccaacaataaacgtggcccgcatggatgagataattcgaaaacgaaatagacggccacgatcttcctaaatcacatttgcggttcatttgccacaacttgcctttnttaaaccaaactgcgggcacctcaggcctcagccacacaaagccacgttcgttaaaaatagaaag

SEQ ID NO: 3519 - DNA, 389 bp, Glycine max
  unsure at all n locations
gtgcgctgcggttcatactcgganagaggaggttgtgtcaggatccactagcaccgcattggtacccgcgtatattttctattaaagcattcttgtatacgcttatgaacactattctatatacccatagtggcgagatttcctaatgactgatagaactggacggacattccatttgaggtcatctaagcttctctgtacggtaaaatatcctcaggaataccacttctcatgtcctatactgtccttggaatgatgataagcttatattgtgcttggggttaggagacaaaagctgtctattattatacaaccaacttggtatagcagtcgcttccctcttccctgtttttctgattggcgtgctactttagacaattttgaaaatg

SEQ ID NO: 3520 - DNA, 443 bp, Glycine max
  unsure at all n locations
agcttgtgtattgttacattctactaatatatggaattgcccactgctttgcttgagaataacaattgcttgaccacaacagcgctggaggcgacaagggacaatggtctttcaaataaacctgttgtacatgaacaaacaatatatcatacgctgaccgtgccaaacgaaccagcgaagtcattgcataattgttatactaactataattcatgaacctgaacaaaatgatttccaaacacatgaccgacacatatgatgcggtggccagaagaatcaggtggtggttgacttctaagagggaaaaatgtcatgctntgttgtcgggacaacgatacaaggattacgttataccgtgaagcaatcacatatcccatgtccgttatatccatccacttgtccacattaacctgaatgaaccanacatacacatgtangtaatt

SEQ ID NO: 3521 - DNA, 446 bp, Glycine max
  unsure at all n locations
agctntgtccgcannaaatcacttaaaaccattttaaggtccaacgccttaaacgatcctcttcgcttttatcggttaacatggaccgttcaaaagcataaaatcaacatgtatctttagcgcttttgcgagaactacgtaggtctaatttcctcttcgatgtaggatacgtaggagcaaaagccccgcttttgtcgacctcgggagatggttagaagtccaacgccttagctttctcaccaagtaaaatgaatcattntaaggtctaacgccttatatgacccccttccaagtaaaaagaatcacttgattcgccccttttgaaagaactacgtaggtctgatttccttatcacaattgaggaatacgtaggagcatgggaaaaacccttgtcaccacaaaaagataaaaaataaaaaaggcataaaaagacttataaaaacgta

SEQ ID NO: 3522 - DNA, 459 bp, Glycine max
  unsure at all n locations
agctntgagccanaatcctgactcaccataaaccttgacccagggtgagaatgtcaatccttaccctcggaagcaaaaaaagaatagaggggaaatttccaatcaaagaaaaagagaaggaaaatttccaatgaaagcaaaaaaagaaaagaaggaaaattccccaatcaaagagtgggagaaagcacaaagaaaagaaaggaaaattcccaatcaaagaatgggagaaagtaaaaaaggaagaagaagaaggaaagaaagctcctgatcaaggatcgaaagaaaacagaagaaatgtgcagagaggtctttggaccggacaatatctgaacaatacagaattgccaccaaatgaacgaaaaaagaaggaaagggaaccacgacctanaatagtcttctccctttgattaccaaccaaaatcccgtgcgctagcgaccttttttttctcgccccgcact

SEQ ID NO: 3523 - DNA, 458 bp, Glycine max
  unsure at all n locations
agcttattgctntcctgcgaccaaattgcaaaatatctaaaacgaataaggacggaggggaaaaaaacaaaagtacttcaactttcaacttatgtgttcaaaaggtgaaagaggaagtgaaggtaccaaaccaaaccaccaaaccaatggaagatggcagagtacttcaccacacccaactctaccaataattaatgttacaaattccgggaatttgaacatataacgattcgtcacctgtaggaaattatagccccatttcccatactcacagcatatatatatatatgccacaagatcatggtattttgtactttcagagcaccatagatggttggcattggcaagttgagagaaatatatatataaatagacatttaacatttattcattctgataaataaaagcaagctggattntttattgatgcaataaataaagaaaatattacaagaata

SEQ ID NO: 3524 - DNA, 438 bp, Glycine max
  unsure at all n locations
agctnttgcaggagaagacacatgcagagttggaggctttactgtttcacattgaatcagaaatgcgtactggtacagcacaggtggatgagtactgggaggccattttaaaacatctccacatttataaggccaaggcattctccatcatattattttccagtattcttatatgcctatgaacaatggtttctttgactgtattactaaatcggttccacatgcaggctttgtttaaaggaaattcatgctatattgctacgtaagcatttgcaatctcttgagagaccattggaggatgaagataaattagagaatgctcatgttatggtacctgaggaggaagatactgaggatgatattaaaggtatgtataagctttttgttatcatggacatttagttgttcatgacacaatttttattggctctatttctc

SEQ ID NO: 3525 - DNA, 445 bp, Glycine max
  unsure at all n locations
agcttccatcaatggctcatgagcggacatggatgccttgtgtcttgttggaacaagtgcgaaaccaaccaaacacagagggcgggcaagcaacagatgatccgtgcgctactcttttcgtaccttcggtcaaatgtgtcaaatagatctgccaagacagctaccaccggactttccttgctatggtggtatgcaaggaaagcgtcgattgctgctaggtccaccaaaccatccacgtttggaaagaggacgaccccaaaaattagcaaagctaacacatccataaacgagacctaatctccttgattggccatacccctcgccttgtcttctaggtacccccgtggtaggcccgctatgccattccgagtctgttttatgcggtccanacctcttgctgaatccttgaccacagttgcaattctgctcanagaggggagacacc

SEQ ID NO: 3526 - DNA, 443 bp, Glycine max
  unsure at all n locations
agctntcataagtaaaatcaggtgtagccatctccctaagagtcctctcatgaggtggaggttgagccatgttctcagtatgaaaattagtagtcgaatgctcaaaatcagaatattcaaaatcactagcaacagaatactcagaatgctcaaaatgctcacaatgctcgaaatgcacagaatgatcaggatgcacactatgcctaactaatctatgaaaggttctatctattntangatcaaaggattgtaaatcacctggattgcccctagtcatgcactatgtgcagcaaataatgtgttctcaaacaagcaccaagggagggttaaaactacaactatagttaaacgatatccaaatgagctgaaattntgtgagcaacaccctanaatcatgaagatagcacacaaattttcagacaaaaattcaaagtctaactatg

SEQ ID NO: 3527 - DNA, 454 bp, Glycine max
  unsure at all n locations
ttaagtcacctgcggcatgcaagcttgaaccanaaccggtgagagtgtgaacttatactgtgagtgaacgactagttgtgagtaataatctttgcatcaatctctgaattttagaatgaaatgtataaatgaggacatgattgtacatgcacaagccttttgaccaaaaagcttaccttgaatgataattatatcctttgcaccctttttgagctgaatgatattgtcaaaaatttgaaccctgaacttaattaattatctctagataccttgtttagattctcagagagcatacggttcaaggcaaatttacctcaaatttgggggagtggaactaattgcggtgcaaagaaagagataaaacatcagtacacacaacacataagatgtgtgttaaaaaaagaagaagagaaaagtgtgctaatgtaacaaggtcaaaagaaaatgaaagtga

SEQ ID NO: 3528 - DNA, 452 bp, Glycine max
  unsure at all n locations
agcttctttgagaaaacttccttgagaagctagagcttagctacacacacccctctcataactaagctcacctccttgagaagcttccttaagaagattcctaaagaagctagagcttagctacagatacctctctaatagctaagctcacctccttgagatgagaagttagagcttagctacacaccccctataatagctaagctcacccccatgacaaaaaacatgaaaataacaaaaaaagtccttattataaagacaactcanaatgccccgaaatacaaggctaaaaccctatactactagaatggccaaaatacaaggcctagacgaaggaaaaacctattctaatatttacaaagataagcgggctcatacttagcccatgggctcgaaatctaccctaaggctcatgagaaccctagggcctttccttggatctctagcccaat

SEQ ID NO: 3529 - DNA, 426 bp, Glycine max
  unsure at all n locations
ggctgcagcttttcctgctaacagggagctctgatttctagggtgattgactattgcatcttcattttccttaaaggcatctcctcgttgtagtacaacctatagcctttgtttttagcagcatcccacacagggagacatggacacaccttgtcaacaactatcttgacattagtggcccttgagatgtgcagacaaggagggtaaggagtacgctgatctcttgcatacatctgagcatgaaggttgccaagagataagcatttttcttgggttagattatgatcagctggatgcactggcaatagttntgtgataggcatccacaaatgcaccttcttttgaaattcactctttggaggttcaacttcttgcgagggatcccatctgtgcttctcanacaaatccctagggatatgattttat

SEQ ID NO: 3530 - DNA, 453 bp, Glycine max
  unsure at all n locations
catgcaagcttttagtataaaacttttgtgaaaacaaattttatgatacttttgaaacaaaaggtcaaataaaagaaataacacanaattgaaagaacacatgagaacttatatactgtttgtttgtccagttcttggtaaaccatcaaattttactataacttataataagctataagtattctttcctaagtcacttctacttcagacccaaagtagtctttagacttgtgtcttcaagcaaacactccaaatattctttgtatcatagtctcttcatacattaactaaagtcacttaaaagctggtatatgtaagtcccacaattctatcatcttatctgaataatatacaaatgaattacaagaatttctcagagttttcactaaagcacaagatttacaaagaaagcaaaagagaattgacattgaatggtacacatctcattatcta

SEQ ID NO: 3531 - DNA, 417 bp, Glycine max
  unsure at all n locations
agcttatcctcatggcctgcctccggacttcaccccccgtgccaccccggaagatttaagccaagcccctactttcgaggggcaactcccaccttatgaagactatcccgggcaagacgatgggggaaggagatacccatcttggccccctgctccacctcaaagatccgtccccacatgaactaccccaaccgaacatagtccgccatatcccggtgtcgcaaccttcccttcggcgggagggcgacgcgagactcgcgggatgcgtgttccacgaaaggaatacgcgcggagtcgccaccaacgtttatttgaggaaaacgtcggaaaaaccggaaaagacgtgatctacgaactttttagtgaaaggttcgggagtcgtatttacgcacggngaaggtattagcaccccacacg

SEQ ID NO: 3532 - DNA, 424 bp, Glycine max
  unsure at all n locations
agctntgagccaattcaaacgacaataactttttactcgaatgtctgattgagccccgtaatatatcgagacgctagaaatggaatgttgaacctatgagcctattcaaacgacaataactttttactcggatgtctgattgagtcccataatatatcgagacgctcgaaattgaatgttgaacctctgagccaattcaaacgacaataaccttttactcggatgtccgattgagtgacttaatatgtcgggacgctcgaaattgaatgttgaacctctgagccaattcacacgacaataactttttactcggatgtctgattgagttccgtcatatatcgagacgctcgaaattgaatgttgaacctctgagccaattcaaacgacaactaacttttactcggatgtctgattgagtcccgta

SEQ ID NO: 3533 - DNA, 385 bp, Glycine max
  unsure at all n locations
agctngactagagttgcaagtgtaagagctataagtgtctgtgaacaatacttcaaacttggacaagttagtgaaaaattggtggttgtcaagaactgaacataatcttgagttaagacgaaccaatataaattctttgtgtgatttcttgtctaactaacaaagagtttttgaatttgtttttgtgaatgtatgtatacatgattttgatgatgccaaagaagaatcaaacaaagttgcttcaaaggataagcatggcttcaagattaatacaagattgcttcaacaaataaagtcttacttcaagattaactcaagatcaagccttgccttanaacanagtgctttcaagacattcaagactctggtaatcaattaccaggca

SEQ ID NO: 3534 - DNA, 441 bp, Glycine max
  unsure at all n locations
tggtggagtgctgctgctnttgcttcactgaggctaanaagtgtatagaatntacagaggaagactatgttagactacgctattccattctgaataaatcaagcttaaaataacatcattagttataatgaattccatgagttttatcttaaattgagtgacatgccttctagtaactgaagctagtatctcatggtttgctctgattacagattctgaattanggtgtgaatgatctcccatgtaaactatataatgctacattaatgcanatcccaaagttagttttgttctatataagtaagtagttaggagctgctagtaatgtagctcataggctgtagatgcatgcaactcacattgacagcatgcattaagttcaagtgaatatgctccttacctttggtgtggatccattcaccanagtatacccaatgaaca

SEQ ID NO: 3535 - DNA, 457 bp, Glycine max
  unsure at all n locations
agcttctatataagctngaaccatttatcaatattcatttgttgagttntatttagaaaattagagtttttctcttttatcttagtgagagtgattctcctaaattcttgagtgattcaagaacaccctggctgtatcaaaggactttcacaacctttgtgtgttgccctcgctggaaagagtgagtctttccttcctttcatcttcacccttgttctttcaaaccacaattccagaaaatccacctctacccagaattatctcgtggccgtaactcccattttacgcactcaaattaagtgattcttgagcctaaattgactttcaaaacgagacctttcacctcgttttggaatcacctcatttggagccctgtagcttcagttattgccatttctatatttcttgccagccaccacttaacctacantttaccatcccattcattcattttatg

SEQ ID NO: 3536 - DNA, 340 bp, Glycine max
  unsure at all n locations
gcccgagtcattcatccctatgagatgttgntgaattattggcgatcataatttccattccttggattacggngttgaaccaagctcaagcttttacaaaaaggttcatcaagtcaagttgaaatatggaagtaaccatcctgcaaaattggggcaaaagatgaatcgagtcacatcactgcttcgtctactgccaaacatatttaggattattgatgtccttggtacttncaagttcaccttgacaaagatgtcatggaccatgttgaanatctaaattgattcaaccccatattctgcgtaaaaattcgcaatacttcgactgtacatcattcgcatg

SEQ ID NO: 3537 - DNA, 465 bp, Glycine max
catgcaagcttgaggattatggggtacccatcacatgtgtgactatgtgttggacgggcgaaggtgcacaacaagttttccacatccacaatgcgcgcataaacccaccattccctgttgcccaccttcaactgagctcacgtactcccacgtagcccatatcctcgtttctctcaacaccgggtccccatcaatcctctcaagcttccacaacatccaagcagatcaacattcatacagcacaagctatcacagccaagcataatagagcataagcagaaaactctgctcatacaccaaccaagatcacagctgtttctcgcttaaagaccacagtaacaattccttcgatccaattcgctaaccgttggatcgactcgaacattttactagaagcctctagtacataagcctacactgtgaccgttggcagctactagcaaacatccagactcattctgcact

SEQ ID NO: 3538 - DNA, 162 bp, Glycine max
atgcaaggaaacatgcttgttgctaggattccaagatttggctctagaattagaaaacaacatgaaaattaggattcgcttgtgagagtctttgctcgaatatgggctgccccatggttgatatagaggtagtgtgcaatacaccttgcaataatgtgtata

SEQ ID NO: 3539 - DNA, 395 bp, Glycine max
  unsure at all n locations
catctgatgttntccctttagccacaatttccaagtacttccctaatagaataaaggatatcatcatggaacttgtctcaaagaaatcttgtccttcanatgtgtgcccagcgcaaccagcacgtccatgttagcggattttcgcttcagtgcatgatatgaacctacatagaacctaatagtaatagccatagtaaaatgactataagaatctccaatttcttgaaaacaatacaataaaattgtctttggtgaataaagagaaacattaacaagaaaagaaattagaattaaatagttattgatagtcatagtaccttttgccaactatgaactgcacaggcgtgctaagaatccatcttataaacaacccaagagtaagcgtattgtggatc

SEQ ID NO: 3540 - DNA, 394 bp, Glycine max
  unsure at all n locations
ctaagcttgtgcatgggagtggngtcaataggaagaaactcttcanagatggaggaagtgtgcgtaaaagataacaagggaatgagaaaaaattatttgtaattaaaaaaaataaagaaaagtaaaattacataacaactcttagatttatccatatctaaatgataacaaattggtttttttccaattgaaaaggtgtttgatgcgaacatacaccttgtaattnttaagtgagtctatgttagcaaaccccatatatatatntttaagaggaaagagaccatgactaattcgaagttcagttgggacataaataaagtctgacaaaaaaatattttcatcaaggatcaaacttaagtactacctgaatgattcaaccttagcttcatcacat

SEQ ID NO: 3541 - DNA, 442 bp, Glycine max
  unsure at all n locations
agcttcatgatgaatcaagaatgattcanagaatgtttgattatttcaaaggtgatgacaaaaagctcanaggtcaagaacacttcatgataacaaagatgatgatcttaagaatcaaagaatgagttcaatatggttcaagaggaaattagatttcaagaatcaagattcaaggttcaagcttccaagaatcaagatcaagattcaagactcaagatttaagaatcaagagaagacttaatcaagataagtatgaaaacgttntttcaaaaactgagtagcacatagatttttctgaanacctttttaccaaagagtttttactctctggtaatcgattaccagattattgtaatcgattaccaatagcaaaatggttttcaaaaagctttcaactgaatttacaatgttccaattgatttcaaaatgttgtaatcgatta

SEQ ID NO: 3542 - DNA, 392 bp, Glycine max
  unsure at all n locations
agatgaggaagtgtagaagggtgaaacttcctgcttttattcgttgaccacatagtggtacctggagatatgtcgcggnggtcaggagaccttgnggacgtcaggtggcgtgctattgcccaaaaccaagcttgaccaatcccgacccaacccgggcatagtcagtcagtgagaacctgtgatgtacctaagcaggcgagctcctggcagtcaacagataaaaggaacaaagaccacaaagcaaggaggcttgtgtggtggttggccagctgtgaatcttgtgtgatatatgggttatggcctctggtaatcgattactaagggtgggtaatcgattacaaagcttataaatgaagacaggaggctaagatggtctctggtaatctcattcc

SEQ ID NO: 3543 - DNA, 334 bp, Glycine max
gccctagaagactggcaagttttgttaagaggcgggcgtcgacatctgaacataatcttgagttagctacgaaccgatataacttctttgtgtgacttcttgactaactgacacatagttgttgaatttgttgttgtgaatgtatgtatgcatgcattctgatgatgcctaacaagaatcgagcaaagttgcttcacaggataagcatggcgttcgagaataatacaagattgtttcaacaaatcaagtcttacttcgagattgactcaagatcaagccttgccttaatacaaagtgctctcaagacattcaagactctggtaagcgagtacca

SEQ ID NO: 3544 - DNA, 245 bp, Glycine max
  unsure at all n locations
atacacccctaagactagttcccaagcaaggactagccacattaaatgcttcacatgtcttgggagaggtcacattgcctctcaatgccccacaaagaanatcatgattatgaggggtcaagatatttatatgtagtcaaaaggagactacttctttcccttcctcgagtggaagtgaacatgaagtatgggatgaagagtgtagtgaggaattctaccctcatgaagaatgtgacctcctaatg

SEQ ID NO: 3545 - DNA, 362 bp, Glycine max
agcttactccacgctatcctccatatctagattttcagaccttcgattctcactcgagtcttcaccaaatcacgtcccgtagagaccaatcttcctctatttcactcctctttcacttccaccgatcagaatccagagaaacttcatcaaatggcagagccgtcaaagaagagaaggggatcatcttccaccgtcaccgctgctgcccatcgccgtcacggcccatccggagcacccacagcacctattcctacttctttgtgatctgcaagatcatcaacattgctttcatccgatgatcaacggctacggtacctttctcagattcttctagaataatcttagaccctaagcacctagac

SEQ ID NO: 3546 - DNA, 453 bp, Glycine max
  unsure at all n locations
actaagcttgtctatgcttataaattcaactcaatgaaataatttatagtttactataaaaatggatatcagaagatcggaataattactataccgcagatggtattcagaaatcatatacctctcatagtatcgggtgcttgccctatccaaaatatacctcttgtagtatcaggtacttagtctagccgaatacttgacaccccttatagtatcagatactcggcctaatcaaatatctgatcctttgttaaatactcggtctaaccaaatatcgaatatgtctaatgttatctttgacaacttattaaagaaagattacctagattaactaataaaaaataattaagggagatatcagttccttaatgataattatacataggagcattacctaattntaatttgatgctgacacggcacctgtaaagactttgatgcttaagttcgaat

SEQ ID NO: 3547 - DNA, 451 bp, Glycine max
  unsure at all n locations
agcttataattggcttccaaattgattttgtgtatacaatatgatggactgattccttttagatcagaaatgtgccaaccaatagccgctttacgtcgttgtagaatttgcaccagttattcttcttcttctttcttcaaaaagttgctaattataacaagtttggtctcatcttcttccaagaatacatactttaaatgtgccagaagggtttttaattttgctttgggcttttctgttggactcagtttttccaattcttcacaacaaccttgtcaacataattgtcttttgaatcatcaagctcttcatcacaagctaagcaatctctcccatagccaggttctttntccaaaggagactgtagcaccatggntgaggctaataatgttatttcctgctccacctcttcttcttcgaaataggcatcacccatatctgagtggttcat

SEQ ID NO: 3548 - DNA, 392 bp, Glycine max
  unsure at all n locations
tcatgagtgaatcaagatgattcanagaagttttgatgatatctttggtgacgacaaacaagctcataagtcaagaacacttcatgataacaaagatgatgatctcaagaatcacagaatgagttcaagatgttcacgattgaatcaagaacacttcaaggttcaagagaaaatttgatttcgagagtcaagattcaaggttcaagctttcaagaatcaagattcaaggttcaagctttcaagaatcaagatcaagattcaagatacgtatgataatagtttttcaaaaactgagtagcacatggatttttctccaaacttgtttaccaaagagtttttactctttcggtgatcgataccagattgttgtaatcgattaccagtagcaaaat

SEQ ID NO: 3549 - DNA, 351 bp, Glycine max
agcttccattgttcaagtttcgagtgttttcgatatattatgtcgcctgaatcgacacctccgaatgaagggctatgaccattcgagtctctcgagagctacctttgatcaatctcagagcgatcgatatattatgcacctgaatcgcacctccgcgagacaagattcaccgttctagcttctcaagagcttgcgctggactacttactcccgcattaacagtgatgcgcctacttaagccatacgagtttgacatcctgacctttagactgagtcgcgcacctacgttgctgaaatcctatcgtcccaagagtttttgctctctggtgagccactaccagattattgtat

SEQ ID NO: 3550 - DNA, 257 bp, Glycine max
  unsure at all n locations
tagccctagaggngatggaccttttcaggttttggagaggattaataacaatgcctataggttggacctcccagaagagtatggagtcagcaccacttttaacatttctgatttaactccttttgcaggtggagctgatattgaggaggaggaactaacagatttgaggtcaaatcctcttcaaggggaaggggatgatgcaatcctccctatgaagggaccaatcactagaaccatgagcaagaggcttcaagaag

SEQ ID NO: 3551 - DNA, 387 bp, Glycine max
  unsure at all n locations
agcttgagatgaggaagngtttaatgttgaatcttcctgcttttattgttgaccacagagtggtacctggagatatgtcgcgggggtcaggagaccttggggacgtcaggtggggtgctattgcccaaaaccaagcttgaccaatcccgacccaacccgggcatagtcggtcagtgagaacctgtgatgtacctaagcaggcgagctcctggcagtcaacagataaaaggaacaaagaccacaaagcaaggaggcttgtggtggctggccagctctggattttgtgtgatatgtggagtatggcctctggtaatcgattaccaagggtgggtaatcgattacaaggcttacaaatgaagacaggaggctaagatggtctctggtaat

SEQ ID NO: 3552 - DNA, 416 bp, Glycine max
  unsure at all n locations
tagatcaggcatccgagtcattcgttatggctgttcgaatattcataggcattccatttcaacttttaatcgccatgatatattacggngctcaatcggacatgcgagtcaaaactttagcccgtcgtaattcacccgagttttccatgtntaaatttgagcgtcgcgataggttacttgcgttattcgaagatccggtggaaaagatatggtcgtttgtatttgcgatgggcttcattcttttcctaagagcatctcgatatattatgagcatcaatcacgaatccgagtcaaacgttatggctgttcgaatttgcctggtcagcccatttctactttcgagggcgatgatatattattggcctcaatcggacgtccgagtcaaaagttttacccttcagaattcacccgagtct

SEQ ID NO: 3553 - DNA, 397 bp, Glycine max
gcaaaccggagcaccgttcaaccacttggaggtttggaacatctacttgacagaggtaatggcttcgactcccttgaggagctttacacttgaggatatggaagacgattcatctagatctggttctatgacgaggctagagagaccatgcctcatgacaccccagaccattactgatgtgcatatggggaccctttccatgtatgtccgcagatgctgctaattctatttgcatcaactataatttgatttacactactcatatatcttatatgcacgcttccccttggagcggctgcattatctttggacccttgccaaagttacatttttctcctctgaactgtagatagatgcacgcatcacggctcctaacatattgcattggcggcactat

SEQ ID NO: 3554 - DNA, 129 bp, Glycine max
  unsure at all n locations
agcnttgtaataaatcttccaaacatcctctaatatatttcttntcctcggtgtattggtctttacttgtagtgagttcattaatttctcatttgtctgtgactatgtcttttcgttctgttttaattt

SEQ ID NO: 3555 - DNA, 440 bp, Glycine max
  unsure at all n locations
tacttatgttgttaaagtagatgagctccatgacatgcaagattgtctagtcttcctcctagatgaattgtcacactctgataaaaaaaaaaaattaaaataacatgtcacacatgtctttataaaattatagaataattaactgctctttntctaattttttagcactccaatctggttcatcacagtgctttttctcctggtttacactgatggtaagcgagtacatcttataataatccaccaagcctaaatcatttactgattattgattaaatgtattactataattacattntcgtgccattattgtatatggagaggttggtactcttattattggcagggggatttaatgacttgtttctaatctctgatgcttatcataattgttgagatacaatgtatttgtcctagagactctagttatattactctct

SEQ ID NO: 3556 - DNA, 404 bp, Glycine max
  unsure at all n locations
agcttanaccaagacattgttatccagacaagttcaattcatcaaatcaacctccctttttctcaagaactgcaaatcctccattcaggaaaggagtggtattaagagaagcttccaagtcaaaatcaatgccaccaatgaagaggaaagattctgatcaactaattgcccacactgttaggcaagcaatgaaagcctctccattcccctttaagatattttaattttaatatttcataatagttgtgaatgaactgtgacaagataaattacaaaagctttgttttggttacttgcaatgtaccttttaaatttgattaagtntaatntaaaacataattaagatagttttttaacatgctcaaaactataaaagaaatacgtatcattaagtttaaaaccta

SEQ ID NO: 3557 - DNA, 334 bp, Glycine max
ggcattgcaaacgattcacacctggactctcactcctctgccacctcacaagcaagttgttggctgcccgtggatatacaagatcaagtataatgcagatggtaacattgagctgtccaaagcgagacttgttgcgaaaggatacacacaagtggaaggcttagattaccttgctactttctcccaagtgccaagctcaccatagttcaactcattcttgccctttgcagccattttgattggcatctcaagcaattagacgtgaataatgcatttctttatggagaattgatgaagaagttacatgagtctttctccagaatgcatcagccta

SEQ ID NO: 3558 - DNA, 463 bp, Glycine max
  unsure at all n locations
agcttattgggagataattntcaatcatcattgntatatgcaatgacaatcaacaaatctcaagatcaatcactagcatttgtgggtttgtacttgcctagaccgatgtttagtcataaacaattatatgtggcagtttcaagagttcaaagaaaacaaagattaaagatcttaattcatgacaaggaaagaaaaccattgaagtctgctactaatgttgttttcaaagaggtatttgaaaacctttaataagtatgtccacaagtgctactaattctatttgtatcaactataatttgatttacaatactcgtatatcttatatgcaagtttcctcttggagtggctgcattatttttggtccttggccaaagttacatttttctcctctgaaatgtagatagatgcaagtatcatggttcttaacatattgcattggtgggaatatgtggaaacaatatga

SEQ ID NO: 3559 - DNA, 473 bp, Glycine max
  unsure at all n locations
aggtagaagaagaagttcanagacattcaganatattagtggataagttgctgtcaaaagaattgttgaatgaattaattaagattaccgaaatgcaaaccaaagccttgcttttatagactcttcatgtctggtcaagagaaccattagaagagttataacctttagaaaaactntaaaaaccatttgaaaaagttgaaaactatttgaagagttacatcttttgattntgttcagaaactatcactgttaatcgattaccaaatcagtgtaatcgattacacanagcttttttgtgaaaggatgtngactctttcacaattaaattgaattccaacgttcaaacacactggtaatcgattaccanatcattgtaatcgattacaacattntgaaataaattggaacgttgtaaattcagttgaaggctttntgaaaaactatttgctactgggaatcgattacaacaatct

SEQ ID NO: 3560 - DNA, 458 bp, Glycine max
  unsure at all n locations
agcttcttatccaaggctcatcttgngggngtttctccttcttctatggcttattccttaatggatggcgcctcctctcacctcctttcctttgtcttccgctgcatctccatggtggaaaatcaccattaaaggaccccattgaagctcaaagatccagcctccatagaagccccacaagcaagcctccatcaagtggtaatcagagcacaagagcttcaagtaggtgctccttaaacctccattattttttttgctttaccttctcttccattgttgtttcttcattttttctccatgtatctcctcacatgtcttgtgctaaatgttgttaacatgattctttagagtttccaccaattaaacttgctatagaagctagatttgattntctatggttcacatttcttgttcttgttcttgaaccatgaattgtgttgagtttacgttcctttgag

SEQ ID NO: 3561 - DNA, 374 bp, Glycine max
  unsure at all n locations
atgaggaagtgttgaagggtgaaacttcctgcttttattgntgaccacagagtggtacctggagatatgtcgcggtggtcaggagaccttgnggacgtcaggtggggtgctattgcccaaaaccaagcttgaccaatcccgacccaacccgggcatagtcagttagtgagaacctgtgatgtacctaaacaggcgagctcctggcagtcaacagataaaaggaacaaagaccacaaagcaaggaggcttgtggtggctggccagctgtgaactttgattgatatgtgggttatggcctctggtaatcgattaccaagggtgggtaatcgattacaaggctaaaaaaatgaagacaggaggctaagatggtctct

SEQ ID NO: 3562 - DNA, 304 bp, Glycine max
  unsure at all n locations
ttagagtctaactgcacgcgtgcgcgcgcaagcttccttcttgccatacttacaaatttgnattttttgcctgggcgtatactttcaactagcgtttgtagaggctctatagcgcattgacagcctataagcaaactacatgtagatgctgtcgtagatatagaactctggttggtgtgaaaagttgcttttccatcatgaaaatgaaactcagattccagaaaagattgccgtatagagatgggaaaactcgaactttcttgcttcgtgaacgaaactgagtcacaatacatccctagagctg

SEQ ID NO: 3563 - DNA, 456 bp, Glycine max
  unsure at all n locations
ttgaanatctttataccctcganancnacncagcgaaactaagcttgcttcacaataacaacgccaacgatttttctactatatatngactgccgacaggagtacagaagtcatacactattcttagaatgattataaccctggtccacagataaaagacaatggctgctcacctggctcgcctctcctacttttacactccatctggtcatcacaagctctttctctggtttacactggtggaaccagacatcttataatatcccccagccaatcattcactgatactgcataacgactactataaacattctcggcatatttgatatggaaggtcgcactctatatggcaggggaattaagactcgttcaaccctgacgctatacaatgtgaacacatgatgtctcccaaacctatatactactcttggatatgatatacatactccatcagct

SEQ ID NO: 3564 - DNA, 129 bp, Glycine max
  unsure at all n locations
agcttagggatggaatacttacttgttgttgatgaacaaaaacgcacaatggaatcaaaaaatgcgaaaaaggatgaccctagggctacaaactcgtcaatcccgtgggtatggcttntgaaagggggg

SEQ ID NO: 3565 - DNA, 154 bp, Glycine max
  unsure at all n locations
tacaaaacctaggtatctctgcanaagctgctcctcttgcagtcncgagagctcttttcccgaaataggcactgtggtgtgttgtggaattntgtgccctggccttcttaaagttttgtaccctaattttgcacaagataggctttaaataggt

SEQ ID NO: 3566 - DNA, 375 bp, Glycine max
  unsure at all n locations
agctgccaatgttgtaaaattgtctgtttgtccacaggtagcaaactgttttgatttgactttgcaacgagaattgcctgcggatgcagcctggtacatatataccacaacaaattcataataataataataataataataataataataaaaaatgaactggatgcactaattaatgatggagacaagtcttggcttatttgaaagaagccatattgacatgaaactttaaaatatatactttaaaagacagtacttgaaaaaggaggacattgaccctttggttancaattctaccatttgattttcttggtacggatgacatatgtgatacgtctaaattgaaggaaatacgtataaggagattttcttact

SEQ ID NO: 3567 - DNA, 169 bp, Glycine max
agaatcggaagaagtaattggctttttccctggcgatctaactgcagatctcttgacctctgccgtggaagcagctgcataagccattcatgatatttctacaccttagatcaacatgatgaaagcagctgggtgggaccttgatgctgatgccaactgactcgaacct

SEQ ID NO: 3568 - DNA, 79 bp, Glycine max
  unsure at all n locations
agctctcccaccctacatcggcngttttttnatacntttttgtcaccattgnagaaacgacgaagacggtggaagggag

SEQ ID NO: 3569 - DNA, 424 bp, Glycine max
  unsure at all n locations
agcttatgagaaaccattaaaactttttgttttcctatacaaacancaatggaagaagcttcgtcaagtattcccattgaaaaacctttattcaaacctttcaaagttagtgagaaggctacacgaaaaattagggaacttagaaaaactaaatccttaattgaaggcgtaggtgacaatcatagtgaattactaaataagattgcgtgtttacttaaggacattccagatactccccaaacctcgaaaaatacttccaaaatggcaacaagaagtacctccaaattaattaatgctattaatgaagagagtggccacaactcagataatgatcatgatcacacaagaatataaatccacttaatttcaacactggaatacaccctccagattatattatcaacgtccgactgccctgatcttt

SEQ ID NO: 3570 - DNA, 406 bp, Glycine max
agctttttgaaaactttttgaattgctttttgagaaaacttccttgagaagctagagcttagctacacatacccctctcataactaagctcacgtacttgagaagcttccttaagaagattcctaaagaagctaaagcttagctacacacacctctctaatagctaagttcacctccttgagatgagaagctagagcttagctacacaccccctataatagctaagctcacccccatgacaaaaaaacatgaaaatacaaaaaaaaaaagtccttactacaaagactactcaaaatgccccgaaatacaaggctaaaaccctatactaccagaatggccaaaatacaaggcccaaacgaagggaaaacctattctaatatttacagagaatccaaccttgagccat

SEQ ID NO: 3571 - DNA, 405 bp, Glycine max
  unsure at all n locations
tcctcggngccatttcctgcgaaggcaaaaatttggaaagttatttntaccagtgggacactactcttataacaaaaatggcgtacaacctcctcccataaatacaaacatcaatgtaaatttagagcaagcttatgcgcatatttccttacgaacgttcactngcacaagacatcctatcaactaagaaaaatgcacccatatacaatcaaggtagcttcattacctagattatgtacttccaaggtgtatntgttatttacatcacacacgcctccttggctgaatttacatacatgcatactcaaagcattttggggtaccaaaaactgcacatgcgctcatcttggtatttctaatacccatacatatacaaacttcacgatgaatcttgactacctacac

SEQ ID NO: 3572 - DNA, 616 bp, Glycine max
  unsure at all n locations
cacgcgcgacacactcttccagtantcacgacactngcgtacactacgncngtgccgcnaggaacacgcatactccagaccaccccccccccnannnttgaaatcaattgattgccgtcgcannnacagncgannnacgagagacgagcgcgcacgcanagcaagcnncacaacacgagcaangnaagncatatatctctgttcaacaacgcgagaaacacgaacgcgcaacgcgagcagaangtgcgcggacaacacgaccacaccacgcgacaagacacaacgtaaccgaccgccacgccgcaacctcaggaaaaccgaagcacagcaaagaaccacaaaacacgcaacatagctcggagaaacaataagcaaagaagcaaagcacccccgaacaaaagcaccacaacaaacaaacgcgacgccagctgggaaagatgccccgaacgaagcgacgactaaccaacgtgaaaccaagaccaacatcaacgcccaaaccacgcgctggaccgaacaacacgaaaaaccgcnccaggaccccgcctaaacagacccattgcagcaaccggcacacgaacccaaccagcgaaacacaccggcgccgacgacgcccacc

SEQ ID NO: 3573 - DNA, 138 bp, Glycine max
  unsure at all n locations
ctcgcttgttntggaagttctatagagagaatgttccaagntttatagagcnctgagagattntgctgtgcgaagatctctagagacgagagctcgaagcggaagccattctgagaacttgagatgagcttgtgagtg

SEQ ID NO: 3574 - DNA, 160 bp, Glycine max
agagccatgagcctagggaagtaatacaaacgtactggctgaatgtaactgaaattgttggcaaccataattcacccccaacatccaacaagtcagcctccattaggtctccaaatatgctgatgcctatgttgccaaatggggccatattacgacatga

SEQ ID NO: 3575 - DNA, 359 bp, Glycine max
  unsure at all n locations
agctntgcaacaaatgtcactctactcgaaatttctgatagatatgtttgacaggaaaaacaaacacgtccaccacgagaatattgtcgcggaacgaaaccgcagtgctgtaatacagagaattcttccaccaaaacataaggaccctggtagcgcaactactccttgatcaatcgaagaagtcactctcggaaaggctctcattgactggggtgccagaatcaacctaacggcgctctctatgtgtacaaggtcgggagagctggaaatcacgctcacgagaatgactttacaacttgctaaccgatccatcacaagaccttacggtgcagatgaggaagtactgactagagtgaaac

SEQ ID NO: 3576 - DNA, 297 bp, Glycine max
aagaatatccctttatttacaatattgtcacctttaataatttatcatcagttcgagagataatatcggttttgatcaaaattaatgttaacgagcattgtttattaaggtcgtcaaaggaaacttattgatgcaatgctacccgccaagggcattggatagaagactccaagaagattgggtcagataggcaagagaaggccctaggggtctcaagagccttatggtagatttcgggaccatgggctaagtatgagcccacttatctttgtacatatcatattatgattccattat

SEQ ID NO: 3577 - DNA, 392 bp, Glycine max
agcttcttgctggctgcttagtttgtagaaacttttctcataatgtgtgtataacagaaggggcgagaagggctgcaaggtgattttacctaacatagttgtgggaaatgaacaggcagcaaggagcatttcctaatgaacaggctgttaatggaaatggaaagaatatatatggatggggaattggggagaatgtaggcataatcacttgcgacacaagcaagataccaaaggctcataattctttgtaagaatgaactattctcggttctgtactctgctttaccagtataagaagaacaggttacttccattatgttcttctgttcgccttaatctagatagtacacatcattttgttattagagctcctaatccagtatgtcctgaat

SEQ ID NO: 3578 - DNA, 464 bp, Glycine max
  unsure at all n locations
actcagcttaacacnatgtaaccaccacaccttgtaagaaagtatttatatctgatttataaataaacgattatatgagttatgggccacgccatacagattattaaaccttgtggggacagagcagtgactgttgctaaagggggaaccttttggaggagagattatctcctattttagttaatagaatatttgggttcccaacaaaaaatgacgcagctttttgcataaatatattattgaattactgactgggcgttcaatcttattgatacttcctccctcatgttntacacaaatatcattgatacgtcccaaatcatcagtcttactgaatgaaaccgggtacccacaataaccagtgatgaaactgagacggaacatatgacagaccatagacgagaccaatcagttcataatatagcatccatacaattaaatgagatggaagtcgctggatattc

SEQ ID NO: 3579 - DNA, 461 bp, Glycine max
cctctcagtcacctgcggcatgcaagctttgaaggtgcgtatcccaccatcttatcttagtttaatacttgtaatgcgcctaccatcacgattattgtctccctttccatcattgagggtaccacttgggttgccagatccctccacctttgggcgtattctttgaaagattcatgcccttttttgcacatgttttgtagttgtatcctatccggagccatatcaaaattgtactgacactgcctaacgaaggcaaccattaggcctttccgagaatggactcgggaaggttccaagttagtataccaggtgacagctgcgctagtaagacttttttggaagaaatgtatcagcagtttcccatcttttacgtatgcccccatcttccgacaatacatttttagatggttcttggggcaagcagtccccttgtacttgtcaaagtcgagcgccttgaactt

SEQ ID NO: 3580 - DNA, 458 bp, Glycine max
  unsure at all n locations
tgtagatgttgagcaatagtcatcaccgcgattgaaatgcctttattnttctctaattacaccattgtcactgttattcaacatatgatggttatgatctgttatatgttttagatcaataaggtggcttgacacaaaactgttaacaaaaaccccaccgctggtaatggtcaagatactagccaaaaagtgggcaatatgaaactctaacacctgtcacttcatctttttggcctccttatgactggagggttccgcagacctattcttgtgatcacagttttgtcttttgcctttgcaactgtctttctcctttggctctntgggagaggggaactgcactagtcgaaaggtccctacgcgcaagatttnggtaatagaagccgctagaatggtgttgctgacatttaaaagaatgagttntgaaagctagtcaaaagctaccatgtcacaccaat

SEQ ID NO: 3581 - DNA, 389 bp, Glycine max
  unsure at all n locations
tatcttaagtcacgtgcggcatgcaagctcgactagtccacataagtgagaattcntatttgtctaagacgaggagcattaagggttatcattgcctgacaataccgctcatcaacataacatttgtgtggtttgcagaattctttgagcttaggatagtaagtattgtcttcaactatcctaagagctagttctcggctaatttcaaaccactgggagccttttcaccaggcactcatgttgatttcaaattattttgtttggtattagaagcatacttccccaatgagtgagaaaagtgtacataacatatttaatagcatgaacaaacaatttataaagactcaggataagatcatgaacaagcatgagccagaaacccatgatca

SEQ ID NO: 3582 - DNA, 385 bp, Glycine max
  unsure at all n locations
gctgcataacccagcccacaagaagtttctacgattttgtgcagaaagccggcatacagcctggataatgacgctgaccacagcgtgaatagcctcacgagtggatagtaagaatnctagcctcaacaaaagaggacccaagtaatactgggaagagagggaggggtcacccaggtgatcccaaaagagtgagaccatgttgactggacaaaaatgaagaccactcgtcaaggttgaattagaccaagagaggtctgtcagaacaaagagtgagaattgttcacatgtatcgacaccttgtctggctatccaatttggagattgaagactattgaacttatgcccaatatgaacactccgccaaattctaagagatggatctttt

SEQ ID NO: 3583 - DNA, 424 bp, Glycine max
gatcttaagcaccgcggctgcaagctgtaccaagattcttttctcctttacttgtcatctccaaatcgagagggaagggggaagggggaaaagggaagaggaagaagccttgaagataaagaattgtagtcaactctttgattagtagttgtttaagaaccctaacgactttaataattttgtaattgaactcatgtatgattattaactttattttagttgccttggtaattttctttagtatgtcagtttctggccttggtccaagtgctcattttagtgagagcaataaatatacctcttaagcattttgtaaggaccttttttggttgaataattacaattttagcttggtgctaatagagaaagtgcttctctttggttctttcttggaaccctgattctcatcaaagaatttcattct

SEQ ID NO: 3584 - DNA, 454 bp, Glycine max
  unsure at all n locations
ttctttggttcttaaaattatggttagtctccttgtgtgatcagcaccttggactaaactctataaatagatatgtaacccctttcatttgaggtttgctccattgtggcggtaagtagggcattggctcttttttttggttataggattagaatcttctttgaatcttatcaaaggtctccatacttttgtggtgattcctcacttagcttatcattctcctagagtgtggcaccttccttttcatttcctgtctatgccatctttttcttttgttatttacttttccatctcttttcctcttatttcttactatcacgttctctaanattngcaccattgttacaagtctttatcttcgtgctaattaatatatttgtctntaattcctttaaaaagataaccaactcaaggaagacttgtaaaacagtatggtttctgctaaggatcatat

SEQ ID NO: 3585 - DNA, 451 bp, Glycine max
  unsure at all n locations
agcttgtccnccaattntctataaacatggggttaagtgaagtagaaaacggttcagccccttaggcacttctctctctttcgaatttgcttaggaaaattgtttttgtgaagaaaatccaagccgaggcgcttccgtaacgtttccgtgagtgatttcgcgaaggttttcgaccgttcttcgacgttcttcatcgttcttcagtcttcaacgggtaagtacctcaaaccaagcttttcaattcattctatgtacccgtggtggtccaaatttggtttcatgtatttttagtctcgttttcatttactttttatacccccttttgacgtgcttaagccatttatttaagtcatttctcgcttaacctaaaaataaaataaatttccaccgatcatttgaattgtatcatccgttaactctggttgaaataaattccgaccgatcggtcgtg

SEQ ID NO: 3586 - DNA, 470 bp, Glycine max
  unsure at all n locations
ntggtctctatagatcttcacacagcanaatctctcanaactctctggaacttggaccttctctctctagaaaccctagacacgcaaagctctgaatcccagtccaaactccccttctgaaatctgatttcaggcttaaataggtggccttgtttgtgctcgtgagcttatcacacttatggaccgcttagtgcacattagtgaatttcggcttagcgtgttcctttctcgcttagcaaatgaactgaagcgtggcacttagcgaacctgtacatcttatcttcttccagagtcttcctcgcgcttagcccatgagtgttgcgcttagcggaggctcgctaagccagcagaatggcttagcgagaaggtgaaaaatagcactttccanagcttgcctaattaacctganattgagagaacatgataatcaaacaaacaataaggaagtactaagtatttattacctatac

SEQ ID NO: 3587 - DNA, 449 bp, Glycine max
  unsure at all n locations
gagcacctgcggcatgcaagcttgtaggattatggngtacccatcacatgtgttactatgtcggcggcgggcgatggtgcacaacacgttttccacatccacaatgcgcgcataaacccaccatcccctgttgcccacctccaactgagctcacgtactcccacgtagcccatatcctcttttctctcaacaccgggtccccatcaatcctcccaagccttcccaacatcaaagcaaaacaacattcaaacagcacaagctatcacagccaagcaaaacagagcaaaggcagaaaactctgccataacaccaaccaaatcacagcttttctcacttaaagaccccagtaacaattccttcgatccaattcgttaaccgttggatcgactccaaaattttactggaagtctatagtgcataagcctacattatgaccgtcgggatctact

SEQ ID NO: 3588 - DNA, 502 bp, Glycine max
  unsure at all n locations
nttaacgcaatcataccttgagaccctgcacatccaaacacagctaactgctagaatcagagaacacgattttcaaacgatttggaatatactgacgccagtctatctatatacaattgcctgtcgcttgcttgaactctgatctcaagtaatgatatgccattactcaaaagggggacattgttgatgcaaatgaacttcatgttctgatgaagatcatgacgatgtgttgcaattgatgcaaccggcgcttttcatgattaataaccaggacaatacgtcaagactacaaggcacaacatcaagatgagcactagaatattacgaagggaattcctaattgaattatccaacagttggcccagtgatttcacataacaacgcgttttcaaggtnttactctctggtaaccattaccagaagatgaaacgactaccagtggcaaatacgctccatacacctataaaaatcgatctccagttttcagctgcactcctacccc

SEQ ID NO: 3589 - DNA, 185 bp, Glycine max
  unsure at all n locations
agcttagcatcaatcaccttgctgaccataacattagtaggaattgnggcttcccataatggatacaaacacaagggatcacattcacaaacaccattcaagtatgaaaacgtcactggtgttccgaatgcagtggattggagggaaaatggagctgtcacagcagtcaacgacctacgccaatg

SEQ ID NO: 3590 - DNA, 332 bp, Glycine max
  unsure at all n locations
tgtacctagcatccctacaagagattattaaatctttgaaattgagttaaattaattnttctgatgtagcaagaatcaataatgagtgcttcaacttttaataggtttttttttgtaaattcaaagatattttgatgttttgatgatgccaaaggaacacgtttctcaagttttattcaagacaagaattcaagatattcaagaaattcaagaaataatgatcaagaaaattcctagagtcttacgaagaatattccaagttgaaacagcaaaaggttatgcccaatgatgtaacttaatatatttntnaaagagttgtactatctgatcat

SEQ ID NO: 3591 - DNA, 399 bp, Glycine max
gcaagctttggtttcaattacgttcgtgttgatatattattggactcaatcgtacattcgagtaaaaatttattgtcgtttaaatttgctcagagcttcttttttcaattacgagcgtctcgatatactacgggagaccatcggacatccgagctaaaagttattgtcgttagatttttctaatagcttatgttctgatttttcgagcgtattgatatcttacgggacacaatcggacatacgaggctaaagttattgacgtttaaatatcttcagagcttctgttctcaataacgagcgtctggatatattacgggactcaatcggacatgcgagtaaaaacgtattgtcgcttcaatttgctcagagcttcctttttatattacgagcgtttcattg

SEQ ID NO: 3592 - DNA, 344 bp, Glycine max
  unsure at all n locations
tgtagcaaattcgaacgacaattacgntntactctgatggtttgattgagcccgnaatatatcgagaggctggtaattgaaattagaagctctgagcacattcaaacgacaattacttttgactcggatgtgcgactgtgttccgtagtatatcgagacgctcgaaattgaaaactgaagctctgagacaaagcaaacgacaataactttatactctgatgttcgatagtgtcccataatatatcaaaatgcttgtaatcgaaaatggaagctcttataaaaatcatacgacaatctattctatgtcggatgttcgattgtgtcccgtagcatatcgagacgct

SEQ ID NO: 3593 - DNA, 371 bp, Glycine max
agcttgaggtgaaacccactttaacttatcattttgtcgctggctgctaaccgggaaagacccttttgggtttggcataacctatacaatgacgactgtcatctagaaaaaatatctgtgaaagccattccttggacatggaattctactcatttgagtcttatttcacgtaagctctgtaatggctggcgtacctgatttcctaccttggcttttaatccctataaaatcatgaaagtacttttgctgaggaggttttagcacggcaccatgtatcatatcactattactgaatacgtttcttcatcatatttatttacacactatgattgtcaaggatgacgttttaactaatagttccttctcaaata

SEQ ID NO: 3594 - DNA, 352 bp, Glycine max
ttagcccatcaatcctttttctatatctatcatattaatgatccgggctcctttgaatattttacaggaaagattctatttcacctgtaatccgattcgcaatcccgtgatgtgacccgcctatttcatataaaataattccttctcttatatgtgcacataccagagttgggttagcgcttttttcttggtcaaagtaattacaccattctaccagtttagcggctgtcgcaccttctttaccttacaatacccaccactgcacaatgccctcacgtgtacctcaggcgcggcatcctctctgtcatgtgctcctttaccgcatgcaccaccaccatcctatgcctacatt

SEQ ID NO: 3595 - DNA, 210 bp, Glycine max
  unsure at all n locations
agctnttcgattcattctatgtacccgtagtgttccacattgtgtttcgtgcattnttattctcgttttgtttactttttataccccctgttgacgtgcttaagccattttacttaagtcatttctcgcttaacttaaaaataaaataaatttccaccgaacgtatgaattgtattatccactaacttcggttaaaatagaattcaaccg

SEQ ID NO: 3596 - DNA, 365 bp, Glycine max
  unsure at all n locations
gtggtaatcaaagcacaagagcttcaagaaggtgcttcttaaacctccactaatttccagctttaccttctcctccattgttgtttcttcatttttctccatgtatctcctcacatgtcttgtgctaaatgtttttaacatgatatttagaatttccaccgattaaacttgctatagaagctagatttgattttctatggttcanatttgttgttcttattcttgaaccatgaattgtgttgagtttaagttcctttgagtcttgtcttgataantttttgtggctgaaacctaaaccataaaattcttactaaaacattaaagtagaagataacctctaaactctagagagacttgttctccta

SEQ ID NO: 3597 - DNA, 487 bp, Glycine max
  unsure at all n locations
taagtcacctgaggcatgcaagcttgtaggattatggngtacccatcatatgttgtactatgtggcgattgggcgatggtgcaagtcgactttccacatccacaaatcacacataaatccaccatccccagttgcccaccttcaactgagctcacgtactcccacgtagcccttatcctcgttcctctcaacaccgggtccccatcaatccctccaagcttccacaacatccaagcaattcaaaatccaaacatcatgcactatcaaaaacaagaaaacagggcagaggcagaaaactctgcccaaaacacaaaccaataccacaactttccttactcacataccccagtaacattctcttcgttccaatttgttcactgttggatcgactcanaanatttactggaggtccctagtacataagtctacatnttgaccgttgggatctgctagaanacgtccagaacccaatatgtactaccctttt

SEQ ID NO: 3598 - DNA, 448 bp, Glycine max
  unsure at all n locations
taagtaataataatagtaagaagaatattaataactattatctatanccattttgtggcattatgaatgacaggatgtagtgacataaagtgcttagagagttcacttgcatgtgaaaaattttcaaaaagaaaaagacttaagttaaaaggataatgcaaccagattaatacttccaaagaaaaaaatgttttgcaaagacattttcagacaatttaaatatttttatttgactatattagtataaatcatctctaatccatatattttttaatattatgttctttntattcattntcttttgatatactttgtgttttaataatttgaattcaatatgattntgtttatcaattatttctggatttgacatntacttatacgaaatttataagtttctttttttggtagtatttactaggtttaaaatgttaattggtaaagacgt

SEQ ID NO: 3599 - DNA, 559 bp, Glycine max
  unsure at all n locations
ccaccccacaccgcctgcatgcgccaaaccacccccaaaaacactcanctccacaaccccaacggatgaccattcatgcataccncacaccagacgcagcaggaagctnaattaagatngncgaaccgacaattacttttacttatcagaaccaccaccggccccagaaacgccacatccaggagcaccgcacgccgccgcaagacaacacaaacaaagaatctacatcaaccattaacgtgagcacctcatctagccctgtgcctcgagtccaaccctagccaggaatgagagcagaaatccagacaccacgaagaatacaaagccccattgccacacggaaccgacaagaagaatccgtgaccatcctttcgccactcagcacggcacaaagtaagtcgagcacaactcatacaaacgcgggggaccctcaaacgaccgccgagccctcaaaaccccccctaccgactactgcgaacccaacaggacgccgaacaaccacccacgtaccaacacgcaaccaaaacaggcaagataccactccacaacacgacaagcg

SEQ ID NO: 3600 - DNA, 419 bp, Glycine max
  unsure at all n locations
agctttaattagaacaaaaaaaacatatgcaatattgttattaaattaaaattgtgaatttttaaaaataaaggatcaaaatcgtaggaaaaaaaccaaaggatcaaaattgtagattagaaattataggtgataaaaattacaatttaacctaaaacatttaatcattatataataaaatttaatagatataaaatattaaaaagtgcaatttaatttaaaattactcttaagataactttattgattctcgtgataactatattttagagcttactttttatgtgcggaaatgacagagaatttttacatgtacaagttaataaattatggtacagaaatatgttgatggtctactttctggatattttaatatatnttttataagcatttagttcttattaccatgacacctaaat

SEQ ID NO: 3601 - DNA, 467 bp, Glycine max
  unsure at all n locations
gacattgcttctgaagatcagagttattcaaattagttagcagcatggatcccttcaatgctagcagcatacttccacagaaggtttaaagacattgacacaggctaggagaactaccactttcaccaaggataacaagttaaaccgtgattcatcactacttacgtagcctctaaccaaaacctttccacacgggttgatttcaagtaatttcatagtagtaaaacaacgatccatgactatgctgctaattcattcgcttttcttttctctcccatatagaccacacagcatggattattactaattaagttctttctgacgcacactggcacccaatctttgtagctcaccagcacctactttcccaaacaagaaatcgaagtccataactgttccacagtactcagagaagtgtangagcaaataatgattttaagggtaattaattaatcaccaaaatctga

SEQ ID NO: 3602 - DNA, 521 bp, Glycine max
  unsure at all n locations
cacccaccccctcaccaccnctcatngcttattttcccgncccccaatacgacnnatagcctgaaccgactacgcacgcgagcacttttttacaaatcgcaggatacatcatttaagcacccccggtcttcttggtaacatgcccattgcccaaattcaagaaaggaaacacacaattcatcataagcacggcatcaatgtaaaacaagggctaccacccttttcacaaaaaaaataaaccaccttactggcctaccaatcaaaggaaggtaaactgttcaccatgcttcaagatgagcaactatacaactcatggccaagactaacaaaaagtaactcatggactaaccatcaaggtatactaataactcaaaagaagcaccaaaaataacccacacgaaattaaaaggcccatgattggccctaagaggcctcgtcccgaaaccccctcctcccatgcgaatgcaggaccgacagagatacaagagaagcatttcgagaactggactggggtggttccg

SEQ ID NO: 3603 - DNA, 432 bp, Glycine max
  unsure at all n locations
tttcttgataaaagaatgattaatgatatttataaaacccaaagctataacaattntgtttgtccctatattgagttctatttctaaggatttttcaaatacggaaaattggagaggtgaaaaatattggttaagtaaaagtgttacatttgcaacattctgatgtaaaatatagaaaataggttactggaaattttctgctcagcaatgttttgggatgactggatctagattttcaataataagaatgaaccagaaaggagattaaatctacttccttatctaataaaatctgttagggaacaaaaggctggagtagttttgagctttgaatggtatttaagaacacttggtcagtctttaattcatatggtaattgtgagtatntaatatattatgaacttctcgtaaataattgactatatctaatct

SEQ ID NO: 3604 - DNA, 272 bp, Glycine max
tagatcaggtgatgtgttctttgtttggaaggcaaacatagatatatatattattaataagatcagatcagcaccagaagtactgatgaattacacataaatacaagacactaagagtgtcgccttccaaccaaaacaaaccctccaaaaatccactacaaaggataaaatatccatcccaaacagatatacaatgcacccagcccatatcaactaatataagccacacggttcgaagaccattggttgaaggatatactgaagagattctc

SEQ ID NO: 3605 - DNA, 427 bp, Glycine max
ttcacatttacttgatggggcctatgcacgtcgaaagccttggaggaaagacgtatgcctacgttgatgtggatgatatctccagagctacctgcgtcaactatatcagagaaaaatcacacccctttgacgtattctaggagctgagtctaagacttcaaagagaaaaagactgtgtcatcaagagaatcacgagtgaccatggcagagagtgtgacaacagcaggtttactgaattctgcacatctgaaggcatcactcatgagttctctgcagccattacaccacaacagaatggcatagttgagaggaataacaggactctgcaagaggatgctagggtcatgcttcatgccacagaacttccctataatctctgggctgaagccatgaacacagcatgctacatccacaacagagtcacact

SEQ ID NO: 3606 - DNA, 482 bp, Glycine max
  unsure at all n locations
attgacaccctgatgcccgtggaanccccttcactatccagactcaagcttctatttagacctcgatcggtcatctntcctgtgtcgacgctctctgtcatttcctttcgagcgagactagtgacaaatatgttgttgtcacatatcgcgccttatataacttacttgcctgtgaaaaattttcaaaagagaaagactaagctacacgataatgcaccacattattacttccaagaaaaaacgtttgcaagacttttcagacaaccaaatacttattttgccattttaactaaccatcctaatccccaaattttggaaaatatgccccttatcatatccttggatacttgggcttaatacccgactcaaatgaactgtttacaatattctgggattcgcactacttatccaaaattanagttcccttttcgttcgctttccttgcataaacaatatattcgttacaccttttacccgacccc

SEQ ID NO: 3607 - DNA, 429 bp, Glycine max
  unsure at all n locations
agcttcctcggggccattcctgcgattgcaatanttggaaagntagttttaccagcgggacattactcttaaagcaaaaatggcatataacctcctcccataaatacaaacaccaatgtaaatttagagcaagcttatgcgcatatttccttacatacgttctcttgcacaagacatttaaccgaaaaagtgcacccatatacaatcaaggcagcttcgttacctagattatttacacgtactgccaaggtgtatttgttacttacatcacacacatctccttggctgaatttacatacatgcatactcaaagcattttggggtaccaaatattgcacatgtgcacatcttggtatttctaatacctatatatacacaaacttcatgatgaatcttgactatcttcacanaaaggcgctacacttcatc

SEQ ID NO: 3608 - DNA, 606 bp, Glycine max
  unsure at all n locations
ccccgcccctccccaacacactactctagaggtcctcagggcacgaccaaccacaaaacccnnaaaaacgcgnacnnggaggannnnttggagnccccctgtgaaggccctcgaggccccctcgcaaancccncgaagaagnngangnaggagaacagaggcaggcanangatctagcaacacttatacctataatgctcgccggagaccagcacgagaagagtaaagacattgacccacgctaggagaactaccacaggcaccaaggaccacaagctaaaccgacgagcaacacgacctacggagcctcaaaccagaaaccccccacacggggagagcccaagcaagttcacagcaagaaaacaacgaaccaagaccacgctgcgaaaacaggcgcaacactctgtcccccacagagaccacacagcacggaacaccacgaagcaagcgccccaaggcgcacactggcacccacggccagcagccaaccacgaccgaccacgccacacagaaggcgacaaccggaaacgacgcacagaaccaaagaagcgcggaacaaaacgagacgcgacggcataagcaaccgcacaaaccgggaccagcccg

SEQ ID NO: 3609 - DNA, 449 bp, Glycine max
agcttgagcttcagctgctatttatctaatttatatgtacatcttgtaagaataatatgatatatgtcacagcttacaaacattgatgtaacattaaaaaataaatcaagtaactagaatatgtgaacagttctagataagggaatatcagcacaacaacaacaaacataacaaaaaggataaaaaacatatgaaaagaaagaggaggaaagaagagaataacagttgactactacaatatccttataggtattaaaaatatttgcaataacatgacaaaggaattgcttctcttaacattgtctaaaaaaaactaacatgataccatggagtaacaaagttcagatagaggtttcttcatttaatacagctcacttcaaaatagactttttatttccatttactttccgtgttagtctaaggaagggactagggagagtgacatagct

SEQ ID NO: 3610 - DNA, 459 bp, Glycine max
tcacagatccgatcatggaaggagttggcatctgccttcattatgcagtaccagtacaatacggatatggctcccgatcggaaccagcttcagagtatgactaagcgagagcatgagtccattaaggaatatgcccaaagatggagagatctcgcagcccaagtcgtaccgcccatgacggagagggaaatgatcacaattatggtagatacgttacccacgttctaatatgaaaagctgataggctacatgccagctaactttatggatctcgtcttcgccggagaaaggattgaatccggactacggaaaggcaagttcgaatatgcttccaatgtggcccccaacaacaacagaagagccctagtagtgggtgcgaggataaaggaaggagacatccacgcgtgcaccaccgccccgatgtggatgatagcaccccaaaatatctaaagctcatac

SEQ ID NO: 3611 - DNA, 382 bp, Glycine max
  unsure at all n locations
agcttaaccgagactcgcgcttcggttaatgtccagtagtttcctttgatcagattctgggccacccccctgatattggagggcgaccaactgtgcaagcacaaccagagagggaggctatcacgcacctactatgcataccggggcaagatttcacccgtgccgctgcaaagaaacgagtgtggatcatgtgcaccaacatgactactattacacagatatgtatgacattgctacttatcaacattctaccctgcagatgtatcaggtggtctgtgtcatcccgacataggtaagtatgcatatggttcaactgatttctaatgtcatctactatntggagggagcgcgaccacaatgcacccagtggacccggaggagt

SEQ ID NO: 3612 - DNA, 193 bp, Glycine max
gagagcatttcttatttaagcacttttggcttttgtttcgcgtagcttaggaaaaacgtcacttattcttctttgtttgttccgaagccatgtgtaaagtcccaagcacgttttacatcagccagagtcaccattagtcaccacaaaccatcattggtcttcatgtaaaacccacaccgagaggaactcttca

SEQ ID NO: 3613 - DNA, 387 bp, Glycine max
ggctgcagcttgaagctggagaaagctgttttgttttgctttacatgccctactcccttgagtggaatttgtattggtctgttctattaaatgttgcatcttagtccatatcatatcttttgtgcatatgcatcattgtgaataagtgggaagaaaatttttaagttagaacaagttcttcagaaggcaaaactctttgttctaatctattacagccttattgtaagcgattacaaaagttgtctaaagcttgtagagttatgtctcgtatcgatttattcacaaaagttgtcatttacacaattgcttttagacaatgattggcttattcaggagcctctactataatcgattaccatgtgatataatcgattacttctctttcta

SEQ ID NO: 3614 - DNA, 242 bp, Glycine max
agagtggtacctggagatatgttgcggtggtcaggagaccttggtgacgtcaagtggggtgctatagcccataaccaatcttgaccaatctcgacccatcctgggcatagtcagtcagtgagaacctgtgatgtacctaagcaggcgagcttctggcagcctacagatataaggaacaaagaccacatagcaacgaagcttgtgtggtggctggccaactgtgaaacttgattgatatatgg

SEQ ID NO: 3615 - DNA, 485 bp, Glycine max
  unsure at all n locations
tctgagtcacctgcggcatgcaagctngaaagcgttgcccagaacatttgctgactagagtctaaattgaagcgtctttcggtgagttaaggtcaggtggctagattttctaaattaattaacacggattacgatgtgtcgatgtgacacgaatggagttcccctagtagcatgtgaatgaaatcgtcacaatttcattactttatatttaaaaaaaaaaatgggttaaggtacgaatattgaatgataaaataaataattagaaatttagaattcactaacatgatgtcattcaattatagattttcatcacgattagattataggattatgtaatacttattttaaaagttatatttaaaatattnttaatgaatattgataagaaaactttacaccagtgtataaaaaataaaattgtaaaaaaaattatgaaaataaaatattgcattacnaattanaaggaaaacataatatttatttta

SEQ ID NO: 3616 - DNA, 477 bp, Glycine max
  unsure at all n locations
ctcagcttaggatgagctntattatgaacataagacttaattntacatatgcatctttctattggatacatccacctgtattgaacaggaccacctaatctaactttgtttgccaagtgaacaggaaagtgaaccattatgtcaaaaaacttggaggaaaaatcatctctgattgacaaagaatttcaataatttgtgattctatataatccaaatcttctacctggatcactntctaacacaaagagcgaaagaaggatccaaggtgaattaaaagatcaaccaccacactaggcattgtgcttctaattgctatttgtaataagtaatgtaacatgatatgtgtatcatgactctngtagccagaatatttgtcagtgatatgcatgcattntgaaatatttgttgcactcccatctangcaattggcatctttcaagataccacanaaaatagacttctttnttgtagtcatta

SEQ ID NO: 3617 - DNA, 189 bp, Glycine max
agcttcttggttgtgtaagaatagggagcctactacatcttacagtatgctgatgatactgttttttttggagaggctgtgtgggacaacattcatgctattaaggccatcttaagaggatttgaattagcttctggtttaaagattaattttgccaaaagccaatttggggttattggtgatggtgat

SEQ ID NO: 3618 - DNA, 459 bp, Glycine max
agcttgaatagatgtaaaaaatatcaatgaaaactcactgcttcaagtgagattatacaaacttctgaagtctctctcagcttgaagcttcaacgactttaacacgtacctgctagctgtatttgcttgtagtgtttgaatacaggttttaatacatggtttagacatatacatgtatatataaaaagtagtaacaatgtgctttacctgtacttgatataatgaaacagcttccacaagaacaccaatggacaaaccaacttcaactacaacaaagtaattcaccttcacctggagttcatataatgagtaatggcattagaagaagtcaaagccaaaccaacttcaagtacaacaaactaattcagctttttctcaaccaaactatgtcaaactacttgttggctattaaaagtgttagttattcatgtgacgggcatactattctagtttctattc

SEQ ID NO: 3619 - DNA, 477 bp, Glycine max
  unsure at all n locations
cttctacctatgacagtgctaagggatgtttccctagatagtagaaggtatatagattgttttagaaggagtgctcttttgatatcaccttttgttataaaatgattttccttcttaaaaatcttcttggaggaatccttttcctctttttccttccccttggcctttgaagagaaggccttactatccttctttttcttttgtttttctagtttttcttcctcatccctattatctttcatagttagttgatctttggccacctgtgaaggtgtttgaggatgcaacacanatttagtgccaagatgggtgagggtaatctcattagttaggccattttaaatgatcttcctatcanatttccatggccttcctaaaagaatatgcattgcctccatgggaactatatcacaattaacttcacccttttatgtcccaatggagaaaggtacctttacttgttggctaattatcatt

SEQ ID NO: 3620 - DNA, 459 bp, Glycine max
  unsure at all n locations
agcttacttggacttaacctatttccattctattaggatataaaaaagggaggaggatgatgaacactanaaccaaatgaaagcctttagcatcacatgggacaaaagtgaccatcctacagctgtcctaaactgtagggaaaaccaaaagtggggtagcacgtaccatagcagtaccccatggactcttaatattgggaagtctggaatctcccaacattntgagagactttgggttgggatggcctagtcctaagcctccacaccgcactcttcactctcgctacttgctagtgttagtggatagagtgtattcccatacccatacccatacccatgatagtacaaacacaaacacaactcaaaaccccgtaaccgctaattaacgtccttatatatctcatctgcttttttttggcggcaccaaaaccgcttcttcccactctcnttcatccatac

SEQ ID NO: 3621 - DNA, 402 bp, Glycine max
  unsure at all n locations
tcttgactgaagatggatcagtggacataagcactgctcatattgttgcatgtgctgtaaggattntggctgcagttatgattcttcaggtttttttttattaatttccaccttgtttctgttatgttgttgatgcttaagataagcgcatgattgtaaatttgataagatgttgtttccagagttctatggatcctctgttgggaacattggcattattatgtggatcatttgtctccttattgaagaaaatgcataggttgagattccttcgtcatttacgcaggttggtccacttccttgaattttggaccttattaattntcaacaataaaaattttcttttcattntttttaattaagtagaagaacgaaggttttctttttccctgcagagggggg

SEQ ID NO: 3622 - DNA, 463 bp, Glycine max
  unsure at all n locations
gagtcacctgcggcatgcaagcttccttgggccattacctgcgaaagcattatttttagttagcctacaagaaatgcttattgtacacaaaaatgacatgctaatccctccggcttacaacgaactcatgtgcacgtttaacgaaacacatttatgcacatgcatacgtaacaatatcctactattgatgtcaacatacaaggacacccaacacattctaattgccatacatctatgtgcatcttgaatagagcacacattctcatgctcaaggcgctgcgtcaaactttacacctaagtatatcctaaatattttctatttacaaactacttacacatatttgaaatatatatcatacaaattgtattgtttcactcacatttatttatatgcatattgganaactaattatatcctgcacacacacttgcattcaagagggaatttcacgctatcatgtgt

SEQ ID NO: 3623 - DNA, 578 bp, Glycine max
  unsure at all n locations
cgcccaccctccgtacacgaaaccccgccacgtcacaccnncccttnncagaaaaaaannntttgacgcctgagaccctgcaaacaacncagcaangagaaacggcgacccccacacggggacaaagcggnttgcgggcgattgtgcacaacacgaacaacagagacacggagcgcgcataaacccaccacacccaggggaccaccagcaactaagcacacgtacgccgacgcggcccataagcgcgagggacccaacaccggcgccccaccaatcctcccaagggaaccaacaaccaaggaagccaacacgcgaacagcacaaacaatcacagccacaaaaacagggcaaaggcagaaaactccggccacaacaccaaccagaaacacagcgtggacccacgcaaagaccgcagtaacaacgccaacgagccaagagcggaacccgacggaacgcacgcgaacaccgaccggaagtccnaagaacacaagccgacaaagcgaccggtgggatcaacgaccatacagcgcagaacacacaccgaacaaggcgagacacagcccaccacacacacgccc

SEQ ID NO: 3624 - DNA, 231 bp, Glycine max
cagtggctggattatgtgcgctaatcaccaccgactattatgtgccgatgtgacacgaatggagctcccctagcgacatgtgaatgaaatcgccacaattttactgcttactattaagaaataaggcgccggcgggggccaccactgaatgctcccatggacaattatgaacctaaaatatcctatgatgatgatgcccatgcttggacttccatcgcgagcgtacgatac

SEQ ID NO: 3625 - DNA, 529 bp, Glycine max
  unsure at all n locations
tgagtttgggcccctcgagacccttcgaataccncgcactagctactagtcgagcttctcaggaggcgagcgacgttatgagacgtttatgtgtatctattctctaccttcaccggaagtgatctcgaccaccctttttaacgtatgttctctcaagagagcatgatagtgaacctttctgtcctataacttggaggatgagtcacactctgatggaactatgatgatagagagtcgtgagagactcatactccaagattatctcctgtatctctttcttactccaagagcgagctaccgatccatggtgatctacctgtatcttctacctccctaggcgctgcgcttctaagcttcttatgcaatgctcatcgtggcgtggatgtgcatcatgactgtggtattccatattggagggcggctactctcgcctattgtaatatgtgttgcgctgccttctcgcggtgtggcatctctaagatccgacctatagagactcattattctagctcatagaaaccgcctagct

SEQ ID NO: 3626 - DNA, 451 bp, Glycine max
  unsure at all n locations
agcttctctanacatntattattggttatttctagataaaaaaaataatgtcttggtgagggtgtaattgtattggtcttaatcacactacattgacataaagctatgatatttgacatagcttttatacatttttttattctccatactgaatcgttaaagttagaagctttgctttttatcctctttttgtgctagttgtcatcacagaataaaaaatgtaccagattattcatgaatcaggactcagatttganctaatttgaatctttagtaagtagttgctagtgccactaattattgaataattgattttggtttatctacgtgatttactattcaaacatttgaatatggttgcagaataagagttgcaacttctgatatgagaatggtgctctcagttatatgtctcatgtggcactttctttctttcttgcatctaccatga

SEQ ID NO: 3627 - DNA, 116 bp, Glycine max
gaatatcagcaaacgtagttgcttcttagcagcatccttatatacttttccataatttttcattcactgctcatgcgcttacgacatggatgcctcatggaggtagcgggacatta

SEQ ID NO: 3628 - DNA, 103 bp, Glycine max
ctcctacaaggacgaattctttcattccacttttgttatttccaacactccgcgaggactatataggtgggtaagacgttccgctccctatcttctctatcac

SEQ ID NO: 3629 - DNA, 449 bp, Glycine max
  unsure at all n locations
agcttattgggagataattntcaatcatcatttttatatgcaatgacaatcaacaaatctcaagatcaatcactagcatttgtgggtttgtacttgcctagaccgatgtttagtcataaacaattatatgtggcagtttcaagagttcaaagaaaacaaagattaaagatcttaattcatgacaaggaaagaaaaccattgaagtctgctactaatgttgttttcaaagaggtatttgaaaacctttaataagtatgtccacaagtgctactaattctatttgtatcaactataatttgatttacaatactcgtatatcttatatgcaagtttcctcttggagtggctgcattatttttggtccttggccaaagttacatttttctcctctgaaatgtagatagatgcaagtatcatggntcttaacatattgcattggtggaattatg

SEQ ID NO: 3630 - DNA, 403 bp, Glycine max
  unsure at all n locations
tgctgcaaaagaattggtgaatgaattaattaagattaccgaaatgcaaaccatagccttgctcttatagactcttcatgtctggtcaagagaaccattagaagagttataacctttagaaaaactttaaaaaccatttgaaaaaagtgaaaactatctgaagagttacatcttttgattttgttcagaaactatcactggtaatcgattaccacatcagtgtaatcgattacacaaagcttttttgtgaaaggatgtgactctntcacaattaaatttgaattccaacggtcagacacactggtaatcgattaccaaatcattggaatcgattacaacattttgaaataatatggaacgttgaaattcagatgaggcttttgaaactatttggtactggaat

SEQ ID NO: 3631 - DNA, 339 bp, Glycine max
acgcttcatcaagtggtaatcagagcttctgtatcttttttaggtgctccttacacctccattaattttttttctttaccttctcttccattgttgtttcttcatttttctccatgtatctcctcacatgtcttgttctaaatgttgttaacatgattctttagagtttccaccgattaaacttgctatagaagttagatttgaatctctatggctcacatttcttgttcttgttcttgaaccatgaattgcgttgagtttaggttcctttgagctttgactagttattttttgtggctgacacctaaaccctaaaattcttacaaaaatattaaagca

SEQ ID NO: 3632 - DNA, 401 bp, Glycine max
  unsure at all n locations
cgaatcggacctcagtgtgaanagttatgactcttttgaatncttctagagctttcgttggtcaatgtcgagcatctcgacatattatgcgctcgaatcagacatccgtgtgaaaagttatgaccatttgaatttctcgagagcttccgatgtttaatttcgagcctctcgacatattatgcgcccgaatcggacatccgtgtgaaaagttatgaacatttgaatttctcgagagcttcggatggttaatttcgagcctctcgacatattatgcgcccgaatcggacattcgtgtgaaaagttatgatcatttgaatatctcgagagccttcgatgcttaagttcgagcggactcgatatatataagcctgaattgccctcagtgtctaaagtatgaccat

SEQ ID NO: 3633 - DNA, 330 bp, Glycine max
agtctttacatgtcatggatttactcttcgtttattgctcacgctctccatgatggtttataaactattatagaacatgcctttctatgacgattatttaaaatcgatgtgaaatttgttacgtttttactaaagatgactcatttacatctatgtttatgacggtttttttggaaaactcattttgagagtgtatcttctctgactgacatatatatatatatatatatctatatatatgtatatatatatatatatactcaccctactaaaaaagtatatagtggctgaaaaccctatcttataatacacttgttccatacatatgaa

SEQ ID NO: 3634 - DNA, 445 bp, Glycine max
  unsure at all n locations
agcttatctcaagcaaggagtggttttatattttatatagcangnacgcatgaaaaaatagttgttataagaaggtaacctcttaaatgagatataattattgtgaaaaattagtcagtgacttttgacggaagaatcccatgttcacccactaatatttaagcccaactttaatctttaggaaaaaaaataatcttaagacaatgatgttagttaaccgatataagaatgttgtatttttgtcaatcaaaccaacatgtacgatagaaaaggatacggttgcaatgttattaaataattagttgatctgattgaatattttaataattgagggactcaattgagcttttaattataatcaagacattaattatatattaagcctttgaaaagtataatgagctaattatatttaataaataattaaatcgttggcattaatata

SEQ ID NO: 3635 - DNA, 425 bp, Glycine max
  unsure at all n locations
cgtgcgaatcaaatcactcctgtcatttatctctagcatgcattctttctttgnntacccactcctcacgtttgggaataacaccataactaaatgcgccacaaggcatccctatcgcaccagatccaaatctagaacgatgggtgatcaagaggagacacaggaacagatgaaagccgacatgtcggctctgaaagaacagatggcttccatgatggaggccatgttaggaatgaggcagctcatggagaanaaagtggccaccgctgtcgctgtcagttcggctgccgaagcagacccaactctcttggaaccgtgcgccatcctccctcaaacatagtatgacggngaaggaacancgctgggcacgacggctgtcggaccttgcggcctcaataatcttaagagggataggcttagaatat

SEQ ID NO: 3636 - DNA, 437 bp, Glycine max
agcttcatgtcagctgtgcacaggtactaactattaactattcttatttgagcaaactcgtacgtgtataattggcattaatcatgtcattttattttatgcaaaacaatatcaggtagtaagtgaacaaaaacctgtggtaggcctacggttgtacttggaaggcagaaaaagtgatagacttgcaatacatgtacaccacctttcaagcctcccaaacactatgatctactcttcaggcacatcttcgtggcgaggatctgatgacaatgaatccagtgacatctttctggaacctataaggtggaagggatttgcaaacgtgtgcactgcagtggtcaaacatgaccctacctggttgcaagaaacaagtggtggtgtttatattgtaaccggcgcacaactcattattaaagggacttggccaaagaatgtgc

SEQ ID NO: 3637 - DNA, 474 bp, Glycine max
  unsure at all n locations
ctcaagctttaagtggttgatggaacagatatgaaacataggtggacaattgttattgtttcttttgtttggctggntattacttacactaatagatttggtcacatgtcttcaaccactaacgtctaaatttttcttagcgatgatgggtttcccttaaataaattaatactaatactatatgatactatgattccaatatggacagagcttttgggtctatctccaagttcccccgatgctgctatcttcacatcaaattcttcgaagacaacaccttcagcacctacaacaacaaactcgcataccacgaccccgcagagccaaaacgcttctcatggaagcatggttcaacctagtagtaccgttacctatgtgatggtgatggctntggccattgttctggttgcagttccaaccgatactgtgagcatttatacatgatgcggcattatgccactgtgaagacagttg

SEQ ID NO: 3638 - DNA, 449 bp, Glycine max
  unsure at all n locations
gcttaagcttgattgcaccactcttgtatactagcattttatccatgaagccagaggataactcggtgagctcacagagctcctccacgttttttgaacccccatgaggtctagacttcacattaacatcgctgcttccagcagtagctgattgtttaatcataggcaattttgtacgcaaattaataaagaacatacttgcctctgggttgtgctcctaccaacaatttgttcaaaacactattataataagtaaaagaagttaacatgataaatttaaattcttgtactcaccacaaggtcaagctccattgctgaatatgatgcattttcatcataagctcttggctctgcagcctccccatattcttggtcatcaagaagagctatcagaanaaaacatgtgaagttaaagtcactagcccactagatattgcagagtatacata

SEQ ID NO: 3639 - DNA, 165 bp, Glycine max
ccgaagatgttagctgtgggttaagcatttaagattcagagcaataattctgtatagttcggtcagcgacttaagatttccgctgtttcaccatggattcatggttccgcacaaggatgagcatggatagagttctttacgactgaataactgaataacgtggtt

SEQ ID NO: 3640 - DNA, 378 bp, Glycine max
cctgcggcatgcaagcttggttcgaggtacttacccgttgaagatttatgtttgatttataacgaatgaagaacgggtgaaacctttgcgagattcctcacggaaaacgttacggaaacgtttcggaagtgcctcggcttagattttcttcacggaaacaatttttccaagcaaattcgaaggagagagaagtgcctaaggggctggacccctttcttcttcatttcctcccctatttatagcaaaataggggaggtggttgccgcccagctcgcccaggcgagctcagctcgcccaggcgagcagggttgcttccttcagaagcaaccgtcttctggaggaatattccagagggcccaagtgggcctgggtgctatt

SEQ ID NO: 3641 - DNA, 453 bp, Glycine max
  unsure at all n locations
tctatgtacccgtagtggtccacattgggtttcgtgcattnttattctcgttttgnttactttttataccccctgttgacgtgcttaagccattttacttaagtcgtttctcgcttaacttagaaataaaataaatttccaccgaacgtttgaattgtattatccattaacttcggttaaaataaattccgaccgctcggtcatgccgtaaccacgttggaaatcaaaaaagaggtaataaataatattaataatacaaaaaataacatcttttagtaaaataaagcggaaaatcaatcggacgttttctctttgggaattctcattcttaatcgaattgattaataactaaagtgaaactaaggctaaaatcaaatcgcctagtcaagctctgtcacaaaaatagggctttgaagtccgtcatttcaatcttccactaagtaaaatggatca

SEQ ID NO: 3642 - DNA, 208 bp, Glycine max
  unsure at all n locations
agcttctgtcaccttctccgctgctccattctctttgcctagcccttcttcatcctttcttctaaaacattntcaaactaaataattgagactcatcaatacactcatccacacgctgaatttatgatccatatcatcaatgaaacttgagttaagtgccttttattttctactactactgtcttctatacactacacgtttcactta

SEQ ID NO: 3643 - DNA, 438 bp, Glycine max
gctgacttattaagatgatgacaaaggtgatgaacaaaaaactcatagatcaatcaaagaacaactctagtgaatcatagaacatctcaagtgaatcaagaacaagtctagagttcaagataagaatcaagaagaattcaagactcacgaagaaagtctagagtcaagaatcaagattcaaggttcaagatctcaagaatcaagactcagagattcatgaatgaagagaagactcgatcaagataagtattaaaaagttctttcataactttgaatagcacatgagtttttgacaaaaccttttaccacagaggttttactctctcataatcgattaccatattgttgtaatgcgataccagtagcaaaatgagtttgaaaaagttttcaaactggaattacaacgttccaattattttcaaacggcttaatcgatta

SEQ ID NO: 3644 - DNA, 356 bp, Glycine max
agcttatctatttcttttgatgaacttcaagattcatttttaacttgcataaagaatctgtcaaacttgccaaattattttcattttctaagaaaactattttaaatttagaaaagaaagttttgaaattaaatgtagaattataaaatcttaaagcagaagttaaaacattaaaaccaatagatacaaaccaatcctctactaaatgtttaatacaagatagcaatgaagcatctcattcatgtaaatattgtaaaatatttaaagaagaaattaaagatgtaaaagattctctttccatacttactcttggcaaaaataatttatatattatactaggaaaacatatatgtgtt

SEQ ID NO: 3645 - DNA, 208 bp, Glycine max
  unsure at all n locations
tagaaagacaaacattatgngaagnctgntttactttattatgcttatcntaacacagagatgacatgctgatccctccaatttacaacgaactcatgcacacttttaatgtaaaatatttatgcacatgcgtatatgtagaatattctactatttatgttatagtacaaggacatccaacacattctaactgtcatacatatatatg

SEQ ID NO: 3646 - DNA, 444 bp, Glycine max
  unsure at all n locations
agctnnttgaanagacacatctcttcttanatttttgaaaaggcacgaaggacctatatatgtgtgtgtccaatttcaaaaagcaagagatagatattccaagaaaacttcattgtcaaatgctctctcaataactcttgggcaaacacttgcaaatctattgagagttcatccaagaacttcaaattgtattattcactctaaaggagaggaatctttctgttcttcttagaaagtcaattgtaatcaaaagactagttgtctcttgaattatgagtttcctgaacacaacggaaagggattccttgngtgttcaaaagttgcaaaagggttgtttacaaagatagtggaaaatctcaagtgggttgcttgaggactggacgtangcacgggaagcggccgaactatgataaatcgagtctgcatatctctcttcccttatct

SEQ ID NO: 3647 - DNA, 395 bp, Glycine max
  unsure at all n locations
tgttgccaacatgttggtaacctggttttcatttttttgccttctttctgcacccaccttccttctccttcgacacacaagttntgcttcgggatccaccattggcttatggttgaagtgttatggatcaattgtagacatgtctataggggtccaagcaaaaatattcatattttctgtcaaaaagtgagatagtttctctaagataggcggnggcaactcagatcctaccttgacaatcttcatctcttctggtccgattttcacttacgagagctctctttcaggaattggtctttcgtgttggccattatgctccttggttctacaatccaattcttttatcagaatctattatttgcctgggatcaaaactagcttcttaaacaaagctg

SEQ ID NO: 3648 - DNA, 428 bp, Glycine max
  unsure at all n locations
agctntacagcagattttagtaatgactcactatcctataattaaaataacttaatgccattaacctagggaattaaaaaaaacttaatggctgagtgtaattgaaattgtggcaaccaaaagtcacccccaacagccaacaagtcagccaccatttggtctcccaaaaggctgatgcctaggttgccaattgggcccttattataacttgaactaaacctaactaaagcccttttagttgattaacccaaaacatatttttggtcagccaactttacaaggattgggccattatttagacaaactaaacactctaaaattgagacaaagtggtgtcatttagtcctcctccatttgggccatgatacaactcacaaccttggacttttctccttgaaacttgngcttgtattcaaatagtatggaca

SEQ ID NO: 3649 - DNA, 435 bp, Glycine max
  unsure at all n locations
tgtatacgctacaacgaatgatttctggggcttattanaattatatcacagctntgtggctcttacaaatagattagaaccttttgaacattttacatattttttacattcactttcagtttataatcgcgtgtnttctctcttttctctcttccttcttcatgactttacattcttatattcttcattggtcttccattgttcatggcattcattgtaagcatgtgcaactaaatcttcagttgctggaataaaacggngtagatttagagtatgtgccagaatcttctctttctcaattgcaatccatttctactcctttgcttcatgtctatgcttaggcttggtcaacctacattanatatacaaattcaagggttagatagaaattcatctagttaggggcattgctntgggcacccagtagttntactg

SEQ ID NO: 3650 - DNA, 351 bp, Glycine max
  unsure at all n locations
agcttgatagcacgcagagactaacgttcgcttcngcgcccttcgncaatcgcggccgacaagcccgttgacacgcggtgatttacgtcatcttccgcgctcacaagatctgtcatactgacttttgagtcacaatgacgggcacaaatacacgagtggttatccttataaactttttgctgtctgtaagacgaaaagcatgatagcacgcatagactaacgtcgtcttctgcgcccttcgtcaatcgcggccgacaagcccgttgacacgcggtgatttacgtaatcttccgcgctctcaagatctgtcatattgacttttgagtcacgctgactggcgaaaatacccga

SEQ ID NO: 3651 - DNA, 409 bp, Glycine max
cttaagtcgactgcaggctgcaagctttctctgattactctgctagggtttttagcattagagagaagggaaaaagattataaccttcattgcatagtctttgtgtgatgaacaattatccacccatagatattatttttcaaatataacgatgatccaacggttaataagtccggaattgtagttttactaggaaagatttgggtgtgtgtgggaaaatgagaggtacgtgtggggggtgtttctttcaccataagcattatttcacaaattctaatggtggggatgcgtataaataagttccaaacttgatattagaattgcacgatgatccacaggctaatgaatccgagatcattgttttaatgagataggcctgcttgtatccgatcaatgtctctctcatttg

SEQ ID NO: 3652 - DNA, 476 bp, Glycine max
  unsure at all n locations
ntgagacctttagccttgagnactgacaacacacacagcctaaaaggtatatacttgaacaacattttgcagtttatcaaatatttacgaggcatggcaactcaagttcaaacatgtgacatggccattgatgctacgtttagaaatatacttatagctatgttatccttgccatgtatggtgataacatcgtgattgcacgatgtagtatgacagagattaacacgtttgagcagctcttggcacaaaactcttaaaagaatgatcctggtccatctaaaataatcattggtatgagaattcttagactcagaatagaacgaatttctgagatgccttatgagacatatatacacaagttgcttacaagtttaccttgtagatttagaccagaatagcctttggattcattgaagttttgaaaagaatctttgctacagataacaaaatgtaactgtagatgccttgcttagccg

SEQ ID NO: 3653 - DNA, 329 bp, Glycine max
  unsure at all n locations
agcttatccncacaagagtgcagaacatctggtgatgtctgcattgattataggaggctgaatcaggtaactagaaaagatcattttcccctgcctttcattgatcaaatgcttgagcgcttggcaagtaagtctcattactattttcttgatggtttttctggttatttacaaattcatattgctcttgaggatcaagaaaagaccacattcacctgtccctttggcagttttgcctataggaggatgccctttggcctatgcaatgcccttggtaccttccagcggtgtatgcttagcattttcagtgattttttacagacttgcat

SEQ ID NO: 3654 - DNA, 363 bp, Glycine max
  unsure at all n locations
ctataaaactaagctttgcctcnaacatattatttccaacttccaatgctctgngaatcgattacaaggcaatgtaatcgattaccagaagacaattttgaaaaacaacttttaaaaaaggttttgaatttaaattttgaatcatgtaatcgattatcagatgtttgtaatcgattaccaacaacggcacttcagtaaacactttgaaaagtcatgacccttcaaaatataattgtgtaatcaattaccaaaaacctgtaatcgattaccagtgaagagttttaggaaaaatcttttgaaaagacacatctctccaaaccattttgaaaaggcacgaagggcctatatatgtgtgtgtctgac

SEQ ID NO: 3655 - DNA, 601 bp, Glycine max
  unsure at all n locations
ccctcccccacncacccactcantcttcnantgncgtcacacgttgggngaacacgnnncgannnncagtccccccaaccacnnntttagtcgtttgaggcgctgcacnaccgcgnancgcnagaacgacccgaggcaagcagacccgacggagcagagatcaatcatccgtttgtcatcaccacacaaggggagaaagcgagtgaatgaagacacgaccccgacgccgacgaaagaagaaccaaacacgacccacggtcgctgcacagaacaacacaaaaccgcccccccaaacaacgcccagagcgcagaagcccacgcgaccaagccgtcgctcacaatgaaaggacncaagccagacaaggcacatcgaagcgaatacccccacaggcaaccgccgaccaacggcccgaacacgcagcagccgctacaccacacaagccaaccactaccagagacacacaaagcggtgaaaccaaaccctacaccaagcgggccaacagacccagacaaaccacggacgaacccaccccactcacgcgcacggagaccaccacgcaaggcgcgacancggcaaacacgccccgcgccacccacgccc

SEQ ID NO: 3656 - DNA, 252 bp, Glycine max
agcttattaacattaaggggtgtgattctgtattcttatagcacgaccttgataaaacactcgttgacgtatttatttttttggttcaattttcactcgcatattatcctattttcagctatgccgtataggctactgaattatatgtacgggttctcttttacatgtttgacaattgagactggatagattattctatcagggccgatgagtgaaagtttttcacacttatttgttgctgagcacctcttg

SEQ ID NO: 3657 - DNA, 510 bp, Glycine max
  unsure at all n locations
ttgaagacctgtgtgagcattgatagtcttgtaganacncgcacatagacaactaagcgtacaaagtngagaagaatattctanagccactattaagaatacatatagggtacacaacaaggtaatatacccagctactcctcaattatatatatataagcctcaatgcaacccctcacatgttacatccaacccttgtattattaagaagaggaaagacaaacttatattatggtaagagagataaccaatcatacaagctagtatgtatatgtatcacgtaacatgagctgtgaaaaaagaaataccgtacactgaacataaagcgtataccagaatatcgctgctcgtgaaagacagacatcttttgctaccaacttattatgctaattatatagggcactccgtcaagaaaaagtacagaaatgattacttatcgatggatgtaatcggttcgagcaatgagcttaaagcaagtggccttctagagcaaacctaatattatgtccg

SEQ ID NO: 3658 - DNA, 345 bp, Glycine max
agcttgtagaatggctagacatgatacatgtcttggtttggtttgtttcaaggataaaagggatgccccacattatttccatgacacaaatgcaaaaatgatgatttggaaactttatgcaaaactggtcatgcatgcacctatgcgaacactcaagtgtcaaatttttatggtcatgtgatgctagggctcaggattcgtttcctctattttaatcaacccaatgtttccaaaatatgttcttttatcaatttgtgcattcatccgagtccatttcgggcgtccggggaaatttcacagcattcacccttcaggtgatacacattttcaaaaattggtatgatc

SEQ ID NO: 3659 - DNA, 447 bp, Glycine max
  unsure at all n locations
ctgatgatgtcaaaaagaaatcacatgtttgtcatcatcaattacggtgagaatgtgaatgtatgtatacatgattntgatgatgtcaaaagaagaatcaaacaaggctcattttgcttcaagattaatacaagattatttcaacaaacaaagtcttgattcaagatttcttcaagatcaagccttgcctcacaatgaaaggtttcaagtcattcaaggcacatgtaatcgattaccaatacatgtaatcgattaccaatggtttgaaagtgtgtaatcgattacacatcatatgtaatcgattaccagagactctgaacgttgggaatccanattttaaatgaaaggtcacaactgttcaagaaaaacacctgtgtaatcgattacactaattctgtgtcgatatccaaagaggattatcaacgtatgtctnctccagtcatatcc

SEQ ID NO: 3660 - DNA, 210 bp, Glycine max
cgcacatcgttcgagcgcacgacatttcactttacaaggagcgaagcagaggagaccttcgattctattactcaccgcgacgcacaaaagtgggcagttaacttgaacggtcattattgccaacgcggaacgcattctgcgcttcactatccatgttcacatattattgcagctcgtggttacgcgcgcccgaactactaccactctata

SEQ ID NO: 3661 - DNA, 382 bp, Glycine max
ctcaagctagagttcctcacgtacagtaaagtggcaaaaaaatttccccattaatataattgtcctatacaatcgcactgagcaactatatcaccgagaccttcgcatcattgcatgacatacttcataaatatgtgagttagaataaaaatgttgcactcttaaggggttactgctggcagccaccatactgaccacaatatccatctctatgtgatgcacgcgacccacacttaagtttttacatgcaaaccatccaaaccacatgggcaggtacacacttaaacacaatcacacacattggaaatatatgaacgatcaaaatggagaaaatcaaaatccgaatctgccttataacatctggcacaagtctttgctttga

SEQ ID NO: 3662 - DNA, 474 bp, Glycine max
  unsure at all n locations
gtcacctgcggcatgcaagcttctcttggaccttaggcaaaccttcagctcatccttcattatcaaactgnctactcgtgattggtccctttcctctctccgaagcttaagctcactgttactgccccacagagcccctcggaatttgttccggccgtgttcttccctacgagcccttttggtctcttgttctaaggccttggtggtagctatatttacatctctcagttcggcattctcctttcggatcttaagagctgctgatttgaacttttctttgactgtttgggcttgctcgagttctgctctaagggcctgcacctcttcgtcttcctccggtgcctcaacttcctcccctttagtggttctcaaactcgggagccaatccaaaccttgcatgtgggctttcaaccacttacggtagctaccgacgttgttactgcctctgagttctttgtccttcttttgcaccat

SEQ ID NO: 3663 - DNA, 437 bp, Glycine max
  unsure at all n locations
gatgaganagtgtagaacggtgaaacttcctgcttttatttgttgaccacatagtggtttctggagatatgtncgcggggtcaagagaccttgtggacgtcaggtggggtgctattgcccaaaaccaagcttgaccaatcccgacccaacccatgcatagtcagtcagtgagaacctgtgatgtacctaaacaggcgagctcctggaagtcaacagataaaaggaactaagaccacaaagcaaggaggcttgtgtggtggctggccagctgtgaactttgtgtgatatatgggttattgcctctagtaatcgattaccaagggtgagtaatcgattacaagcttataaatgaacgcaggaggctaagatggtctctggtaatcgattaccaaggtgtgtaatcgattaccaggcttgaaaacgaggtcacgaagcta

SEQ ID NO: 3664 - DNA, 458 bp, Glycine max
  unsure at all n locations
agctntgaagagtgttgttnttcaccttctcgctaagtttatatgctggcttagcgagcttctgctatgcgcaacactcatgggctaagcgtgaggaagactctggaagaagatgagctatacaggttcactaagcgcactgcttcatctcactaagcgcaccgcttcagttcatccgctaagcgagaatggcacgtgcaagccaaaattcactattgtgtgctaagcggtccataattgcgctaagcgcacgagcacgaacaaggccacctatttaagcctgaaatcagattttagaagggagtttggactgggattcagagctttgcatgtctagagtttctagagagagaaaggtccaagttccagagagttttgagagattttgctgtgtgaagatctgcagagaccagagcttgaagcaggagccgatttgagagctcgagatgagtttgtga

SEQ ID NO: 3665 - DNA, 474 bp, Glycine max
  unsure at all n locations
tgctctnatttacattgatgtttgtatttatgggaggaggttatatgccatttttgctttaagagtaatgtcccacaaaaactaactttccaaatgtttgccttcgcaggaatggcaccgaggaagcttgcctcaaagaggtccaggaaggacaaggcggccgaaggaactagttccgccccggagtacgacagtcaccgctttaggagcgttgtacatcagcagcgcttcgaagccatcaagggatggtcgtttctccgggagcgacgcgtccagctcatggacgacgagtatactgatttccaggaggaaatagggcgccggcggtgggcaccactggttactcccattggccaagttgatccagaaatagtccttgagttttacgccaatgcttggtcaacagaggaaggcgtgcgtgacatgaggtcctgtgttaggggtcagtggatcccgtcgatgccgacgctatca

SEQ ID NO: 3666 - DNA, 595 bp, Glycine max
  unsure at all n locations
cactcccctacactncctnccagntanctacgcgtcctcaccnntccctaaaaatttgctaatacggtcncnactaccaacncncnnccnnnattgaatcatcccctcgcacgnccnncnanatcnanacgcagcaggcaggcgcgnacacaactagaacaagacagcgagttgacgttggagaaccacgaaccgcacgacttggacacgcactaatgaaacaaatccgcacaccgcatcaacagatgaacccgacgcaggggggcccagagaaatgacaccacacaagcatgcacgtacaaagagcaagtcaaaagcccatacggctgttagnggccatgaaccaagcacacccaacccacaggtcggcagagatgcctatctaaagccgccgattgacgaatgggagaagctagggagccgccgccggacacaggatgtgacaaggaagcaaaactcgacgaggactataaacgactcccctactcatggcacgacgtccggctgcggaacccacgacacaacctcccgcccgcaccgcacggagcacaagaagccgctacaccacaacacgagaggaaagcagaccacaccc

SEQ ID NO: 3667 - DNA, 387 bp, Glycine max
  unsure at all n locations
catacaatatttagacaaaaactcgcctaatagcatgaaaagaaattactgaaggcaatgcatatttaagtgcaaaaccaataagaatatacaatgaaggcgatgcgaatttaagtgcaaaaccaaaataaatatacaatgaaggcaatgcaaatttaagtgcataaccaaaaaaaaaatatacaagcagaaccaacattttcaatcattgtctcaatatttccaggatttntagtctgcatacagaaaacaagcaaattaaaattttattaaatggtgatctcaaataaaaattacattagatatgatcgaatcattacttcagacattcttggtataatgactcagatgacactgaatagaaccacctacgacggtgtcaacgat

SEQ ID NO: 3668 - DNA, 453 bp, Glycine max
  unsure at all n locations
agcttataatatattattacgctcgaatgtattcatcagaagctctcgagaaattcaaatggtcataacttttcacccggatgtccgattatggcgaatcacatatcgagacgctcaaaattgaacaacggaagctcttgagaaattctaatggtcataacttttaactcggatgtccgattcacgcgcatcacatattgaggcgctcganaaggaacaacggaagctctcgagaaattcaaatggtcataactnttcacactgaggtccgattcaggattataatatatcaagacgctcgaaattaaaaatcggaagctctcgagaaattcaattggtcatcacttttcacacggatgtccgatttgggtgcataatatgtcgacacgctcgaaattgacaacggaagctctcgagaaattaaatgggcataactttatactgaggtcgatc

SEQ ID NO: 3669 - DNA, 385 bp, Glycine max
actcagcttgccgcacggacgtgtccgactatgctctattcgtggggaacatgctacgaaaggagagagcacgagatgaagagccaatggttgatacatggacggagatgaagatgatcatgaggaagcggattgtgccggctagctactcaagggacttgaaattcatgctcctcaaactaacccaaggcaacgaaggggttgaggagtatttcagggatatggatgtgctcatgattcatgcaaatattgaccaatatgaggagggagctatggctcgatctcttaatgtgttgactaatgacatacgcgatattgttgagctgcacgagtttgttgaaatggatgatttgcttcacaaagcaatccaagtggagcaacaatt

SEQ ID NO: 3670 - DNA, 441 bp, Glycine max
  unsure at all n locations
ttaagacacccgcggcatgcaagcttgaccaatcccgacccaacctgttcatattagtttgtgagaacctgngatgtacctaaacaggcgagctcctggcagtcaacagataaaaggaacaaagaccacaaagcaaggaggcttgtgtggtggctggccagcggtgaacttggattgatatatgggatatgggctctggtaatcgattaccaagggtgggtaatcgattacaaggcttaaaaatgaagacaggaggctaagatagtctctggtaatcgattacattgaaaacgaggtcaggaagctaggggagcttctggtaatcgattaccaggggatgtaatcgattaccacgcttcacaagagaactggaagactgtggagacctctggtaattgattaccagtctgtgtaatcgattacacagagggatgtgtcact

SEQ ID NO: 3671 - DNA, 434 bp, Glycine max
ctcagcttagatgggatcattgaaaaatagatatatcttgatttctttaatgtttaatgaatactctgatattgatggtcttgatttattctcacaattgacagtactaagagaagtgttaagagaagaaattagcacaccaatagaactattgagttatattaaaactctatattcttttccaaatgtttacattgcatataaaattctattgacaatctttgtaacagttgctactgctgaaagacgttttgaaaaaaagttgttcataacatacacagaataaagatgatctattttgcatctaaattatatttaaataaacggcatattaaatgtgtacatgttaattgaagcattcaaataattggtgttacgagagaatgagaagagaagtgataacttggtacttcaacgtggagcctaagaatgta

SEQ ID NO: 3672 - DNA, 467 bp, Glycine max
  unsure at all n locations
ttaagtcgacgcggctgcagctgctaagaccgatatnggttcttattttgttctcatgngctcctttccttaaactgagaaccccattggttggttcatataaacattctcctcaaaatctccattaagaaagacagttttcacatccatctaatgtagctccaagtcataatgggctattaatgccatgataatcctgaaagaatcctttcatgagaacggcgaaaatgtctcttaataatcaatgtcatctttttgagtaaaatcccttagtaacaagtctagcattgtaatgttcaaggttgccatgagagtcatgtttagtcttgaagacccactttcaactaactctcttataaccctttggtaattctacaaggtcccaaatatcattatgtgccatggaatttatctcttctttcatggtatttaaccacttctcagaatcatcacagcttgcagcttgc

SEQ ID NO: 3673 - DNA, 301 bp, Glycine max
  unsure at all n locations
ctcagcttgtgatcctgatctacagacgactcggttttatgctcttgttcttaactatatctaggncagatatatgctattgtgtgcacaaattatatcaacttgtcttcaacccctatacgaaccacatgcatgctactaacatgtctcttcggtaccttaagcacactgttattcaaggtattttttttatggccaacttatacacaaaattacatgcatatgtggatgcagattaacgatcatgttctgaaagttaaagatcaaccactggcttctgtatcttcttagaaattccttg

SEQ ID NO: 3674 - DNA, 450 bp, Glycine max
  unsure at all n locations
agcttcanacttcgntgcatctaaccactatctctnttcttcactttccatggcctctctaaagcactcaggttctccatcatctgttaggatcacatactcattagtagaatacctattagaaggttgtctttccttgttggacctcctgagttgaacttgaggtggctcgatagcaccaccaagattttcatcttgtgacatgtcatgctcctcttcatacatcattttgaacatcagtatttagattctgaatatgcggctgaactggttcaaaatcaaccacaccaacattgtcttccttgggtgtagacttcttcaccttatcaatgtcttgaatggtttggtctttcatgaatttcacatcacggcttctgacaagcttcttctcaacaggatcatataacctgtaaccaaattcattctcatcataaccaatgaagatacatt

SEQ ID NO: 3675 - DNA, 383 bp, Glycine max
  unsure at all n locations
ctgttgcagaggtgcccaaaccttatctttgatcatggngctcaaccgcataagttctatagtggtttgagatctcaaacccagatgatacttgatgcctcaactagaggcactatgatgtccaagagttcggaggaagctattgccatcattggctccatatcagctagcgattatcaaagacattatgatagagctccacactaaagaaaaggtataatggaggtagacactcatagtgcaattctagctcaaaacacactcttgacgcagcaaattgaggccttagcaaagcagatagccaacgttctcacaatattaccaatgtggaccacaaaaaacacatcaagctcaccaagttcaacaaattntgatatgtgatt

SEQ ID NO: 3676 - DNA, 410 bp, Glycine max
  unsure at all n locations
agcttcattgcttcatgatgttgaatttagattgattcaaggngctctgatgataacaaagatgatggcaaaaagcccatgagaatgatttcaagattgagtcaagaacaattcatgaatctagagaaagattcacgagaagtttcaagtttcaagttttcaagaatcaagaataatcaagatcaagattcaagactcaagattcaagaatcaagaaaaggctcactcaagataagtacaaaaaagtttttcacaacattgagtagcacatgaagttttcacaaaagcttttaccaaagagtttttactctcgggtaatcgagataatcaattacccgtttactgtaatcgattaccaatggcaactttttgtttcaaaaagctttcaactgtgattataacgttccaat

SEQ ID NO: 3677 - DNA, 503 bp, Glycine max
  unsure at all n locations
tgttagcccttanncttgaantcctgaanacggacacaagatactcagcttttctatatataggcgcatctatatgtactttgacatattatcgccggagcttcacggtgcgtgcgctgaggtctcgagactgctacaacacttaatgctcgcatttaacgaacagtccttcttacatgccagaaccatgcttgataggtaacgcacgtcttggactttactaagaaagccacttattccatataatacgtacgcactagcaaatcatgccttttgatgaagaaacatatctatcacactgcagacttcacttacttcttcatagaactttgacatatcccaggagaatgttttatgccagaaagacacttacacgccgactattatatgacgatcttaaaagcactccctaatgtaatgctgaatgcctatatggacgtgtgttcgaaactcgaccgcagaatcaaatcatgatcgtaacacattccttaccctaattctcg

SEQ ID NO: 3678 - DNA, 210 bp, Glycine max
  unsure at all n locations
gctctgcagttgaccttcagcttcttcnattgagcaggacgaccaccttcatcagtggataacacctcattctaaggctcataatgctcttcctcatccttcttctcttcctcataatattcgtccgaggtctcatgaaaaacgtcataatctaatggctcatcaaaagggtcctcttctaactctctcactttatgctaaggggatact

SEQ ID NO: 3679 - DNA, 228 bp, Glycine max
agcttcgacattcaatatcgagcgtttcgataatttactggacttaatcagacatccgagtaaaaagttattgtagtttgaagttgctcagagcttcaacattcaatatcgagcgtttcgatatattacgggactaaatcagacatcagagtaaaaagttattgtcgtttgaattatctcagagcttcggcattcaagtccgagcgtctcgatttattacgggactca

SEQ ID NO: 3680 - DNA, 333 bp, Glycine max
  unsure at all n locations
actcaagctctgaggaacttcanacaacaacaactntntactcggatgtcttattgagacccgtaatatatccagacactcgaaattgaataccgaagctctgagcaaatttaaacgacaatacgtttttactcgtatgttcgattgagtcccgtaatatattgaatcgctcgaaattgaagaccgaagctctgagcaaattcaaacagcaataaatttttacttggatgtctgattgagtcccgtagtatatcgagacgcttcgacttgaatgccgaagctctgagtaaattcaaacgacaataacttttttcctcggatggctgattgagt

SEQ ID NO: 3681 - DNA, 260 bp, Glycine max
ctaagtcacctgcggcatgcaagcttgtaagagatctgaacagaatattagaatggattttatttgataaacacccaacgtgttatcaaatacttacaaaaagagagcaaatgtagatatgatacgagtttatgatatgattgaaagacagatatagagagagacactggaggtgctggcgtgctgttccattgctcactattctccgtgctatctctcccatcacttccctgctttacactgacgctccttattctccc

SEQ ID NO: 3682 - DNA, 262 bp, Glycine max
  unsure at all n locations
cagctctcctatttgctataaagggatgaagcgaaaagataatggtcattcccttaggcacttctctctctctcgaaatagctgaggaaaattagttccgtgaagaanatccaagccgaggcgcttccgtaacgtttccgtgagtaattacgcgaagattctcgaccgttcttcaagattcatcattcgttcttcgttttcttcagtcttcgactggtaagtacctcagaccaagctcttcaattcattctatgtacccgtg

SEQ ID NO: 3683 - DNA, 458 bp, Glycine max
  unsure at all n locations
catgcaagcttgttgngcagaacaatgggaatctngcctatttttttgctttgtcccatcctgnctactgagatgaatcctccaataaatggaagctnttgcggttagtgctcgtttagattaacccttatttatttatgagaaatgctctcttgttcaacaactaacattttgtctttaattgcataacatatgacaactagtggtggaagtttcatggacacaaattcttgatgaaactctaacttttggaaagtttgtttgtctgagcctttgttagctactaactcagctaatcatgggccatcctttgatttatctacgggcatgcatatgcttagactatgcatttaatttggaaatatactgaatgctccaaattagtatgtgctatctattgcacaaccagcattcgtgtcataaatggtgaaattccaattagacaagctcgagaatat

SEQ ID NO: 3684 - DNA, 461 bp, Glycine max
  unsure at all n locations
ctacagaatgtgtacaaagatgtctgcaaagatatttgatctctttaacaagttgagaatgaatatgatagatattcactcgttaacttgaagggagtggtgcatgttcttttttggactgagtgagtgcacgttctaataatcccacgcacattatttgttgtataatgttgtaattattgtaaactagaacaactctatgattaccatattgctagacatatttttaggaaaataattatgtagctttatatgaattataaagaccagtactatttaaaattattaataatattggatagacctaactttgggccattttcattactgtctcaatcaaggagaaaagtttanagaaaacagttgcacttctggacgcatgctggtatctgtattggcatgcatattattcaacattgcatttctaaaatgcaggggaataattgcttaacttatatatt

SEQ ID NO: 3685 - DNA, 458 bp, Glycine max
  unsure at all n locations
agctngtccataagctctctttcatagtaggatgaaatttgtctcttcctaagggcactcttaagatcattcaaatactctactggaggatccccatgaatccttcgttccctaacaagggaagtccaccaatagagggcatacccttgaaagctaagggtagccaatggaaattttctctctttgctaatatgatgacaagcaaagagttgttcaaccttcatttcccaatctaggtagggctcaacattatctttttcatggaaatatgggaggctaatgttaacctcttgaggccgtctatcattntctcttctttgggaatggtgtttagtatgtgaactatggtgtcctctataatagtcgctaagttcttcacttaaactcttgcaagagtcatgattgctataggagacatgnttttttcttttcatttctttcattatttttcttctttc

SEQ ID NO: 3686 - DNA, 481 bp, Glycine max
  unsure at all n locations
actcaagctttgtagaagtgggtcactctattgaagcaacaatggaagatttctcacacaatgatcttagctcgagattctctcaattggaaggctttgacatgtcttcaagattctccttgttgtcctcttaaagcttcaatgatgactattgaagtggaggccactcaactaaaaaacttatggaagaagcataaaaaggtgataattgtcgagtcatgacagctagtagagtcattctgagattgtcattatgaggagacctttttatgagctttctaaagatacatcaaaatggtgattctaatgttaactgagaaaagatctatgctgaagcacatccttttgatgaagtacaactganatggctctctgaaataacatagcttcatcatgcttaacacatcttcacaaagcattctaaattagtttgcatcataaatagaaattgaaggaacagttattagtctgttggtgtcta

SEQ ID NO: 3687 - DNA, 173 bp, Glycine max
agctacttctgtgcagtgtctctctttatatattcacccatcacagcatggcgcttcccttgcgcaatatgcacattcagctcaaatccatgaaacgaaacacacattgcatcgtaagcaagcattctatacaagacaaggcattcggccattataacttactaagaaatcta

SEQ ID NO: 3688 - DNA, 432 bp, Glycine max
  unsure at all n locations
agcttgtagacaacactgcggctgcatanttctatgctgacctttaccaacctccgtcacccttgttgcccaaattcctttgatctctaagtacatcagccaatacacgttccatttccaaattctatgtaaaataacttcttgcttcctcattattttttcctaaaactattcttttgtctgtcattttttcattagatgactccattgaagttaatgtcacttattcaacctgcacataacaaatattagatataacctactttattcatttgactagtccactgcacaatcatagaaaatatttcaagcaaagtttttatgcaatagcaaagtacaaaatattgtatcttcaatagataagtacaatagtaacaacgcacacaaagtttgtctgcgttagcaaattacaattaaaagagaactattcct

SEQ ID NO: 3689 - DNA, 446 bp, Glycine max
  unsure at all n locations
agcttgtccagcttcccatntacttcctccatataatcagccacaagaaacctttntaactcttccactaccgctcgagctttacctatatgtgcaatcatatcatggctgatctgtttgagtgtagcaactttttgggttgcataaaaaaactttcaatattattggcaaatatctcttgggccttcttcctaaaagagcaacatgttttgaatgatctaaggatttccaaaacatccggctcaacagattgccacaacacaacacatagttgaaagtcaagttnttcccactcagatttcttgttgtttgggacagcactagctcctttttccaagtggtcatgatatccttggccaagaaaccacaactccacttaggcagaccaagaaaagtagttcttcccagtgagtnttgcaatagtgatggtggnggttctagagaag

SEQ ID NO: 3690 - DNA, 467 bp, Glycine max
  unsure at all n locations
tatacanaagaaaagtatggatcgtgggtgcttgtataagtatatatgtactcaacaagtatgagaataaggattaaaattgttactcggatgaatatgagtacaagtattgtttttaaacgcgggtatagaactggtaattttattaccatattatttttaaagtagattatgagaaggcatatgattcggtgagttagaattttttttgtatatattgaaaagattgggctttaatgatacatggattaaatggatacatgggtgtctttcatcctccttagtctattattggcaacggaagtccttccaagaaattcatgcttcaacagggtttaagacaaggtgattctcttgcaccttttctttttacaattgtaactgaatgattaagtggcatgatgagagaggtttgtgataaaatctttttgaaaattataacgtgggagagaaaaagattgaatatg

SEQ ID NO: 3691 - DNA, 329 bp, Glycine max
  unsure at all n locations
agcttcattagttgttgcattntagtattaattcctcttatggaagaacgataaacatttcttgcattgtatacttgtctgattgttgtataactattgacatcgtgctcctttaacgttagaagaatatttcttggtttcaccattgactttgtaatatcagcaataataatcttctcatccttagtcaatcgaccaacatatggatgtccaactaatgacttgaccaattcatgattgtgacattcacacattaacttcaccattcatcctttgccttccaccactggttttacacgcagcttaaaggcacacccacattttctact

SEQ ID NO: 3692 - DNA, 206 bp, Glycine max
tgagctatgagaagcttatgaggacctcctactctcttgaaactcgaagctaatagtctgcgcggaacgagaccgccttctttcgacggccaaccttgatcttggagggctggatggaggactctgaccttgcaacatgaactcgtccaatatggtcatcaccaaggccactctcatacatcatatcattcagactcttagacacc

SEQ ID NO: 3693 - DNA, 243 bp, Glycine max
  unsure at all n locations
agcttgagatgaggaagtgtcgaagggtgaaattttctgttnttatagncgaccacagagtggtacctggagatatgtcgcgggggtctggagaccttggggacgtcaggtggggtgctattgcccaaaaccaagcttgaccaatcccgacccaacccgggcatagtcggtcagcgagaacctgtgatgtacctaagcaggcgagctcctagcagtctacagattaatggaaaacaggaccac

SEQ ID NO: 3694 - DNA, 218 bp, Glycine max
gtaaggccttgctctgttttttgcactttattgaactttaggagagagaaccttagatgaagttttagatttttagggacatacccgtttacaagcagttaacattctacgacttttcacatagtttgcagtatatacattgaactgacggttgtgcatgcttgatatgcctgtttgaggtcctggaacacaaggaaaacaagcatgtttttctgcat

SEQ ID NO: 3695 - DNA, 453 bp, Glycine max
  unsure at all n locations
agctntttgagccanaacctcaactcattggttataaaccttgacctaggataagaatttttccttttaccctcggaagagggaacaaaaggatctcccaagaaagaagatccattcacagttaagctgaaaatgtgctttgaaagcaaaagagaaaaaagaaaggtcccgggcaaaggttggaagaaagcaaaagaaaaataaagttcccgatcaaagatcgaaagatagaaaagaaaaagaaattcccaatccaagattagaagaaaacaaaagaaatatatagaaaggtctttgaccagacaatatctgaataacattcaggattgtcacaaacaagaaaaggaaagaaaggaaaccagagctggtgacacatgaagcagtccccttttgattaccaaccaaaatcctttgcgttgacaactctttcaccctacgctaaacataaacaaa

SEQ ID NO: 3696 - DNA, 257 bp, Glycine max
aaaatggatcattattaaggtccaacgccttataatgatcacctttcaagtaaaaagaatcacttgattcacgcataagaaagaactacgtaggtctgatttcctcctcgatggagggtacgtaggagcaaaagccccgcttttgtcgacctcaaaaaataaaaagaactaaaagttaagataacacaatttccataattctgagaaataggttggtgtcctttgagacacacgtgagaggtgctaatacctttctc

SEQ ID NO: 3697 - DNA, 134 bp, Glycine max
agcttgttgagggtctctgttatggcttctaattgtcgggacaacagctcgatctgagctaaggtcgcatcttgagtggtgagtcctagaaggcttctctttgttggcgcatatgtgcgatcaggaagaatggc

SEQ ID NO: 3698 - DNA, 330 bp, Glycine max
actcaagcttctattgcaggaatttcatgctttaccaaccttttgccatattgtagtcacgaagaccttagcaaggttactggagatcttctcgagcagctcacttcatcaggatgttcgcacattcatcgaacaatgcctcgattgtcaacataccaattatatcactaggaaaccaaggggactacttgcacccttccctataccaactcgaccatgggaagacattgcactcgatttgatcgtggattaaccatatactgggggtattctatcatacgtaggtattattgtcaacggaaggcctttccagatattcatgctttaaca

SEQ ID NO: 3699 - DNA, 396 bp, Glycine max
agcttctactgttgacatgatatgttatacaatctgtgatatttctcccttaaaggttcctgttccatgagccagtagtcccatttaacccatgcaattttcttctgatcaaggctaccaccccataagaacctcctctggattagccccgattgctattcccaaataagagaaaggcagaggcatgattcatgcaattcaaataactggcagcctgcaatttccattgttcagattggcccagcaccccaaagctgctcttcccataatttattttaagtccttgtatgagctgataccattgagcatcttcaatacacacagccacatccacacactggaacactcacacacacacatacacggccacacacacatctactcatacatttacac

SEQ ID NO: 3700 - DNA, 437 bp, Glycine max
tgcgtcggagggtacatctcaccatcatgttattgtttatgagagacagagccaaataattgattcccagttttctatagatgttgaacatagtattaactaaaaccaaactcgttgcttacattttctaacgtgtacattatcttatatagtattcgtgtgatgatccttatacttggattatcttgggtgatcctctatgtaatgaacatagtacactatatactgatgcaagacgcgagcttgtctacgtgcgaaccgtgtggatctatgggatatggcctccgtacctcatttctcggatggctccccacactacgcccacaatccaacatgcgcctcattgcctcagctaccgctatcccatcttatcccgacacctcccctcacttcccttctcctcttctatacctcacgtcgtttttatactttcatcg

SEQ ID NO: 3701 - DNA, 370 bp, Glycine max
acacatgcagcaaccatgaggtatgtgggaaattgtatattacctatgactccgtgctgacactaaaattaagttcacaaaataacaatctgggaggttacagacgcacattcactaagcttcaattgatgactaaatgcggtgaaaatacaactttccgagtcttacctttcattgatatgaacatttatttactcagtggtactattgagtctttcttttacacataatttacccagacaaaatagggagagtatccaataccatatgctatattatgaccaatgcaaataaacgtcgacgagtaaatcatggttaccatttacaagtacgacagtagctccgtcaaaaataatgtgagagtacatat

SEQ ID NO: 3702 - DNA, 425 bp, Glycine max
  unsure at all n locations
ngaagttgctgagctgaaatccaagtattgtggctctctttgttnttacccattatatgctgtagtttcgttgttagattttttctttataggaatttatggtcctgtaagttcattgagagggcccaggcactaatacatggagatctacacactggttctgtgatggttactcgtgaatcaactcaagttattgatccagaatttgcattttatggaccaatgggttttgatattggagcattcttgggaaacttgattttggctttctttgctcaagatgggcatgctgatcaagcaaatgatcgaaaagtaggtcccctttttccatgtcttctgtggtccttacttgtcctcttctttgcatactataagttgtatttagtcacatttcttgttattctccataatctagctaccactta

SEQ ID NO: 3703 - DNA, 297 bp, Glycine max
attttctctgtaggcacataccaagaagaccattagcgagagcccatagaacagtcaagagaccagcagagacaaaccttaggagaaaacttgctgcaaataaagggggaaagaatcaattgacagaatatcccacattattaatgattgaaagaaaccctgttttaaagactttatttaccagaagaaaatattcaagacaaacaccctacgtggccgaccacatatataaattgctctcttggatgatggacgtccacgaataacatgcctggaattcaatagatgataagcatt

SEQ ID NO: 3704 - DNA, 398 bp, Glycine max
agcttctctcctgtcccgagactccatatctgagaaagagtgtatgccttcaggatctgattcatggttcaggcccatggacttcgcaagaatccattgctgcttggcctcttcgcagtcttcaaactgattttcttcttggttaatagtcccctcaactgcctgtaacttagtggtatttgggccttcagaagacgcatcatttaaaccacccatagtattatcctccttggagctattagcttgttcaggttccagctcaaggagacaagctttagctaggccgtgtctctgcctcacgtacactttaaggaatagtccagaatccctttttgtgactgggccagactggttgaaatcatatttgtacccctctgtttttttattggccccgattg

SEQ ID NO: 3705 - DNA, 422 bp, Glycine max
gactcgagtcatcaagagattataaatatgtgaccatggcatgagtttcaaaaaaataatcatcaatcatctttgaatcatctatctttcaatcttttttcaacatcatctctcaacatctttcaatcaatctttcaatatctttctacaaaattttctgattcatttctcttcatctttctaaaagttttttatcaacactttcacttccaagaaaagttctttgttcaaaaacttgcgctattcatctttttcattcttttctccctttgccaaaagaacgaaggactaaccgcttgaattcttttgtgtctctcttctcccttacaaaagattcaaaggactaaccgcctgagaattctttgtcttaacacattggagggtacatcctttgtggtacaagtagagggtacatctacttg

SEQ ID NO: 3706 - DNA, 423 bp, Glycine max
agctttgaaatccaaagatctaatccaatgtagatgtttcataaatgggattcctttgcttgtgttgtttgattctggtgccacccattcctttatatcctgtttgtgtgtaggaaaacttaagctttctgtgtcttctttaaataaagatatagtagtagagacccctactagtggttctgtgttaacttctgatgtgtgtttgaattgttctgtggagatttctggtaggatattcttgattgatttgatttgtttgcctttgagccagattgatgttattcttggtatggactggttatcttccaaccatgtcttgttgaactgttttgagaaaagtgtggtgtttgatgattctggagtgagtaaggatatgatgtttatctctgccaaccaaggtgtgacatctttaaaggaagatgc

SEQ ID NO: 3707 - DNA, 427 bp, Glycine max
tgtcgaaattgccatgtttgggtgagttagacatacctattctgttttagggtttttgtgatgatgtttgtgatgtttatatgctgaaattgctgatggaaatctgttagagatgaagggtagaactaacccaaggttagaaagtgagaatgtgacgttatgagtggaaaaagagtgagactttgagagttggaaggctaagtctgaattctgtggtaaatggaggttagagtgagttaatactagcttgaaatgtcatttagaacatgtgagaaaggttaggctgagctagagagaaaaacaaatgaccaaagtgaacaaagagccattgctagggcaaatttgggtgttgaagagtcaaattttgattcggtgagagtttaggtgtaaatccagtttgaacaagtctaaatggatgttatggact

SEQ ID NO: 3708 - DNA, 372 bp, Glycine max
  unsure at all n locations
tagcatgttataaatatatctattagcataatttatactagtgagaatatttgtatgggtatcttaccagaagcagagctcattcaccctttgaatcaagatgtatagtaggtccggttctgcaacagtaatgcaggtgatcctcttcaatttgatcatgttttgtttgctanaacatcataccatctattgccatttactcgaatttatagtcgctaacattagctactacaattaaaataacttaacaggttattgcaattctatctagtatatataagaaataatatggcatgcagtttatacatatattttctttataaagaggaatcataatttgtatatatttgatgcatttaaagtttttactat

SEQ ID NO: 3709 - DNA, 426 bp, Glycine max
tcactagttcatctcactgctttaatgaaaactgcctcttacagctgcatctctatgaagaccaaagaggattgtttcaaagtaattaatttcatatctgggtaaatactaaatactgagtgctattagttcctgtctagtcttccactagaataaaagtagacgaggaaactaatagtaagttaaaaaatttgctcatgtgcttttgcttagagttatgattttgtaagtttaacgcaacggaatggctaagttgctagcatgtatttttctgttgagcaggccctgtatttttgctattctgtcagtactccagtagcaacaaagcaaaatgcacacttagtagtacgtcagaacttaagactaccttgcctcttaaatcttataaaaatgctaaacgctatgaatgtgtttctatgaaaccac

SEQ ID NO: 3710 - DNA, 419 bp, Glycine max
  unsure at all n locations
tcacatatttgaagcttaacttcttcagtggctgtggctcacgggctacctttaaacttgcccaatctatgacgccggttcggaaaataaccgtcttcgtattgaatggttcgtgtactgttatttacaaaaaatgccaccggtcatttgttaaggacggttttagtagaaccgtccttattcacgcgtcgtaaaaagcttttaatttagtagtgactgtaatgttatttcaaagaagaatgaaagaacctagagttttcatcaccctcaccaatccatcccaccctagatttttgggtcatttcttcanagatctccaaaattctttagaaagagtcaacctccctccttctacatcttcaaccctctcacacaaccttatgttcaccacttatagctcctccactttggaatttata

SEQ ID NO: 3711 - DNA, 333 bp, Glycine max
  unsure at all n locations
agcttgacanaattatggacaattgtcttgccttcaggggttataatgctctcgggatgaaactgaactccctggtgaaaaaaaaaatcaatatgtgaagagaagagaagggagacaaagtgcaagttcaaagataataataataacaataacaacagaaaaaaggcatgaacttcagatcagcagaatcttttactgctaactangaataaatgaggtaaaaggtttaaatttgattgtaaagcaccttcacgagtagctaagtttcctaatttttaaacacagcataaaatataaagattttgccctgtaaaagtataaacactaaaaaag

SEQ ID NO: 3712 - DNA, 409 bp, Glycine max
  unsure at all n locations
ntgcgaaacgcttgtcgctggagctgacccatcaattgccctaactctcttagactgatgatccctaggctcttgaccttgacttgatagaacctttttttaagcaaaggcatttgacttgaccccatgttttactaaagtgaaaaaaaacccagtgcgaatcaaaactccgacatctactatggtcttccatttttcccgcagtattgagtcaatggttaggttggtgagatgttgccgtcgtggttcaattatatttaatatgtatgcatttatggttattttgtttggtcaacataaaaccaagttagcataaataatgaagtgttgtttctattcccttatgatcttatttgtgaaacttttgtggtgtttatgttggcagttgaacaggatcaagaaaattgga

SEQ ID NO: 3713 - DNA, 383 bp, Glycine max
agcttgcttgtggtgcttctatggaggctggatctttgagcttcaatgaggtccttcaatggtgattttccaccatggagatgcagtggaagacaaaggagaagaggtgagaggaggcgccatccactagggaataaaccatagaagaaggagcttcaccaccaagatgagccttggataagaagcttggagaggatgcttcaatggaggaaaagaaagagggagagaaagagagaggggggagcacaaaattgaaggaagaaaaagggagagaagttgaactttgagttgtgtctcacaagactctcattcatcaaagttacaacaagtgttacacatgcttctatttatagactaggtagcttccttgagaagctttcttg

SEQ ID NO: 3714 - DNA, 391 bp, Glycine max
  unsure at all n locations
tgctctanatttacattgatgtttgtatttattggaggaggttgtatgccatttttgttttaagggtagcatttcttggtaaaactaactttccaaatgtttgccttcgcaggaaatggccctgaggaagctcgcctcaaagaggtccaggaaggacaaggcggccgaaggaactagttccgctcctgagtatgacagtcaccgctttaggagcgctgtacaccagcagcgctgcgaagccatcaagggatggtcgtttctccgagagcgacgcgtccaactcagggacgacgagtatactgatttccaggaggaaatagggcgccggcggtggacatcactggttactcccatggccaagttcgatccaaaaatagtccttgagttttat

SEQ ID NO: 3715 - DNA, 404 bp, Glycine max
  unsure at all n locations
agcttccaagcttattgtgatgatgccaaagactcaagtcaagaatcatgattcaagcaagtttcaagaatcaaagagtcattcaatcaagaatcaagattcaagtgaagaatcaagagaagactcaagatatgcaagaacctcaagaaaagcatcaagataagtataaaaagaattttcaaagaaaagattgaatagcacaatttgtccgaaataatttttcaaagaaaaatcttttaccagagtttttatggtaatcgattaccagatgcctaaaaacgttgtataactattttacaaagtagtaatcaattaccatgggcatgtaatcgattaccaatgttgttgaactttgaatntaagatttcaagagtcacaacttgtgataaaatattttcaaactt

SEQ ID NO: 3716 - DNA, 420 bp, Glycine max
  unsure at all n locations
ntgagccaaaatcctgactcactatataccttgacccattgtgagaatgccaatccttaccctcggaagcaaaaaaagaatagaggggaaatttccgatcaaagaaaaagagaaggaaaatttccaatgaaagcaaaaaagaaatgaaggaaaattccccaatcaaagagtgggagaaagcaaaaaaaggaaaagaaggaaaattccccaatcaaagagtgggagaaagcaaaaagaaaagaaaggaaaattcccaatcaaagaatgggagaaagtaaaaaaggaagaagaagaaggaaagaaagctcctgatcaaggatcgaaagaaaccagaagaaatgtgcagagaggtctttggaccagacaatatctgaacagtacagaattgtcaccaaatgaacgaataaagaaggaaaggga

SEQ ID NO: 3717 - DNA, 262 bp, Glycine max
agcttcggttgttctatttcgagcatctttatatgtgatgttcctgtatcggacctccgtgtgataacttatgaccattataatttctcgagagcttccgctgttcaatttcgagcgtctcgatatattatgcgcccaaatcggacatctcggggaagggttatgaccatatcaatatcacgaaagctttggttggcaatttctagcatctcaattgtgatgttcctgtatcggaccttcgtgtcataacctatgaccattt

SEQ ID NO: 3718 - DNA, 377 bp, Glycine max
  unsure at all n locations
ntctcccaagtcctaaatgacatttcaagctagtattatctcactntaacctccatttaccacagaattcagacttaaccttccaactctcaaagcctcactctttttccactcataacaccacattctcactttccaaccctaggttaactctacatttcatctctaacagttttccatgggcaatttcagcatacaaacatcacaaacatcatcacaaaaccctaaaacagaatgggtatgtctaactcatccaaacatggcaatttcaacaagctttcaacaagtttcttcacaaataactatcatgaagcagaaaactagcaagactacccatcatatctnccaaaaccccatacccacgaaatttaagagag

SEQ ID NO: 3719 - DNA, 366 bp, Glycine max
  unsure at all n locations
agcttgatacatcatcacaagtggtggtgtcaaggttcctttttatttaaagagtgaaggatattcagagaatggggacaagaaattcatcttacgcagctgtgtaaaatgaaatgaaaaaacgggttgtgttttgattnttcatcagaacacanatcctattttcccactcactccttttctttcaaaggccaaaataatgcactactctcactgatcaccatcaaactatgcttcttctctctttgacaccaaccatcaaacctacatctctcacctgcatatntggccaacccacaatttgnggacctctggcactcntgtttgtattgcttcacatcgtttgggatctggtttgctcacgtc

SEQ ID NO: 3720 - DNA, 406 bp, Glycine max
  unsure at all n locations
tcatgatgaatcaacaatgattcanaggtgttttgatgataacaatgatgacaacaaaagatgatgacaaaggtgatgaacaaaaagctcanaagatcaaagaacaactcaagtgaatcaaagaacatctcaagtgaatcaagaacaagtcaagagttcaagaatcaagaagaattcaagattcaagactcaagaagaaagtctacaatcaagaatcaagattcaagattcaagatctcaagaatcaagatcaagattcaagaatgaagaaaagactcaatcaagataagtattaaaaagttttttcaaaactttgaatagcacatgagtttttgacaaaacctttaccaaagagtttttactctctggtaatcgattaccatattgttataatcgattaccagta

SEQ ID NO: 3721 - DNA, 366 bp, Glycine max
  unsure at all n locations
agcttgttattatgataagagcatacctgttgtttcctagaagtccaaaaatacaagacattttgttaatgaaataaccaaaaactatcatattaaccaaatcaccacctccaagctaccataaaaattataaaaaatttcataccactatatatatatccatgatctcaaccaatctttacataacccgtaatcaagtcttttgattanaaaaaaaaacctaatacattaatcatgtcaagaatggtggaaccatatattatattattagatcgatcatatgtttcaagaaaatgtctgagcctatctaataatttctcctaagaattcaatacacaaacctggatgagcagaaagctatgacat

SEQ ID NO: 3722 - DNA, 407 bp, Glycine max
  unsure at all n locations
tcgaagaaacggataacagattgattntactctgtaactagacgacatctccgactgatattgtggaccctatttgcttcttgatgcaatcctaccccctaaggacattgaataaaagactccaagaagattggaccagagagatgcaagagaagaccttaggattctcatgagccttagggtagatttcgggcccatgggttaagtataagtccacttatctttgtacatatcatatcaaggttttattatttttgggccttgtatttagggctctatagtgtaggtagggtacccttgaaatgtaggatttttcagcccttgtattttagggcaccttgactagtttattgtattaggggtagttctgtaatttcacatacattaagtgaatatttgatgtgtgt

SEQ ID NO: 3723 - DNA, 196 bp, Glycine max
acatggctcattaactgatgtttagtaccctcgtttgatctaacagttgggactgttgaacctccaatccatgttcgttgtagatggagcttggcatgcttgtgaggagggaaaggatggacaaactcgcacttggggaagcattctatatggttcgttgtcgcatgccaacgacgaatgtgattctctacctaaa

SEQ ID NO: 3724 - DNA, 391 bp, Glycine max
  unsure at all n locations
ccttattatacaagcttgcctaaggtgtttctctttcctaccccctaatgtatccttatggcatntcttattctgctcagtatcctagaagttaattaacctgttgcaatatgttaggagccatttcagctgtttttggttatacccttcaaattcttatctgtattcagagctatgaatctgtaaattctgttgcatggtactcttttggagctttttaataacttatgtatacactgcaggaaggtgatgtaattgcttatcgattgattgagttaacagcatcttggactccggaactttcctcctttatggtacatatcaagtctgcttttggattacataattngaaaaaaaattgcatcagaagtttaatacgtattacatctat

SEQ ID NO: 3725 - DNA, 336 bp, Glycine max
  unsure at all n locations
agctcgtgcttcacggataacatgatatctctgacatgntttatgacattgcctataattgaaagcaagatgaccataataacagccacagacatattcaatgactcaaatgtcatatttccttttctatggaagactttcaaatctcccattaatcacattttgttatatagcacgggtcaatggggacaggacatgtattccttttgccctcttctctcatcacccacaagatattttaaattatgattgtaaaacaaatagaatagtcgccattcaataatatgctctaacgtttttcggggtgacacctttgtgccattattgaatactatg

SEQ ID NO: 3726 - DNA, 389 bp, Glycine max
ttgagctcgatgatgctgccccatagagcccctcggatcttgtttctacccaattcttctgtttgggccctctttgtttcccgctccaatgcttcggtcatggtcatgttgacatcccttatctcgtcacactcttttctgaccttagtgactgccatctttagtctttctttaaccactcttgtttttcaagctctactttcaaggcttgcaccttctcgctctcctcagggacttcagcttcttccccacttggacctttcagctttgggagccaagttatctcttgcgtcttaaccttcaaccacttatgatagccgccgacgacaccgttgttgcttccactaagctccttatctttttgttccactgtattccatgcctttcgg

SEQ ID NO: 3727 - DNA, 411 bp, Glycine max
  unsure at all n locations
agcttgtaggattatggngtacccatcatatgtggtactaggtggcggtcgggcgatggtgcacaacaagttttccacatccacaatgcgcgcataaacccaccatcccctgttgcccacctccaactgagctcacgtactcccacgtagcccatatcctcttttctctcaacaccgggtccccatcaatcctcccaagccttcccaacatcaaagcaaaacaacattcaaacagcacaagctatcacagccaagcaaaacagagcaaaagcagaaaactctgccaaaacaccaaccagatcacagcttttctcacttagagaccccagtaacaattccttcgatccaaattcgtaaccgttggatcgactccaaaattttactggaagtctatagtgcataagcctacat

SEQ ID NO: 3728 - DNA, 425 bp, Glycine max
taacatgcttagaaatcaagtgatcatgtattccgaaatttagggggagaaaacggatgcacattttatctatatacaattgtttgttgcttgcttgaatcttgatttcaggtattgtattgtcatcatcaaaaagggggagattgtagatgcaattgactttgatgttttgatgatgatcatgatgatgtgttgcaattgatgcaaatgggcttttcaagattaaaattcaagacaatacttcaagattacaaggcacaacatcaagatgatcactagaatattaggaagggaattcctaattgaattagcaaaggtttggccaagtgatttaaaataaaaagtgtttttcaaaggttttactctctggtaatcgattaccagaggatgtaatcgattaccagtggccaaatacgttttataac

SEQ ID NO: 3729 - DNA, 406 bp, Glycine max
  unsure at all n locations
agcttgagcttcagctgctatntatctaatttaatgtacatcttgtaagaataatatgatatatgtcacagcttacaaacattgatgtaacattaaaaaataaatcaagtaactagaatatgtgaacagttctagataagggaatatcagcacaacaacaacaaacataacaaaaaggataaaaaacatatgaaaagaaagaggaggaaagaagagaataacagttgactactacaatatccttataggtattaaaaatatttgcaataacatgacaaaggaattgcttctcttaacattgtctaanaaaaactaacatgataccatggagtaacaaagttcagatagaggtttcttcatttaatacagctcacttcanaatagactttttatttncatttacttt

SEQ ID NO: 3730 - DNA, 436 bp, Glycine max
actcagcttacagatccgatcatggaaggatttggcaactgccttcattaggcagtaccagtacaatacggatatggctcccgatcggaaccagcttcagagtatgactaagcgagagcatgagtccattaaggaatatgcccaaagatggagagatctcgcagcccaagtcgtaccgcccatgacggagagggaaatgatcacaattatggtagatacgttacccacgttctaatatgaaaagctgataggctacatgccagctaactttatggatctcgtcttcgccggagaaaggattgaatccggactacggaaaggcaagttcgaatatgcttccaatgtggcccccaacaacaacagaagagccctagtagtgggtgcgaggaaaaaggaaggagacatccacgcggtcaccaccgccccgatgtggatg

SEQ ID NO: 3731 - DNA, 419 bp, Glycine max
  unsure at all n locations
gctcgtgaacgattgttaattcanattagtcgtataagtatatgtggtggtactaggaacgcgggaagcaccctaaatattgatttgtacgtgccatttgctaatgaggagcatgaaaactttattgtggatttcatgtttcaaaatttatggcttccttgcctcttcatcgtcatcttgtctttggtgatgctcataagaaatgtgggaaatttgttgcatgttaataaattctgtcattcgattgttcgagacgcgctgtaccgcagtagtaattatgtctcccacatcaatgtcttttgagtgcatttgatttgttagaaaatgtatgactaggtatacttatttcgcaaaaaaatacttattttattgtttgacagtttgttcatggatatttcttaatcttgaaaatttttctc

SEQ ID NO: 3732 - DNA, 429 bp, Glycine max
  unsure at all n locations
taagcttgttagtgtcttttctttctttntcttctggagttgagcttaagccctaaagccaaaacattgtcagagtcttttcttcatttttcttttagggttgagcttaagccacaaagcttaagccttggatgcccaatttcttcatttttcttttcttgagcttaagttatagatcttaagccttgtgagcacattttcttcatttttcttctaggattaagcttaagtcttgtcaaggtattttcttaatttttcttcttgggtcaagcttaagccttgtaagcctattttcttcactattcttcaaggagatagcttaggctatagagcttaagccttgtcaaaatcttttcttcattattgttctagggtcaagcttaaacggcaaagcttaagccttggaagtggtggttctttatttttctt

SEQ ID NO: 3733 - DNA, 374 bp, Glycine max
  unsure at all n locations
agctttgcggatttgtacttcgccagtgtaatgatcaaagtgggtctgaaaagaggcaaatttggtcatcctgctttgataaaaactggggcaaatgaagaggatgagaatgagggagaaacccatgttgtggttgccattcctatatggccaagtttcccaccaacccaacaatgtcattactcaaccaataacaacccatctccttacccaccacccaattatccataaaggccatccctaaatcaaaccacaaaacccacctaccaatgctaaacaccacctttagcataaaccanaacacccgccaatatatgagttttgcagcgaanaaaaccttgangattcacccaaaatccggtgtctatgctgac

SEQ ID NO: 3734 - DNA, 394 bp, Glycine max
  unsure at all n locations
tctaaacattntgattntcanaatttataatgaagagtcacatctgttgatgtgtaaccgactacaccttaatggtaatcgattaccagtgactgatttagaanaataaatttccaaaagtcacaattcttcaagtgacttgtttctgaaatttttttcaaaagtcataacttttttaagtgactagttttaaagaaactgccaagagtcacaaactttgacttgagtcatcaagagattataaatatgtgaccatgacatgaatttcataattatcaataatctattcttcaatcttttttcaacatcatctctcaacatctttcaatatattctttcatctctttcaacactttcaacagaactttctaattcatttctcttcatctttcta

SEQ ID NO: 3735 - DNA, 255 bp, Glycine max
agcttggcatatatatatatatatatatatatatatatatatatatatatttatatatattataacaaagagatcttcatctatgaaactatgttacgtgacaatctcatattttttacttttcaattaaacgcgatccattcaactatttattctaattatcttatttttcttcattaaacgcacccgcgccgaatatttagtttaattgctttattcttctatgttaaaataaaaaaatacataataattatt

SEQ ID NO: 3736 - DNA, 386 bp, Glycine max
gcttggcacaatgccactccatttactatccgagtatatagtggatcttgggatgacaatggcatttttatttacacaacattaaatcatataaaatattgcctccccaatggagatagtgggataattaaaacattggatgtcccaatttatattacaaaggttgttggaaacaccatcttctgcttgggtcgcgatgggaaaaacaaagctataactgttgatgcaacagaatatatctttaagcttttcttgttgaagaaaaaatatgatcatgtaatgaacatgataaagaattcgcagctttgtgggcaggctatgattgcttatctacaacagaaagggtttcctgaagttgcgctccattctgtgaaagatgagagaat

SEQ ID NO: 3737 - DNA, 416 bp, Glycine max
  unsure at all n locations
agcttgagcaactctaataggggaaattctccttctccaaccattctttccttcctttcttttatccatctcatcccttcttctatctacattagccctaaagtgtaaagcctctcatgataatgagaggctaaacccccattgttgggagtctggcagaccaacttttgtaatgtagctttttcttattatttatttaatacaatccaatttctgttgctcttttctgtgcttatttgtttattgattattgtatgatcatccatgttcatgtagtgcttagaggataatgctttgaanaatggttattttctaagaaataggaaaagacatctaaatgaaatcattgctagaaataaatngatatttgtttatcctattttatgcatatctaatcttaatgcaatttattggtt

SEQ ID NO: 3738 - DNA, 417 bp, Glycine max
  unsure at all n locations
tcaagaaaaagatggcctcagctnattccttatttccataagggaattctatcaatagacctccaatctttaatggagagggttaccactactggaaaacccgaatgcaaatttttatcgaggcaatagatctaaatatctgggaagccattgaaatagggccttatatacccaccacagtagaaagagtttcaatagatggtagttcatcaagtgaaagcataaccatagaaaaacctagagatagatggtctgaagaggatagaaaacgagtacaatacaacctaaaagccaaaaacataataacatctgccctaggaatggatgaatatttcagagtttcaaattgcaagagtgctaaggaaatgtgggacactcttcgattaacacatgaaggaactacagatgttaaaagat

SEQ ID NO: 3739 - DNA, 402 bp, Glycine max
  unsure at all n locations
agcnttgatgatatggtcttcaccgactaaaggatcaatgtgggtctaaataaaggcaaatttagtcatcctacttagacgaatgagaaaactggggcaaaagaagagggtgaggatgaaggagaagcccgtgctgtgactgccattccaatacagccaagtttcccaccaacccaacaatgtcattactcagccaataacaaaccttctccttacccaccgcccagttatccacgaaggccatccctaaaatcaaccacaaagcctacctaccgcacttccaatgacaaacaccacctttagtgtaaaccaaaacaccaaccaagaaatgaattttgcagcgagaaagccttagaattcaccccaattccagtgtcctatgctaacttggctccatatcta

SEQ ID NO: 3740 - DNA, 413 bp, Glycine max
tgtaatcgattacacacatactgtaatcgattaccagagcacattttcaaaaaatattctcaacagtcacatctttttatgtggttcttgaatggctatcaaaggcctatatatatatgtgacttgagacacgaatttaagaagagtttttggagaacaaaaaggtcttatcctattaaaaagcaaatcgtgttatcctcttacaaattccttggccaaattacttgtgattcaataaggaattatttgagtgctcaaattgttcagtctatctctttcaagagagatttcttcttttcttcttcttcattctgaaaagggattaagagaccgagggtctcctgttgtgaaagaattctaaacacaaaggaagggttgtccttgtgtgtttagaaccttgtaaaggaatttac

SEQ ID NO: 3741 - DNA, 355 bp, Glycine max
agcttcttgatgacaggaagcatggacttatgtgagtcattccaaaatgtgatattatcgctaaggacaagcacaaaagatacacaacatcattacatattttatttctgaaaattatctacctactcacctatgtgatgataataataataataaatatagcacaaatcaaggttgatttaatgatatttttcaatattgtaatgttaacctaaaactgaagttaatcgatcacataaataaatgtcgtcgtatttagaaaagaaaaacagaaaaaagggaaggtggagtataacctgcagtgagtccatggataaggaattttggtgacattgacatgtaatgccttttggac

SEQ ID NO: 3742 - DNA, 408 bp, Glycine max
  unsure at all n locations
tatgaccaatttgatctccaactntgagctcctcattgtccatgaaggtgataattcccttccggcacacagaatcatagagtttacaagtaaaagtgtgatgggtatcatctctcctaaaactaaggaatacgtcatgggtacactntgtttcagacactgtaccatcatttgccatgattgtattgtagtagcactgcaagtagagtagtgggactatgagctttctttcactgaatgaatgactcgcatcacaaatctcctacaacttatatcaggaatttaaacaaatactaatatactttgttatttttacatcatattattatatattctattttttatttgaatatatttattatcattntctctccggctctctccaatagccactgtggccccttggat

SEQ ID NO: 3743 - DNA, 369 bp, Glycine max
  unsure at all n locations
agctttaccattgaattcagcaccttatgtcatattagatggaaattgggtatcttaacataagagaattcagatggactttaatcctaattccacaagcgaccttttcacgagatctctacttaaccctttgggtacatgatcagccacattatgctgagttctcacaaactccactgatatcacaccatgcatgattaactcccgaaccatgttgtgtctaacacccaagtgtctagactttccattatacactggactatatgccttagccaaagntaatatggggtaaccttattccttttggtaggaattcagtttaacatgtaacaggctgccaacatagcctcaccccaaaatccttcactt

SEQ ID NO: 3744 - DNA, 407 bp, Glycine max
tgtcatagtatgacatgtgcagatgaataagattaggattaggcaatccacccgcaaaaaatgagtcattaggacaatgagttatgatcaaatcatgaagaagtgagagactctagtaagcatgttctacaatatatagaaatggatttcaaattcttacaattagaaattctaagacttttaagcacagagaaacaacctaaggtgaaggaagtcagtgaataacatctattaaatattgtcaaattctttaatgatgtgtaattgtgtaaggattcataaggtaggaactccaatttctcacaattaagtagagtaagagattgcaatgcattcagcagaccatctcttaaggatgctagggaattagtgccagagatagttaagtctaggatgaaattggtgga

SEQ ID NO: 3745 - DNA, 362 bp, Glycine max
ctcatgtgttctagtctttgatggcatagggatgaattgttgacatgcctcagtaactgctaccatatcctcatctgcaatcatgtaaagagatcctcgcttttttccacgagccacaatgagattgccttttgttacccttcaagctctatatccaaaagtggtgtaatgcccctcattatccaactaccctatagatgttagatttccctttaaggcaagaatatgtcaaacattgtacagtgtccatagggatccactagaggtcctgatgtcaatatcacctcttccgacaatgtcaagagattttcatctgcaaggtaaactttccaaaccttccaaaatatagttagataaaaatc

SEQ ID NO: 3746 - DNA, 455 bp, Glycine max
  unsure at all n locations
gtgaccttagaatcctcaagcttcgagaattgcccaaactccctctccatttctgattttatgcttaaataggtggccttgttggtgcttgtgcgcctagcgcaactatggctcgcttagcgtgcattagtgaatttcagcttagcgcgcgtcttttcactcagtggatggactcaagtggtgtgcttagcgggattagccctcgctcggaaaacatttacagcttatccttcttccagattcttcctcgcgctcagccgcaagagtggtgcgctcagcggatggctcgataagccagcagattggcttagcgagcggatgaaaatcagcacttcacaaacttgcctaattaacctgaaattgagaggaaatgattattaaacacacaaaatgggagtactaagtatttattacctatctttaacananagtaattacaacattacaaaataacc

SEQ ID NO: 3747 - DNA, 408 bp, Glycine max
  unsure at all n locations
agcttgaacaatagaagagcttcccnctttcctcgaaactctaaatgcccaatattgcacttgtcttcaaactcttccagagcttcccaaattgcttaaaactttaaatgtcaaagaatgcaaatcgcttcagagtctaccagagctttccccgtcgctagaaattctaaatgcaagagactgcgaatcattgatgactgtattgtttccttcaacggcggttgaacaattaaaggaaaataggacacaggttatgttctggaattgcttgaacttggatgaacattctctagtggctattgggttgaatgcacaaatcaacatgatgaaattcgcanaccaccacctatctacaccaaatcgtgagcattgtgaaaattacaatgattcttttcaagttgtttacat

SEQ ID NO: 3748 - DNA, 434 bp, Glycine max
  unsure at all n locations
tgtcaaggtaggaaaaaaggacagtgcatgtcatattgtccgacccatcaagcatattcacaatctgcaacaggaaaaggacggcaatgaaggaagaaaaagactaatctacattatgttttcagtgtcactcacaaggacataagaataacatttgatgcaaatttaaaagaaatcataaacaaaaaatttgatgaagtgcatatcttatagaaaacagttaagaaataacaataaccaaatgaggcattttttggttgtgcttttttggtgtctgttgattatgctggagcataattctaaaacttttagccataaaagtacccttctccaccttttatgagacaggcttgtttccttagcttccttatngtggtttgcatattggatttttttagttttcaaaggttggccatgcaataggactatattgt

SEQ ID NO: 3749 - DNA, 391 bp, Glycine max
  unsure at all n locations
agctntggagaaccaagccaatcagaatgctagacgaaatatagatgggaatagaggtaacaatggcggtaatgacggaccgaggcagaaccgggttgagggagtaaagctcaatgttcctcccttcaaaggtagaagtgatccagatgcctacctggactgggaaatgaagactgagcacgtatttgcctgcaatgactacactgatgcgcagaaagtcaagctagcagcagctgaattctccgactatgcccttgtttggtggcataaataccaaagagaaatgttgagagaggaacggcgagaggtagatacatggactgagatgaaaagggtgatgagaaaaaggtatgtgcccactagctataacaaaaccatgcgacagaaactt

SEQ ID NO: 3750 - DNA, 431 bp, Glycine max
  unsure at all n locations
ntgatggtgttgagaaaaaatcacatgtttgtcatcatcaaaaagggggagaatgtgaatgtatgtatacatgattttgatgatgtcaaaagaagaatcaaacaaggctcattttgcttcaagattaatacaagattgtttcaacaaacaaatccttgattcaatatttcttcaagatcaagccttgcctcaaaatgcagagatttcaagtcatccaaggcacatgtaatcgattaccaatggtaatcgattaccaaggcacatgaaagtgtgtaatcgattacacatcatatgtaatcgattaccagagactctgaacgttgggaattcaaattataactgtgtaatcgattacacaaacattgtaatcgattaccagtggaaagttttcagaaaatctgccaacagtcacatcttttcattagatttgt

SEQ ID NO: 3751 - DNA, 405 bp, Glycine max
agcttgagaattgtaaaggactacttaatagcatgaaatacgtcttagaagggaggattttctaagacggttatgatgatgaaaccatcttaaaataactctcattctaagagggttatctaatcaaaatcatcgttgaaaaggactcattctaggctctctgtgctttttttttttttttttttttatgttttagacctagtaattgtcttagaatgggagctattctaagatgatttcgttgtcatagtcgtcttatgtagcacccttattttttgtaaaataaattaaaacatttttttttaaaaataaatagggtttaggaaaataatgaggtttttgtaattaaataaataaggaggaataattttattaattaaataatgggtttaaggtgaataaaat

SEQ ID NO: 3752 - DNA, 426 bp, Glycine max
tgtccaaaactaggtaaagatgttcagggtccagaatctaattaattaagtcgatgcaaagattagataacactataacaatcatgaagctctcataataaaattacctcttttatttatggcagatactttactatcaagcaaacaagataaataaaattagaaagatacccaagaaagatgaagaaacacttgagaattttcgttctagtaactaatttgttataagatttgcactgctagatcctcaaacaaccaatctttccagaaaaatcattaatgatttaccattcttatttaaaaaatattaaggttaacttttatgaaccataatcatggatcatgttatttgaaacaaaatttataccatcatcaagaaggagaatgatactttaataatgatacttcaaattgtaccatcaaaag

SEQ ID NO: 3753 - DNA, 328 bp, Glycine max
  unsure at all n locations
gagcccgagtagtcgaagatatgnttaagtccatagccatcanagtctgaaaagagtatgatgaactaagggacgtctatatggccaccgttgaagccttggaacgagaaaccaagaaggcccgaaaggaataacacgtgccagcaaagttttgaggggctttatagggcagcaatagtaagctcaagctccgaaaaggtgaaaggaatcatcacgggtcaaaggcatgatcttgaaggatgagctaaaggcttaccttaggtcgaaaagaaatttgtcccaacaagtaagcgagactgaagggaatatgtgggccgtcatcgatgag

SEQ ID NO: 3754 - DNA, 425 bp, Glycine max
tttatctctatatatttttttattcttttaggaatccatataatagccatatgatatacgagttcttgttattcaattatttgttttctaagaaatccgactcaatacgaattttctgagacttcattcacttcaatttactaccacaaattgcctcatgtacctacaacaattcttttacctgtattgaaaaataggggtatggcaaaaaaattagagcaattgtcctccactgagtgggcataagcttagcaagatgaagtagctttttatcctcttctcttgtccacccaatctatacacaaaaagcatcagattgaaaaatcactcattagaaaaatatcacaacaattaataacatagttggtacatactccttatcaataacatcttaaaaaaagagaggctcttaaacccaaagaaag

SEQ ID NO: 3755 - DNA, 415 bp, Glycine max
  unsure at all n locations
ntggngctggnaaactatataacttcaccaaggttctagtttaggctctctcttctctctctccctgtgtcattctgctttaggcttttcttcttttagacactatttcattttgcaattccaatttttacttttcgtttcagcaataaaactccattcttcaatctataattccggtctctattgattaatggaaggctaagtccccaacgatgttttctcttgaggatcaagcacagttctctttgaggttctattattactggtaatttatgttcatgcttaatgatcgctcatgattaattggtgtatgtgttgcttaatcacataatgaatgccttatgttagattttgcttagtaattcaatttaaggttggactaagtggttgaaatgataaaggataaactctcgta

SEQ ID NO: 3756 - DNA, 357 bp, Glycine max
  unsure at all n locations
agcttgtccctccccttagaattgctacttccactttgccatcctaattatttattgggtacatgtaaataatagatactgaaattcgaatcaaactaaaataaaacaacttaattcgattttaaacacctgccatctaaacgtggaataatgggttgtcaagtccatcagtaacacctgccatcctaattacgttttatttggtgaataattccttcctataaccatgctctattattttccacgagtgtacagtgtcccaacttcagcttgttaggaatctgagatctaccacanaggagcatcaattatacaaaataaattattcgttttctacaattcacccctccttatgct

SEQ ID NO: 3757 - DNA, 414 bp, Glycine max
tgtgcttaacgtagaatttccaattatattttataatattaattgcaactccaataaaaacaatttaactatatattattattaacgtaatttctatttctactactcttaaaaacaatttcactatatattgttataaatcatgtggatacattttgtcacaatctaaacatgtcagtcgcatcaatttttccttttcccatataaccccagaatttcaagagttagtcaacttgaatctcctattatagaggcattttcattcacacaccccaaattgttggaaaaataaaataaacaataagcaagaaaaacacacacgtgcttttctcctaataatcacctcaagctacgtatgagcaaccagtgaggggatatccccaatatgctccacaataaagaaacatgtgacat

SEQ ID NO: 3758 - DNA, 410 bp, Glycine max
agcttatcggtcacatgactaacaacatattacaaacaaccaggtaatgaaggaggttctctgttagggagtaaaaaagttgacatcggcattttgaatttaatatcatccttaatgtttccttgattgtagacaccaattagagtccagcctataatttccatggaaatgttgtgggcccacattgcttctacagaacttggtgcaggacatttcaactcgaataaaatctcagcttcattccattcgtgctctgaaaatattccctccgctttgcattctagatcacaccagagtatcgggtcccatgttctaaatatgtaattacatgaagaactaaatcgcatagtgccattgatgagtacgctgaacttcataatcaacaccattttcatgacacttttcaatct

SEQ ID NO: 3759 - DNA, 394 bp, Glycine max
  unsure at all n locations
tgatgttgttttgcatgtactgtatgaaaaagaaggtagtgattagatttaatttttaatagacatatgattgatttctgatctgctcaagtttgagatttctttctttctttcttttttttgcttgaattatgagtaacctacaagcttggtccaatcatgcaactaatttttggctcatcaatctttaagcttgacccttttcagaaacctttgcgaatgattaaccttttggttgctacttttcatccaacctatttgaatgtgacctatatatgtatgcattggaggtttccaactntttaagatagaaatgtatctgaaatctctaaatacatgagctgcagaagaggaaaatatgctgaanaatcttgtattgtgaatacctgacttt

SEQ ID NO: 3760 - DNA, 399 bp, Glycine max
agcttggttcaaggtacttacccgttgaagatcgaagaacgatgaagaacgaatgaagaacgtcgaagaacggtcgaaaaccttcgcgaaattcctcacggaaaacgttacggaaacgtttcggaagcgcctcggcttatattttcttcacggaaacaatttttccaagcaaattcgaaagagagataagtgcctaaggggctgaacccttttccttctcacttcctcccctatttatagcaaaataggggagatgcttgctgcccagctcgcccaggcgagcagggttgcttcctccagaagcaacagccttctggaggaatcttctggagggcccaagtgggcctgggtgctatttgcactcccatttttactaagtacaccccctctgcttttttt

SEQ ID NO: 3761 - DNA, 417 bp, Glycine max
attcgattcattctatgtacccgtagtggtccacattgtgtctcgtgcattattattctcgttttgtttactttttataccccctgttgacgcgcttaagccattttacttaagccatttctcgcttaacttaaaaataaaataaatttccaccgaacgtttgaattgtattatccattaacttcgtttaaaatatattccgaccgttcggtcgtgccgtaaccacgttggaaatcaaaaagaggtaaaaaataatataataatcaagaagacatcttttagtaaaataaagcggaaaatcaatcggacgttatctctttgggatgtctcattcttaatcgaattgattaataactaaagtgaaactagaggctaacatcaattcggctagtcaagctcgtacataaaataggcttt

SEQ ID NO: 3762 - DNA, 415 bp, Glycine max
  unsure at all n locations
agctntactatgtaatgaataaccaaggtaaattccttcatctgacttggcatcaaattctcctaagttttcctttccattgtttaatacaaagcatttgcaaccaaaaacatgtagatgtgagatgtttggttttctaccattgaacaattcatatggagttttctttaagataggtctgattaaagccctattcatgatataacatgcagtattaacagcttcagcccaaaaatattttggaagaggagtatcattcaataaggttctagcaatttctttcacagacctatttttcctttcaacaacttcattttgttgagggggtctaggtgcagaaaaaatatgttcaataccatgcttttcacaaaataagtcaaattctttattttcaattccccccatgatcacttct

SEQ ID NO: 3763 - DNA, 399 bp, Glycine max
  unsure at all n locations
tttaacccnctttntaaaagatatgcttagaatacagatgaagaacaagaagcaatcaatttaacaatgttcttttaaacgtgcaaggaaaaattgattgcaataaaataaatgagataagggaagagagaaatgcaaacttgatttatactggttcgaccactttccgtgcctacatccaatcctcaaacaacctacttgagattttccactatctttgcaaaaatcctttttacaacttctgaacacccaaggaatcattttcccttgtgttcaagaaactcacaattcaagagacaaccagtctcttgattacaattgattttatgagaagaacaaaaagatttctctcttttagagtggataatacaatttgaagttcctggatgaactctcaat

SEQ ID NO: 3764 - DNA, 392 bp, Glycine max
agcttgagaattgtaaaggactacttaatagcatgaaatacgtcttagaagggaggattttctaagacggttatgatgatgaaaccatcttaaaataactctcattctaagagggttatctaatcaaaatcatcgttgaaaaggactcattctaggctctctgtgctttttttttttttttttttttatgggttagacctagtaattgtcttagaatgggagctattctaagatgatttcgttgtcatagtccgcttatgtagcacccttattttttgtaaataaattaaaacattttttttaaaaataaatagcgcttaagaaaataatgatgtttttgtaattaaataaataaggaggaatatatttattaattaaataatggttttaag

SEQ ID NO: 3765 - DNA, 366 bp, Glycine max
  unsure at all n locations
tgtccaaaactaggtaaagatgttcagggtccagaatccaattaattaagtcgatgcaaagattagataacactataacaatcatgaagctctcatagtaaaattacctcttttatttatggcagatactttactatcgagctaacatgataaataaaattagaaagatacccaagaaagatgaagaaacacttgagaattttcgatctagtaactaatttgttataagatttgcactgctagatcctgaaacaaccaatctttccagaaaaatcattaatgatttaccattcttatctaaaanaaattaagggtaacttttatgaaccataatcatggatcatgttatttgaaacaaaacttata

SEQ ID NO: 3766 - DNA, 367 bp, Glycine max
  unsure at all n locations
ctataattcatgggcataaatttatcatcctatgtctaacaatgatttcaatatgatatcctttctttttggtctaataaaaggtatcctcttggcagcggataacccataaaactgatacatgcacattttctttatatttctaccttcctaagacaatctttatcctagcccctccccaaattaggggtctattttgaataaaacaccttatgttgtcttaaaaccctaaaaccagggtcaaaatatcagaaataaggtcagggattttataaaaaataataataatgttgctcacaaggtgcagggataattttcaccaaggctggctcttggctaagtggataaataaaaagaaacatggctn

SEQ ID NO: 3767 - DNA, 405 bp, Glycine max
tggggcattgaggaagggttttggaagaaagaaggagataggaatggttgttttccaaggctacacgaaaaataagacttgaaacactcaagtgtttctactctcaggaaaagaagcttttctcacacaccaaaagacatattgtagatcgtaacgatcaggtcgtagaaatctgtcctatgaacctccagaccaaatttcgagaagatctaacaattaacgattgcagaagggcgcttttaccaaggtagcttcaggtagcttccttgagaagcttttctcgagaggcttccttgataagcttcctcgtgaggcttctttgagaagctagagttttaactacccacacccttataataactaaattcacctccttgaaataaaacatggataaaacaacacaat

SEQ ID NO: 3768 - DNA, 344 bp, Glycine max
agctcgtatagttccccaatttatggttattttggagtaaattttgtaaataaatcttgttttatggttaacgatgtctttagaaaatttccattggatctaatgaagaaatctgtgcattttcaggtgaaaaagaggctaagttttgaattgcaaaatgtagcaattgcgctaagctcagcagttgggctaagcgcagcttcagcgcgcttagtgcaaaggagaatctggcagagcatcagaattaaagttgtgcgctaagcacgagatctgtgcgctgagcgcagcaggtgccttcaaccaggctaagctcgagactagcgctaagcccaatttcacttact

SEQ ID NO: 3769 - DNA, 425 bp, Glycine max
  unsure at all n locations
gcttctgatgaatcaagattgattcanagaagttttgatgataacaaaggtgatgacaaanagctcaaatatcaagaacacttcatgataacaaagatgatgatctcaagaatcaaagaatgaattcaagattgaatcaagaacacttcaaggttcaagaggaaatttgatttcaagaatccaagaattaagatcaagattcaagacacaagattcaagaatcaagagaagaattaatcaagataagtattaaaaagttttttcaaaaactgagtagcacatgaatttttctcataaccttttaccaaagagtttttactctctggtaatcgattactagattattgtaatcgattaccagtagcaaaatggttttcaaaaaacctttcaactgaatttacaacgttccaattgatttcaaaatg

SEQ ID NO: 3770 - DNA, 410 bp, Glycine max
tcttaagcacctgcggcatgcaactataccttatcggaattggaaaagatttaatgtaagtcaagagcatgatagtgtgtcgataccattaactggtcacaggttcttaagcaggccgagggcatcaatattgtatttggaaagacccaagagaaggaaaaaactaaaacttccatatggaagaagaggtcgatattgtttgatcttccatactggtatgatctagatgtcagacattgtattgatgttatgcatgttgagaaaaatgtgtgtgatagtgtcattagcacacttggtaacattcaaagaaagacaaaggatggtttgaatactcaccaggatctagtttagataggtatacgagacccagtacattcaaggtctgatggtaacaaaatatacttgccttc

SEQ ID NO: 3771 - DNA, 410 bp, Glycine max
  unsure at all n locations
tcttacatagtccgcctttgcttgaccttctttatgcttaanaacagaaacattatgcataggcaaaagatcaagaggagttagtgggttaaaaccataaacaacttcaaaaggagaacaattagtggcattatgaacaactctattgtaagcaaattcaacatggggtaaacaagcttcccaagtttttaagttcttcctcaaaactgttctaagcaaagttcccaaagttctattaacaacttttgtttgcccatcggtttgtggctgacaagtggttgaaaataacaatttagtgcccaacttgctccacaaagtcctccaaaaatggcttaagaacttagagtccctatcactaacaatgctccttggcaaaccatggagtctcacaatctcctgttggatcaagt

SEQ ID NO: 3772 - DNA, 425 bp, Glycine max
  unsure at all n locations
agcttgatgtgagaaagcgtggaagagttagtcttcctactttngtttgttgaccacaaagcggtacctggagatatgtcgcgggggtcgtcaggtggggtgctattgcccaaaaccaagcttgaccaatcccgacccaacccgggcatagtcagtcagtgagaacctgtgacgtacctaaacaggcgagctcctggcagtcaaccaataaaagaacaaagaccacaaagcaaggaggcttgtgtggcggctggccagctatggatcttgagtggtatctagaaattggcctctggtaatcgattaccaagggtgtgtaatcgattacaagacttaaaaatggagacaggaagttaagatggcctctggtaatcgattaccaaggggtgtaatcaattacaaggcttagaaatggngacaggatg

SEQ ID NO: 3773 - DNA, 427 bp, Glycine max
  unsure at all n locations
tcagacctaagcaacacanaatctaggtatccaaaatccctcaatttaatggattttcaaggtttgagaagtgaaattgagaatgaagtaaatttggagcaaactctcacctcacacaagtctataacatcaatttaaacttgctcaaactggatttacacctaaaattccaccgaatcaaaatttgactcatcaacacccaattttaccctagaaatggctctttgttcactttggtcatttgtttttctctcttgcacagcccaagctttctcataagtcctaaatgacatttcaaactaggattaactcactttaacctccaaataccactaaatccagatttgaccttccaactctcaaaaactcactctttttccactcataacaccatattctcactttctaaccctatgttaactctacc

SEQ ID NO: 3774 - DNA, 400 bp, Glycine max
acaaacccatgacgtaccaatttgaacatttcttgctccataacattcttgatgaacggctatttgacatctataaaatatataatgcattcttatattaattgcaacgaaattcaaaatgaagagtaagaaaacaacaaccaacaaaaacttgccggatagttcaatcttgcagaagaaaaaaaaaaggttttataagcaaatggtttcattgtcagcggtgatctgactgataagtgaggatggtaaggctgaaaaactgtttcggcaaagcagaatggagactgctgagcatggaattgaacaacataagaaagggtgcatataattgtcaaatggtgtagacaaaatgctggagtttcttcttgcttatatcatttcaagatgacattaattagat

SEQ ID NO: 3775 - DNA, 388 bp, Glycine max
ttctctaccacttgtcatccacaaactgatgggcttacagaggtagtgtataggtctttatccactcttttaagggctcttctaaaaggcaaccataagtcttgggatgagtatcttcctcatgtagaatttgcctacaataggggcgttcatagaaccaccaagcaatccccttttgaggttgtctatgggttcaatcccttaacacccttagacctcattcccctcccacttgacacttcttttatacataaagaaggggaatctaggtcagagtttgtaaagaagttgcatgagagggttaagacccaaatagagaaccaaacaaaggtgtattcaactaagggcaatagaggaagaaaggagctagttcttaatgagggggact

SEQ ID NO: 3776 - DNA, 310 bp, Glycine max
  unsure at all n locations
gtcacctgcggctgcagcttccgttattagtgcacagctcttcaaaattggcatatcttggaatttgctttattgcatccaacagaggtatgtttacctctacttttctaaacgtttccaagatctctttctctacctcttccattnttttgntggaaactgctcttggagggaatggaagagggggaatgtgctgcttctgcaaatcagaattacctgtggaagaagattcacctgcacagaaattgttaggtaaatttttgtcatcacctttntctggaatagagtgaagtttggcaggttcatttgc

SEQ ID NO: 3777 - DNA, 380 bp, Glycine max
  unsure at all n locations
ntgagcaaattgaattgactattactttatacacggatgtctggttgagtccagtaatatatcgagacggtccaaattgaaaatggaagctcgtaggaaattcaaacgacaataactttttactcggatgtccgattgaatcgggtaatatatcgacacgctcaaaattgagactagaagctctgagcaaactgaaacgacaataactttatacatagatttccggttgagtcccgtaatatatcgagatgctccaaattgaaaatggaagctcttagaaaattctaacgacaataacattttactcggatatccgacagagtctcgtaatatatcaagacactcgaaattcagaacagaagctctgagaatttcaaacg

SEQ ID NO: 3778 - DNA, 404 bp, Glycine max
  unsure at all n locations
agcttgttgagggtctctgttagggcttctatttgtcgggacaacagcttgttctgagctaaggttgcatcttgagtggtgagttctagaaggcttctctttgttggtgcatatgtgcgatcaggaagaatggcgtgatcactagccgccatgttttctatgagttccattgcctcctccggtgtctttagcttaatcttccctcttgcggatgcatccaatatttgctttgattgtggtcgcaggccatctatgaagatgtttagttgcaccgattcactgtacccatgtgtaggcatctttctaagtagtccatggaaacggtcgagtgcctcgctgagggattcattanngaaatgatggaataaagagatttccatcttccctttagcgggcctttgatt

SEQ ID NO: 3779 - DNA, 411 bp, Glycine max
  unsure at all n locations
tctattgcaggaatttcatgccacaccaaccggtggctatataggagtcacgaagaccttagcaaggttacaagagaacttcacgtgcagctcaattcatcaggatgttcgcagattcatcgaacaatgcctcgattgtcaacataccaattatatcactaggaaaccagttggactacttgcacccttccctctaccaactcgaccatgggaagacttttcactcgatttcattgttggtttaccatcttactgngggtatacaaccatattggtggttgttgatagattnttgaagggcattcatttgggtcttcttcttccacactatactgcgtaccaagtcgcaaacctcttcctggatattggttctaaactgcacgacatgcctaagagcctagttntcgatag

SEQ ID NO: 3780 - DNA, 394 bp, Glycine max
agcttcaagaaaaatggcctcaacaaattccttatttccagaaggaaattctatcaatagacctccaatctttaatggagagggttaccactactggaaaacccgaatgcaaatttttattgaggcaatagacttaagtatttgggaagccatagaaatagggccttatatacccaccacagtggaaagaattacaatagatggtagcacatcaagtgaaagcataacaatagaaaaacctagagatagatggtcagaagaggatagaagacgagtacaatacaatttaaaagccaaaaacataataacatcagccctaggtatggatgaatatttcagggtttcaaattgtaagagtgctaaggaaatgtgggacactctacattaacacatg

SEQ ID NO: 3781 - DNA, 405 bp, Glycine max
  unsure at all n locations
tctagccaaatggacttaccttgaattaattcctttgatagcccttttgagccttgtttccctttccttgttttgaagctcactacaagccttaagtgaaaaaccatgatattaccatatccttaaggaattttggagctttggaattgttttgggaataagtgtggggggtttttgtttcattggacaacttgttttgttgactatgcttcatgatgtattttgggtcatacttgatgtacattgtatattggttaaatgttggacatgctgaatgaaatgttgtttctcaaaggtaaaaaaaaaaataaaaaaatcaaaataaaaaaaaaatcaaaaaaaaaaagagagaanagcaataaagttgagtgaatatgatcttaaatggcacaagaatgatgaaac

SEQ ID NO: 3782 - DNA, 420 bp, Glycine max
agcttctgcagctcttgtattgctacatgtgacagtatatcaggtcgaatgctcaatgcttgcccaagttttatgtatgctggacccaaagatgtcacaatttcacgtaactcaatagccctagcaacttcattctggttatggaaagaggacaaaagaataaccaaaatgtaatctcaaaatttgcatttttgaacaaagactatgaaatataaagaaactgttactattttcagagaagcttagatatttatctatagtccatacataacaaaagctcaagccataagctcttcagtacagaactagaacaactctgtatacagccctatttagtcattatttagatatataacacaaatttacaataatacttacataattcattaatagtattgtaatatagtcgatttatatatt

SEQ ID NO: 3783 - DNA, 416 bp, Glycine max
  unsure at all n locations
tgccaaagtgaaggctcaagtttctgaagtcaagggtgttatgatggaaaacattgaaaaggtaagacctatacaaaatgacattgtatagaggtctttaacagagtcgatgccatcatccatcaaatatatagtactaatttggattgaaaatttacattttctcgtaggttcttgatcgtggagaaaagattgagctgctcgtggataagactgacaaccttcggtcacaggtttcattttcttctttattcttttagatatatttttaatctaatttacacgactttgtgttcattttttttttatttttttgttaaatatttcttacattatttaaatttttggtgttagtatatgctgacatcattagntacttggttttaatttctatctcaacttgttatgcgatgact

SEQ ID NO: 3784 - DNA, 406 bp, Glycine max
  unsure at all n locations
agcttgtagccattataagagaatgagcatgtgattagaagtatgactgataatgttagtcagtttgtcaaattgattgtgaaggaatgcattaatcatatcctggtgagagtgtgatccttaaattttgagagaaacgactataatttagtactaatttttgcgtgaatctctaaagtatggactaaatgtatgaaactgaggatgatgaaggccatgtttaattgtgaaagccacttggccaaaaagttgaccatgtgcttgaatgaattattccttgtacccagtttgagctgaatgaattattgattgattgaaccctgagcctatacaatgttatctcctaccttgacttangtngcaggagagcatcatccacaggaagcatggttcanagcaaatttgt

SEQ ID NO: 3785 - DNA, 408 bp, Glycine max
  unsure at all n locations
tttanatatgtatacactnttagggatcacaaacttattaatactgaccagagatgaaagtaaccctcaatagcagtcaattcacacaacataacccacaggacagaagattaagacatggtgtgaaggaacttaccgtaggtttgagcaattctataatttcttgagcttgccaaagccttatgtcaacaatattagcaagtaaatcaacctcaatcaaaatgtgggattgctcattgngatgctgcctggtcttcctcttaattttttcttcctttacgattgaaaggataataatcttagacattacacaagaataatatatagatcaataaaaataagcatcatatttatttcacactttntaatattagacctagaaaggtcatatcaggccttcattacctt

SEQ ID NO: 3786 - DNA, 351 bp, Glycine max
  unsure at all n locations
agcttaatcttctttatgaatcttcttaatgaagcttctcaaggaggtgagcttagttatgagaggggtgtgtgtatctaagctctagcttctcaaggaagttttctcaaagaagcttctcaaggaagttttctcaagaaagcttctcaaggaagctacctagtctataaatagaagcatgtgtaacacttgttgtaactttgatgaatgaaagtcttgtgagacacaactcaaagntcaacttctctccctttttcttccttcaatttcgngctcccncctctctttctctccctttttcttttcctccattgaagcatcctctccaagcttcttatcccaagctcatct

SEQ ID NO: 3787 - DNA, 439 bp, Glycine max
tgacactatgaaactcagctttataggtgaaatcaagtgcagccatttcccttagagtcctctcacgaggtggaggttgtgccatgttctcagaatgtgcaaaatcagaatgctcaaaattataatgctcaagatcaggatgttcaaaatcaccaataacagaatgcacagattcaccagttatggaatgctcagaatgatcaaaaggtataaaatgatgcctaactaatctatgaaatgtcctatctatctcaggatcaaaggtttgtaagtcagatggattgcctctagtcatacactacattcagcatgcacacaactagttgccttgtcatgtaaataaaggtgtaggtttgaactacagctaccctcaaatgatatccaaatgagttgaaattttgtgagcaaccttataaaatgatgagaagatagcacaaaa

SEQ ID NO: 3788 - DNA, 313 bp, Glycine max
  unsure at all n locations
agctttataagtgcgggtctgggagactattgtcaagtgttcgcgatatgtgaagatgatgttccaagtacttcggatttggtccgaccatgccctcctgatttccagctgggaaattggcgagtggaggaacgccccggcatttacgcaacaagcataatgtaaaccttgacggttttaaaagctctatagttgggcctaggctttagagttttcgttttgttaaagctntgtgtcttttgtttttgaatttataatacaaggatctttctttatctgttcctgggctctacccattctcattcatttgcat

SEQ ID NO: 3789 - DNA, 411 bp, Glycine max
  unsure at all n locations
tgcttctacaatctcccctttntgatgatgacaacccttaaatcaagaaatacatacacattctttttcctagtcgatcactcacttaatcctacatattctccccctttgtttttgagtttaagctttacttggaattaagttatttaattatgtgagttcttgatttaatccctattttctctccccctttggcatcaacaaaaagccaaagtgcataacaaatataaaacatacataaatgactaatcatacacaagacattcattgaaaaaatctaaaccaatcatgaagcaaaaacatgaataacccanattcaaatataaaccacatagtcttataacatagatcatagatgttcagtcatactaagcaaatagtaaaagaaatactaaatgttcaaatgtcgta

SEQ ID NO: 3790 - DNA, 394 bp, Glycine max
  unsure at all n locations
agcttgtcccagcgtttatgcgagacatataccaacatgttagctatcatcgccaagtacgaagaagagttgggtctagccacggcccacgagcatagaatcgcggacgagtatgcccaagtatatgcggaaaaagaggctagaggaagggtgatcgactctttacaccaagaggcaaccacgtggatggatcggtttgctcttaccttgaacgggagtcaagaacttccccgattgttagccaaggccaaggcgatggcagacacctactccacccncgaagagattcatgggcttctcggctattgtcagcatatgatagacttaatggcccgcataattagaaatcgttaggaaacttgtatggtctcttagaccttgactagatatgact

SEQ ID NO: 3791 - DNA, 408 bp, Glycine max
taaggcttgtttccttgttcaaatcaaatcaattttttgaaagttgttttgttatcaagtccatgcaaaaacatttgaattcatttggtatttgggaaagccattcattgttttcattctcaatgttttcaaaaatccttttgttgtgttttgatccaatcaaaagtaagttttagaaacatcggttattgattctttccaaagcatgctatgcccaataaaaaatttctgtttaagtcccaaaaggagttatatataatctacaactacactaatagaacaaaatatatcaaagcatgcataaactagtcaaaaacataaactcgcgtaagtttccaaacaaaaatccaaaatagtaaataagataataaagtactaaaatttaatacaaagcgataaatgaacata

SEQ ID NO: 3792 - DNA, 354 bp, Glycine max
agcttctaaaaggatgtcaatttgatgttctatgcctcttgtaggtggcagcccatgaggaatctccttaggaaagatatctttaaactcctgcaataagggttcaacactaggagaagtagaaatagttaactcattaaaattatcagcaaaaactctattgtatttgcaatacagtagatagagtggctcacgagcaagtaacactttcctcacttcacccgcctttgctacacaaataaattttctctcatgtgtatcactctttccctcacgtgtatcactcttctttgtcctattcttctttgggggttcaatcttttttttctctatgtctctcttttctctcattct

SEQ ID NO: 3793 - DNA, 359 bp, Glycine max
ctctagcagccagaatgtagagaggatatctcttcctcgtgcactagttgtcactccatatgctagacagtggatccctcctgagattggacaaggtgatgtcagatgtgatgcttcagtcccttaactgcggaggctcacaacttatggaggggcgcttcatgattatacatgaaatgctctgcgcggactcaaatacaatactggagattcatctgtgctgaatgtagaattgctgactattctaatgaatcttgcctatgaaatgctatttccttttaggaatggatcatggaatagcgggaaaagaactatcacagtacttctattgcaggggctaataatgggagctctatcat

SEQ ID NO: 3794 - DNA, 399 bp, Glycine max
  unsure at all n locations
agctngagggaggngagttcagctattcttattcttcttccttgcaggttctttgtgttcttgatcccttgagtcaccaagtttaggtaaatgagattcattcttcatcctaaacttgatttgtcttcattctcttgctctagtttctccaataacttgtaactgccattttgtattacccatgaaggaaaactttgaaaaacctaaatattcttcattcttccttctaaatttcgtggagtctacaagaggtaaggggagtctctccaactcttgaaccatgtgcttgttgttgaacttacttgaacatgttgttactttgaaattttcaagcttgctgctattcctgtatatgtgtactgagatatnttccttgagctttgatgccaaaaatgattt

SEQ ID NO: 3795 - DNA, 429 bp, Glycine max
  unsure at all n locations
tgaggaatcatanggaacctctagagacactgctatcatggccagactacacatgtgagcccacttagaggtaagggatgagtttatcgcaattgggattagaatgaacatgtgtagggatccttagaggattaaatttgggtttattttgggatgtttattgaattataatttttctcttacgattataattatgagattattatgtttgatgggtcaattgattccctgatacgaattggttgataaaattgagtgctcttggtgttttcgttcttttaacctatgattttgattactttgattttgatatgattatgtgaaattttttgaggggttttactcctcatgttgtgagaagtatttttgttggacaaatggcctcagttatcttaagaataaggagttgaattaagatacaaaaactat

SEQ ID NO: 3796 - DNA, 419 bp, Glycine max
  unsure at all n locations
nagctctaaagcacagcaacacagaatctatgtgtccaacacccctccattcaattgggttttctatgtttgaaaagtgaaatttaaaatgaggtaaatttgaagcaaactctcacctcacaccagtccataacatccatttagacttgttcaaactggatttacacctaaaatctcaccgaatcaaaatttgactcttcaacacccaaatttgccctagaaatggctctttgttcactttggtcatttatttttctctctaacacagtccaagctttctcataagtcctaaatgacatttcaagctagtattaactcactttaacctccatttaccacagaattcagacttagccttccaaccctcagagtctcactctgtttccactcataacatcacattctcactttctaaccct

SEQ ID NO: 3797 - DNA, 427 bp, Glycine max
tgaaccattatctcctttgggttcgcaggttcttccatgcacggaatccagtgatcatctctattacaatgcacccaagagaccatatatctaacgctggttcaatctgaccaacgaccgattctggtgacatgtaaaaaggtgtccctctaaacttgaccttcccatactcagcatttgcatcttctctagtcttggacaacccaaaatcagcaatcttcagttgataccttgcatgatcatcagatgaaggaaagagaaggatgttgtccggtttgagatcacaatggacgactccttttcgatgaatgcaagaaagccctttgagaagcatacgagtgtagactcttacttcactatccgatattggccccttcttgttactaaaccaagaagagaaccataaggagcacactccatgaaaaga

SEQ ID NO: 3798 - DNA, 426 bp, Glycine max
  unsure at all n locations
agctnntattttatttatatattatattttttataattntatgtanttttatcacactattcaaaacctattttataaaataaatatacaatatgaattttatctttaagttatattttttacctaaattataatttcataaaatgttagtattttattatttataaatatttatatatgtcaatgaatatcttatacctatattaagatatttttattatttattataataggtttttatatttaaatttatttaatcactactttttaaaagaattaaattttataataaagatatatacataattaaataaaatgaccatattttctatttcttaaaatatttatgtatggaatttattgatattattatctttatttataatataataaataacatgagtaccttaacatatataaaaaaat

SEQ ID NO: 3799 - DNA, 406 bp, Glycine max
  unsure at all n locations
tagacgactntgtttgaaccgagatgactttattattaattggacaagtttttatataatgtagaagaaagtgaatctgagccttttacccctttgaaagacttgtatttaaaaatgttttaaaaatacttttaattaatatttaaatttttattcctttattagtatatatgtgaagggtagagggtgtcacaagagactatataaacaatcttttaaaaataattcaacgggaaactagaaagaaaagtgagccaagaagcctcattttgtttaagtgagctagagaccaaccggcgcaagctaaaaacctctataataggaaataccaacagagtctgctttcaacagaaaaagacaaaatctggaacatgataaaaaatagaaaaatcagcagacattagag

SEQ ID NO: 3800 - DNA, 402 bp, Glycine max
agcttttggtatctttgttttccttggttcactccatatacaactaacaaacttcagaccaagtccgtaccatgtgtttcttatgttacaatcttactcaaagtgcatatcttttgttatgatctttcagagtctaagttgttcacctcccgtcatgttgaattcattgaagatgttctttcgttttcctccacttcaagtcaacaacacatgatccataaccctcaaattcaaaattcacaaccgaatcttccaaatccaacctccaccaattccaacaaacaattcagattccagcttatattttaatatcaacattgtacccacccaagcacctcaatatcaaccacctttaaattcaaattccaccttctcacaattccagcttatcttttaatatca

SEQ ID NO: 3801 - DNA, 381 bp, Glycine max
  unsure at all n locations
atgctgcgcgtactgatgggtaccatgaggtgtttgctggggtttgtctccacgcggatgttgaagagacggcatgggtatctacttccttcctttntgcccctgttgccccgattcttttggcattcgcatttgcggaggaaacgtaatcaaactttcctcttttcaatcctacctcgattctttccccggcgaacactagatccgcaaagctggacggcatgtaacctactagcttctcatagtagaacactggcagagtgtctaccatcatggtaatcatctctctctcaaccatgggaagagctacttgtgccgccaaatacctccatcgctgcgcatattctttaaaggtttcaccctctttcttgaacatattct

SEQ ID NO: 3802 - DNA, 360 bp, Glycine max
  unsure at all n locations
agctttgcagcagatgccactctactcttaattcttgaaagatatgttaacaaggaagcataaatatattcatcaggaaaacatcatagtggaaggaaattgcagtggtgtgatccaaaagatccttccacctaagcataaagatcctgggagtgtaactattccttgttcaactagagaagtcaatgtgggaaaagctcttattgacctaggagctagtatcaatttgatgccactctccatgtgcagaagattgggagagttggagataatgcccactcgaatgacattacaattagctgaccgctccattaccangccatatggagtaattgaagatgtgttggtcatagtgaaaca

SEQ ID NO: 3803 - DNA, 414 bp, Glycine max
tggtccagtgatttgatggatgcatcctccctttggttcctttaagttgaattacgatggatcagttcacgatgctttgaagaaggttgcggttggaggagtctttatgactgttgtgggagagttttatttgcctttgttgcaaaagtcgagttctgctctgtcatccttgctgagatgcgggttatctatcttggcattagcattgcttggaataaaaggatacattaattttattgtagagtctgattccttgaatgttgtgaatctaatttctaagggttgtgattttcatcatccttgtgctacttgcattattaaaagcataggtgagcttacagctgatggagactccctgagttggaggcatgcattgagggaggcaaatgagttggtaaattctgtctaatctct

SEQ ID NO: 3804 - DNA, 336 bp, Glycine max
  unsure at all n locations
agcttgactntgagagttgattttagccttactttcactttagttattagtcaattcaattaagaaagagaaatccaaaagtgaaacatccgattgattttttcgctttattttactaaaagatattttttaattatattattattttatctctttttagtttccaacgtggttacggtacgacggaacggtcggatttcattttagcataaattaatggatattacaaatcaaacgatcggtggaaatttattttattttttgattaggagagaaaatgacttaagtaaatgactgaagcacgtcaaaaggggtacgaaaagtaaatganacgag

SEQ ID NO: 3805 - DNA, 379 bp, Glycine max
  unsure at all n locations
ntgagggtgcgcagcccaccatcttttcatagtagagtatcgataatgtgtctaccatcacgattatcgtctccctttccattattgggggtaccacctgtgccgccagatccctccaccttttgggcgtgttctttgaatgaaccgcccccctttttgcacatgttctgtagttgcatcctatccggaaccatatcaaaattgtactgatacggcctaacaaaggcaaccattaggtccttccaagaatggactcgggaaggttccaagttagtgtaccaggtaacagctaccccagtaagactttcttggaaggaatgtatcagcaattcctcatcttttgcgtattcccccatcttctgacagtacatctttagat

SEQ ID NO: 3806 - DNA, 413 bp, Glycine max
  unsure at all n locations
agcttgggagcatccatatctgagttcttggttcatccaagcattttcatgcaagcttcatcaaggtagaggggtctttccacttcttgaaccctaaccttgttgtctttggaagctagccttcattgcctgttgttttgatgttcaaatattcgtagctattgtcttggctggaactggaggatacattactttttatttttatttttttgaaactttaaggttaaaaatgatttctttgggcgtcaaaacttagggttagccttaaatttcacttanatcggagtttaaggatattttgtaggattgaatctgtcacgaaattaaaatggtggttatgactatatggaatttttccttaaagatctgactanaaaatgaagttgctatgtgtgaaatatagggtagcatgt

SEQ ID NO: 3807 - DNA, 403 bp, Glycine max
  unsure at all n locations
tgtcgggttcagtttcaattacgcgcttgnggcatcctatggactgagagaaaaggctcaggtcatcaaatattgcacatcttttaaagcacaaagcgaggatcggaacttacgttctttttaaaaggctgcgatgagaaaattacagaggacatgaatccctaggggaaaccaagaagaacacacaaaagtagcgacttcctcaattaccccagatcttaagcatagtatcgcttgacaacgttggagttcacgggtgaaggtagctcctcgtcatccatgttggcgagcactagggcccctctggagaaagccctttttacaacgaaagacccttcgtagttcggggcccactctcctctgttgtctttcagagcttggcagactntcttcagcactaagt

SEQ ID NO: 3808 - DNA, 394 bp, Glycine max
  unsure at all n locations
agcttctaaactntgtacaagaatgaagctctgataccacttgttagacaagtggcctcagatatcttaagaagggggggttgaattaagatattccaaactgtttcccctaattaaaaatctatttttctttttacttaagttatgaattcccttaatgacaatcttcttaaatattaattcaaatgaagcaacttgaatatgaatataaagcaataataaataaaggagattaagggaagagaaaatgcaaactcagttttatactggttcggccacacccttgtgcctacgtccagtccccaagcaacccgcttgagagttacactaacttgtaaattccttttacaagttctaaacacacaaggacaacccttcctttgtgtttagagat

SEQ ID NO: 3809 - DNA, 408 bp, Glycine max
  unsure at all n locations
tgtagaatggctagacatgatacatgtcagggtttggtttggctcatggataaaagggatgccccacattatttccatgacacaaatgcaaaaatgatgatttggaaattttatgcaaaactggtcatgcatgcacctatgtggacactcaagtgtcaaatttttatggtcatgtgatgctagggctcaggattcatttcctctattttaaatcaacccaatgtttccaaaatatgttcttttatcaatttgtgcattcatccgagtccatttcgggcgtccggngaaaacttcacagcattcacccttcaggtgtatacacatttttttcaaaaactagttatgatcaactgaattttttcaaagaaaagttggaaatcatctcttttcaaagcatgtcggttttta

SEQ ID NO: 3810 - DNA, 380 bp, Glycine max
  unsure at all n locations
agcttgtggcaaactttgaaggtcacggtggagtcaagggcgcatgaaaatgagtaaattaaaggcacaaataatccattcagagtgaaaactgaaaattaataaaataattaaaaatcttatgacttcgatcaaagacggttttataaaaaccatcgttaacggctaaaaatagttggcattaatttcaaaaatgccaccaaatgttttactacatcgatttttcaataaccgacgtagatacaacgacgcagaaagacgctnttctagtagtgaaagaaagaaaacaatcctatacataaaaaagaaagaaagtaaactttgaacgttttatggttttaaccacaaccacaacanttctaatggacttgtttcattat

SEQ ID NO: 3811 - DNA, 411 bp, Glycine max
tagctacacacacccttctaataactaagctcaccttcttgagaagcttccttgagaaacttcttcagaagcttccttgagaagattcctagagaaactaaagcttagctacacacacccctctaatagctaagttcacctccttgagatgagaagctagagcttaactacacacaacccctataatagctaaactcatccccatgccaaaatacatgaaaatacaaaaaaatccctactacaaagactactcaaaatgccttgaaatacaaggctaaaaccctagactactagaatggccaaaatacaaggcccaaaagaaggaaaaacctaatttaatatttacaaagaagagtcgacccaaccttggcccatgggctcagatatctagcctgaggttcatgagaaccc

SEQ ID NO: 3812 - DNA, 376 bp, Glycine max
  unsure at all n locations
agcttatccataacttgactaaagaatgttgcaactgactgtagtaatacaagatcagaanaagattaaaaaaaaaagccaaattgtcccaaacaatgctctctcaagtaggatcaatatctgaaaaatgaaatgttaaatttagaaatctaagtaaatattgattcctaattttttaaatgttggaaagacttggaagacaaaaattgcattaaaatagaaaatgcaaaacatatagtgggactgagacacattagcagcgtttcctcaactcaaaaattataagaatcagaagtaaagagtatgttaagagtgtggtaacatactctaacaagctttgatcaaatgactaaaattaattgggcaaaaagatatt

SEQ ID NO: 3813 - DNA, 405 bp, Glycine max
  unsure at all n locations
tgggtgatgttgcgcgtactgatgggtaccatgaggtgcctgcggnggtttgacccatgcgggcgttgaagagacagcatgggtatctccttccttcctttttgcccccgttgtcccgattcttttggcattcgcactcgtgaaggaaacgtaatcgaactttcctcttttcaatcctaccttgattcttttcccggcgaacactatgtccgcgaagctggacgacatgtaacctactagcttctcatagtagaacactggcaacgtgtctaccatcatagtgatcatctctctctcgaccatcggaggagccacttgtgctgccaggtctctccaccgctgtgcgtattctataaaggtttcgccctctttcttgacatattctgcagctgagtgcgatcggga

SEQ ID NO: 3814 - DNA, 399 bp, Glycine max
agcttttcgattcattctatgtacccgtagtggtccacattgtgtttcgtgcatttttattctcgttttgtttactttttataccccctgttgacgtgcttaagccattttacttaagtcatttctcgcttaacttaaaaataaaataaatttccaccgaacgtttgaattgtattatccattaacttcgggtaaaataaattccgaccgttcggtcgtgccgtaaccacgttggaaatcaaaaagaggtaaaaaataatataataatcaaaaagacatcttttagtaaaataaagcggaaaatcaatcggacgttttctctttgggatttctcattcttaatcgaatggattaataactaaagtgaaactaaggctaaaatcaactcgcctagtcaag

SEQ ID NO: 3815 - DNA, 407 bp, Glycine max
tgcatgatttacattctccccctttcttaagcaaattcttaattcttcttgacatcatcaaaatcttcatgatttacacaaatagttttgtctagttattttgctagaagtataccaattttatataccttcaaatttgcacatgcatttttcctttctaattaaaattatcttaatctgttgtaattaatggtaaaatttattttcttaatctattgtaattaatattaaaatttaatttaataattaatatttaaatgatagattaaatataaataatacataaacctcttatttttatttaatatatcatttaaatatttatttattagataaattttaccattaatattaattacaatcatgctaatatatattatttttaattatttatattttttctgatg

SEQ ID NO: 3816 - DNA, 404 bp, Glycine max
  unsure at all n locations
agctctangacctctaatataatgtttgtctcttccggcaaatgcaaactagaccaccttttgtttctacgctagctagcactgtcttggatgcgtaccaagtagaacttatgccaattaaagctgcaccaattttaactgtgtctctgctaaattggcaccaacttattaccccctatattaaagacaaaataactccatctacttcaatcaaatattccttctttcatgatctttctttcaccagctagctatgcacccattccaaagttaatttaagttgatactgtagggtggcttcataattaatacttgtctgggttgttttaagaaagatttttatttaaggaaaatcgatcttgaaagagaatcattaaattcgactatatgatatattttaatta

SEQ ID NO: 3817 - DNA, 426 bp, Glycine max
  unsure at all n locations
tactatcttaacacgtgaaccanacgttntcatgtacatttttttagcgacagtgcttaattaagtgcaacatattgctttggaagcaaggttacgatcaccggaaacaacggtgtctcttgatcggtatcaccggtttttttctgatggatttttttcaccatgatttcattcaaattgacaaattctagagcatgacttagtgtggagagaccaacttacatatttgtagggagtttgggccttggtatagggcccatcgccaactggtaagcctgttaccataaatattatcctacttttatgatggaaaggaataattgtccaaaataattatgtgtagagcaatgccaatgccaatgccatgcgtcccanagtggaaatcaactaggatttgcatttacgaaatanaatactgatttgatg

SEQ ID NO: 3818 - DNA, 399 bp, Glycine max
  unsure at all n locations
agctnttanaattattttcgcctctttcttctaataggagatcagggacagttggttgttgataatacagttttaagggtgttttccaatgtttggaatttattggattaatgtctttttccgatactgaacctatttcaattgttttttctaaattttggtcactatcttcattaatgaaattaattaatttggaggtgcttcttgttaccatttttgaagttccttttgaaggttggggagtttcaaggatgactctaagtaaactatcaagcttgtttaataattcactattattgtcacctactccttctataacggacttgtttttccttagttccctaattttttgttatccttgtcactaatcttgnaaggtttgaataaaggttttctatg

SEQ ID NO: 3819 - DNA, 429 bp, Glycine max
tgaggtccctcattgcaaagatgtttttcaagatactatactcatctggcacttcaatattcaaacttcttgcatgatcgagaagagaggggaaagcaacttcaaacccgataggcatatgttctgcattttcatcctgaagcttgtacaaattctccttaaaaaatgacattcctgttacatatgaatgcatatatacacaatagaaacattaaattaacataaacgtgctgataaaaaaataacatttatatcataatactttactatttcccggtcctcttcttttactatggaatagaggtgtgaaagtattgcagaaaagaaatgattaagagtatgtatctaacaaaagaaatgattaagagtatgaaaatatctgggttaaaaaaaaaagagtacgacaatatcacagtcagcaaggaattc

SEQ ID NO: 3820 - DNA, 274 bp, Glycine max
aataaaataccagaatgccacatgtgaggggcccaaacaaaactcacataaaacaaaatctatagctaggaagatcaaatttttctctaaaggaaaactctttaatagggtaaactatatctgaccaaataaaactcacctcatgaatacccaaattagctacaccacttgtacaactatttccctctctaaaaataagagacaccacaaaattcaatgaatttgtgtaagaaacaattcatctagcaatttctcaagttccacggcacaatgg

SEQ ID NO: 3821 - DNA, 421 bp, Glycine max
taacaaaacacatggaaatcaaattattaattgataaatgaagtcattcactcatgccatactccttaaaataaaataaaaaaaaaaagagtagaaactaaagctgtacagaccatattaactaaaagaaattcaagattgaatgatacataaacaaaaagcaatctagcatcaactgtcataaacacagattttatccaaatagaatacacttatacacccataatgagaaatgagacagccacaacctaaagtcccaaactaattgagttccaattctatcagcattttatacaacacacaacaatcccttcaattattatcactcaaaaaatcttataaatagggaaaggaaacagggttgtacctgtggcaccatgagcaaaatgacacttattgccaaaggggcaataccctgtca

SEQ ID NO: 3822 - DNA, 356 bp, Glycine max
  unsure at all n locations
agctntgagccanaatcctgacacaccatataccttgacccagggtgagaatgtcaattcttaccctcggaagcaaaaaaaaaggggagagggaaaatttccaatcaaagaggaagcaaaaaaggagagaaggaaaatttccaatcaaaggaaaaaaagagaggaaagggaattcccaatcaaagagtgggagaaagcaaaaagaaaagaaagaaaattcccaatcaaagaatgggagaaagaaaaaagagaagaagaaagggaagaaagttcccgatcaaaaaaaaaaataatatgcagaaaggtctttggaccggacaatatctgaacaatacagaattgtcaccaaatgaata

SEQ ID NO: 3823 - DNA, 430 bp, Glycine max
tataagaacaaaattgcctcaatcatttccaaatatgcatgtgaattaggatgcatcaacaagaatcaagccaaggctattgtgcaagcaatcaatggggcaaaacacaccaaatgattatgatgatggatggctcaaattctcacaaaggtaaaatcatcactttcaaattgagctttcaaaactatcatgacatgtagagaagaatcaaggatttcaagtcacaaaatgtcaagaacttttattttcaaaacacttacccatttcttgaacatatcctataattcaaagataaacatgcaaagtcgtacgtgcacacaaattgacccaaaatattaaactaaaaatccgacgaaactaacaacattaacaaattaacacaactaacaaattaacaaaaccaacaaaactagcaaaaccaaagaacact

SEQ ID NO: 3824 - DNA, 353 bp, Glycine max
tcctctcagtcacctgcggcatgcaagcttgtaaaaagggaagcaagttaaaaactcttttcaaagtaaaaacgttgtttctacttcaaaaccctttgaactacttcacatagacttatttggtgcctctaaaactatgagtttgggtgggaattactatggcttagttatagtagatgattactcaagattcacatggactttgtttttgaaaaccaaagatgaagcttttgatggttgttgcacacttgccaaggtcattcaaaatgaaaaaaggtcttaacattgtttcacttagaagttatcatggaggtgaatttcaaatgagtctcttgaaatgtttgtgagaaaat

SEQ ID NO: 3825 - DNA, 386 bp, Glycine max
tgaaggtgtgtagtccaccatcttttcatagtagaatactagtaatgtgtctactatcattgttatcattttttctccgtcattgaggtgccacttgagcttccaggtctctttacctttgggcgtattctttgaaagatctgtgcccctttttgcacatgttctgttgttgcatcctatccggaaccatatcaaaattgtactgatactgcctaacgaaggcaaccattaggtccttccaagagtggactcgagaaggttccaggttagtgtaccaagtaacagctaccccagtaatattttcttggaaggaatgtatcagcaattcctcatcttttgcgtatgcccccatcttccgataatacatctttagatggttcttgggg

SEQ ID NO: 3826 - DNA, 400 bp, Glycine max
agcttcattgcttcatgatgatgaatcatgattgattcaaggtgttttgatgataacaaagatgatggcaaaaagcccatgagaatgatttcaagattgagtcaagaacaattcaagaatcaagagaaagattcaagagaagtttcaagtttcaagttttcaagaatcaagaataatcaagatcaagattcaagactcaagattcaagaatcaagaaaaggctcaatcaagataagtacaaaaaagtttttcaaaacattgagtagcacatgaagttttcacaaaagcttttaccaaagagtttttactctcgggtaatcgagataatcaattacccgtttactgtaatcgattaccaatggcaactttttgttttcaaaagctttaactggattataac

SEQ ID NO: 3827 - DNA, 407 bp, Glycine max
tcttctatatatagacttcatcttcaagtatctattgtcttacaaccggtggattcttcacggttcttcgtctgaggtcttgaaactgttagagcatttaatgcttgcattaaatgtacatcccttttttcatgcaaattccatgcttgataggttggcatgtcttgtacttcagtaagaaagtcacttcttccatcataataggtctgcactagcaaatcatgccttttgatgaagatcataactttcagactgtagacttcatttattcttcatagaactttgacaaatcccaggagaatgttttatgcaagagagaatcttagacacagattattaaatgacgatcttaaatgcactccttaatgatatgctagattgtcttatatggacgtatgtttgaaaac

SEQ ID NO: 3828 - DNA, 412 bp, Glycine max
  unsure at all n locations
agcttgttgacacctttctccggccaatttattggtaagnttcctattgttatactcaagaatctcttgctttgcaaatgatctatatgtttcacaccccatacatttgggtaactcattgatatttaatacaaacttttattatgcagattaacagggtgaagctccaattatgattaaaaaacagcgtgaaaaaacatttaagaaactacatttaagttttgtccatggaattaaactttcatatttgtcccttaaattataagcaacaatcactctaatcctgatttttttaaagggaaaaatatgcggacacctttacagactatgtctctttatatctcttatcctatcacagtatatattttcagctatgatgcctacacttttctctaggtgtcatttagctctt

SEQ ID NO: 3829 - DNA, 422 bp, Glycine max
  unsure at all n locations
acagcttcgatntaatcattcatgggtcccacccaagctagcctcttcgccacactgatttatgtaagcaaagtttgatgaagaccaacttcctagcataatgggccaaggaattttcagaagaccaactaacaactttgcttttattatttcaatgtttttaaagacctttatgacttgggccgtgagatctagatttgatttggagatggtgttcaagaagccccacatgattaagctctttttaggtgccaggaagtaaaattgttattgtatattgattttgatttgattaagggctacaaaaattataaatgactatatttctagttgttataatttactaaaccgctattaatttatgaggatcccaatctctgacattagtgtgattaaatgaactaaaccaattcatatcatgt

SEQ ID NO: 3830 - DNA, 404 bp, Glycine max
  unsure at all n locations
agcttgggtggatgtgtgtacatatcattgtagaattctcaaatacaataacagatcatggtctcattgaggtacaaacccataccttccaagttctggatgtcgaagaagtgttcaatatggacgattacttcgttcttagtgtgaattaacattgtctcaatcttaggaatgtgctcttcatacgatgaggcatcacttccacttgacattgttggaaagattaaagcttttttggatagggtttttgtttagggtttaagaacggttgggagagagaaagagtttagggttttcttcttcctcttcattattggcattggaagttgttgattcattgtcatcccaagngatatattccttcttctttgtgttgaatgaacccttattcttcttctctcatt

SEQ ID NO: 3831 - DNA, 412 bp, Glycine max
tgttggtatgtgatcaaagaagatgtcatcttatctatctctgaatttcattctcatggttccattcctacgagtgggaacacgtcatttctagctctaattccaaaaaaggagaacccacaagaattaagtgaatacatactcttattaggtgcatttataaaattattgatgaacttctagcaaagagattgagatgtattataggggtgttggtggatgacaggcaattcacgtttctgggagataggaacatgttagatggagtggtcattaccaatgaagtgattcaagaggaaaatcgttaagttaaatcatgtgtggtgttcaagacaaatcctggagtggtcattgtcaatgaagtgattcatgaggcctaccagtttggggccgatgcttctagactaactac

SEQ ID NO: 3832 - DNA, 409 bp, Glycine max
agcttataagaacatatttgcctcaatcatttccaaatatgcatgtgaattatgaagcatcaacaagaatcaagccaaggctattgtgcaagcaatcaatggggcaaaacacaccaaatgattatgatgatggatggctcaaattctcacaaaggtaaactcatcactttcaaattgagctttcaaaactatcatgtcaggtagaggaaaaacaaggatttcaaatcacaaaatgtcaagaggctttttttttcaaaacaattacccatttcttgaacatatcctataattcaaagaaaaacatgcaaagtcgtacatgcacacagaattgacccaaaatattaaactagaaacccaatgaaactaacaacattaacaaattaacacaactaacaaattaacaaaaccg

SEQ ID NO: 3833 - DNA, 398 bp, Glycine max
  unsure at all n locations
ntctaaagttntttggtttttccataccttgaaaaaaaaaagtgtgctattcatttttctttctcttctccctttgctaaaaagaattcgccaaggactaaccgcctaaattctttttgtgtctctcttctcccttttccaaaagaacgaaggactaaccgcctaaattcttttgtgtctcccttctcccttgtcaaagaattcaaaacgacacagtctgagaattcttttgattcttccctttcccttatacaaaagatttcaaaggactaaccgcctgagatatcttttgtatcccccttcacaaagtttcacaggactagccccctgagatctttgtcttaacacattggagggtacatcctttgtggtacaagtagagggtacaactacttggg

SEQ ID NO: 3834 - DNA, 561 bp, Glycine max
  unsure at all n locations
cacgcgtccaccactactcacatanaantactatanntgnttntantntaacatnnnnannnaanacacccgacgaagcgnngattgatcccctngagaatcgaanccactcgaaccctgagacactctataaactcacgctcacaacagcaggcggcgcagaatacacatctactgagttcaggtcattttgtgcaacaaatggcacgaaacatcaagtgacagcaccctatactccacaacaacatgggggtggacagagaaagaatacgaccctctgcgaatatgctgagaagcacgaccaaagaaaagggttcaccaacccatctgtggggcgaagcaactgctactgcagctcatttgtagaacagatgtccaaccaagagagtagagcatgcacacccgaataagctcggcaggaatcaaaccgtgtgtgaaacatctgagaacgcttggtccattgtgccccatgcacacacccgaacaattgagtaagaagccagatgacacggctcaatccggcgtcacggccggatatcactaacaaggtgatacaaatcg

SEQ ID NO: 3835 - DNA, 385 bp, Glycine max
  unsure at all n locations
agcttnttggagtagaaacatggttccttctcattttatttcaaaaagttgtatctagtcaaggtctgagagaccatacaagtttcctagcgatttctaattatgtgggccattaagtctatcatacgctgacaatagctaagaagcccatgaatttctttgggggcggagtaggtgtccgccatcgccttggcctttggctaacaatcgggaagttcttgactcccgttcaaggtaagagcanaccgattcatccacatggttgcctcttggtgtaaagagtcgatcacccttcctctagcctctttttccgcgtatatntgggcatactcgtccgcgaccctatgctcgtgggccgtggctagacctaactcttcttggtact

SEQ ID NO: 3836 - DNA, 374 bp, Glycine max
  unsure at all n locations
tattgtttaactactctntgagtgtgtgattctttatattccataaaacattgtgtttttgaaagtcatgagtggcttagtgaattggtgctggcagcttgaacatgcgaacttgtaacaattactgggaattggtcactacgaattttgagctganatttttactgcattntctagacatttggaaaaataattagaaaaaaagaaccaagtgatttggataaaaggaaaaaataatcataatcacacaagttggcgggaaaatcagtgtccaagataaatagtgaaagggaagtgtgcttgttgttttggctcanaatttgttctataattggtgcctattttataccaatcttagttctgacaattcaatt

SEQ ID NO: 3837 - DNA, 383 bp, Glycine max
  unsure at all n locations
agcttgtttgaaacctgagggatgcctatagcagtcaccttcctagttaccaaccaaacctttgtgcccatgcttgttccacgtcggaccaaagaaaaaggaaacagaaaaggaaaaggccgaaacacccaaaagccaaattccccaccaaaattcaacttcctaaaagtcctattggcccatgattatgcatgttatcgttgatttgataggaaatgatttgcaaagtcaaatcatgacatatctatggtttggaattaggatgaaacacttgcatgtgtgagattttatacactntgagtggttttcctctatttcattcgcacccagtgtttcttctaaatgcccttttagaaatgaaatgctaatatcccacaatctca

SEQ ID NO: 3838 - DNA, 387 bp, Glycine max
tctcaaggaggtgagcttagttatgagaggggtgtgtgtagctaagctctagcttcttaaggaagttttctcaaagaagcttctcaaggaagttttctcaagaaatcttctcaaggaagctacctagtctataaatagaagcatgtgtaacacttgttgtaactttgatgaatgagagtcttatgagacaactcaaagttcaacttctctccctttttttcttccttcaatttcgtgctcccccctctctctttctctccctctttcttttcctccattgaagcatcctctccaagcttcttatccaaggctcatcttggtggtgaagctccttcttccatggcttattccctagtggatggcgcctcctctcacctcttctccttt

SEQ ID NO: 3839 - DNA, 390 bp, Glycine max
acaaagaataggttcattcataagcttatcttttaataaattataagttttctcatgcacatcagtccacttgaacaccacatccttttttacaagttcatttaaaggtgcagcaagtgaactagctaaaccacgaaaacttcttacctcattagcattcttaggtacaggctattccctaagtgcctttactttttcttcctcaacacttattccttttgagctagtgacaaaacctaagaatacaacaaattcatggcaaaaagaacacttttaaagattggcacacaatttattttctctcaaaacattaaaaataacatgtaaatgatcaacatgttcctctaatgtttgctataaatcaaaatatcatcaaaatacaccacaaca

SEQ ID NO: 3840 - DNA, 430 bp, Glycine max
  unsure at all n locations
tacgaacccaaactttntaaacttcaatgcaagaaaacatactcatgactaggaacccaaagtttggttttaggattagaaaagcatgaaaatagggacttgtttgtaaaaatttgggctgccccatgattggcactttgcacctaagtaacgtgggagatgcttttcaatggtgtgtagataagtgtgtaaatatatatggcataaaaatatgtatatatgtgaatatatggcatgaaaataccttgcaaagtgaatgaatagtaaataatgcatttcaaaaatgtatatttatggataggtagcgtaaaaataccttttaaaatatgtatatttgtggataggtagcataagaagcctttcaaaaaaaaaaatgtacccatgccaaaaatggcacaagaatgcttcccaaatgaatatatgatgtgga

SEQ ID NO: 3841 - DNA, 390 bp, Glycine max
  unsure at all n locations
agcttcaccggatgatgccgatcgaacatttcctaatcgacatcatccaattgttattcagggattgaataaaataaacaatggccggtgtcggtcgttatatggccccgactgatatctttcagccgacattgcgcaatttcttttacaaacgctagcgataatgtttttttttttgttttttacggtagaggaagttttttgttttggtgttgcctaaaaaatttacaatgtaggtcggctaggtttttccgtgcgagctcaaccgagggttcgttccgaccgacactggcatgtagttcttctcatttaagaggacaagacaacgttggcccatcccggcaaaaacannnaaaaaaacattatcacggaaattgatcgaaaaaaatg

SEQ ID NO: 3842 - DNA, 433 bp, Glycine max
ctcagcttattaagaggcttctagcacactccagacatcttctcatagatcccaacggtcagatcatggaagcgtgttttgtgaagttgcagaccacatttcgagacgatccaacggttaatgaaggccaggaagcgtttttaccgaggcagcttcatgtagctttctctagaagcttcattaagaggcttcctctagaagcttcctcgtggcttctttgagaagttttctcaagaggcttctttgagaagctacatccttatctatccatccctctattaactaaattaacttccttaaaaataattacggatgaaaataacgcaacaaataatcaaacatcaaacataattactaataatatatagatatatatatcagggtgttacacatcatatattgagacgctcgaaattgaacaatggaagctctc

SEQ ID NO: 3843 - DNA, 413 bp, Glycine max
  unsure at all n locations
agcttganggattggtctttgccagtgaaaggatcgatgtgggtccgaaaagaggcaaatttgatcatcctactaggacgactgagaaaactggggcaaatgaagagggtgagaaagagggagaaacccatgctgtgactgccattcctatacggccaagtttcccaccaacccaacaatgtcattactcagccaataacaaacctcctccttacccaccaaccagttatccataaaggccatccctaaatcaaccacaaagtctgtctaccgcactttcaatgacgaacaccacctttagcaaaaccaaaaacaccaaccaaaaatgaattttgcagcgagaaagcctgtagaattcaccccaattccagtgtcctatgctgacttntctccatatctacttgataattcaa

SEQ ID NO: 3844 - DNA, 424 bp, Glycine max
  unsure at all n locations
ntgcttgcttctacagcagcaaagtttccctaaggtacctacaatttttacgtgactttgttcagtgcagcacatatgcatggggacctgccgtgcatcttaatccaaatgtaggcatgggaacgatgcacgactttggctccaaagaggacttctcccgtaataaaaaataaatcactcggacacaagttacttattttaaaaataagatttcatttgaaaataattaataatgtaacgcgagtccactgatgatttcatatttttttaggtggttgcaacgtggaaatcagcatattggcaatgatgatctaatagttttttgttgcaaattggatatcatgaaacgacatgaggtaagaagatcgtaatgtattcgttaaacaataaatacaatgtcatgtttaagtgaaaattaacaatt

SEQ ID NO: 3845 - DNA, 427 bp, Glycine max
  unsure at all n locations
agcttagctattntccgtccattntcttcaagagtaattaataattattatcattttggatgggaaaataaaagggttgctgcaaccaatttggttccatactaaccaccctttggatccaaggttttcatggaaatattgaatttgactttatctttgttctttgggttttggaacaagatatttgatgtatgtcccaacaaaagtgcaccgacccaacttaggaaacaacatgcatggccttaaatacactaaacaatttaagggatngtttggttgactgttttttattttcattttcactgaaaacaggaaatggtaataaaaatatgtttggttggatttttgaaaacattttcagtgaaaatgaaaattaanacaaccagaaaatgaanataataaaatttcgttttcagtatttcaattg

SEQ ID NO: 3846 - DNA, 428 bp, Glycine max
  unsure at all n locations
tgcanagctgaaaggacaaaggtacgtgggtgaagaatcgtggaaaaaggattgcttgaacatctgtgaaagcactgcatgaaaaaagaatggaaaccaacggtcataaatgataaaatagatccaaaaaactgtttttttttttcttataaatattctcttccgatgggacttttgttcaaaacattattgaatacgaaattgaattaaactctttttttctaacaaagattcacaccttaatttattgagttaggagggactaacccttattgctatacccaagctcccataatacgaaataaatcatttttgtaatagagaattaaatagctcaattttttaatgttaaaaataaaatagtgtggatatacctatgcttttttaccgttaaaaatgttttatattttaactatatattatctttt

SEQ ID NO: 3847 - DNA, 349 bp, Glycine max
gtcacctgaggcatgcaagcttgatgtcattcaaaagacactatgtcgacctaaatgatgactaaacatgcattgtttatgtaattggattaattatgcgatataatttggtgtaacccattactaactaattaatattattaagtactcgtttggttaaacaaaaaaattgtcggtccaacaaaaatcatttacgcgtatagcatacatcattgtcataattgacaacacataatgacatgcatgcgtattaaagtttgagcgcgacaacacattgactgacttgactacacattttgaaggaaaaataaacacgaaaatgttcacgcgtgtctatttttttgtaaac

SEQ ID NO: 3848 - DNA, 382 bp, Glycine max
tgaatacaatgaaactcgctagcttagcaacactaagatttactcaattcgctcaagtttcattcgtccaatagattgatagtgttacaagactttattcgttttgtctaagattattctcttgtgatttgacaaccttaacacaaacatcttcaagctttatatggacttcagagcttcgatatgttgagagatcccagccagtcgttatctaatagctttgatgcttgacacgaagccactactgtgtagaaagagagtggggaccataaatactttctgcaacatatcttcagaaaagtacaattcgctagtgtcgcctagtgctcagagccgactttcaacgtacaaatcaaaaaaaatgttaacgacataagacaaa

SEQ ID NO: 3849 - DNA, 394 bp, Glycine max
  unsure at all n locations
agcttgaaggcaaattggatgcattggttaacttggtaacccagctggccttgaaccaaaaatttgtacctgttgcaagggtctgtggtttgtgctcctctgctgaccaccatacagacctttgcccttccatgcagcaacctggagcaattgagcagcccgaagcttatgctgctaatatttacaatagacctcctcaacctcagcagcaagatcaaccacagcaaaataattatgacctctccagcaacagatacaaccctggatggaggaatcaccctaatctcanatggtctagccctcagcaacaacaacagcagcctgctccttccttcaaaatgttgctggcccaagcagaccatacattcctccaccaatccaacaacagcaacag

SEQ ID NO: 3850 - DNA, 412 bp, Glycine max
  unsure at all n locations
ntgatctaccaccaccaccgccaccatcatcttagttttctattatgtttaacattattagtactttgatttctagccatgtatttggctatattattatgacatttgaacaatttagtatttcatttatttgcatagtatgattgaacaattatgaattatgttaaatgactatgtggtttttatatatttgatctattcatgttacttgcttcatgattggtttatatttttcaatgaatatcttgtgaatgattagtaatgtatgtatgttttatatttgttacgcactttggctttttgttgatgccaaagggggagagaaatggggattaaatcaagaactcacataagtaattaacttaatttcaagtgaagcatatactcaaaaacaaagggggagaatatggag

SEQ ID NO: 3851 - DNA, 387 bp, Glycine max
  unsure at all n locations
agcttgggtagagtttgtcttgtgcagtaagaagtggtcctgacaaaatactcataactttgagaaagttattgaaacttggttactagctaagaactgaatgtaatctcagtggtagaaacaagccaacataattttgtgtcttatgtactcctacttataactttgagtttgatttttttaaaatctctattaattagaaaaatttgttttcatcgtctgatcgtgcttttttttttttgaaaatctgttatatgtcttatgcaatgtttctttatataacaatcttgttcttttagaagaaagggctttaaaagtttataanaatacaattcaagccctttattgggttattngctttataatanttaaaaaataaataaaaat

SEQ ID NO: 3852 - DNA, 418 bp, Glycine max
tgacacattcttgataacaagacaaacttcatttgcttcttgtttgtgacaactttgttttcatccaaatgattttttgcatgagaatgttttaaataggaaaaaattaattttcatgagaaataaattttgaaaaaatatataatgcacaactaacctggtagaattgttgtctagaaattttcccaaattattataaagtgatatcataatatttagaaattttcttgcgaaaatactgttgtagggcaacaaaggaacaataattatgaaaaatagattcttgtaatttgtttggctcgagaaaagtatatgacatattattaaggttaaggaaactccctattaaattttataaaattcagagttatctaagtattttttatatttaaaaatagcatttcagaataattttagt

SEQ ID NO: 3853 - DNA, 418 bp, Glycine max
agcttcatactgcatattattatgaaaatacaatgttgaaagatcaatccgacatcacttatcaacaagagtccaattcaatatggatacaattaatatgtcttagtctaattgtatgttgaagaaccacctacaactaaaggtcataataaaaagagtgcagaaaagcaattgggagaattgaatgattaatttaacaaattgcaagaaaagaaagggaaatcgagtgatttgcataacatttccagtaaggcaatcaaggggagtcggaagggaaagttgagatgaatggctataagaaaggagttgggcagaagatagagccaggaaaagtagagggagagtgctagttctctcatatgccatgtgttgtctttttatagtttcagtctttaattgtcattgtgaggggataata

SEQ ID NO: 3854 - DNA, 411 bp, Glycine max
tctgaaatatgaagtattaacctatcaaggctatcgttccctttaacatgaccctgaccattctcagaactccgcctaagtgaatgtacctcttgttcgtagtctcttattcctttggcaaactcatcacacaaattctccaaaaggatccgtgcttttctctctctttcaagatttctcaaacaaccagagaaggaagacttcacttcagaaagctccctagccagcttccgatgcaggctttctgaatgctgacgtaacctcctctcatcttctagctcttccctgattgattgaactgcagctttaattctaccatgttctttgttcttcctaataagtttgtcaattgtaatttcctttatcaagttctccacttcctgcctattcatttgattctctcgtagtaac

SEQ ID NO: 3855 - DNA, 339 bp, Glycine max
  unsure at all n locations
agctntgagccaattcaaacgacaatatctttntactccgatgtctgattgagtcccttcatatatcgagacgctcgaaattgaatgttgaagctctgagccaattcaaacgacaataactttttactcggatgtctgattgagtcccgtaatatatcgagacgctctaaattgaatgttgaacctctgagctaattcaaacgacactaactttatactcggatgtctgattgagtgccgtaacatatcgagacgctcgaaattgaatgttgaacctctaagccaattaaaacgacaataaacgtttactcggatgtctgattgagtcccgtcatatat

SEQ ID NO: 3856 - DNA, 397 bp, Glycine max
  unsure at all n locations
tcaacattcaattntgagcgtctcgatatatgacgggactcaatcatacattcgagtaaaaagttattgtcgtttgaattggctcagagcttcaacattcaatttcgagggtctcgatatattgcgggactcaatcagacatccgagtaaaaagttattgtcgtttgaattggctcggagcttcaacattcaatttcgagcgtctcgatatatgatgggactcaatcagacatccgagtaaaaagttattgtcgtttgaattggctcggagcttcaacattcaatttcgagcgtctcgatatatgacgagactcaatcagacatccgagtaaaacgttattgacgtttgaattggctcggagcttcaacattcaatttcgagcgtctcgatatatta

SEQ ID NO: 3857 - DNA, 281 bp, Glycine max
agcttgaatgaattaccacgaggcgggttctgtaacgactatacatgactctgaaggcgcctgttcatttcagagggccatgtgccatctacggcgctgatctttgtggtgactgatgagaccacaacttccagcgtactgctggtgacctaatcaatcgactatctttacaggtattctgtaccttgtactggacttgagaataacattaatcgtgtcatttgtcgtctgaacagcgaccttggcattgaattagtgaccttagggtttagtgtcatgtg

SEQ ID NO: 3858 - DNA, 154 bp, Glycine max
ctgtggctgacaaatgctatatagcagcttcataggtctaatttaggccgccccctctctccctcgcgggagacattatctatccctgctatctctattctagttgccgaaggtagggccaagaactcttatctttacatgctatttaagcata

SEQ ID NO: 3859 - DNA, 393 bp, Glycine max
  unsure at all n locations
agcttattctatttatagcattcgtcttgaagtatttgttgtctctcaatggatggattcttcactctactcttcatctaaagtcttgaggttgttagagcatttaatgcttgcattaaatgtacgccccttcttcatgaaaattccatgttgataggttgacgtgcttacacttcaccaagaaagtcattaattccattatagcaagtctacatcaacatagcacgtcttttgatgaagatcaacaattccagaatgtggactttatttattcttcataggaatntgacagatttaaggagaatattttttacaagagaaaatatttgacatagagtattaaatgaaggtattanatgttaggtcaaagcttgaagccctttgtttagtttt

SEQ ID NO: 3860 - DNA, 404 bp, Glycine max
  unsure at all n locations
tgtaacctggacacggttgatgcccaagatcacatctttttttcgaaaaaggcgtgcgaacgaaagtgcacaatacctacatatattttttatttttatttttatttttatttttattttttttgaggtattttgctacctaaacatgtgtataattttgtgagatatttttgctatatacatgcatatccaaggtatcttactacctaaacatacatatatatattttgtgaggtatttttgctatatacatgcatatctaaggtattttcactacctaaacatacatatatattntgtgaggtatgactaccttacgagcttgtgcttgttttatttaaattcctaggatcatggacaattaggtgtgtcctactatgaccaaagaaacaaaggtgatcaaa

SEQ ID NO: 3861 - DNA, 310 bp, Glycine max
agctttgagccagaatgctgactcactatataccttgatccagcgtgagaatgccaatccttatcctcggaagcaaaacaagaaggagaaggaaaatttcaatcaaggacagagacgagatttccatctagaaaaaaaggtgagcagagaaattcccaatcaatgagtgggagaaagaaatgtaggaatgaaaggatattcccaacctaagaatgggagaaagtataaagagatgaatgttctagatcaaagaaactagaatatatatgcagagaggtctttggaccggacaatatctgaacaatacaga

SEQ ID NO: 3862 - DNA, 361 bp, Glycine max
tgcccagagaaggagtccacggaggaaatgcttaccatttctaaagactggagagcggtttctaatgactcctctgtggcttccacatcaggcatagaggatgggcagctcaccaagatgtctttctcgcctgagacgatgaccagatgcccttccactacgaatttctacttttggtggagtgttaagggaacaactaccactgagtggatccacgggcgcaccaacagacagctggacggggggataatatccattatttggaaagtaacttgacaggtgtgagggcctatatgtactgtgagatcgatctctcccctagcctctcggcgggtgccgtcgaacgctcgaaccaccattg

SEQ ID NO: 3863 - DNA, 413 bp, Glycine max
  unsure at all n locations
agctcgaactcttgcacctccttgaagttcaaccatgacttctcccaaactttggcttcataaaccttcttttgcccaccatcttttgcctccaaagtgatggtgtacaaggtaccagaaaccacttgctgtttcgcagttaccaccttttcaaactccaaaagggcattctgcatagccatttacaattcaataaaaataaaatataattcatatttaccacaaaataaaaagaaaatagaagcccgttcgtggttattgaaattgaccctaccaatctatttattccttgacataatggaaatgcaaatttatcctaacaatcaattaatttttggtgaacaaaattttggnggaggggtaatgccccagtacaagacagaanaagcctccaagctcaaagaacattcaca

SEQ ID NO: 3864 - DNA, 425 bp, Glycine max
tccacaaaaggcatagttatttccagtttcctaacaatatcaaggaatctcgctagatggcagtctttgtccttcttggaaggtaccacaggatatggtacttccgtagcctcatttgaagctttttctttcttcttctctcttgctttctcacttctactcttttctttcccttctttatttttttcaactttttctttttcttcattttctttttctttttctacctctatttctttttcttggtcatttatttctttctcctcgaccattattggtttttcaccctcctgacttgtcacatttgttacctcttctttctttttctcagtgccatcctttacaacaatatgtttctccaaagccaccttatcctcatcctcaactaccaaatgcttcttgtttcttgttatcacaacattaca

SEQ ID NO: 3865 - DNA, 387 bp, Glycine max
agcttatcacctttatcggcaattgaaaaaagattttaatgtaagtcaagagcatgatagtgtgtcgataccattaactggtcacaggttcttaagcaggccgagggcatcaatattgtatttggaaagacccaagagaaggaaaaaactaaaacttccatatggaagaagaggtcgatattgtttgatcttccatactggtatgatctagatgtcagacattgtattgatgttatgcatgttgagaaaaatgtgtgtgatagtgtcattagcacactggttaacattcaaagaaagacaaaggatggtttgaatactcaccaggatctagtttagataggtatacgagaccagttacatccaaggtctgatggtaacaaaatatac

SEQ ID NO: 3866 - DNA, 426 bp, Glycine max
tcttacatagtccgcctttgcttgaccttctttatgcttaaaaacagaaacattaggcataggcaaaagatcaagaggagttagtgggttaaaaccataaacaacttcaaaaggagaacaattagtggcattatgaacaactctattgtaagcaaattcaacatggggtaaacaagcttcccaagtttttaagttcttcctcaaaactgttctaagcaaagttcccaaagttctattaacaacttttgtttgcccatcggtttgtggctgacaagtggttgaaaataacaatttagtgcccaacttgctccacaaagtcctccaaaaatggcttaggaacttagagtccctatcactaacaatgctccttggcaaaccatggagtctcacaatctcctgttggatcaagtggcctcagaataatta

SEQ ID NO: 3867 - DNA, 282 bp, Glycine max
ctgcgcttcgagtgacacctactgctacttcacatttgatctcaacggcagggtctctctgcttttggcgccgacagattcttcacactctcacctgataccacaatcggttctcatctcaatttttatgaaaaaacttgttgtagttttagcacgttcagtaattttcgccgaggggtattttttttttttacaaaaggggggattcttgttctaacgggttattaaaaatttccataatgaagtgaggggataataattgatatatacttcctctatctc

SEQ ID NO: 3868 - DNA, 427 bp, Glycine max
  unsure at all n locations
ntgcacgtatcagtcaagtgtatggaccatatcatagccaaagtgctcatcgataatggttccagtttaaacgtgatgcctaagagcactttggagaaattaccattcaatgcttcccacctaaagccgagttcaatggtggttcgtgccttcgacggcacccgctgagaggttaggggggagatcgatctcccggtacagataggccctcacacctgtcaagttaccttccaaataatggatattaaccccccctacagctgtctgctggggcgggcgtggatccactcagtgggagttgttccctctacactccaccaaaagttgaaattcgtagtggaagggcatctggtcatcgtatcaggcgaggaagacatcttggtgagctacccatcctctatgccttatgtggaggccgcagaggagt

SEQ ID NO: 3869 - DNA, 441 bp, Glycine max
agtcacctgcggcatgcaagcttaccatggttcatccatttgcttaatggtctgcaacataagctagagccttgtttcggtgcctaatcccagcttccaaagttgctgataactgttaaatatgagttgttttttattataaaaatataatgaaaatatctttaaaatatttatttaacagttattttttacttaaatattaaaaattgatatttttcttatttatggcttgtagatatgaaaaggagggataaaatccaaaaatatgcagaaaatatcaaaaatatgaataaggaagatttttgccatcaggtccaagtccactccaacaactataaaaaaggaatcaagccaagcagaaaagacacaccgagtctcagagcactctaatacacacctaaagtctgagaactctcccttagaaatctttcttctctctca

SEQ ID NO: 3870 - DNA, 431 bp, Glycine max
tcttcattgcactaatgctctcccttgaaacagctccttcaggccattttagatgtgatccacgcttgaaatatttttctgcacccttgctacatattgaagagcaaatgaataaaaaagaagttactacatttaaaaaatatatattaatgataggttttatacaaaaggtataaacacttagtcaaataatttataatttaattatattttaaaatatttttaaaatttactaatttattgtaaccactgtaatattggatctttaatggaatcttaaatattctaaccactaataatcagtctttatttattgataagaattaaatccaatatcaaagatttacaatttttccacgtactaagactcatttgataggctaataagcagcctaatatcatacttaaaaaattataataaaaaaatcaaa

SEQ ID NO: 3871 - DNA, 375 bp, Glycine max
gggatcctcttagtcacctgctgcatgcaagctataagaaattttgcaacatcgttttggatatttaacaagaacattctatttcttgacattggtaccttggtaattatattatttctcccatctctgatggaaagactggaatctttcatgtgaatatcatagccttttttgaggaattgtcccaaactcaaaatattgttcttcatatttgggacgtagtagacatttgatatgaattcatgtcttgcatccttcaaatggattatgatcttacctttttccttttataggaatattggaattattaccaaattaagcattgccacttactgactcatcaagatccacgaaacatgcttcttttccacacat

SEQ ID NO: 3872 - DNA, 403 bp, Glycine max
tcaaccttcggtggtcctttctgctccaaatcgtgaatgaaggacattttcggagtcgtgaagcgcgtctctacgtgtgggacttcgaaatttcaggtttgggtggacttctttctcctttgattttcgtgggtatggagttttgggagatatgatgggtagtcttgctagttttctgcttcatgatagttatttgtgaagaaacttgttgaaagcatgttgaaattgccatgtttggaagagttaaacatacccattctgttttagggtttttatgatgatgcttgtgatgttcatgtgctgaaattgcttatggaaaactgttagagatgaacggtataattaacctacggttagaaagtgaaaatgtggtgttatgagtggaaaaagagtgaattgttga

SEQ ID NO: 3873 - DNA, 416 bp, Glycine max
  unsure at all n locations
agcttatattttactaaacttcgntgtgtatttaaatatganaagaggattntgctatccctaaaggaaagaaaaaaaaaatgaaaatacggtccttgagtgttgtcagtgaatgactatgagtgcacatgtgagagaaaattggtagtgtaataaaaaaattcacaaacaaccttaaacagtaaaacaaatcatccaacaccgagtgataaaatataaaggtataaagtatattattttattacttaatatatttaataaaataaaataataaaaatatgtttttatcaagtgtggtgtatcactgttcttctgtctttttgtgggaataactctgttattaatataccttcttttattgaaattaaaagaacgaaaaataaagggaagaacaacgactaccaacttttttttac

SEQ ID NO: 3874 - DNA, 414 bp, Glycine max
  unsure at all n locations
ntaagctctgcagtttatcttattaatagagttccctctagtgtgttaaactttaagagacctcttgatgtcatttctcatcatttcacccttaatcttgtcaatcatttaccaccccatatttctggttgtcatatatgtacattcgcatcctcaccaacaaacaaaattagaatctagagcaatgaaatgtgtttttgtgggatacaacaccactcaaaagggatataaggcctatcatccatctacaaaaagattttttgtatcattggatgttacatttcatgagcatgaaatgttttttcccttgaaaacacttcattcttcaccttataggggaggtgatttggaggtgcagaatcatgatagacttgaccaagatatcaggttatttgatattatgccaacaacaac

SEQ ID NO: 3875 - DNA, 403 bp, Glycine max
agcttataaaaatggatgatataaagaatttgaagaggtcatcagatgacttggtatttttagtttcattttttcccaagaaataacgtgtacctttcgtaaaagaattctgttttcgtccttttgtaaggaaaaaaaaaaaaagagattctgtttgaatttgattaaactattttctaaaaaaaaactattatgaatgataacttttttcttatcttaatattttgttttgctatatattaagattctaactcaaaatcattaaacttgtttataaaataagtatcttctacttccatcccagtaaaaatcccacatgaaggagttaagaaagctagattactttgtgactcttataaatataattaagatgaatattacgaacacatcctatgggtttatc

SEQ ID NO: 3876 - DNA, 292 bp, Glycine max
tagctaataatttccacagtgaatgacttttgttaaattttaatagaattagacattaaagtggttaattacaatctcgaactaaagatttattcatttggtaattatctaaacatggacaatactaaatttcctattcattttatctcatttcatttcatttcagcctcccttccaaacaaaggcaagtaaaaaagggggtttgacatcctaactggataatcgtaacgacaaacaccgcgagtatttacagcttgactgttgtacgtgcttgataagtgcacaacgttta

SEQ ID NO: 3877 - DNA, 390 bp, Glycine max
  unsure at all n locations
agcttgtagggttaaagtctcacgattgtcacgtgttgatgcaacaatggttagtcgtggctatacgagacatcttgccaaacaaagtcaagttagccataactcgcctgtgctttttcttccatgccatatgtagcaaagtcgttgatcctgtcaagtttgatgagttggaaaatgagaccgcaattatactatgccagttggagatgtattttccccctgctttctttgacatcatgattcacttgattgtgcatctggtcagagaaatcaaatgttgtggtcctggttatttgcggtggatgtacccggttgagcgatacatgaagatcttaanagggtatacaaagaatctatatcatccagaagcatctattgttgagaggtaca

SEQ ID NO: 3878 - DNA, 401 bp, Glycine max
  unsure at all n locations
ntgattcctagnaaaaccatgatttctttgttagcccaatcatgttacaagcctaataaagtccgtagtgatccacattgagcatgtacatagcattgactgagatgatgtgcaaagttgggaattttaatattcagttgttataattcaaacacttttaccgagacacttatgggattgagagaaacactagccttgtgggtaaaattaagcccaggaaagcaagcgaattgaggaaagaagggctaattaagaaaagaagactaattgaggaaagaagggctaattaaggaaaatagaatatttaaggaaattaggctaattaaggaaagaatgactaattaaggaaatcagattaattcagaagtccactaatctgcacctataanagaagaagagag

SEQ ID NO: 3879 - DNA, 351 bp, Glycine max
agcttctacttatgtggcagggcgggctttcttcaccttcttgtctccaacgcgaactttgaccattgttcttccttcccgcgatgctccttttcatgtctgcttgagtgggcttatagcctaaaccatacttcccacgattaccttgggtatttatcagtctagttatgccgccattgttttttcctaaacccatcccgggctcataaccgttccccaacataactcgggccatcattaccgctgcatcggacagactatgctgcccaaagagggagtccacagaggaaatgctgaccacctcaaaagactggaaagcagtttctaacgattcttctgcggcttccacat

SEQ ID NO: 3880 - DNA, 416 bp, Glycine max
gtgcttgtacaatctccctctttttgatgatgacaacttctgaaatcaagaaacacacacacacacactttttcctagtcgatcactcacataaatttccattctccccctttgtttttgaatttatgcttcacttaaaattaagttaattactcatgtgagttcttgatttaatccctatttctctccccctttggcatcaacaaaaagccaaagtgcgtaacaagtatgaaacatacaaatacaactagtcattcacacaacaatcatggaaaaaatataaactaatcataccagagaacagaaaacaattaagcaagatattttaaccattcatcaaacttagaaacgttaagaaatataaaaaccatacataattgacataccccagaatagaaaaacaatcaaacagatat

SEQ ID NO: 3881 - DNA, 459 bp, Glycine max
  unsure at all n locations
attgttcccctgtccggcccgggatcctctgagtcacctgttgcatgcaagctttatgagaaaccattcaaacatatgtagtttcttcacaagactgaatggaggacgctttagtcgagagaccaccttgaataacctttattccaacctttcaagttagaggaaagagctgatcgagtaagtagggcacttagaaaaactaaatccctaattagaggcggaagtgacactcatagcgaattactaaaccagattactagtttgcttaaggtcaatgcagatacgtccccagcttctgaaaatacttctcaaatgggaacgagacgatccttcacaataactaacggcattaatgaagatagtgaccgagactacataaccccactgatataggaccagtgtagtaaagaatataagtcttaaatattccaacactggaaaccccctccaagaatatan

SEQ ID NO: 3882 - DNA, 359 bp, Glycine max
tatgaagcctatttcgcgcggctatctaccatacgtgtgttgcatctatactatgacaccaggtatgagaacaatgcacgaattctaaaatgcaacacttagcatacaggtcaatttgttaagaccatatagcaattgaattctaatgcatatataacgcattttatatatattcatattacccaagagtctacttttgcaatataactttattgttatcaaacgttctgtgcatcacacaaaggaaaaaactatgtgtagtatgtcacagatgatatacgtaaacagcatgtgtgcacaaacttttcacaacaaataatttacaactgactctaagagcccatactcatggaggatat

SEQ ID NO: 3883 - DNA, 388 bp, Glycine max
  unsure at all n locations
agcttgtcaaanagggaagcaagttaataactcttttcaaagtaaaaacgttgtttctacttcaaaaccctttgaactacttcacatagacttatttggtgcctctagaactatgagtttgggtggtaattactatggcttagttatagtagatgattactcaagattcacatggactttgtttttgaaaaccaaagatgaagcttttgatggtttttgcaaacttgccaaggtcattcaaaatgaaaaaaggtcttaacattgtttcacttagaagttatcatggaggtgaatttcanaatgagtctcttgaaatgttttgtgaagaaaatggaattcaccacaacttttctaccctaagaacacctcaacagaatggtgtcatgga

SEQ ID NO: 3884 - DNA, 404 bp, Glycine max
tgaaggtgtgtagtccaccatcttttcatagtagaatactagtaatgtgtctactatcattgttatcattttttctccgtcattgaggtgccacttgagcttccaggtctctttacctttgggcgtattctttgaaagatctgtgcccctttttgcacatgttctgttgttgcatcctatccggaaccatatcaaaattgtactgatactgcctaacgaaggcaaccattaggtccttccaagagtggactcgagaaggttccaggttagtgtaccaggtaacagctaccccagtaatattttcttggaaggaatgtatcagcaattcctcatcttttgcgtatgcccccatcttccgataatacatctttagatggttcttggggcaagtagtccccttgtac

SEQ ID NO: 3885 - DNA, 401 bp, Glycine max
  unsure at all n locations
agctttncacattgaattcagcacctaatgtcatattagatggagattgggtatcttaacataagagatttcagatggactttaatcctaagcccacagccgaccttttcacgagatctctacttaaccctgtggataaatgatcagccgaattatgctgagttctcacaaactccactgatatcacaccatgcatgattaactcccgaaccatgttgtgtctaacacccaagtgtctagactctccattatacacttgactatatgccttagccaaagttaatatggggtaaccttattccttgtgttaggaattcagttcaacaagtaacaggctgtcaacatagcctcaccccataatccttcacttacacccgaataggataacatggaattcacca

SEQ ID NO: 3886 - DNA, 411 bp, Glycine max
tgtcatagtatgacatgtgcagatgaataagattaggagtaggcgatccacccgcaaagaacgagtcattaggacaatgagttatgatcaaatcatgaagaagtgagagactctagtaagcatgttctacaatatatagaaacggatttcaaattcttacaattagaaattctaagacttttaagcacagagaaacaacctaaggtgaaggaagtcagtgaataacatctattaaatattgtcaaattctttaatgatgtgtaattgtgtaaggattcataaggtaggaactccaatttctcacaattaagtagagtaagagattgcaatgcattcagcagaccatctcttaaggatgctacggaattaacgccagagatagttaagtctatgatgaaataggcggactcc

SEQ ID NO: 3887 - DNA, 472 bp, Glycine max
tgcatcatattccccgagtcattcatccgtatttgatgtcgatgcagcatcgaagaacagaattgccattccttggattatagggttgaaccaagctaatgctattataaaaaggttcatcaagacgagtggaattatggaagtaaccgcctggcaaaattggggcaaaagatgaatcgagtcacatcaatgcttagtctacttccaaacatatataggattattgatgtccttgataattccagttcctccttgacaaagatgtaatggaccatgttgaaaatataaagtgattcaaccccatatgctgtgtaaataatcccaatacttatactgcacatcattcgcatgcatccatgcttttcattggttgcaattgttaaatgcactctttccttgaaaaacaaaataaaatgaacttaatcattgttttaacaaaggaatgggacacgctttacgacgcccttaccaa

SEQ ID NO: 3888 - DNA, 417 bp, Glycine max
cctaagattggttgtagaattctctaagcatgaaaatgcggacttggatgaagacttggagctggcccttgattggtactctggcccctttgacacgagggaaaagctttacaatggagtgtatatatgggggcctatattaggggcataaaattcctcccctagtatgattaaattgttttcctaaatgcatgtatgatagcatggaatgcccttatgaatgcaaatgtgggcaagaagtcattaactttccggaatgcatatggataaatatgagtgagacaatcaaaatttgtgccgggtacttcaaatgtgttgaaatagtttgggataaccaaatgtttaagatgtaaattatgtgcccagtttgacgcagccctttgcgcatgaaagtgtggtgctcttttttacaatgtt

SEQ ID NO: 3889 - DNA, 614 bp, Glycine max
agcttgataataacttgaaggtttgtatcataaatgaatactgtggaagttatcactaaacacgcttataaatgagggaaagaaaatttcaactcagcgttttgtataattctgctaccataacttattttagcaacatagtttacgagaagataagaaagaaaaggagaaattcaggataagacgagtgacataattataatttatgtaaaaatattaaaacgagttcaaaatgaattggtaaacaatttattattaataatatatcattcatataattactcttattatataatattttccctttatttttttatatatcacatgaataacaatattattttatattttattctttttcttttttttctttttttttataaaaaatactaacaagtatccttaggatattagttactgaattaaaaaaaaaattcttttacattctctcctcttctataattttcacaacaaatataatattttctttcaattctttaccaattttataagaatactaggcaaagaaacccttttcttatttcatttaaaataattatatatatttattgtgtaataaatacaatttctcttacctttaatttaatgaattt

SEQ ID NO: 3890 - DNA, 532 bp, Glycine max
tgacattctaagacgatcatgatgtcaataccgtctttgaaagttgagattttctaagacggtgtcccttcgaccgtcggtaaaagttagacactttcaacgatgttagattcaaagaccggcaaacaccggcattgtttgtctctttccacccgcgttgaaaccgctttttctaccagtgccatcaagtatcaactaataaagaattgaattattccctttaatccttttcataaaaaataagtaattgtgttaaaaaatactactatgttatgacttctttcgtaatgattggaactaatatgcaaggctttaagccttagtttcttgttttttttcctcctaaaagtgatttttgaaagttatccaaacagggcctgagtatgtttctgtgattgcgaatcaattcatgttttatgtttcagaccattaatggaatgttctgtatgcatgcacagagctaagtttatttagttcagaaaagggtatagtgagtccgtgaaagatgatgcttgccatgtccaactacatt

SEQ ID NO: 3891 - DNA, 312 bp, Glycine max
agcttatgctgcaaatatttacaatagacctcctcaacctcagcagcaaaatcaaccacagcagagcaattatgacctttccaacaacagatacaaccctggatggaggaatcaccctaacctcagatggtccagccctcagcaaacacaacagcaacgctgctccttccttccaaaaagctgctggcccaagcagaccatacattccttcaccaatccaacaacagcaacaaccccagaaacaaccaacagtttaggcccctccacaaccttccctcgaagaacttgtgaggcaaatgactatgcagaaca

SEQ ID NO: 3892 - DNA, 613 bp, Glycine max
aatgggatgggaaaaatcatctccttaatcctgactaaaatggttccatgaagaaagcaaacaatacactctttctaacacacattttactatttgttaaaatttattgaaaacaataaaatcgagggagagactctttaaataagaaatgagacccaaaaaaatttgtgatttctaataaatttcaactaatagtagaatgtgtgttcaaaaaagtgtgttgctagcattcctcatggttccacagatacaataatgttacagtttctctcagcaaaaggaacagtctggtgaagaaatgtaaaagtcaacagctaaattcaagggtattttctcttaacaggacatccaagtaacaatagccaaagtactagaataataataagccaactgcttattataagttacattaattcaaaagtcagttgtaataataagtgaaaacttatgtatcttttttgtttctacatgtttcactaaatatgatcatttgagttttgtttatatcacaacttcatggtactcaaaaccaaatgcaatgttgatgaccctcactcatcctttagttaattacttaatgggaagtcttgtgcaaatgaaattatctacatta

SEQ ID NO: 3893 - DNA, 629 bp, Glycine max
agcttgaaggtaaactagatgccttggttaacctggtaacccaactggccatgaataaaaaatctgcacctgtcgccagactctgtggtttatgctcctctaccgatcaccacacagaccttttcccttctatgcaacaatctaaagccattgaacaacctgaagcttatgctgcaaacatctacaacagacctcctcaacctcagcagcaaaatcagccacaacagaataattatgacctctccagcaacatgtacaatcccggatggaggaatcatcccaaccttagatggtcgaatccttcacaacagcagcaacaacaacaacaaccttattttcaaaatgctgctggcccaagcagaccatacgttcctccaccaatccaacagcaacagccccagaaacaacaaacaattgaggcccctccgcaaccttcccttgaagaacttgtgaggcaaatgactatgcaaaacatgcagtttcaacaagagaccagagcctccattcagagcttaactaatcagatgagacagttggctacacaggtaaatcaacaacagtcccagaattctgatagattaccttcttaatctgtccagaatcccaaaaatgggagtgccattacattg

SEQ ID NO: 3894 - DNA, 707 bp, Glycine max
  unsure at all n locations
ctctagcttcatgatgaatcaagattgattcaaagagttttgatgatcacaaagatgatgacaaaaggctcaaaagtcaagaacacttcatgataacaaagatgatgatctcaagaatcaaagaatgagttcaagattgaatcaagtacacttcaaggatcaagaggaaagttgaattcaataatcaagaatcaagtttcaagattcaagctccaagaatcaagatcaagattcaagactcaagattcaagaatcaagagaagactcaatcaagataagtattaaaaagttttttcaaaaactaagtagcacatgaatttttctcaaaaaccttttatcaaagagtttttactctctagtaatcgataaccaaattattgtaatcaattaccagtagcaaaatttttttcaaaaagctttcaattgaatttacaatgttccaattgatttcaaaatgttgtaatcgattacaatgatttggtaatcgattaccagtatgtttgaacgttagaattcnatttaattgtgaagagtcacatcctttcacaaaatagctttgtgtaatcgattacactgatttgggaatcgattaccagtgatagtttctgaacaaaatcaaaagatgtactctttccatagttttcaaggttttctaaaagtcataacttttccaaatggtttttaagtttttctaaaggttataactc

SEQ ID NO: 3895 - DNA, 616 bp, Glycine max
agcttgagtgccttctgttattaacttgatggctgatgttgaatcagattcacaaactaagtagcgtaacgattagttaatttgttctgccatttgtccattgaccaatagattagtcaatattaatgaatattggattagtggttttggccattagtcaattgacattaaaattgctttaattttattcaattccaacaaaaatattgataaaaactaaaaagaattcattaatatttgagcaaatgtaaaatacattggtcaattattgttttgttagatgcattcatccatcattttatcattcgtacactgtacccaaaaaaattctatgaatcgtcttgctgtgttattcatttgaattcagaccatcctctttagtttcctgttcataccataccttgataaaattagatgttggacccagaagtattattggtgtaatcatttaatttcattctatacatatcatctaaacttgatttaactttcgagttgttaaacaatatcatgtatattgaaaaacatctatttaaagaaatcaacaccttaaacaatcatggctttgaagcatttctactacttggctcatggtgggtctccgatctttatttac

SEQ ID NO: 3896 - DNA, 640 bp, Glycine max
  unsure at all n locations
ttcaataacccttcccactcacttacaggaagcaatgaatgatgaagggaacaaagttaacttgtcataaaaagtttgtgttctatttaatgtaactatgctaaattttccttatcataattgtcatgatgtagaattgtagttgattcagaggaattttttatttacattttatgcatacaatgcaatttgtcatccatactcctatctattcactgataataataaaaaaatactcctaagtcctatctattcatttaacataaaatttctaaaacgagaattattaggttgccgtttcggcggtttggttggctttattgtgtcgtgcaacacttttgtatgtcccctccttcaatctaagacgccacgacatagatattcaattcagttttcactttaactttgtattatactctcaagtctcaatcttttaaattatttttatttggtgtataatgccagcaacggaatttgaacttaagacctgaaaactacttgaatcctccaccactagtttgccttttcaattatttgatctttatctttcgctttcctcttatttctaatattntttttctttatatttctttaaaaatattccaaatccatttatgtatgatcaatggaacttaataat

SEQ ID NO: 3897 - DNA, 476 bp, Glycine max
agcttatccttatggcttgcctccggactttaccccccatgccaccccgaaagatttaagccaagcccctactttcgaggggcaactcccaccttatgacgactatcccgggcaagacgatgaggaaggagatacccatcttagccccctgctccacctcaaagatccgtccccacatgaactaacccaaccgaacatagtccgccatatcccggcctcacccacacccgtaaaagaatctgttcccttcacggaagataagggaaagattgaggcacttgaagagaggttaagagcagtcgagggccttgacaattacccattctcggatttggcggatttgtgtctcgtgcccaacatcgtcatcgctcccaagttcaaagtaccagactttgataaatacaaagggacgacatgtccaaaagggcatctccggatgtattgccgaaagatgggggcgtattctgcggacgaaa

SEQ ID NO: 3898 - DNA, 526 bp, Glycine max
  unsure at all n locations
tgaaccataaccggtgagagtgtgatattaaattgtgagtgaactactaactttgaataataagtcttgcctccattctcttaaaattaaaatgaaatgtatgaatgaggacattatgaaaggcctgaatgtatatccagcccattgaccaaaaatcttaccttggattataattgtatcttttgcaccctttgtgagctaaattacacttttcaaattgaaccctgaacttgaataaatatctccaaataccttgtttagattgtaagagagcagatagttcaaggcaaattaccccaaaatttgggggagttgattgggatgtaaagtaaatggtaaaacatcagcacacacaataaataagttgtgtttaaaaaaagagagagagaanaagaaaagaaatcaaagaaaatgtgtgttgttgtaataaggtcaaatgcacattgaagtgaaaagctggtgagaacgctaattggattaaaaagaacatttggataaatctaggatttgtgctctcttagaatct

SEQ ID NO: 3899 - DNA, 394 bp, Glycine max
agcttgatcaaaactcgaaggtgggtatcagatattttttctgcggaagttatcactcaccacgcttatagatgatggaaagaatatttcaactcaccgttgtgtgtaattctgctaccataacttattttatcaacatagtttacgagaagataataaagaaaaggagaaattcaggattaaaccagtgacataattataattgatgtaaaaataataaaaacagttcaaaatgaattggtaaacaatttattattaataatatatcattcatataattactcttattctataatgggttccctttattttgatatatatcacatgaataacacacttattttaaattcaattctttgtctttgattacttttctttgatagaaaatactaac

SEQ ID NO: 3900 - DNA, 276 bp, Glycine max
gatattcttagacgggtcccttcgaccgtcgttaaaaggtaaacactttcaacgaagttagattcaaagaccggcaaacaccgtcattgtttgtctttttccaccgacgttgaaaccgctttttttaccagtgccatcaagtatcaactaataaagaattgaattattccctttaatccttttcataaaaaaaaaactcattgagttaaaaaaatctactatgatatgaccttccttcctaattgattggaactaattatgctaggcctttaagtc

SEQ ID NO: 3901 - DNA, 632 bp, Glycine max
agcttgaatgtccaaagagcaaagtctccaacaaaaatgtagaaaaaattaacattcaattaaaccaaaaaccctaaaaatgtgaaaacacgtcttagaattctgcatagattttagattaatatgcaattttgaatatgtgatatatgtgaaaggaacttttaatcacaccgtaagttataaaacaatattatttagttgaaagttatagaatggtataataattgtcaatgttacactggtgtaatttgatccttccttatatattaaagttttagaactccccttgagtccaacatcttttatgtatgctcagtaagatatataagatcaaagtggacatgcatacatatgtaaaaagcatagttaagaggcgaaattgaataatccaaccaactcatttataaaagcaacataacatatgttacaacatatatattacaacaaagcatataaagatgaaagataagtctaagctcatgatacatcaaaattccaatttctccctcttatgtaatcaacaaatacaggtttgaaagatggaaaatgataaactatcattatcatttatggctgctgaggtggatcttcatttcgtggtgaatttggatgtggatgttaaagttgatcat

SEQ ID NO: 3902 - DNA, 594 bp, Glycine max
  unsure at all n locations
cgctacattttacatgccaatgaactagcacgacgtcttaaggtatgctaacattttattattttgtatcctatctccttagtcctgagttagatgttactctggtgaaagagtaaattaatagtttttttttttactattatgtggcatgtagttggttattgatagctacaattgatcaaaaaccaattatggatattttacaataaattaatccttgagcccttcggatagatacgattagttttttattgatcgtatccttatcttttctgttttatttttcctaccttgtctcttgaatctgaagtgtaatcagattggttataaaatctctaaccaactctgcctataaatctcaatctttgaaaatttgaatgaatatgaaacaaaattatctttcttcccctanactacagaataaaacaattttttgtctcggtacctgcattgctattttgcaggcacttctagttaaacaaaaaagaaacatttgaaaatgatgacttgaatcgaacttataaaatacttaatttttctctcatttcactttattttttaattttttgttttttcattttatttctttctttc

SEQ ID NO: 3903 - DNA, 427 bp, Glycine max
agcttgcctaattaacctgaagttgagagagaatgattattaaacacacaaaatagatgtatgaagtagctatagtatattctggacaaagcgtacttatcgtactacacaacaaccataaattgggaaagcttgatataatttacacaggtcttatacgcaaaagatgctgcgtatttattgactaacactaagcatatcatggtattctctatacgcgcgctaggcgagtttgtaccgttaaccgcccagcccatttttgtgaggatgaatctactttcactcttgagagaagaactgtttaattatctctcctgtgattcttttgatgctgatggccacgatgaaaaggaaagcaaatcttatggacctcaggaaccatatgacactacgagattcatctttgaggttgcgtgggaacacttca

SEQ ID NO: 3904 - DNA, 548 bp, Glycine max
tgtaatcgattacacacatactgtaatcgattaccagaggagtttttcagaaaacattctcaacagtctcatctttttatctgattcttaaatggccatcaaaggcttatatatatgtgacttgagacacaaatttgaaaagagttttcaagaacaaaaaggtcttatcctcttaaaaagcaaaatagttttatcctcttacaaattccttggccaatacacttgtgattcaataaggaattatttgagtgctcaaaatgttcaatctatctctttcaagagagattacttcttctcttcttctttattctgaaaagggattaagagaccgagggtctcttgttgtgaaaagaattctaaacacaaaggaaggattgtccttgtgtgtttagaacttgttaaaggaatttacaagatagtggaactcccaagcggattgcttggggactggacgtatgcacaaaggtgtggccgaaccagtataaatctgagtatgcactttctcttcccttaaactcctttatttattattgatttatattcatatt

SEQ ID NO: 3905 - DNA, 544 bp, Glycine max
agctttgatacttacagctgatgcaataaccactgtctgcccaacttcaaggccatttattccagcatgtatattgatggaatttgtgcaaaaaacagccaagagccccatatatagtttatacatccatcctgccccataaaacaaagtcaaaatagtgaatctttacagtaattagtaataactcctcaagtatcatttacataaaggtacaccatcaatatggaagctcagaaatgacattatcttcaacaatcatccttttgtcatatcgaggctgttggacaatacaattttcctctcttggtcttggatgagggggtgggaaaaggattttaatgttccttttcaccaatggtcttcatctatggctttggtttttaagtagtgatagtgttgttgggttgggttgaattgtttctgctgggatgttgcataattttatttacttttctgtcccaggagaacctacctcctgtggcttcttgtaatacctctggtactatgtatcttctattctataaaaaacttcgtaccccattgc

SEQ ID NO: 3906 - DNA, 570 bp, Glycine max
tagcaagagcctacgcatcaatggagtccatttgagtctcttatgattcaaaagatggatgccatgcttcacctccatcaagagcactcaactgatgttcaagtaccttaaaaaacatcacaactcagctggagaaataaaaactaggctaacccttagtcacctccttaaccccgatgaagatgaagcttagctatgtttcagtgtttgtttctcttgtctatattgtttgatggtttgttatgttctgttttgttacgtttgtctttgcttgatgaaagttaagtttttttgtaagctttatgattaaaagttgtaatgttccatgattaatgaaatgctatggttttatttcccttcaatttttttgtgttctgatttttgtgtatagttcaaacattttggccttgttaattctaaaaggcggagatgaactagcatatttgctcgcattgcataagcatttgggaataacttgcactagcattagtaaaattatatagtatgatatatgatgatgatgatgataagaaatgattttttcttaagtgtaagaattttaggatgact

SEQ ID NO: 3907 - DNA, 464 bp, Glycine max
agcttccattgttgagtttttgcttcccttttcacacttcatttcactccccacaagtaagtgcactttcccctggttatttggctctcccttgatgtgttttagtgctttagttgctcattttttgcgaaattcgtgaagcaattcacatgtgaatccatgcttgttttcgctaaattaaagggttgtaagggatggccttaagcctatgttgcattctggagtaatggggcatgccacattgcccccattctcttgcacctaggtagcatggaaaatacctttcaatggtatgtatatatgcgaatatatatagcatgaaaatgccttgcaaagtgtgtgaatatatggcataaaaataccttgcaaagtgtgaatgtttacaaaataaatgcatttcaaaaaaaatttgtttttttgtgtgggtcgcaaaaagaccctttaaaaaaaaatccccttttaaa

SEQ ID NO: 3908 - DNA, 316 bp, Glycine max
tcatgacgaatcaagattgattcagagaagttttgatgataacaaaggtgatgacaaaaagctctaaggtcaagaacacttcctgataacaaaaatgatgatctccacaatcaaagaattagttcaagaagttcaagattgaatcaagaacacctttatgtttaaaaagaaattttatttttagaaaccagaatcaagtttctagattctcgaatcaagatcaagatttaagactctcgactcttgattctcgaatcaagagaagactttctctcgataagtttgaaaaagttttttaaaaactgagtaccccatg

SEQ ID NO: 3909 - DNA, 362 bp, Glycine max
agcttgttaaacgattctatgaaccatactttgttttggaccaaattggcaaggttgcatacaaacttctattgcctgaaagatcccgcatttctcctgctttccattgttccttccttaaacccttccaccaatcatctgaagaagattgtgtcccactagcattgccttccaatgatgttgaaaatcaaccagttatctctcttttaaccattctgggcactcattaggcctctgaatctactgatccaaagctaaggtattaattcaatgggcagggttgtctcttgatgacattacatgggaagattgtgaaaaactcaagactgtctatcaccttgaggacaaagtgtttttttgat

SEQ ID NO: 3910 - DNA, 536 bp, Glycine max
tgcatgatttacagaatttgtcttttatatttaatatcttgttttattttataaagaaaataattatttttatcattgtttgatataatatggtctctatttataaatcaagacatctagtttccttattttccaaaataagcaattttagtcctatcagttgaccatccaaagtctaatgttgacttctatgtgacatattggtgctgatatggaacttatgtatgcaaatgacatgacacttatgtgaaaaaaaattaaatgacgtgaataataaaaaaacatcttaatatgaattaaacttgtgaccctttattcatagacaatggaataaactactaatatactcaatttgtctacctaaatatattactattattctctatgtattcaatagtcaagagttatattttttttgcagattatcaaaatctataaattaaaaatatttaatatataaatctttttaatcctataatatataaatttatatgtttctattttgaataatttaccatctaatttttatttttacc

SEQ ID NO: 3911 - DNA, 369 bp, Glycine max
agcttgccgccacggagttttccgactatgctcttgtgtggtggaacaagctacaaaaggagagagcaagaaatgaagagccaatgtgatgtgaatcttacggggcgcggatcgcttgatacaggctgtatagtttttggatgacgccactttcggtgaaggaagataagtcagggtagacgccactttcggtgaaagaagatgactctgggtttatcctacttcctgtgaaggaagataattcccggtttaccccacatggattaccctgataaggcttgaaattggttctacaaaggaacccataaagaaacttctttccaatattatgaaaacgtcccaagtttttttttttttaaatataaaaac

SEQ ID NO: 3912 - DNA, 496 bp, Glycine max
ttggtcctattcaaatagccataacttttgacatgggggtactattgaggcccatgatatatcgagaggctcgaaattgaaaaatggaagttctcgagaaattcaaatggtcataacttttaacttggatgtccgattcacgcacataatatatccagacacacaaaattgaaaaatggaattctcgataaattcaaatgttcataacttttgcctccaatgtcagatttaggcgcataatatatcgagacgctcgaaattaaacaagaaagctctggtccaattcacacggccataacttttgacatgagtgtatgattgatgcccatgatatatagagacgctcgaaattgaataatggaagttctcgagaaattaaaattgtcataacttttcactcggatgtccgattcagacacataatatatcgagacgcttgaaacctaacaaggaagctctggtcccattcagagggccataacttttgacatgggtg

SEQ ID NO: 3913 - DNA, 543 bp, Glycine max
agcttgtgcttgttttattaaaattcctaggatcatgagcaactaggtgtgtcctacaatgacttgcgaaacaaaaggtgatcaaataacaagcagagatttaaaaggtactaggttgcctcctagtagcgcttctttaacgtcttgagctggacgcctgatgacttgtcgatcacggacctagtactttgcttaccttcggctttggacttggtcacctattggtcgaccatgtgtcgtaggcaatactctaacctttttgtggatgagctgaggggctctataggtggcgacggtgcatttattgcctgttgctggccatccccaggctgctgtggtgtttcgccttgcacctgcctgggggcgcagtacttcttgatgaaagctcgattagtaggggacctgatgaccttgccgggggtgataggcactctgtagaaatgacagaggcccgtaatcagagctggaaaccccaggaccctgttggacttctttgggtccactgggtgtcctatgtcacgatggcatgatcttgctgggggg

SEQ ID NO: 3914 - DNA, 555 bp, Glycine max
  unsure at all n locations
tgtccgggcagttaagcaagaccgaagataatatttgggccatcatcgaccagtacaaggaaaaactaagcctaatagtgactcatgaaccaaagctagaagatgaatacaccaaggtatcagtcttgcaagcggaaaaagaagcaagggaaaaggtgatcaattcattgcacaaaaaagcaatgatgtggatggacaagttcgcctttactttgaatgggaatcaagagcttccccaactgctaaccaaagccaaggcaatggtagatgtgtactcggctcccgaggaagttcacgggctccttaattattgccaacacatgattgatttgatggcccacataattaagaaccgctaaggcaattgtatggttgctttgattttgattaaataaaccctttttgttccctaataaaatgaggttgatttaatcctatgtgtttaaaactctgtgtgaatccaatacttcgacaacttatctttagcatgcattncatgtttgtttttatcgcattactcaccgcattttgttcctctaggaagtacaccataac

SEQ ID NO: 3915 - DNA, 592 bp, Glycine max
  unsure at all n locations
agcttttctttctcaatcaacctgtctattgactaacaattctaattgcaagttcacattcttgttctttctttgacaaacatacatacttgctcaaacttatgaaaagaaacacaaactccatcacaatcatgcattccatccaaaatcaattcataacaccaattttcacaaaaagataaaaatgttttactacataatcatccaagtcaagttaaactattccatatgcttcaaaacaagcatactagctatccacaaacaaaaacaacagtgtatataaacattaaccaaaataactaagacactgaactgaaatataataattatataaaaaaatatccaaaaagcaaaatcctcaggaatttaaaatccctgagataggtcctgtgtatcctatgtctgagcatcctcctcatctgtcaagtaaagtactggagtagttggaggagaggtgttcagtgtcaggactggtgtggtctggtcctctagtatgtcaagtacaagagtggaagggtcanctgtaggctgtggtgaggagaagtctgctactggagtaggaggctctgatgtgccctcaagtgaatctttt

SEQ ID NO: 3916 - DNA, 827 bp, Glycine max
  unsure at all n locations
cattcttgtagttntaattnttttttattaagctagggttgaaaattaagtcataaagccggctcaaccccaacaccacaaagtcagccaaaaagttggaaaaacatatgtgcaacagcaacacccttgacgacacaaacggtggcaccaaccatgggaagggtgggtacaaggcccctaacgcccactggngtgcaagggctttgcaatccgggagaattgccctggtgaagggcttaccctggccaatgaacaaatttgtggaaaggggcccggtgaaacccccttggttttgcaaaacttaccaaaaaaaattgttccagccccaccccaaatagggggaatattatttttatttgaaatatccccccaataattggcctctagaaaacacccccccattccacactgggggaaagagaatctaattatataaaacacaaaaaaggggaggggaaccccctttacaaagggaaaaaaaagagaggggggaatttttgggtttctcataaaaacccccttcttcttttttttttgaaacaaaaagtggcaacaaggtggggcctttttttccctcggagacaagccccctttttttgttattattgaccccaccccccccctctttcgcgcgttttgtggtgcctcttccctccacaatattttttcccaaccaaagggccaaaaaaaaaaaactaaagacgcccggagagaaattctctttttttttcaacccacaataaatccacttctatcaatctgttgtttcctctccactttttctccgttcgcttcttcttttatacacatactaaataaaacaaaaa

SEQ ID NO: 3917 - DNA, 629 bp, Glycine max
agcttacggttcgagtcaatcaataaaaaacaagctcatcatgggtgcaagggattcaacattcataaacagtgtaagctcttttggctaagtgactatttcaatcaatcatggcctacatcatttccaaaattcatgcattcattcagtattcagagatttatgcaaaaatcaatacccaatgctagtcattctctcacaattaaggatcacaccactcaccggattgtggctaatgattaccttcacaatttacctgtcaaaccaactaacatttttagtcatgctcctaattcatgttctttatcttctaattaccgcatactcattcaaagcatatgatctaatcattgcaattcactcaattcatgtaattgatcaatccaatttcattcacaaacacacaatttccaaatcaaacaaaccactgcataaatcagactgtaaagtgttcaacaagcttcaaaatttgctaactaaataaactgaatataaaaatgaaattaaaagcataaaataatcataaaaatgtattaaaatcaggaaaagtgcataaaaatcctgtcaaagctcctcccgtgttgcagtaagctcatcctggagtgaagagggagtatcttgggttggat

SEQ ID NO: 3918 - DNA, 576 bp, Glycine max
  unsure at all n locations
tgaagganaacttgatgccttggtccacctagtaactcagcttgccatgaataaaaaatctacacctgttgcaagagtctggggtctatgttcttctgcagatcaccatacagatctctgtccttcttttgcagcaatctggagtcaatgagcaacatgaagcttatgctgcaaacatttataatagacctcctcagcagcaaaaccaacaatagcagaataattatgacctttcaagcaatagatacaatccaggttggaggaatcatccaaatttgagatggacaagtcctccacaacaacaacagtctgttcctcctttccaagatgctgctggtccaagcaagccatatgttcctcctccaatacagcagcagtcacaataaagacaacaagagactgaggctcctcctcaaccttacttagaagagttaatgaggcaaatgaccatccagaatatgcaaattcagcaagagacaagagcctccatttagagtctgacatatcatatggggcagatggctactcagatgaaccaagctcagtcccaaaattctgacaaattgtcttcacaaa

SEQ ID NO: 3919 - DNA, 393 bp, Glycine max
agcttagcccaagaggggatggaccttttcaggtcttggagaggatcaataataatgcctataggttggacctcccaagagagtatggagtcagcaccacttttaatatttctgatttaattccttttgcaggtggagctgatatagaggaggaggaaccaacaaatttgaggtcaaatcctcttcaagggggaggggatgatgcaatcctccctaggaaagggccagttaccagagccatgagccaaaggctccaaaagattgggctacagttgataaagaaagccttacggtttttaatgaactttagggaaaatttttgaccccttggcccaaggtgggttcaacttttttttgaaaatatagaataagttggtttctttttttgggccc

SEQ ID NO: 3920 - DNA, 631 bp, Glycine max
ttgcttctacacttatcaatctcccaagattgtgacattgttctttccaccttcttctctaattccgccttttcctttttattttccccaatttgttgatgctaaaaattggatccacaaatcaagatacaaaggcttctttgaatcagtttgcaatgtatcatacataggggcatgtgtttgttgaaaagactcttgtccaagatcacaaatcatatcctctaagcaatctcccatttctacatcaaatggttcagattgggaccgcctctgcatgtttgtcaatttaccattctatatccatgttgtataattcttcttaatcttatcacacaacatgccctcgtatgtcgtcgagtatttgctgtctcccattcaaataatttatacaaggacaaaacaattttttgtccccatccgattgacttctttgagaagcaaattgcaagaactgttccacaccttcctcatacacagggctcatgggacttttattcatccaactttgatccatctaaataataactccgtgatactaacaaagttattcaatgcataaaaaatctacttttttattaaaggtgtgggcctattccattcaaaagacatttttaatggtaaatcatatgtc

SEQ ID NO: 3921 - DNA, 324 bp, Glycine max
agctctagaggctgatttgcgcatacatattttgtctgctacgtgacttcccacaaagagttgcacaacaaactgagaactttgattcttacttaaagagcaacagcgctttgtatcctcatttttcctcgtatttatctaaaagctcagttctcttgatgaattgtgtatcagttactgaaccctctgctaagcttgggcttatgacttggcgaccatactgctaaagatgtgattgttatttgactctaacactatattgttatgacatcatgggctatacatgttgctactgtgcatttagtgcctgatgctggccatacc

SEQ ID NO: 3922 - DNA, 794 bp, Glycine max
  unsure at all n locations
gcttgctgtgcgacgctatatgcaaccggattttgacggcactatgccttcccggtgactcgctgcgctggacattcactggtgaccaaaggctaaaaggtgagaagccgcgcctttccctctggaattcgtcattggaagcagagctcttgcacgtctataatgccctgggatatacacttacaagaatagccttgctggatgcatcaattgagagaaagagaaaggaggcacaacttattagtggagactcagcaggagacataatgnatattggtctgtgaaaggcatcttgcacctttatttaacgtggaacacatgatagacatgtttgcctacgtagcctgagtcccttactgacgtgtactctgataggagtattccaatgacatgcacaatgcatgttatcatatagcctttagatgcctctacaactgtacgtgtgacttttgcgcgctgtcaatgattacgcccgcttgattattccatgcatatggcgcatgcatctttacatatttctttccgaagtttggagcgcgcaagattcaccaacccctctaataggctcctctcagcgctctgctcgaaaacctgaacatacacaaaattctgggtgaccttgaccgagcgcatggcctcgaggaagcggttcccactccttttaactcagtaagccttaccctgaaggagaggctgcttacttgtaaagcccgttaaaaccacaccggtaggaagtccgtctccaagggggaacacaccacccctattaatacctcgntggcccccccccctcc

SEQ ID NO: 3923 - DNA, 185 bp, Glycine max
tttcaactatgtgtcgctaaacatttactgatcttttctcttacatgtaattaacacgacctaagttgcctggtaagatctctaccttatcgactaggactaaacgcctaatgacttggatatctctaacgcaaccctttatttaccttagatttatgactaggacccctataggacaaccctga

SEQ ID NO: 3924 - DNA, 501 bp, Glycine max
  unsure at all n locations
tgtccgggcagttaagcaagaccgaaaataatattngggccatcatcgaccagtacatggaaaagctaagcctagtttgaatatgagcagagctagacgatgaatacaccaacgtatcaactcttgcgagcgggaaaggaagaaatggaataggtgatcaattcattgctcacagaaacaatgatgtggatggacaggttcccctttactttgaatgggagtcaataacttccccaactgctagccaaagccaatgcaatggtagatgtgtactcggctcccgaggaagttcacgggctccttaattattgccaacacatgattgatttgatggcccacataattaagaaccgctaatgcaattgtatggttgctttgaatttgattaaataaaccctttttgttccctataaaatgaggttgatttaatcctatgtgtttaaaactctgtgtgaatccaatacttcgacaacttatctttagcatgcattcatgttttgt

SEQ ID NO: 3925 - DNA, 194 bp, Glycine max
agcttccgttgttgtatttcgagcgtctagatgagttaggacagcgagtcggacatcctgtgaaaagttgtgaccattctaagctctcgagcgcttccgatgaacaatggccagcgtcatgatcataaatgatgctgaaacagacatccgagagatatgtgctgaccattctaccctgtgcagagctttcgctg

SEQ ID NO: 3926 - DNA, 389 bp, Glycine max
tgaccaggaattatttgtatgggtcgaatgttgaattccggttgttcctggcgcggagatgatggtacagcgggtgaaccataatcggaagattcttttggtgaagtagccatggaaaagcagagcgtttggaatgatttcgtaaatctcagaaggctattgggaaatgctggtataaacacgaatgccaagcagatataaatttgaatgaggaatgtacagggtcgtgtgaagcaacggtcaaattttcctgggttcattagagaacgcgctataaatgttaagagatccgttggggcactttcacattgctggaggtgctataatccctctagcacacaaatgcccatcttgcccctcagtttttcaaactgatgcgcctccaaagc

SEQ ID NO: 3927 - DNA, 804 bp, Glycine max
  unsure at all n locations
tacaaccagaagtcactctatgctaaattttttgaaagaatattgcccaccatagaagaaaccaaggtccattcagaattggccatgtgggtctccacaaggaatccaagaagaaggaacaacctttttactttaaccccggtttgggtggtatatttggcctttctcgggtggtattggccctttccggtcctgtgtaatgctttcacctacatttcagaggtgcatgaagggcaatttttttctaatattgggggagaaaatggaattcgaaagtttttcatgggatgatttcctttgtttttgggtcatcttttggatgccttgccaatcaaatttgaaaaaagtattgtagaaaatgtgaaaagtctaatttggtgcttaactgggaganatgtcacttcatggttcaagaaggcatagtgctggggcataaaattcagtgaggggaattgatgtgggacaagggagaagattgatgtttattgagaaaacttccccctccaatgaaatgtcaaggcgagtgagaaagttttttaggacacggtcggttcttacagacgtttaataaagatttcttaaaagtagccaaaccactcagtaatatgttgaacaaaaaatgttgcttttgtggttaatgaaaaaagtgtggaagcatttaatgatcttaaagccaaactagtatctgctccgggggattacaccacaaaattggggggcaaaatttgaattgatgggtgaagccaaccaatattttggaagtggtgcgcctcggtataagaaaaggcaaaattttttatgctc

SEQ ID NO: 3928 - DNA, 610 bp, Glycine max
  unsure at all n locations
tttcttctggttgctcggctagggtttccaagcattagagagaaggagaagggattggagcctcaatttcattgtctccgtgttgaatgcattgctctctctacagacattatttcccaaatctcaacggtgagaatgtgaggaaatgagttctaaaggtggtatccaaatttcatgatgatccaatggttaaaaggtttgggatcatatttttactgagatagatttgagtgtatgcgggaaagaaaagaaggttttgggagaggaaaaaaggaaaacgaatttgagaggaaaaaagagcatagagacgtatcgtaaatattaaaattgacctaatatgtctctatttatagctggactactctcagcctattatttactttatttttctttattttattattttataaaaagaaactctattttactctctcattgaataaataaccaattaanatatctttatattttctaaaacatcattttactctatttgctttctaatgctatgaaaccattattttaattaaaaaaaacccttttccctcaattatngtaattctaaaaactctataaattttagataaatctctatttattttacgaaaaa

SEQ ID NO: 3929 - DNA, 643 bp, Glycine max
agcttggagaggatgcttcaatggaggaaaagaaagagggagagaaagagagaggggggagcacgaaattgaaggaataaaagaggtagagaagtggaactttgaagtatgtctcacaagagtctcattcatcaatgttaccacaagtgttacacatgcttctatttatagactaggtagcttccttgagaagctttcttgagaaaacttccttgagaagcttctttgagaaaacttcctggagaagctagagcttagctacatacacccctctaataactaagctcacctccttgagaagattcctaaagaagctagagcttagctacacacacctctctaatagctaagctcacctccttgagatgagaagctagagcttagctacacaccccctataatagctaagctcacccccattccaaaaatacatgaaaatacaaaaaaaaaagtccctactacaaagactactcaaaatgccctgaaatacaaggctaaaaccctatactactagaatggccaaaattcaatgcccaaaagaaggaaaaacctattctaatatttacaaagaagagtggatccaaccttgacccatggtctcaaaaatctaccctaagttcatgagaacccctaggcgttcttt

SEQ ID NO: 3930 - DNA, 559 bp, Glycine max
  unsure at all n locations
tgtagcagggttattattatggttaatagttggactacattgtgagatacattgcaagttgtctataacaatagtttttgtaagtataatataatattaatgtgatgatatgaagaataataataatctataaatgaattgcaaattacaaattacaaatctgtattaagtatcaccattaatagctgaatgttgtcttttttgttcttgcaaaatagttttcctacgcttccttcgttcaacatatatgtccatgagtaattgatttctgcaacaactgccttataattgccaaacaataggaaaatcaaatgttgaaattgagttaaataagttgctgtagtaggctgactttaaaatgataccaacattatagttatttgcatttgcttcaccgagtaaagggatatgtatttgcaatagaaaaagcataatagaataaaacaatagaaaaatttgtattcagacgcattaaatntcatactcaatggtttagtgcagcacgaatgaattgctgctctaaaatgttaggtttgcaatcatctgtcatgtgaatatt

SEQ ID NO: 3931 - DNA, 470 bp, Glycine max
agcttcaaaggcttagacaagggagtataagtgttgaagaatatagaaaacaaatggaactactccttttaagagctggacttagggaggaggaaagaacaagcatagctaggttccttagtgggcttaatatggaagtgagggacaaggttgaactccttccatatatggacctagatgagctagtccaactttgtataagagtggagctacaacttaaaagaaagtcttctttaaaatcttaaggctttcactcttatccaaggaaggaccaagcccaaggaattttggaggctgcaccttgaaaacccaaggaagataagggtaagaccatagagaaatccacccctaagactagttcccaagaaaggactagcaacataaaatgtttcaaatgtcttggcagaggtcacattgcctcttaatgccccacaaagaaaaccttgattatgaggggtgaagacatttat

SEQ ID NO: 3932 - DNA, 423 bp, Glycine max
  unsure at all n locations
tgtggtgcaaaagattacatctatacaaaggaatttttgatggggcagcctccaagactccattaagattccttgggtgaggtgggacatagtctgcctacctaagagtaaaggtgggttagggatcaaagatttgattaaattcaacgaggctttgcttgctaaatgggggtgggagttggcaaataatcagaatcagttgtgggccacaattctattgtgtaaatatggtggttggagggatttgatttctcataggaactgcagtttagactctccttggtggaaagacctcaaggttatcttcaagcagcagcaaagcaacacaatttgtaaaaatagctttatttaggccatangtaaggacggtccatggaatacaaaccaagtacttattggcttgacaacaaaaaaaacactcat

SEQ ID NO: 3933 - DNA, 113 bp, Glycine max
ccaaatccttcagtaggggctcctaaaacctcctttagttttttttggctttccctcctcttcaatggtggttcctcatttttttccccctgggccctcctcaattgcctggg

SEQ ID NO: 3934 - DNA, 584 bp, Glycine max
  unsure at all n locations
tagctctctcttagtctctccacagctaacaactctcaaaaaactccattctctcagaaatcgtgatgtcgacttaaataggcaatcctgtcggtggacgcgcgcttagcggaagatgagctcgcttagtgccagtcacactcgctcagcctaaagatgaagacgatgcgcttagcgagttggatttcgctcagtgcctctatacagctcatccttcttccagaattgtgcccgtgcttagccatcatatgatgcgctcaacgggcgacacacttagctagatgatgagtggcttaacaagttcatgaaatctgcacttcaccaatcttgcctattttacctgaaattgaagtggaaagatcattaaatacacagaactgggatacgaagtacctattacctaaattatcaaaaagtgattaccatactaccataaacaactatacatgggaggagttgtatacaatttacaacagtgttntacacaaaagctagtcgtattgactgactaacatgccactatatctaccctatgtcaagataaggtcatcatattctataggatatgggtgattttatcaaca

SEQ ID NO: 3935 - DNA, 581 bp, Glycine max
agcttggaggaagaaggagatgaatgaagggagagggagagaagaacacgaaattttgtgctctaagagagctctgaaatttgaagtttaattttcaaatgatcaaagtttaaaaaatgcacacacatgacctttatttatagcctaagtgtcacacaaaattggagggaaatttgaatttatattcaaatttcacttgaatttgtggagccaaaatttcactaattatgattaatgaatttttgctatgggtcagcccactaatccaagatcaagtccaagattaagtgtgcttaggtgtcatcagacatgtaaagcaagaaggacatgcacaaagtgtgactatatgatgtggcaatggagtgtagcaagcaaatgctcacctccctttctaaaatttaattggattgggcttctcccaattctattaaatttatttctcaacacacacatcaaatattcacttaatgcatgtgaaattacaaaagtacccctaatacaaaaactagtctaggtgtcctaaaatacaacggttgaaaaatcctacttttctagggtacccttccttcattatggatccc

SEQ ID NO: 3936 - DNA, 527 bp, Glycine max
  unsure at all n locations
ttgcagattctcaaaaatgaaattttcaaggacgagaaacatttgaaggatttttcaattgacatattaagtcaaatgactcctattctcgataactcacttttctctcaaaaggaacaaactttcagaaatgataaaatgaggccacatgaatgtctgtatatattttttatttgaaacatagtcaatcaaatgctttttctttttttgtttcgaactttactcgtcattttacgacaccttgaccaaacatgcataacgagtaatttctgattgaacagtcttggaagtcaaacctcangagcgcaggtcgcttgagcaaacaaaccaacaacttacattcacattccagtggaagtcaaataagcaaagatgtaattatgagaggatgagagaaagggatgtcaaatttatccatattattagcattgtaattgtggtttacaataatggcataaacttaaaaaatctaacaagtcattagagacatctaacaacaaccttcaaattgccccatgtatagtgct

SEQ ID NO: 3937 - DNA, 831 bp, Glycine max
ggagatttgtagcatcgtgtcgccccatgtttcatagaatctgcctgcatgcatgctttcttgtgaagacataccttgcgagaagaatttttttattggagagagagacgcagttacccatgagtgtgaggtataaaagatgacatggaaccaaaagataggctgttttgtttagtgagggagtattctgatgcgttgaggagggttgagacttatacacagattccaatagagagcttgtgatgttcaacctatggtcctgtcctaagctttttagttgattcggacatggtataagttgtgatggatgcaggttagctttttaaacgctttacaaaggtgttcacatagcatcccatcttagcatatgagtattgtttttaatgcgacatggttagctaatatctgttcctattgctatgaagcactattttttgttttcttcctatatagcgataaaaattattttctttttcaaatgtttttttaattattaatgcttcttgatttagggaaccttgtaatttatgggaaaacctgttcgccgtgaaagtctaacttcacagattatcctactagaatgaatgaccgctttttaaactcattttcttgtgttatatttaatgttgtccacctcaaccatatttctaatttgttgattgtttatctatctgctcatacatatttctatgtatcttgcgttcttattttcataacgctctcgctattctttttttggtatcctactcactctatcttcgactatatgccttttgataaaatgtttcctttattatactcacctatttctatacccttatcaccgtactt

SEQ ID NO: 3938 - DNA, 294 bp, Glycine max
tttgatactgacttaggcaactcctcaggcagagaaaattttttatgcgccgaagcatacaaaaccctaggcttgaatgactacgcttgagggatccatctggcactttatccaagcgactacaagctacccacacactcacaatgcgcacaatttaattctccagcggagttccacaaaatcatgcgcaaatgccatagaggcatctcaccgaacacttggtgggggcatgtttaatccggatcatcaagccgaaggtggcaaccagacttgccacatgctcataaatctccc

SEQ ID NO: 3939 - DNA, 146 bp, Glycine max
acatttgctattgatttgctttaacctagccagtggtcaaacatgtttgcttatgttaagcggcttatccttgcgtgttgacttcgtgctaatggttaaatgtagcttccctacacatacatccgaatttttttctaaacatattt

SEQ ID NO: 3940 - DNA, 534 bp, Glycine max
tgtgggtatgtgttcatcactacaagatttccacatttgggtttctttccgaatgaaaaaaatggtcgctttacactaaatttgtttgctttcacttcttaccaatctgatgcattcttggattttttttttttttttgctatttcaagtttgcttctcctaatgtgtatgagtggtttcagaattcacggtaaaggaatgtgtaataggtttttatgaagaaaattttttctttttttgggtaataagtcagagatgcttttcaagcttttgctacattgctcgatcagattttgttctgggtaagttaatcttttcatttttctaagtattattatatatttggatattacaatcttactgactttaacatggggaagtcttccttttctgttggtaagttccaacaacatacgtgttccttccatactgcaatttttatgacttccctatcattacataaatattgattgcgcaagaaatatttgctgccctattttccttttccatttatttgtacattgaaataaaata

SEQ ID NO: 3941 - DNA, 220 bp, Glycine max
atatccccaccccacaccatgtttatcatgtttttaattatatgagcttgaatctagtttaacgatgcttgcctttataccttgaatatgtgtgaaatattactcatattcatgggtgcatacatttgtgcttgcacatcaagtatacggttgtattataatgaatatattaagcttgagatatcattattttttatattgatcaacccaatgagatgca

SEQ ID NO: 3942 - DNA, 506 bp, Glycine max
attcaatggttcagatgcagctgcataagtggagtctcatcctgatgatgctcgtgtatatatgctgacccatcctaaataatttgctgtggtaagtggatgctactcttatgaacttgtgttccccctttaatataaggaaaatgcacttttcatgatcattacatgtgctgatttttcaggttgatcttgatccttatggctcaccttcagggtttctggatacatcagatcactctactgctgatggaggtatgctgatgtgtactgcaacaaacatggctgtgctctgtgggggaaatggggaggtctgctattcaaagtaatgtgcatactcttattcacaatcaactttcattttgtttgattggtggactgaacttttaacaactgctattcatactacatatggatcatacccattgagagggaaatcttgcccttcaaatggctttgaggaacaagccggcctgcattgacgtatggtatataacgcagaaactctt

SEQ ID NO: 3943 - DNA, 572 bp, Glycine max
  unsure at all n locations
agcttgtaatcgattacacaaatcttgtaatcgattaccagaggagaatttcagaaaataatttccaagagtcacatctgttcaaatgattttttaatggccatcaaatgtctatttatatgtgacttggaacacgaatttgcttagagttttttagaacaaaaaggtcttatcctctcaaaagaaaaatcatcttatccacttaaaaattccttggccaatacacttgcaattcaataaggaattattttagtgctcaattgttcaatctatctctttcaagagagatttctttttctcttcatcttatttctgaaaagggattaagagaccgagggtctcttgttgtatagcaatctaaacacaaaagagggtttgtccttgtgtggtttaaaacttgtaaagggcttttgcaagatagtggaactctcaagcgggttgcttggggactggacctangcacaagggtgtggccaaacttgtataaatctgaatttgcaatttttttcccttgaacccttttattggttaatgcttattgcttctattcagaaagtttaaattcgcataat

SEQ ID NO: 3944 - DNA, 512 bp, Glycine max
tacctgctgccaattcagttcccaaggctaacaacaatctcattactattaagtctgcgacgtcttgtaataacaaagtcattgacatttggcatttccatttgggtcatccttcatatgataggatgcaattgttctaacaaacttatcctatgttgacttgtgataaaacctttgtttgcgatacttgccctagagcgtaacagagaaaactttcatttcccaatagtgactcataagcttctagtcctttcaattttatacatgtagatatttggggtccttgtgccacaactgctttgaatggacataagtattttcttacaattatggatgatcatactaaaatggattggatttttataatgacttcaaaagttgagactcaaactcatttacaagcctttgttgcctatgttgagaggcaatttaatacaaaaatgaaagctattcgatcagataatggtgctaagtttatcatgaaacacgtttatcataatactggtatcata

SEQ ID NO: 3945 - DNA, 521 bp, Glycine max
agcttttatatgtgtgcaagtaataaaagttcttctagtgtagccgtggatgtaggtacatacattgtatgttgaaccacgttaaactttgtgtcttttctctcttccctttatttctttctcttcttttattgctctatactaacactgtaatcttaatgcaattcgtttaggctaagttcgacgaggaatcctagaatgaagtttaaatataattagtccattcaagcgaggaatcggtgtttggggtatttgctctcagcatagaacacagaaacaaccttaaatagagaaaaacacataattacatcaagttgttcagtagaacgacccaacgttttaatcatttgtttatctctcactattagatagcaattttgtagttatttttagaattaaaaaaattatcttttgttatattttctggttccatacaaatggctgcttattgaacgaacacttttcttaatgaaacaaactccctgtgattcgatactcgattcttatcattttatattact

SEQ ID NO: 3946 - DNA, 595 bp, Glycine max
  unsure at all n locations
tatataattttttatttaagaaaatattagactatttttgttttcattaaaaaagataatttgaatccaccactgagcgggaccctttcaatttgtataattgattaattgtttgtagagaaaaaaaaacaataatgataaaaatatatcgtttaatgtattcgatgcagcttgcttctgtacttcgtggtgatctgtattttgtccagagatgatccattatatcataatctatatttgtttttaagatacttgtttttttatttatttgatatcagtgtaattatcacattaagcttagtacctaaaatagtcctacaagttttaattttttagacctattataaaattaatctttaatcaaaacttaatgacatttaaagtttattactccttctcaataatatattctgtaaagaattaaattcagatttttttttactatatgcattatcaattaaattacattcattaaataacacggtatttgttttaatgcggcccanatagaataagtgatcgagtggaaatagaaaaacaaaagcattgatttttagtcacttttactgagaaaacgttttgaaacagttgtcat

SEQ ID NO: 3947 - DNA, 536 bp, Glycine max
agcttgagaaaagaaaaaaacagagatgaacgatagagagagagagagagagagagagacctatgagtgagaggaagaaaagattgtaatggacagaaagaaaaacatatttttcgatggaggtggtagctcgtcacgtcaaggtgtgttgagagggagagagagatacagagagtgagcattgtgaggtacaatgttttgtacagagtgaggaattttaattcctttgtttttgctaagaatttgaaattctgtcaagttagtatattaaaatgctttacaaaaatgataacatagcatccaaacatagcataagagtattgcttctaatgtgaagttgtcaactaagatctctccataagctaagaaggcaatattacttgtaagctacacatatagtgatagagataaatcactttcaagtagattttttaattctaatgctattgaataggggacgatgaaaaaagggaaaattgttgcaggaaaaaatttaatttcaagaaaattccacaagatagatgacggatttgaaa

SEQ ID NO: 3948 - DNA, 560 bp, Glycine max
  unsure at all n locations
ttgaattctagtaaaaaaaactcctcaaacatattataatactcatgcatcttttacattcaaaaccagaaacttggattcctaggcatgagtcatccttttggcactttagtctagcttctacaaactacccacacactcacaatgcgcacaatttatttcgcaagctaagttccacaaaatcatgcgcaaatgccattgaggcatttcaccgaacacttggtgggcgcatgtttaagcatgaaaatcaagggaatgggggcaatgtggcatgccccattatctcagaacgcaccctaggcctaaggccatcccctacaacccctcaattcaacaaaaacaagcaataattcaaggataaatccctcacgttttgagcaaatacatgcaacttagagcaccaaaatatatcaatggaaagccaaagagcccaagaatgaggtacttactttntggagatgaataatagagcaaaatggaatcaaaaacgtgaaaaatgatgacctatgggctgcaaaattggtgattcccgtagccttctttttgaatgaagggggggg

SEQ ID NO: 3949 - DNA, 603 bp, Glycine max
agctttgggggcatatgtactttaagtgagagataatatataaaaaaattggaataataattaatattacgagtaaataacatatacaaagatgattaatttttacataatcaatcacatattatcatataatgtaaattgattgatagtaataataaaaatataaaattcatattaattatgatttaagttctaaacattatagatgatatgataaaaaaaatgtgtataaaaatgagaaattaagcaataatgagagaaaataaaattgaataatgaaagagagaaagagtgtgaccgtcacagcttccaatagattggtgttgtcgtgcaagtacttgaggacccatgttagaacacttgctgtggtgtcatgtgcagcaaagatgacaccaatgagattatcaacaacttgagaatctgtgtgctgctgatagtacatcttgttcttctcacctcgagcttgcaatagaactcccaatagccccccaccataatttaacagattatagactcttataattacatttcaacagaaaaacccaagtcagtgtgaccatcaacaaatgttacatattatatataaccagtgctggataaaaa

SEQ ID NO: 3950 - DNA, 624 bp, Glycine max
  unsure at all n locations
ttccctacactttattgagaaccaaaaggagcataaagaaaacaacacataaaaccaaattaaactgcatgtccaaatccagtaactagctagctagtatatatggaatgcaatattaataattaacttgtattgaagcaactaattaaactccttaccaataatgaagagagcagctttccaagaaccagttgaagctctgagtggaaccctgcctttgtggtccactgaagaatcaagaacccatttcacctcatcaccctcttctggtttcacttcaagactaaccttcttctccatcttgcagtgttgcttcagtattgctactttaattctactgcaagtagagaagactaacccttctagccttgcttcttgctagtgtctatctatttacacgcaccaacctttaacctcangacctctctttatagaggaggatttgctntctttctttatttctttttttgaaaacttattccttttttcttttctgttggtgacataataaagatatcttttaagttttaattatatcattcttgattttcttttcaccataatttcttagactcatatatttataaatcactttctcttttttttccttctaaattttctctt

SEQ ID NO: 3951 - DNA, 493 bp, Glycine max
gcaagcttctatataagctgaaccattttatcaatattcacaagttgagttttattcagaaaattagagtttctctcttttatcttagtgagagtgattctcctaaattcttgagtgattcaagaacaccctggctgtatcaaaggactttcacaacctttgtgtgttgccctcgctggaaagagtgattctttcctgatacgaaatcagagtgcggtaacggaagcaaacaaccaataacgaaggtactaggtaccacccttattagtcgaattcttttaagtatttttggtatttgtgtgtttgggtttttacgaaaatcagcaaggaaaaataagcaatattaaactacaccaatagcttaatacgagattagcactcaccaccaattgagctaatcggactattttcaagacgacgcttgcaaataatcgggcgaaaatgtaaacccaatttctatttggactgaattgttcttgtttattgaataatc

SEQ ID NO: 3952 - DNA, 606 bp, Glycine max
cttctggtgggacatcttgacttgctttccaatctgacattcatcacaaattctgccttcttctattttcagattgggaatgcctctaacagcacttttgtcaaggattttcttcatgcctcttaagtgcagatgtcccaacctttgatgccatattctgacttcatcttctttggaggataaacatgtggaggagtacctggtttcttggggtgtccataggtaacaattgtcctttgatctgctgccctctattagaacttcactcttctcatttgtcaccaagcattctgactttgtgaaagttacattgaatccttcatcaaacagctgactgatgctgatcaagtttgcagtcagtcccttcaccagcaatactttgttcagactaggaagtccatcatgaactacctttcccattccaatgaactttcctttagagccatctccaaatgtcacataactagtggagcccggctcaatgttcaccaggaattctttgactcctgtatgtggtgggaacaaccgctatctaagtacccatcttccttaactgatgctctaatggaggatgaacaacaagaatgaagtcttgtgtttaggaac

SEQ ID NO: 3953 - DNA, 566 bp, Glycine max
cctgcctgcttataagaacaaaattgccggaatcattttcaaatatgcatgtgaattaagacgcatcaacaagaatcaagccgaggctattgtgcaagcaatcaatggggcaaaacacaccaaatgattataatgatggatggctcaaattctcacaaaggtaaaatcatcactttcaaattgagctttcaaaactatcatgacatgtagagaagaattaacgatttcaagtcacaaaatgtcaagaacttttattttcaaaacaattacccatttcttgaacatatcctataattcaaagaaaaacatgcaaagtcgtacgtgcacacaaaattgacccaaaatattaaactgaaaatccgacgaaactaacaacattaacaaattaacacaactaacaaattaacaaagccaacaaaactatcaaaaccacagaacactcccccccatacttaacaacacattgtccttaatgttgcccaattaaaagattaaaacaatttaatcatcaaagagaatccgaccagtgtaataaagccaagagggaaaaggaaaataaaacttcc

SEQ ID NO: 3954 - DNA, 605 bp, Glycine max
  unsure at all n locations
tattctttatctagagtagttgagcacaacaacttactactgacatatattcgactttagtagtggacaatgtagttgagccttgcatcttgcatattcatgttactaagttagcaccgataaagtaatagcttccactagtgctttttctttcaactttatcaccaacatagtcaacatcataatagcttgtaagtctgaaactttctcttcttttgaacataagaccaagattagaagttccaattaaatatctacaaatatgtttaattttagttaggtgaacttccctttgttctttttgaaatcttgcacatagataaacattgaacataatatcagaaatggatgcagtgagatagaccagtgagttgcatccactttttttgatccttgtccaatccaaggtatgtcatggtgtgcattggagtcttcatttcttttcatcgcccatgttgaatttcttcagcaattctttcacatacttagtttgatgaatgtagatgcatttggctttttggtttatttgtaatccaagaaagaatntcatctctcccatcatgctcatttcaattttgtctgcataagcatagaaaaatcttcat

SEQ ID NO: 3955 - DNA, 529 bp, Glycine max
agcttgacagtgtttgatgcatcagggaacaatttcactttagaagtgggtcctaattggattcctaattttcaacttacctatttggatgtgacatcatggcagataggtcccaactttccgtcgtggattcagtcacaaaacaaacttcaatatgttggactgtctaacacggggattttagattttattcccacttggttctgggaagcacattctcaggttttgtatttaaacctctctcataatcatatccgtggtgagcttgtgactacaataaaaaatccaatatctatccaaactgttgatctaagcacaaatcatttatgtggtaaattaccctatctttcaaatgctgtgtataggttagacctttcaaccaattcattctctggatccatgcaagattttttatgtaacaatcaggacaaaccaatgcaattagaaattctcaatcttgcatcaaataatctatcacgagaaatacctgattgttggatgaattggccatttctagtggaagtgaatt

SEQ ID NO: 3956 - DNA, 439 bp, Glycine max
tcctcatcgaagagattattataattgttatcatagttgtaatcatagtcatactcgaaagcaaaaagtgaagtgtggaagtgaagctgaagaagatgggaagtgacgttgtggcagaggactccataccagtggcaacagttggtatgattatgattccaagaccaaagcctattggaaggatctatgagattattcttaaacttcaaaagtgtctcacgctcacttgggatgcacacactctctctgcatggtaagctcaacaaccaaaggtggagaaagacaagaatataaatggaggaattcatgatcacacaagaatatatagaaaacaagtgtagttgttggttctgcatataaatcatcaaacttctattatttatactgctgccctgcctgtttttttttcttcactttcattattttttaccttttttat

SEQ ID NO: 3957 - DNA, 509 bp, Glycine max
agcttccatcaagtggtaatcagagcacaagagcttcaagtaggtgctccttaaacctccattaattttttgctttaccttctcttccattgatttttcttcatttttctccatgtatctcctcacatgtcttgttctaaatgttgttaacatgattctttagagtttgcaccgattaaacttgctatagaagttagatttgattttctatggttcaaatttcttgttcttgatcttgaaccatgaattgtgttgagtttaggttcctttgagttttgtcttgttattttttgtggctgaaacctaaaccataaaattcttacaaaaatattaaagtagaagaaaacctcaaaaatctacagtgacttgttcacctattgtagttttgtcatagaagtcatgtctagtcatgaaacttgtcacataagatttcttatgttgcgctgaattatattttcctgactctttgactaactcaattggtcatgagtgtatgaaattcttttagc

SEQ ID NO: 3958 - DNA, 474 bp, Glycine max
tgctctaaatttacattgatgtttgtatttattggaggaggttgtatgccatttttgttttaagggtagcatttcttggtaaaactaactttccaaatgtttgccttcataggaatggccccgacgaagcttgcctcaaagaggtccaggaaggacaaggcggccaaagggactagctccgctcctgagtatgagagtcaccgctttaggagcgctgtacaccagctgcgcttcaagccatcaagggatggtcgtttctccgggagcgacgcgtccagctcaaggacgacgagtatactgatttccaggaggaaataaggcgccggcggtggacatcactggttactcccatggccaagttcgatccacaaatagtccttgaattttatgccaatgcttggccaacagaggagggcgtgcgtgacatgagatcctgcgtaaggcgtcagtggatcccgtttgatgccgacgcta

SEQ ID NO: 3959 - DNA, 548 bp, Glycine max
agcttgtagaactccccaaaagaaaatcagctattggagctaagtgggtgttcagaaacaagttggacgaaataggtaaagttgtgaggaacaaggctaggcttgtagccaaaggaaactcacatcaggaaggtataaattatactgagacctttgcttttgttgctcgtttagaggcaatacggattctactatcctttgtttcccattatggtatgatgttgtatcaaatggacgtataaagcgcattcctcaatgctattattaaggaagaattctatgtggaacaaccccctgggttttagagttctatttaccctcatcatgttttcaaacttaataaagctttgtatggtttaaagcaagctcattgagcttggtatgaaaagttaagttccttcttaactgaaaatggttttataaaacggaacgttaacactatttttttttgcaaagattatataaatccattcctaattgtccagatatatgacgatgatatattatttactgcttctaatgactttttgtgtgaggactctttcaaa

SEQ ID NO: 3960 - DNA, 653 bp, Glycine max
ttggggctgaaaaaaactatataacagcaccaaggttctagtttatgggactccctctctccctggcgggagactctctctctctctcctctctctcttctatttttcgtttttaattatagtccctcttctctttctcttttattttccgttttttacaattccagttcagacttttagttttatcaataaaatttcattctctatttgattaatggaaggctaagtccgcaacgttgttttcccttgaggatcaagcacagttctttttgaggttctattattactgttaaattctgtttagttgttcctcttcactaattactttgaatttgttgcttttaattcatgcatgcttaatgcttgattaattgactctgcgcttaatttacgttcatgcttaatgatcgcttatgagtaataggcgtatgtgatgctcaatcacataatgaatgccctatgttgaatttcgcttaataatttaatttacggttggattaaatggttaaactgataaaagataaactctcgtaacctaggataagagacttgcttgtgaatcaggggaagcaacggggttaatcttgatatttctaaatcacatatatttgtgttaacttacaaagcaaacaacccccccccatcgtactgtt

SEQ ID NO: 3961 - DNA, 544 bp, Glycine max
agcttgccacccagctcgcccaggcgagcagggttgcttcctccagaagcaacaaccttttggaggaatcttctggagggcccaagtgggcctggttgctatttgcacccccacctttactaaatacacccccttgcccttttttggagattctttttttgtaaagatacgaaaacttacggatttcgcaatgatactagttttctttccgtaatggtctacggaaccttgcgaattacataatcatccccttttttgacttatggaatgttacggaaccttactaattgtgcaacgatgcttcattttgatttctggtgtttcacggaaccttacggattgtgcatcaataccttcttttgatttccggcatgtcctggaacttcacaaattgcctaatgatgggtgccaagcacctcacaaggatcaaacaaaagttgcttgcccccaagcaaaggtccccggacgaaattatggtatgacaataatgaacattatattcctggatttgtccggtattacattcccatttcgcatgaatcat

SEQ ID NO: 3962 - DNA, 546 bp, Glycine max
tccatcatgtggtcatcagagcacaagagcttcaagtacgtgtttcttaaacctccattaaattgtttgctataccttctcttccattgttgtttcttcatttttctacatgtatctgctcacatgtcttgtgctaaatggtgctaacatgattctttagattttccaccgattaaacttgctatagaagctagatttgattttctatggttcaaatctcttgatcttgttcttgaaccatgaattatgttgagtatacgttcctttgagatttgtcttgttattttttttggctgaaacctaaaccataaaattcttacaacaatattaaattacaagaaaacctcaaaaatctagagtgacttgttcacctattgtagatttgtcatataagtcatgtctagtcatgaaacttgtcacataagatttcttatgtcctgctgaattttattttcttgcttctttggctaactcatttgttcatgagtgtatgacattattctcacctattatttgatttgagtcaaatcttgcatgttaattaac

SEQ ID NO: 3963 - DNA, 580 bp, Glycine max
agcttgtctcagcgtttatgcgagacagagaccaacatgctttctatcatcgccaagtaccaagaagagttaggtctagccggggcccacaagcataagattgcggacgaatatgcccaagtatacgcggaaaaagaggctagaggaagggtgatcgactctttacaccaagaggcaaccatgtggatggaccggtttgctcttaccttgaacgggagtcaagaacttccccgcttattagccaaggccaaggcgatggcagacacctactccacccccgaagagattcatgggcttctcggctattgtcagcatatgatagacttgatggcccacataattagaaatcgttaggaaacttgtatggtctctcagaccttgactagatatgacttctttttttgaaataaaatgagtaggtcccatgtttctactccaaaaagcttgtgcaaataaaatcactcctacatttaatctctagcatgccttatctatcttttacccactcctaacgtttgggtttttagggaaaaacacccatactaaacccgccgcaggggaacccctatcgcaccagatc

SEQ ID NO: 3964 - DNA, 705 bp, Glycine max
  unsure at all n locations
cctctatttaccgaccttaaatctcagctttttacctaatttttgtcaaatgaaatttaattaaccataatgaattcccctattctaaaaggaagaactgaaatcccctccgtaaaggaagaactgaaatcccctctaaatctgaaaggttggaataatggaacccaacaacccacaattgttcattttaaaaagatggaaaccatgatgtatgactattagaaattttagtttactcatttctttcaggaactttggaaaggtgtactaattagtttgaaggtttaaaatcacaacctcagcttgagttggttgcatgtangaccaacatgttgtggaaatttcatctgcaaaagaaactaatatggtgtcaatactcaatagtaggaagagcaacaaatgatagatcatangaactttgtttttagttattaccatcttcactttgtaagtaaattgtctatactttagagaaagatatgactaaacagttgatatagacaatgttccagcaaggattttgtggggtttggttcaacattccctcaaaaaatatttgacaatatttggaccatcatgccttgctgtttttctctaagcccttcattcaggttattttgggctgtgtcaatcctaagtctttttcttcattcaacttgtccttgggtgcttcaataattgggaaatctcttacattgctctcag

SEQ ID NO: 3965 - DNA, 697 bp, Glycine max
agcttatgcgcctatttccttacaaacgttctcttgcacaagacatttaaccgaaaaatgcacccatatacaatcaaggcagcttcgttacctagattatttacacgtacctccaaggtgtatttgttacttacatcacacacatctccttggctaaactcacatacatgcatactcaagcattttggggcaccaaaaattgcacatgtgcacatcttggcatttctaatacctacatacgcaaacttcatgatgaatcttgactatctacacaataaggtgctacatttcatgctcttttttttttcaagttttcgctacctaaagccgcatgcaaattcaagcatattttcctttgctgactaaaattgcattcaaatttaaaaggtatattttttgtaatatgttttcttcacataacatgcaacatatttatatatatttttttgggagacatttttgactaccaaaaattatatatacatacattcaagtattttgctattcatacccaaagtgccaattgccaaaggtatcttgctacctattctaaacctacacattcatgacgagcacattttctaaacaactaggcgtagggaaaaaaatatattggggcccatacctgattgctgcccaaaaagggttaccttaccaaaatgcccctccttttgtatctttttgcataaaatttaat

SEQ ID NO: 3966 - DNA, 502 bp, Glycine max
  unsure at all n locations
ttataagtgcgggtctgggagacgaaagtcaagtggtcgcgatatgtgaagatgatgttccaagtaccttggatttggtccgaccatgccctcctgatttccagctgggaaaatggcgggtggaagaacgccccggcatttacgcaacaagcataatgtaaacctttacggttttaaaagctctataattgggcctaggctttagagttttcattttgttaaggctttgtgtcttttgtctttgaatttataatacaaggatctttcttcatttgttcctggtctctacccattctcattcatttgcatgtttacttctttttctgaaacggcagattcgatgacgagtcccccgaaggtactaatacctgngacccgtctatcaacttcgagcaagaaatgaaccaaacggaagatgaaggagatgaggaggtgggacttccttcagaactagaaagaatggttgcccatgaggaccaagaaatggggcctcatcaagaag

SEQ ID NO: 3967 - DNA, 600 bp, Glycine max
catgctagcttaggttatatgaggagcgacattctttttttccccttcttactatgaaaaacggatcatttttcatgcccatacggctcataagtgatcacaattcaagtaaacagaaccccttgattctctcttatgacttaactacgtaggtctgatttcctctcgcacagtgtaggactacgtacgtatactgaagccccgcttttgtcgactcatcaatagtaagaataaatccaaggaactgtcctacatttgggacaaatctaaattagtacgctgctgtcctttgaatacaatacgtgataggcgctaatcccttactcagtcgtaagtgcaactccagacctgataattttcattatgagcggcttccttcaggttatccggcggagtgcacaaataaaacgttgtaggcgactccatgcatcatttcttgctttgaaaagcacgcccgtgagcctcgcctcgctcgcccgcaaaagggctcgcttgcgacactaggaatctaaattggccttggcattttacgggcccatggcaatattcctataagacacccctaaattttaatattcctcaccaacagtatgtcttgcc

SEQ ID NO: 3968 - DNA, 388 bp, Glycine max
tcagagtatgctccacttggcctggctgaacatattgttggtatgccctaacgagtttaaagtgaaaatgaattattttatatatatgccaaattttctcatgaccttattttatataaaagctgtgtatgtgcttgtaccctccggttgtattccaacatatcatattgcattttcatttttaagcttcttcctgctatcgtatcgtatttaaagttgagagattgtgtattctcttgatgaagtatggacacaaaccattaaagtcattggccgaccgaccatttactctgttgttaatcaacttcgtgccacaacctataggagttcaatctcattcaaaccaataacatgtcatcataataacctcctacgggagccatttata

SEQ ID NO: 3969 - DNA, 589 bp, Glycine max
agcttgaagacaagactatacgaggtatcttccttgggtatagcaatatctctaagggctaccgtgtctacaacttgcaaactaagaaactcgtcatcagtcgagatgttgaagttgatgaatatgcttcatggaattgggatgaaaaaaaagtggagaagaacgttcttatacccgcttaactacctcaagaagaatatgaggaagaagatctaggtgaaccaccttcacctacatcacaacaacaagatcaagaactatcatcaccagagtctactccaaaacgagtaagatctttggtggacatatatgaaacttgtaacttggccatacttgaacctggaagctttgaagaagcgtcaaagcacgaagtatgggtcaaggcaatggaagaagagatacagatgatcgagaaaagcaacacatgggagttagtaaatcgtccccatggaaaagatatcattggggttaagtgggtctataagacaaaagctaaaccctgatggcaccatacagaaacaccaagcgaggcttgtagctaaaggtttctcatagcaacccggaattgactacaatgagacatttgccc

SEQ ID NO: 3970 - DNA, 705 bp, Glycine max
  unsure at all n locations
tctatataagctgaaccattttatcaatacacacaagttgagttttattcacaaaattagagtttatctcttttatcttagtgagagtgattctcctaaattcttgagtgattcaagaacaccttggctgtatcaaaggactttcacaacctttgtgtgtagccctcgctggaaagagtgattctttccttcctttcatcatcacccttgttctttcaaaccacaattccagaaaatccacctctgcccagaattatctcgtggccataacttccattttacgcactcaaattaagtgattcttgagcctaaattgaatttcaaaacgagacctttcacctcgttttggaatcacctcatttggagccctgtagcttcagttattgccatttctatatttctgtccagccaccacttaacctacgttttaccatcccattcatccattttatgccaagaaccaccttattaagacccacganattagccaccttattttccattctttccttaatcaatntccgcattttccatcaaggtttaatcctagacgatcctaagtcagcccttgtgccatgtgggttcatatcatttggtatcagagctccggtctaggatcaacattcctttgctgggatattggtaacatccttcttattctctttgcatttatataccctcttatcatatatattttttaggctg

SEQ ID NO: 3971 - DNA, 468 bp, Glycine max
agcttctctcttttcttgtttaattattatattttgtttttaagtcttgtattttgctatgtttttatggcatttgaacacttagtatttctttttaatatttgttgagtatgactgaacatgataattatatttacttgcttttggttgtttatggttatgaattttaaacttaattattttgataatatatgatcagtggtatgtttgatcaaatattaattatgttatttgataatgtggttttttttatatatttgatctatttatggttcttgctatgatttggtttatatttttccatgaatgattgtatggatgcttaagttatatttgtatgtttttaatttgttacgcactttggcattttgttgatgcccaagggggagaaaaatatggattaaatcaacaactcacacgagtaatcaacttactttttagagaagcattaattcaaaaacaaagggg

SEQ ID NO: 3972 - DNA, 525 bp, Glycine max
tggtgcatatgatttatatgatctcacttacagggggcttgttataaacttgaattgtcatgaaccaactcttgtcaaagaattaactgttaggctgttaagtgaagacacacatggctttatgttatatatctaacaataatgaatctattaatatagcttacaagttcattatgcatacaattttaggtccaagtcattgcatatattttcatgaacgaaatcaggacctgcatattcattattagattcatatataaatttttgtccgtacttccatagtgtccattgacacatttttagcatatgattctcttttctatctttttctccacaacaatgagcccaaggagcagagttttcttatgagcatcaatcaagaacgttcaattatttatattacatgatagacaaactaaatttagtttattaatattgaacacttttttggataatagaaataattttaatactttaaccaggtcatttttatttgtcttagaataggcattatgtgcactttct

SEQ ID NO: 3973 - DNA, 473 bp, Glycine max
agctttcaattcattctatacacccttaggggttcattctcgctttgtacattttcatcttcatctcgtctacttttggtattctttttcttcattttaaatgagtttcgaccgatcgtttaagccgtaacttcacttaatcaatgtgaaaatgaatttcaaccaattgtttgcgtcgtaatctcatataataacatttaaaataaaattcaaccgatcgtatatgttgtaacctcggttaatcatcaaaagggaaagtcttaaccaaatatttactttgaaagttctctctaattgagttaagaaataaccaattgagactaacgcttacatcaactcacatatcaagcttttgcccgtaaaaaggtcatttgaaactgtttgaatgtccaacgccttgacggtcccccacttactttgatccatttaagtatacatttttaagggaaacattttcgacccccataaatttt

SEQ ID NO: 3974 - DNA, 317 bp, Glycine max
gtgtgtaatcaattacacttattaggtaatcgattaccagtgactgtttctgaataaatcaaaagatgtaactcttcaaattggtttttttctaaaagttataactcttcaaaatggtcttcatgaccagacatgaagagtctataaaagcaaggctttgctttgcattttcaatcaattcattctttcacttttcacttttccaatcaatcctttacaagccttgaatctctttgaacttcttcttcttctttgtaccaaaagatttctgaagttttctggctttccaaaccttgaaaacttgtgctattcatctt

SEQ ID NO: 3975 - DNA, 572 bp, Glycine max
agcttctcatttgatctaacagagaaggagcatgcaacctatttcactcaagtcacacccacggaactctggcacaagagacttggtcattgccatcttgaaagaatgctaaacatgaaaaaaaggacatgtcaaaaggtctaccaatactttctgatagtttgccaaactataatgcttgtcaatttggtaaacaaaatagaaaatcattccccaaattagcttggagaacctctcaaaagttgcagctaattcacactgatgtggcaggacctcaaagaacaccatcactacaaggtagtctctactttattcttttcatagatgactttacaagaatgtgctggattttttttcttgaaattcaagcatgaagtggctgaagttttttgtaaattcaagaaaatggtggaaacttcaagggacctgaagattcaatgaaaatgggaaagaatatccatccccataattatttactttggggaacaccttggtttgaatattaactcacagccccctaccctctgaacattggggattttgaaggattaacaattcattgttgggaaggc

SEQ ID NO: 3976 - DNA, 408 bp, Glycine max
tgaacaatattacctctaaaaagaggtatatgtgatgtgagagaaaaaaacatactcatactccgattattaacagatgctttctggtgttgcatacgagttgcggcaggatgagccaagctttcaatggacccactcaaaataataacattgaagcttctagagagtgacacgtagattatacaaatataatagttagaaatagatagtatcatattatagctgatatatatcagatgactaacataagatgatcactgctagctggaccgcggcgtaaaattcatgccagtaaatgattaaattttgactttattaattcttttaacacctttttagtggaaaaaaggagttgaatatatattgatgcctactatattcttatatcaaaaacagaaccgagttcta

SEQ ID NO: 3977 - DNA, 365 bp, Glycine max
agcttttgctgaaattgaaaaaaaaatagaattaatgggttttatctacattaactatgcataggtaaaagttctatgactcaggggggtctagtttagttggttaattgagtgggaatgtaagtattgtaaatttcattgtacttcaattgcgacagataaaagaaaaagataaaatttttacatacactacaattataggtgtcattgtaagtgtgtattggtacaggtaacttttttgtagtgttaacacctgtagcgacctgccttgtcaatacgaaatctctactctaaaacacgacatttcaattttttcatgatatacattcaccaaataagcataaacatgtgtgtgtgtgtgtgcg

SEQ ID NO: 3978 - DNA, 345 bp, Glycine max
ttaaataattcattcttggttgggcgtttcttataaagtaatatgaccaggacaccattggagagatgtgatcttctaagtggtagtaggacaacactaattttttattcattattcgcaccaacatccttgaatttcttactatcagtaacatggcttacgggattcattgaaatccttagtgagcttacgatatgaacttgatcaattgaaatttaagcatattttaaatttgcattatgtttgtctttcagattaattatatattataaatttgtttttctaatcttcgcacaaggtctaagtctactattcttagatgataaacagagttcatggcacatg

SEQ ID NO: 3979 - DNA, 709 bp, Glycine max
agcttgtgggacccacatgggtccatgacatatggattttaggattgtgtttttttctttcttcaaggttttgtatacaataaaatcgttaaggagttgtggcatatgccaaaagtggtcaatagcttttgcaggggacattgtgctcaagcccaacaattagtaccatttccaccaaatgatttgtgcagttttacatgagaaaagtccatgagagacatcctcatacattagattacaaaaagcacatgctataccaccttgaagagtgacttgccttttgtgtaggtttacctttgtaagtaacctatctttcaaaactctccaaatcatgaaagtaatcttttgtaggattataatttgccataaccttttaaacacatcaacttaataagtcctaatccttaattcattcaaggcacgataggtggatattaccgtataaaacagtggcaatgcgggttttaagttactaaagacgtacgcccattgttaaatttacctcccaaaattgctagacataacctttttttttataacccttttttccaaataaaaataccccacttgttaaatctacctctataaatattttcctttttattattttgattttttttccaataaggatcacctttgggaaactacttgcaattttcctggaatgagaaagatcctttaaaaattgtaataaaaaggggtgaaaaaa

SEQ ID NO: 3980 - DNA, 436 bp, Glycine max
  unsure at all n locations
tggtcggagcggcggtcatctggtttccaaatctagaggcttcctggattcgctcatggaaggacttgataactgccttcattaggcaatatcaatacaataatgacatggctctcgacagaacccagctgcaaaatatgagcaagcgggagcatgagtcctttaaggagtacgcccaacggtggagagacttggcggcacaagtggcgcccccatggtggaaagggaaatgataactatgatagtggacacactgccagcgttctattatgaaaaattggtgggttacatgccctctagcttcacaaatttagtatttgtgggcgagaggatcaaagtangtctgaaaaaggggatcagcggttaatgcggtggaagaaatgtgacctcagaagctgaagtagttgaaagatgtgataacctcgaggaagtttat

SEQ ID NO: 3981 - DNA, 286 bp, Glycine max
agcttttcttggaccttaggcaaaccttcaactcatccttcatgatcaaactgtctactcgtgattggtccctttcctctctccggagcttaagctcgctgttactgcccccacagagcccctcggaatttgttccggccatgttcttccctacgagcccttttggtctcttgttccaaggccttggtggtagctatatttgcatctctcagtccggcattcttctttcggatcttgagagctgctgatttaaacctttcttttactgttggggcttctccaattc

SEQ ID NO: 3982 - DNA, 605 bp, Glycine max
tcctctctaagcttcttatccaatgaactctcttggtggtgatgctcctccttccatggcttattccctagtggatggcgcctcctctcacctcttcttctttatcttccactgcatctccacaattgaaaatcaccattgaaggacctcattgaagctcaaagatccaacctctatagaagcttctcaagcaagcttcaatcatacaaccccatagtcagtatcacatgaacaacatattctccccctaatggattgacaacagtttcagcattgctctcctttgtgctcacccgtgcacctaatacctatatatccgccttaatcaggggtgagtactgcgatcccctttggaataactcatttttgatggcttcctccaactcttgttttattttctctagactcagtttgttttcttcttccactcttccttaaagtttccgattatctcattcttccaatcttctttaaggattccaattatttcacccaaatgttgttgggtgatggatgtaaaggaattgttaaaccacgtgatgcccttccatagttgtgactgatttcacactaaacccattgcacgaacatgacctacgtgctcc

SEQ ID NO: 3983 - DNA, 528 bp, Glycine max
agcttgaaggcaaactggatgcgttgatcaacttggtaacccagctggccttgaatcagaaatctgtacctgtcgcaagggtttgtggtttgggctcctctgctgaccaccatacagacctttgcccttccatgcagcaacctggagcaattgagcagcctgaagcttatgctgcaaatatttacaatagacctcctcaacctcagcagcaaaatcaaccacagcagagcaattatgacctttccagcaacagatacaaccctggatggaggaatcaccctaacctcagatggcccagccctcagcaacaacaacagcagcctgctccttccttccaaaatgctgctggcccaagcagaccatacattcctccaccaatccaacaacagcaacaaccccagaaacagccaacagttgaggcccctccataacctttcctcgaagaacttgtgaggcaaatgactatgcagaacatgcaatttcagcaagagaccaaagcctccatttagagcttaaccaatcagatgg

SEQ ID NO: 3984 - DNA, 481 bp, Glycine max
ttgcctttagggcttgtacctcatcactttcttccgaagctttaacctcattgtctctcacagtatttagatttgggagccaatccaatccttgtgtccggactctcagccacttatgatagccgccgatgatcccattactgcttcccctaagctctctgttctttcttcacaccgcatcacatgccttgcaaactccttggagtacctttgcattggggtcactaaaaccccgtgtaatgaaaggcgtgatgctttcgtcaaatggcgctcctctcatggggtagccaagctgtcttatggcaaggacaagattataatttatacaaccccttgttcccattaagggaacatttggaaatccttcgcatgaagatagaatcctgattctttcttccttctagcgagggaaccaattaacagacgcccctctatgctaaccaagaattggtcccaattcgtctttcttttttcggcgcac

SEQ ID NO: 3985 - DNA, 595 bp, Glycine max
agctttcatctagccaagattatacaaaagtgttacaagagggcctaacggtttctaatgatatgggtcatcaaatctatcatgtgttgacagtaattgattagcccatgaatctcctcgggggctgtacacgcttcggccatggcttttgctttggctaatagtcgcgggaggtcttgacttccattcaaggtcaaggcgaacctatccatccacatagtcgcttcttgatgcaatgcatcaatcaccctccctcttgcttctttttcggtgtacacttgtgcaaaatcctccactagcttttgctcatgggtcacagactggttcaactcttccttataatgccctatgatagctagcatgctttgctctgtggcttccaagtgttgagccaaactcctcttggatcttgtgcaagcagctaactcttcttttaagatcatgccatgcacccgtgaccaggctcttttctctcttcggagcttgaactcatttttgctaccccacaaagcttctcggaatttctctcggccatggttcttctttgcagcccttttgggttcttgttcaagggctctttgagtggccccctttt

SEQ ID NO: 3986 - DNA, 503 bp, Glycine max
ttgcacgtatcagtcaagtgtatggaccatatcgtagccatgtgctcatcgataatggttccagtttaaacgtgacgcctaaaagcactttggagaaattaccattcaatgcttcccacctaaagccgaattcaatggtggttcgtgccttcgacggcacccgccgagaggttaggggagagatcgacctcccagtatagataggccctcacacctgtcaagttaccttccaaataatggatcttaacccccctacagctgtctgttggggcgaccgtggatccactcggtgggagttgttccctctacactccaccaaaagttgaaattcgtagtggaagggcatctggtcatcgtatcaagcgaggaagacatcttggtgagctgcccatcctctatgccttatgtggaagccgcagaagagtcattagacaccgcttttccatctttcgagggggtaagcattttctccgtggattccttctctgagcaagcttgcctgc

SEQ ID NO: 3987 - DNA, 589 bp, Glycine max
agcttcttagtttcagatgatgcagatgggtttgtagctacctcatgcactcctctaatgactatggcatcatttctggcgctaaactgctgggagttggaagccatcttctcaattaaatttctggcttcagcaagagtcatgtctccaagggctccaccactggcagcatctatcatacttctctccatattactgagtccttcataaaaattttggagaagaagctactccgaaatctgatggtgggggcaactggcatatagttttttaaatctctcccagtactcatacaggctctctccactgagttgtctaatacctgagatatccttcctgatggctgtggtcctggaagcagggaaattttttttctaagaatactctcttaaggtcatctcagcttgtgatggaccttggagcaaggtaatacagccagtcctttgccactccctctaatgaatgaggaaaagccttcagaaatatgtgatcctcttggacatctgggggtttcatggtggagcagacaatgtgaaattctttcaaatgtttgtgcgggtcttcacctgcaaggccatgaaactttgga

SEQ ID NO: 3988 - DNA, 546 bp, Glycine max
tcttatccaaggcacatttttggtggcaaagctccttcttccatagcttattccctagtggatggcgcctcctctcacctcttttcctttatcttccgctgcatctccatggtggaaaatcaccattgaaagacctcattgaagctcaaagattcagccacctcttctcctttatcttccgctgcatctccatggtggaaaatcaccattgaaagacctcattgaagttcaaagatccagcgacctcttctcctttatcttccactgcatctcagagttgtcaattgctgaggagtgaatttttctagccactatcttgtagtcaatctcaaaaactacttgatccaggccaagcaattctacaaactccatggcagctagcaaaccctacgcctccccctcactaacccacatgcacagctccctccacaatgtcctagccatgacaattactcctctagcatagcggatgcacatcccaactcctgtacagttgctctgagcaaaaaagccaacatctacattgcacttaacaaatccatcctc

SEQ ID NO: 3989 - DNA, 462 bp, Glycine max
catgcatgcattgatacatacatgtgaggcactagccactgtatgtccaacttctaagatcatttattccggcatgtatatagatggaatttgagcaaaaaacagccaagagccccatatatagttcaaacgttcatcctgcctcataaaagaaaaccaaaataatgaatgtttacatgaattaacaataactccatatgtataattaacaataaggttcacctatctatatggaagctcataaatgacattatttataacaattatgcttttgccatattgaggctgtgggacaatacaattatcctgtattggtcttggatgagggggagggaaaaggattttaatggtccttatcaccaatgggggtaatctatggctgtggtttttaaataccgaaaatgtctgttggattgggtggaatagctatttgataggaggttgcatatttttatttacttt

SEQ ID NO: 3990 - DNA, 603 bp, Glycine max
aacatgatcacgcttattaattactcagttttatttcattttgactagaatattttttttaagaatgaattttgactagaaaattaatcacatatttatgtttatctttacatttatatacatacaggacatatcatatgagagaaatatatattatatgagagtgagaaaattaaatctaatccatataactaaaatattgatcatcatcatttaatgtcatttgaccccttaagaaatcatgtgactttttgacattaaatcttaattttttatatatgattatataattcaaatttaatcatttcactctcatataatatgttttctcttaaaagatatgtcatatatatataaaaggagaagggtgggatatttttacatataaaaggagatggtgaaggtagttttgaaagaaaatcaaattcatgaggatcactttaatttatgagaaacacatttcattatgttaattgtcacctaatgtaaattcaagatttgggttaaaacaccagggaataaaaataaaaattttaatatattatgtacttaaaacaacaaaaaaattattttggactcagaaacaaaatcccttctttatta

SEQ ID NO: 3991 - DNA, 308 bp, Glycine max
catgcctgcttatttaaaaaaaaaaaacgtaattttttcttctaaaagcgtcatggaaaaaaatatccaaaccgacccaaatgtgtttgagtaaaagcatatttactaccaccatacagggcactgtcctttctagccaaaaagtgaaaatactatgcggctcaaaatttaaacttagacatatgttcttgtgccaaggggttaaggggacagcaacttctgtcatcccctcttttggcccttatatatttatgaactccacaccttgatgtagaaaattcaataaactttttgggtcacccgatctt

SEQ ID NO: 3992 - DNA, 539 bp, Glycine max
tcttgaacgtgatcaatatatttattggcacagaataaaggatgaagatgtggttcgtgatatcttttggtgtcaccctgattcactgaagttagtcaacgcatgtaatttggtgtttttgatagacagcacctacaaaacaaaccggtatagactcccattgctcgattttgttggggtgacaccgactgggatgacattctctgccggttttgcatatgtggagggtgaacgcgttaataattttgtatgggctttacaacgcttctgaagcctttttttaaagcgtgatgccctccctggagttattgtcactgatagagaccaagcattgatgaatgtagtgaaagatgtattccctgaatgcacaaatttgttgtgcatctttcacataaacaagaatgtgaaggccaaatgtaaatcactaattgcgcaaaaaaatgcttgggattatgtcatggattgctggggatctctgactgattgtccttcaaaacaacagtttgatgaatgccttgaataagttcgaaatagcttgc

SEQ ID NO: 3993 - DNA, 923 bp, Glycine max
  unsure at all n locations
cactcacgtcaactgcgagatttctatagtacgtcatacatacactagcgcacgcgctaactgcgatcgataacttctatagtaatcagatatgtataanannnnncaagagagttgagatcgtgagcattcgcgcacgcatcnatcttatctacaagcatgcagctagcagctaactgaatgagttgattacctattgaaccttggtcgcacaggataataaatgggtacactggatcaaagagtaagaggatcggagctcctatgcagacctatatacaaaccaatgaccgtacaaacatcaacctgaagcagattaatcatctgaagcgaatgcagcccaagaggacaaaatgagatcttagacctcagcaacaagatataaatctcagcaaaaggatcatgacactaccgacaacagacacaaccccgaatggaggaatcaccctaaccttatatggcccagccctcaacaacaacaacagcagcctgcgcctaacttacaaaatgactgccgctccaacccaagcatacactccttcacaattccatcaggagcagcaaccaaaaaaacagccatcagatggaggcccctacatcaaactttctctaaacaactgggaaggaaacgactaatcaaaaccttacatcctaatcaagaaaacgaagtctccattatagacatacaccattcgatgaggacaatagatgactaaatgaaacaaaaacatcccaaaaaattctataaccatctgtttaatcggctgaatctcaaaaaatgaaagcgccttatgcttaaaggtcgataacaagtgatgaagagcttgacccgtagtaagctcctcactatgtaagaatcctgcagaattgaattctattcgtaaaaaagtgacggaaaaacatcacttggcaatactgggact

SEQ ID NO: 3994 - DNA, 631 bp, Glycine max
tcctcggggccatttcctgcgaaggcaaacatttggaaagttagttttaccaagggatgctactcttaaaacaaaaatggcatacaacctcctccaataaatacaaacatcaatgtaaatttagaacaagcttatgcgcatacttctttacgagcgttcacttgcacaagacattcttataactaagaaaaatgcacccatatacaatcaaggcaccttcgttacctagattatttatatgtacttccaaggtgtatttgttacctacatcacacgcatttcctttgctaaatttacatacatgcatactcaaagcactttggctatcaaaaattgcatacgggcacattctggtatttctaatacctatacacacaaacttcatgatgaatcttgactatctacacaataaagtgctacatttcatgctcttttttaagtgtttttactacctaaagccgcatgcaaattcaagtatattttcttttgctgacctaaaatgtattcaaattaaaacgtatttttgtaaagtattttctttacataacatgcaacatgtttatatatttttgtgatacattttgactaccacaaatcacatatacatacatcctagtattttgctactaca

SEQ ID NO: 3995 - DNA, 382 bp, Glycine max
agcttttaatgcataatatacacgcttacgggttcactctcgcttcgtacagactaatattaatctcgtctactttggcaaccctatcatgagcatctaaaagagttataaccactcgataaagccgaaacatcgctaaatctatgccaaaatgaatctcatcccatgggcgccgtacacatcgtctatactatgcttaaaaataaagttcaaccgaccgtctctgtttgcaccttatattatcataagaacggatagccttagccaaatattgactataaaagacctttattgttccattcaaaaataacgctgtcaacctaaggctaaaaacaactctcagaatgtgctgatgccacgaaaagggtcattccaaactggg

SEQ ID NO: 3996 - DNA, 414 bp, Glycine max
gctgtgtgctcaggggcgcgactccagagttcggtggccactgactgcgactaagatgacccgaagacgttgcatttcgtactagcatgcttctctgagttataactatgaaaaatggtcgtggaggacagacatggtcagtatataacgaccatgctgtgaactgctttggcaatcaaagcattctttcactgctcacgctttagagcaatcctttacaagccgcgaagcgctttgagcttctgcttcttctttgcaccgatcgatctctgaagtgtttctgggtgtccaaaccttgaaaaccagtgccatgcatactttcatactcttgaccctatgccatccaaagatctaccacggactaagcgcctgaattcgcgacgtgtctctcttcttccttctcgaaaggaacca

SEQ ID NO: 3997 - DNA, 601 bp, Glycine max
agcttgttactaattagattagattattaaaaataatatagcaaataggagcaaaataattgtcatcgattgtgacgtgaggtgattataaggatgttcacatgtgtgaaaactcaaacagagtcaaatcaattcaattagttcgattttaattttgagagtttgaattaaactcgattcgattcaatatgtataaacccgttaaatgtgtggggatgcttaaccggctcagtttttttaagccgtgatccaacctaattttgcattgatctgacatttaattaaatttattacatatatatattaaattattaaatatataatattttattttttaaaaatactttactaaattattaaatcaaattattcatgttttttattatattttcatcttgattttatttatatttttcatattattgcattatttgattttttttaaaaaataaaatatggtatatattagcatttaaacaattcattctatcaaacaaatatgtcacaatttaatttatttaaaggacattttcatatatttacaaagtttaagataaaaactttttatttaaaaactttattttataactcactttgaaat

SEQ ID NO: 3998 - DNA, 558 bp, Glycine max
tgtgcatgggaaaatagttgtttgtgaaagaggtaaaaagggaataactaagatgggagaggtagtgaaagtggcttatggggcgggaatgatagtacttaatactaaaaatcaagctgaagaaatttatgttgatcttcatattttgctagccacttccttaggagcctccagtggtaagactattaagacctatattctatctgataagaaaccaacaacttcaatttcctttatgggaataaagtatattgaccctgcaccagtaatgagagcattttcttctaaaagaccaagtatagtgggactagatgtgactgacccaactgcgaatatcttggctgctcggccactaaaaactaacccaagttttatcatgaatgacataagagaagtactatttaacattctcttaggtgcttcaatgtctatgcctaatgttagtggcatagcaacactttttaaatatttgcacactgattggtcccctgcagctatcaaatctgctttgatgactactgcttacacattgaacaacagaggagctgcaatttcata

SEQ ID NO: 3999 - DNA, 440 bp, Glycine max
agcttgttacaaccaatattctttgtcctactaagtcattgttggctctaacacaaatgagaagatttgttattttgattgcacaatgactaatggtaaattactttttgagtggtattttgtgtgagtttttgtgtcattttgcatgtatttttcttagtagaactcatgtttggacactagttttgtattgcagaagcataaccgcttaattgagtgaaaaaattaaagattacacaaatttatcaagatttgatgactttacacttgatcacggccgtggtacatttaccacgaccatggtaatcaacacaatgataataaagtgataacaatcctctaaaacaatgtcaaaatccgataatggtcgtggtcaactaatgggggtcatggtcaactaagatggatccattcatgagggtcgtggttaatccataatg

SEQ ID NO: 4000 - DNA, 619 bp, Glycine max
tctagaatctagtgttttgcgaaatcaaattggaatttggaacagtgcgacgttgctcatgactttgaggtccctcaattaaaggtttagtgtaacatttgagtgagtaatttcagtgtaaactggaaaattaaatgtatagtatacttgtatacatttagttgtaattgtatagaatttttagtaaaagagaaccaaaactaatataagattaccagaaatgttaaaactaaaatatttaaaatgcaaaacacaagatacaacatttcacttgttattaaataattatgaacaaagtcactgagttgaaaaccaactctaattatacataacacaactcaacattcaaagttgtaaaaccccccaaaagtaaaacataagtcatccttgaaaagaataaatgaaaatcaaatctaataaaattgaaatacgtaatatattatatataataaaattgtctagttcaaaaatgatagtagaatcattcccaacatcatttctcacaaaatacaccaaagagttataaacataagtttatagagattgatagagtataatgtacttaaattacaaacaaatgcagaatagaacagagttagattttggatttgggaactca

SEQ ID NO: 4001 - DNA, 554 bp, Glycine max
  unsure at all n locations
agctttcttaattatatgtctctctatatattaaatttttaaaaatttatatatatttttactaccatatactttataaattaaaaaaatacattaaaagttatactaataaataaattttagtagattataaatataataatgatttattatataagatgaacccaacagttgggtgttgagtgggacatttgtgtatttgagcttatgaatagaagtagagggaactagtgaagagataaagaagacggaggcggtttggagtatgacttcttgcacctcttttgcatcctttctcatttcttcttcttcatttccttcattgtgcttcgcgcaaacccactcaatcacatgtaaacaacgcttcccatttccttctgtaaagggaagaagaaagttctcaactttatcattntcatccaccaaaaggctcgttacaagagccgctgagtacaaattcccaaaccctatttccgaatttgcaaatgccgtgagtttatctcttatcttccattctatcactttatcaagtgaataaaattaacttcatgttc

SEQ ID NO: 4002 - DNA, 424 bp, Glycine max
tgtagaactatgttggattttccctacggttgttttttgttccactttttctttgttcaaatatattcaagggaaattcggtttgccggaaagcacaccggatcgtcaagtatttaaaaattaaaacggatgaatccgagtatcgaacacagggaactaatgtttacctgaattaagttcagaaatgaagcattgttgagagaacatgtatgattgataatttcaaacaaaatttaaactaacttttatgctaaaaactataaaaagcaaggtaagtaaaagtgacaacagtaggcagaaattgttgggtctttctaacaaacaagctgatgcatataaatatatttctctaatcaatcagactcttgtgttctatgctgtagcctaaattactaaacctcgatccctcgtcagaccgaatcaa

SEQ ID NO: 4003 - DNA, 503 bp, Glycine max
agctttatcaaatggatgtaaaaagtgaattctcaaatggctttattcaagagaaagtatatgtagatcaaccccctggatttgaaaactcagacaagcccaatcatgtttttagattaaaaaaggctttatatggcttaaagcaagcccctagggcttggtatgagcgtctaaataagttccttttagaaaaggatttctctagaggccaagtagatactactcttttcataaagagaaaattacatgatattttattggttcaaatttatgttgatgatattatttttggatctactaatgaattattgtgcaaggaattctctcatgacatgcaaaatgagtttgaaatgtcaatgatgggagaacttaatttctttcttggattacaaattaaaaaaaccaagactggaatttttgtcaatcaatccaagtactgcaaagagttaattcacagattcaggatggaaaatgctaagcacatggctacaccaatgagcact

SEQ ID NO: 4004 - DNA, 666 bp, Glycine max
  unsure at all n locations
tgcagctcataatctctccatagtttgtagcaatgttgttccatttgggaattctactctaaaaatttccatgattgctaaggtacatgcgaatattacaattaatgtaaagatatcatgaagaaaaatataatcatcttcaatagatattactctcttgaactattaaatatataaggagagattcacttgcttcacttcaagagtaaatagttatttttcatttttattatttatttttttaaaaatctaatgattaagattagttacttattaaataataaaaataaaaaataactataaaagaattatctttggaataagtggatctctcctctctttacatataattagcttaattgttagttttgttgtttctcacttttatgtctattacataaaactttagtactaaattgttgtaatatatttctgtaggtggaccgtgaattcaacatggcaatggacgacctagtgaaaaaattgaacgaggatttgctgaagtgctgcaacttgcaacaagaatattaatgaatcacgtacgcagcgtattagctatttgaaggttttaatacattatanactcgcatttagtctttgtagtttctcaattgttaaaattgagtctctcacctcatattttgtacaatatttaatagaaatgtc

SEQ ID NO: 4005 - DNA, 643 bp, Glycine max
agcttccatcaagtggtatcagaattaaataacattaattattttgatgatgcttttgtaacctagatggtagtttgcgggctagtgcaatgcaggtatgttgattgggctgagctgcatagaaagggatttaattaacatcctgaattttggaaaattcgtataattccttgctttcaatctcttggaaaattcatatcctcttaaatttattggtaatgcctgttactgaactaaatagaaacaaaagtttttaagctgagatctgctaccttgatgttcttcatctttccatccttcagtttagtattctagaaaaactttactgcttttccttggttttaaactttgattttcttattataaataatttctctatagttgtctaacattatttgcttcatgaaggtacagtaaaatatactttgaaatcatggctcacttctggatatgaagtattgaaaatcagaaatatcctatgggtaatggaacaccctatttgataacttaacttatataaattttgtttttgggtcattttgaggttttgttaatgatggaattaatgaaaaaccttctggtggtttttttttcttcaagttatgacaaccagaacagggatagcaagtaccaacccaatttc

SEQ ID NO: 4006 - DNA, 339 bp, Glycine max
atactcaagctcggtgatggtcataaggtgataacacatggagtgtgtaaatgtgtcaatatgaagatgggggggggattgaagacattgtggatgcgtttgtgttggagctagggggaatggatatggtgttaggagttgcctggttaagcactcttgggaatgtgattatggattggaaggccatgactatgcaattttcttatgaaaatgagttggtgaaattgctaggtcaaggcaataaggtggtcaaacaatgttatttgaactcctatcttgaggatactcatagcacaactgaattgggctggtggggggttcatctacagttaatggaag

SEQ ID NO: 4007 - DNA, 213 bp, Glycine max
agcttcatggaggctggatctttcagcgtcaatgataaccttcaatggagatgcagcataagataaaggagaagaagtgagaggaggcgtcatcccctagggaataaaccatggaaggaggatcttcaccaccaagagagggcccttctcttagaagcttgaagatgaagctgccatggccgaaaagaatgacatagaaatttacgggggggg

SEQ ID NO: 4008 - DNA, 585 bp, Glycine max
tctcccctattttcctataaatagggggagaaagtgaaggtttttatgttcagccctcctggtgattcgagatcacttgaaattagtgaaaaaaattatttccgtgaagaaaatccaagctgaggcgcttccgtaacgtttccgtgggtgatttctcgaagattttcaaccgttcttcgacgttcttcgtcgttcttcggtcttcaaccgggaagttcccaaaatcgaacttttcaattcattctatgtacccttagtggtcctcatttgttttcacgtgcttttattttcatttcatttacttttcgtacccccttttgacgtgctttaatcatttacttaagtcattctctcgcctaatcaaaaaataaaatatatttccaccgatcatttgaattgtaacatccgttaatttttctttaaatgaaatccgaccgttcggtcatgccgtaacccacttggaaaccaaaaaaaggttaaataataatataatattcaaaatatcttttagttaaataaatcacaaaaatcattcggacgttgttctttgggattttctttcttaaatcgaattcactaataacc

SEQ ID NO: 4009 - DNA, 401 bp, Glycine max
agctttgagccaattcaaacgacaataaatttttactcggatgtctgattgagttcaataatatatcgagacactcgaaattgaataccgaagctctgagcaaattcaaaagacaataactttttactcggatgtctgattgagtctcgtaatatatcgagacgctcgaaattgaataccgaagctatgagcaaattcaaaagacaataactttttactcggctgtctgattgagtctcgaaatatatcggaacgctcgaaattgaatatagaagctctgagcaaattcaaacgacaataacttttttttcggatgtctgattgagtcccataatatatcggaacgctcgaaattgaatgtagaagctttgaaccaattcaaacgaccagaactttttact

SEQ ID NO: 4010 - DNA, 528 bp, Glycine max
ttacagcagattttagtgatgactcactaacctacaattaaaataacttaatgccattaacctagggaaataaaaaaacttaatggctgagtgtaactgaaattgtggcaaccaaaagtcacccccaacagccaacaagtcagccaccatttggtctcccaaaaggctgatgcctaagttgccaattgggcccttattacaacttgaactaaacctaactaaagcccttttagttgattaacccaaaacatatttttggtcagccaactttacaaggattgggccattatttagacaaactaaacactctaaaattgaaacaaagtggtgtcatttagtcctcctccatttgggccatgatacaactcacaaccttggacttttctccttgaaacttgggcttgtattcaaacagtatggacaacacttgttgaagagctttcttggctttccttgctctaacccttgtcataagtcctccaagtccttcaagtggatcctttgccttgctcttggtcatgtcctcat

SEQ ID NO: 4011 - DNA, 353 bp, Glycine max
ggacctgccgcatgcatgcttgctattatatcatgtattttaatagctccattgttggaaatttcaagattgagatatgaactgtgtccacgtgctatgaaagaaagacacttttggaagatatatttcacacttgtcaacactcatgtggctccgtaagtactgtatcatgctgatattccatgtactatgttatatttgacaatgaagggggaaactagcttttctattttcttaagtatttttgactaacttaactctgattgtttctttattcttcaaagaataaatatttacataaataaaagacgtacaagaaggaaaaatataaaatatgctagttattagagtat

SEQ ID NO: 4012 - DNA, 513 bp, Glycine max
actcaagtctttgacgattcacatagattataagattaatttttagtccgatatttaatcaaatttaaagctttcaaattggtttcttattgactttattgtacacaaaaatattattaagatataaatttatgatataacctcgcatgaaaacttattaaataagtatttaattaaatttagggttggccaacattattccaatgcaaactttggagtgagcttttacaaaagttttatattttgatttaggcttaaatgtaattttaatcatcttatcttatttaatatggaatcttgattcctttattttaaaatagatatttggtctccttattttaaaaaataactaattttaatctctctattctaatatataaacatttggtcctcttactttaaaatttttataatttttgtcaaatctttaattttacatatattttatttattttattttgatccaattaattcttaaaccttacttatttacaataaagaaatgattaaatt

SEQ ID NO: 4013 - DNA, 791 bp, Glycine max
atttttagtggggcaatctaaacactggtggagacgcggctatttatttgaattggaggatgacgacctaacgggacacgtttcgaatgttgatcttacaagaggtcgtgatttttttatggcaccccccggtggatcctcattcgtgccaaagcacaagctaggacgacttacttgaaaagtgcgtaatgagaaaactcttcttcgcgagtggaccgatgacaagatttgcccggctatttcaagaacttggtgacctttcctcctgattcatgactcaggttcaattttacccacaaaatgcctatcgacgctatgaacttaaatccgctctccatctctaagaaccaaggatatcttccttgagatggggatggtcgatctttgggggggcactgtctataaaaaattgaatccactcatggtcggccagggcttaatataatccggccccagggttttcttgtaataagaactccccaaaatgcccgtgaaggaaacttgtaatgcccaaaactactataagggcgctaaatggcctccccaaccttggggaaccatttttcatctctttccttatgatgatgggaatccgagcgagaccctttggggcttattattaactcgtgaatgcgcatcaaaacacctttggtcgttattgtgtatctctaaatctgcctcttttatgaaaggttaattctattctctctttgggagagtggttagttctccctacttctcgccatgtgtatgaattgtcaccatatactcccactgttttctgccctatt

SEQ ID NO: 4014 - DNA, 461 bp, Glycine max
accttctggccctactcatagttgtggcatgagaaaacatgctctattttcatctaccactccaaatagggcctccggatcattcttttctttaaatggaggaatgttgagtttaataccatcaattccgttttgtctatgaacaccatcattccctcttctcctcctttcttcttcattatgacctctattctccatttgatccaacctttcatggagcgcatcatctcgttggttcattaacctctccatatgttgcatcaaagcttgcatttggaattgcgaaagccccactccatcattaagattagtacctgacattctcaacaaacaaatcaaacgtaacaagacaattatagttgctggttgaataccttacccactcaagtgtatcacacaattatggcttttctctaatgaaacactcctggcttttaccactcttattccccttgagttct

SEQ ID NO: 4015 - DNA, 455 bp, Glycine max
agcttgtaatcgattacacacatactgtaatctattaccagaggagattttcagaaaatattctcaacagtcacatcttttcatttggttcttgaatgggcatcaaaggcctatatatatgtgacttgagacacaaatttgctaagagtttatctgaacaacaagtgtttattctctcaaaaagcaaaatcgttatatcctcttaaaaattccactggccaatgcaattgcaattcattaaggaatcatttgagtgctcaaattgtaaaatctatctcttcaagagagattcattcttcttctctttctaattcactaacggattaagagaccgcgggtctcttgttgtaaaagaattctaaacacaaaggaaggaatttccttgtgtgtttagaacttggaaaaggaatttacaagatatggtaactctcaagcgggttgctatgggactggac

SEQ ID NO: 4016 - DNA, 253 bp, Glycine max
tatatcaacatgggggggggatcgaaaccatttctgacgccgtggtgtctgcactttggtgcatggatctgctgtcatgaattgccctgattgtcactctcgtgaatgtttatattgattgccaagccatcactctacaaaagtcttattaaaattactatgggacaaatctctggctctgcttcttggaccatgaacagtgttaatttaacgcccctcttgaagatgctcttgtcttaactgaggctgactc

SEQ ID NO: 4017 - DNA, 1195 bp, Glycine max
  unsure at all n locations
accactcccgcacacctcgtaattagtcanttcgcggacacnttctaacgccattctgacctnctcatttactatattgatatttagtantctaatctgtaatacgnnnnnnaagagaggttgtggatatgattcggtggcacgagcctgctatattatagaagcagcccggcatgcaatgcattgtcctgagcattaagaaaaagctncttgtatcaaatattatataganctaggcgatcgaaattgattggcatgttgagagtaaaatctctgacgcaataagcgacacacattagagagacgaataattcgtataattgatgagaaatctattgttatagaagaaatagcgattcactcacgctctatgacaatggaacttatatgctgggggcgctttatgatgaggaagacaaataatgtatttagtttttaatggtgaaaaagacatcatatcctntgctttatagggatgcaccttttatcgctgcgtcaaagacctaacgcatatggtagagacaaataaaagctgtaattgaatctcccgcttaaagaaaaatcagagtatgggctatagacacaggaagggttaacaacataaaacttcttatttcataacaaaagccttgagttaacttctggacatttgtatgatgatacaaaaaatctcgttaaaatcatctaaattacatgggaaagtaacgtgatgtaattcaaataagacttatactgacacacccaaatagtaaatgttgcaacaaactacaaaacaattggtcaatctaaaatggaatggaagtccgcggccaattataatactatagaatgtaaaccccaataaagtcaatggcgatgattcggcatggccacacaaagggtactcatatttgaggagaaaataaaatgacccctaatatccttgttaataaattgnttagagagccgtttgacagcttactggtatcataatatgttaaggaatctgggggccatctgccaaaagagaaggtatcacccttagtttataaacatggtagaagcggatctgtgtatacacaaggacctagctccgtatggatcaatcccctgttcgatctgcactagagaatattcatcttatcttagacacatacatgccgcagagacgcaatatgtatcgtcatatatgtgctcaacaaccgtcaggcgacca

SEQ ID NO: 4018 - DNA, 520 bp, Glycine max
  unsure at all n locations
ttgactttgagtcatcaagagattataaatatgtgaccatggcatgaatttaaagatataaaaaatttaagaatctatctttcaatcatctctcaacatcatctttcaactctttctacagaattttctgattcatttctcttcatctttctaaaagtttttgttcaaacactttgttttccaagaaaagctctttgttcaaaaacttgtgctattcatctttttcattctcttcttcctttgccaaaagaacgaaggactaaccgcctgaattcttttgtgtctctcttctcccttacaaaagattgaaaggactaaccgcctgagaattcttttgattcttccctcccccttaagcaaaagatttcaaaggactaactgcctgagatatcttttgtttccccttacaaagattcaaaggactaaccgcctgagaattctttgtnccaacacattggattgtacatcctttgtgggacaagtagagggtacatctacttacggaatgttatactgagaa

SEQ ID NO: 4019 - DNA, 620 bp, Glycine max
agcttgtaggtaaactagatgccttggttaacctggtaacccaactggccatgaataaaaaattttcacctgtcgccagactctatggtttatgctcctctattgaccaccacacagacctttgcccttctgtgcaacaatctgaagcaattgaacaacctgaagcttatgctgcaaacatctacaatagacctcctcaacctcagcagcaaaatcagccacaacaaaacaattatgacctctccagcaacaggtacaatcccgggtggaggaatcatcccaaccttagatggtcgaatccttcacaacaacagcaacaacaacaatagccttattttcaaaatgctgctggcccaagcagacatacgttcctccaccaatccagcagcaacaacaacaacaacaaccccagaaacaacaaacagttgaggctcctccgcaaccttcccttgaagaacttgtgagacaaatgactatgcaaaacatgcagtttcaacaagaaaccagagcctttattcagagcttaactaattaatgggacaattggctacatagttaaatcaacaacagtcctaaaattctgacagattaccttcttaatctgtccagaaatcccaaaa

SEQ ID NO: 4020 - DNA, 702 bp, Glycine max
tctatgggatcaacgtgtctatcatgtggccaacaatatggatgaggactccaagcataccttaataggtgaaggtgcactagttgctaaaaaacacaaggttagcaaaactaacctgaaggctatgaaggtggacttgggacaaacctgtaaggaagctctataagtgggcgtggaagccatcctaaatcgaaaacaaagaagattggccaagtccattgttgaatttgatgagatagaaatgaacattccaacatgtacgatgcattagatagagagtttgtctgggtaattataggataagtgtgcattaaatattatggctgtgcaatgaaaaaaacatattcaagtttttaaaatgaattatatgtattgatgtaacatcctcagctttacatcttaatcatcaagcggatagtataaacgcatatgatattggtactcaagagtttataagttaaagggactacattattctcaagtaattatatcatatacaacaaaagaagtgatccaacacatgggacccttacatcaacatataacaaggtttgcacaaagaagtatctatcagacattaatgacaaaacatagactctctaagcccccttgtttcatcctttctacatgtttaatctggaacatccacataaactaataatacatggtctcagtcagtggtaaaacatgtagcatgccttt

SEQ ID NO: 4021 - DNA, 532 bp, Glycine max
agcttctggtgggacatcttgacttgctttccaatctgacattcaccacagattctgccttcttctattttcagattgggaatgcctctaacagcacttttgtcaaggattttcttcatgcctcttaagtgcagatgtccaaacctttgatgccatattctgacttcatcttctttggaggatagacatgtagaggagtagctggtttcttggggtgtccataggtaacaattgtcctttgatctgctgcccttcattagaacttcactcttctcatttgtcaccaagcattctgactttgtgaagtttacattgaatccttcatcacacagctgactgatgctaatcaagtttgcagtcagtcccttcaccagcagtactttgttcagactaggaagtccatcatgaactagctttcccattccaatgatctttcctttagagccatctccaaatgtcacataactagtggagcagggctcaatgttcagcaagaattctttgactcctgtcatgtggctggaacaaccgc

SEQ ID NO: 4022 - DNA, 600 bp, Glycine max
  unsure at all n locations
tattcaggggatagttgatgatcgtatacaaccagcaggagttggcttacaacaggccaatctatggagcagtttctggaaaaagtggcatggcctaaagttcagctccctctggaaagagcccataaggttgttcctcctggacctgtactagctaggactgagctgacatcagctgaaccacaacctcctatagtagatccacttgcttctccgaaacttgagacattgtctcctccggcaccacctctgataatcatccccgatgacttagctaatgaagctgctggttctcctaattcaccatcttgcaacatgcaacatagacgatggttctgacttttatgactggatggactgttgaggaagttgtggctcatactgacaagaatgttgatatccttgatgtttttgtgttcttctgttgttgccttttagattattattattantaatttggttttcgtacaatatttcctttatttctacatatactgctagttntatttatgggtaaatagtttgctcatcctaaatcattttgaacagtttgacttgtttttgatgacatggcaggtaaacactctaatctttttggta

SEQ ID NO: 4023 - DNA, 745 bp, Glycine max
  unsure at all n locations
agcttgtccacaaaaaatagggtttgaaagtttatcatttcagtttcttaccaagtaaaaaagatcatttttaaagtccaacgccttaaaagtgatcacaattcaagtaaaaagaatcgcttgattcactcttaagaaaaaactacgtacggctgatttcctctccaaaggaagatacgtacgagcaaaagccccgcttttgtccaccctcaaaaaaaaaacaaataanaggttaaggtaatacaattttcaccatttttaaaaataagctgctgtcctttgtaaaaaacgggagaaggggtaataccttcctcaaacgttaaaaaccacccccccaacttaaaaattatttttaacggggttcttttgggtttcccaccgtttccccaaataaaacgttggggggaccccccccctcttttttttctttggaaaagaccaccccggaggcttcccctttttcccccccaaaaaggggcgttgcgaccacaagagatttaaaatgggcttgccaattttgggggcccggcgaaataaaaaaataaacccccctttttttaattttaaaaaaataagtttttttgggcaaaaaaaaaaagggggaaagggtttttttttttaaaaaaaaaaagttttcttatatactccaaaaagggcgccccccttttttttctaccgaccccctcttttatttttccactctttaatgaaccccccccaaaaattctctccccttattttttat

SEQ ID NO: 4024 - DNA, 539 bp, Glycine max
  unsure at all n locations
ttataagcgcgggttcgggagacaaaggtcaagcgttcacgatatgcgaagatgatattccgagtactttggatttggtacgaccatgccctcctgatttccagctgggaaattggcgagtggaggaacgccttggcatttacgcaacaagcataatgtaaacctttacggttttaaaagctctatagttgggcctaggctttagagtttttccttttgttaaggctttgtgtcttttgtttttgaatttataatacaaggatctttcttcatctgttcctggtctctacccattcttattcatttgcatgtttacttctttttctaaaacggcagatccgatgacgagtcccccgaaggtactaatacctgggacacgtctatcgacttcgagcaagaaatgaatcacacggaagatgaagganatgaggatgtgggacttcccccagaactagaaagaatggtcgcccatgaggaccaagaaatggggcctcatcatgaagaaacaagctagttgacttaagaaatggcagtggaaa

SEQ ID NO: 4025 - DNA, 530 bp, Glycine max
agcttcaagaaaaggccaaactcttctccaaaatctgatttcaggcttaaattggtggcttttttcgtgctcatgcgcttagcgcaattttgaaccgcttagcgtgaattagtgaatttcggcttagcgcgtgcttttctcgctcagcagatggactaaagcggtgcgcttagaaagatgaccctttgctcagtgaacatgcacaacttatccttcttccagattcttctttgcgctcaaccgaggagtgttgcactcagcgaatgactcgctaagaagacaggttggcttagcgagagggtaaaaatcagcactatacaaactcacctaattaacctgaaattgagagaaaataattattaaacacaaaaaatggaagtactaagtatttattaactatctttacccaaaagtaattacaatactacaaaattgccataaattggaggagtttgatacaatttatacaagttttatacacaaaagttagtcgtattcatcgactaacaggtatctctttgggaaatata

SEQ ID NO: 4026 - DNA, 370 bp, Glycine max
tcttcttatgcaagcactctattggtggagaagcttctccttacatggctcattctctagtggattgcgcctcctttcaccttttctcctatatctttctctacaactccatggttgaaaatcactattgaaaggccttattaaagctcaaagatctagcctccatataaacatgtaaaccaagctttcatcaagtggtatcagagcacaataccttcacctatgtgctccttaaacctccattaattttcagctttaccttctcctccattgatgatgcttcattattctccatgtatctcctcacatgtattgtgctgaatgttggtaacatgattattttagaattcccactgattaaacttgctat

SEQ ID NO: 4027 - DNA, 526 bp, Glycine max
agcttctaattcaaaaagttttggatgtctctggcttttgtgacacaaataaatacaagtttcatattccagaatgtcattaagggccctccttggttcaaatgatatcatgtgcatgttgatagatatggttatggtgtgcctcttcagacatgcatatattcctgaatcatataagggagtagggacaatctcctaaaaatgaaccaccagccctattatagcttgcaatcagcaggcaataggtagacaaacctattgtccttaaggattgaaacattttactgattagtaattaaatttgattgtgattctcttatgggcatagacttggtctacttagattttagctagtcctagctagctcctaataatatatcctaaccttccattggaacttggaagttgtcttacaaaaaattgataatttgattttacaatgaaactagactattagtatgtaattaacaaggagtagaatatagattacaacctcaactatgttgctaaataccaagtttgtgta

SEQ ID NO: 4028 - DNA, 591 bp, Glycine max
tgactcatttatttaaacaaacctaattataagcttgagtttggcttttttgaaaaaactaaagcatgagcttgagcttgaatggtttagctcatttaaaatttgattattttttaacttgcaaaaaaattattaaatcattttttaactgtcaatttattatttaataaaatattttaatactatgtaataatctacaaataaaatatgtgttaaacatatgatatgatattgtagaatctatgtaattttaatttttatattctatttataaacgagctatttatgagttattaatgtcaagcttgtaaaacttaggcttagcttgagtttgtttatttcattaaacaaacgagtttgatggagcatttagcaagttgaactcgagaagttcacgaataacttgactcatttacatctctatctagaaatacttttgaatttttaattaagtgtcgcattatatatagattgttaacatagtggtaataaatgacatttgtttatagtgataactattatttatggtgatgaaaattgaatgaaaaataattttcatttatagaaataagaaatattatattttatatt

SEQ ID NO: 4029 - DNA, 501 bp, Glycine max
agcttctgacgagtgattatcgatcctctcatcaccttcaataatatctttgactatatatataattgatattttttcacaataaaccactaaaaataatataacttatagcacataatcaaaacactacgatttgaaacattttttcagcaatttattttatcccgtgattttaaactgctaccaattttaaatatttttgttcacctgttactatagtctttatttaaagaaccttgctatttggtacgaaatatacacgctagaaagtagctaagacatacctgaaccaatcacggttgtatggggtcacttaaaatctgatgattaatatttttttcttcaaaaatacaatttgtaactagtatgtaattttttcgtacaatattcatctttttcgttattataaatactcaaggacaaatatggtacatcataaatgaagcccacctctgtcagtataataaaaaattctaacacaagtgaataagatcgaggaca

SEQ ID NO: 4030 - DNA, 553 bp, Glycine max
tcaggattgtgtttagaaaaaaatatcccgtgaactccatccacaatctgagttgagaaaagctcaatgaaaatgaaggaaagtagtagttatggtttcagaaatcaataaatgatgaaaaggaaaaactagaacaaacttacatatttttttaacactgaaaaatcaagtacaacgacaggaatttcaaatgtcattgctctgattaataatggaggaaaaccctgcacctcttgagcagaaccatataggatgatatcagccattagtaacacactattcacatcaccattcaagccatagtgccttatggaaccctgacgaagtcccatacgtgaagcaactccctacatagacagctaataaatcagtaaacaattcaaagacaatatattcaagctgagatatcgtcactaaagataagtcaaacataataaaacagagcattgccacaaatatattctgagagttcatcttcaaaatttctatttctattttttcagtatcaaatttacattacaatgctcaattttggttcatgtattcttttatt

SEQ ID NO: 4031 - DNA, 311 bp, Glycine max
agcttgcatactattgtttgataaaacaaaaagaggatggtaagccttggtatttcgatatcaaacgatacatcaaggacaaagaatacccgcctgaggcctctaacaatgacaagaggacattacagaggttggcaaccagtttcctcctgagtagggatgtcctatataaaagaaaccatgatatggtattgcttcggtgtgggaatgcaaatgaagctgggcagatactaacagaagtgcatgaagggtcatttggcacccatgccaatggacatgccatggcccaaaagattatgagaagtggatat

SEQ ID NO: 4032 - DNA, 540 bp, Glycine max
  unsure at all n locations
ttaacaccaaaatctttctccaatcgcaccaaaccctaacccctaaaacgcgtggccacaatgataaagacgaggaccagacatcacactcacacgtcgtctaaacataaccctccacgatagcgacaacgggccaaatcattaaccctaatcgccttctatggagaactttgacagaaacctagcaagcaacagataaacatattgattggtcttctgaagcaatgttgttatgtcctttccatatgacacaaacgatgtctttttctttgtttttataaaataattaatccaacatgtataaacattaacaccaaaggttacacatggcaacacgtgtaatcttatgtgtccagttgacgatcacgtaggtagataacgattttgaactaacagcaaagacctaagacaaaaattttcaaatattagggacccaatctaaaagataaatttatcagagaccaaatgtaaaaaacagatgtttatcaagaatcaaaaacatatttaaaccttcttttcctcaaagntaaatttgatgag

SEQ ID NO: 4033 - DNA, 283 bp, Glycine max
agctttatatatgaaattaaggacttcatcatcgaccaacaactttatactgaaataatatctcacttaacattgtaatatccaagacataggaattgttccaagtaaaaggacatgagaattgtacctgtgtgtagatataaacttggagaatatttaggacaatcatttatgtcatgttctctaacataagctgttaacttgaatacatggtgaatatctttgaaatttggccccctgctgagggttatacctagcagcctatgtagtactttttctccat

SEQ ID NO: 4034 - DNA, 470 bp, Glycine max
taccaataaacttgttcttcttaacaaaaccttttatatcttcacagagtagtgctaaatggtaccaaaacaaaaccttttatatcttcacacagagtagtgctaaatggtacgaaagacttcagaaaattttaacgaaacagatgttttaatataattggcaaattgttttcaatttaatagataaaaaggatttgataattaacgaaaatcataggtgatcacacaatatatgcagtattcgtgcaatatgaattggtaagtaattcccttttattaatttagcatgtgaattggcatgaaacctgtaaccagaacttcccaccatgaccaaccaatctaagatgctgttcttctatatagactcaaggaagaaaaaagatagttaactcgtgcaatgcattaataacgaaaattgtcattagtaacaattttttttgtcactaatgcattaatttcttgtatgatcg

SEQ ID NO: 4035 - DNA, 583 bp, Glycine max
agcttatctcaattttgtaatcgaggcaaaagcttgacttgtttgaaattttgtagtttgcctatagcttgaatagcttctttccctttatcaaatctcttctcaaagtattttaaaatttagtaatttagtttttagtagacattttcatgttagaagatacagcaaatattttaagtgaaagagagtgaaagaatatatgaactaattgtagtcctttgttctctagacagaattacaatttactgagtaatagcctgagtcacgtagcttgtgtttagatcctttatatgattgaatttaaagctaagcttgagcttggttttagtaaaacaaacaagtttgattatatttaacgggttgagcttgaatagttgaggaatagctcaacccatttacgttctttaggataccattctcgtggttcaacttacaagactatcaactgtatatgcaaacaataattttacagattcttccaggattatttaaggaaattaaggagcagaacagatctgtggcacattcttcatataaatattatcaatgccttgtccaaaccaaattgaaattgatggtttac

SEQ ID NO: 4036 - DNA, 617 bp, Glycine max
  unsure at all n locations
tcacagcaaatgatagaatgtctatagttttatcatttgacaatttattgttattatatgtcttatccttcatatatatagactcttttttttcatctttttcaactgtgaatttttacataattcataaattttatttgataccttgcatagcattgcatttagcaaatacaatttaacatgcttggtttataagtattgacacaaaaaaggcttatgaaaataccttgtattgcatgttgctagggcttattaaaaatatcaaataattttacatgtgtctgtgaaatcagacttattaatgatgcgataaattatgtaactatcatgtctctcgttgatgttgctaaaaaaattgtttatgaagtatagggattaaaagtgcattttgcaaaaagtttaaagatcgagaacataattaacccattaaattattatcaataaaataaccttaaatntaaaatacaaacataggtacatgtaatntatattatcaattattgataaaaaaaaatataataatgtttatgtgaacaaaatatttttttgaccaaaaaataaacgcatgttttttatattcaaaatcattttacagttaaatatttaatggttataaa

SEQ ID NO: 4037 - DNA, 988 bp, Glycine max
  unsure at all n locations
cacacggaacgagaatcgaagcggctgtccnatcattcgtatctgaatgaattaccatgacgaacgagctttttcnnnccccggaggggtggacctggaagaccccggtttttgaaaaccccccgaggcagccaattgcaaaaaaagggagggagaaactttttttaaaccccaataagcagacacggggggggtgtttaaagcccatccccccaaaagtgaaccacaggaagtaacaaacagacgtagattcaagagaaacaaagaaataaggagcgcagttaagctcagacagcaggagacagagtgagcaacaagaagccccgttcatgcaacaccaaaaaagcgcgaatagaagagcgcacgaaacaggcagaaagtagactgactcctaatacaaaaacgcgaatgatgacaatagacgaaatgacgctaataagaaaagaggacacatcgcgcagaccgagacagacgaactggcagcagagaaaaaaacgacggagaagaacgtgtggaactacgacacgccaccgaggcgatccacataaataaaaggtgggagtaaacagacagggcataattggattgatcgggaaaaaggactcgcggggagtatgatcaatacgattgcaccgaaacgggcacgtaggcaaaacctaagtcaactatcacttggacagagaacgaactacgaggcagtcaatcgattacaccgcaacggacggcatacgtagacagacacagcggatggtataggacagaaaactcgacagaaaataaaagctatagtatatggatgtgcatagactcccgacaaagaacgttatcaggagggcgagaataacctacgacaaaagtgattcaagaatcgattctacctctaaaccgccgccgaactaacaccgtacctgcgtatatcacaaaattctcgacctccgcaacgattacgtaatcctcacgcatcgacggatatagacaccggaagacc

SEQ ID NO: 4038 - DNA, 835 bp, Glycine max
  unsure at all n locations
gcccagtcccatgacncctttgataccctgctatttagtgacactattaatctcagccttatagcgcgggttagggagagaaacgatttacttacaactttatttaatcgactttagtaggggacaatgtagttgagccttgcatcttgcataattatgagactaaaatatccccagtggagaatacctttgcataatgcttttttttttcaactttatacacacatagttaaacaacttataactgtgcctaagctaaaaagcttcttcttttgaacctagcacccagatttaaggttccaattcaattattcccggatcttttaaatttagttaagggaacttccctttgttcttttttaaaacttgccccttccttaactttgacccagatacaaagatgagtcccccgaaagtacccatacctgtgactcccttttttttgttcattgtgcaatccatgaaatgtaatgagtacgtatggaagtttattgacttttccccccacctgaagaaattttttccattttttcacatcttcgttcggagaaataaaagactccggctcttttcttttctgggcgaccaaaaaaaagttctctctccctctctgggtttctcaatttctttcgcaacacagtaaaaaatcttttaaaaaatctcactcacttttccgcgaaataatatgataagcctaggttgtgttcctacatattcacaacttttttctttgccaaaaaagatgttccccactcttttccctatagcctttttagcgagaaaaacacttcacttctacacaggtagtagtagcttttcgacgcctatctctgcn

SEQ ID NO: 4039 - DNA, 435 bp, Glycine max
agcttgtttaatctttccatatgagtatcctgacctatgaaatcaaaagttttccttaatattataaaccaaagaaaaggtatacaattatcaaatattttggcaaataaatacaaacagtttcaggacaaagatttgctctaaataattgctaaaagataggaaacttactacattttgatgagttgtatcatattctacgattgtttaatatgaagatgtaaaatgaaagtgcctgaattgaaacaaagtgacaaatctcaaatatgtattttccatcttctgagtataactccatatatagctagtatgcttatcagaattgtcccatccagctcccattgtcttaccaaacaagtctgcatgaatccacttcattacgaaccatttcttacctttaatcacaagtcatccaacattgagactgctagtgat

SEQ ID NO: 4040 - DNA, 515 bp, Glycine max
  unsure at all n locations
tgtacctggaagaacttgttccctggagctattgagaaaagcttgatgattttagagcactgcaagaaaaagggtctattaaagatgcacaatgggtgtgggatcaaataattgtgcctgcagtataaacccattgaagaagaacatgcttgcattttgatgatgacaattcacaatatattttgaagagaccaacaatgacatcttatctggcagtcaaagactgtaaaagatggcattccatcggttttaatggcatcccagattttggatcttgtgtcatttagtttaatttgactctaacattaactagtttgttatttaacctgctatgtttattaactattaagaaatacattagagccattacatgcaatcactctttcataaaaaaaaatccactttgttcttttgctcatccctattggggcataataaattcccaaatntgtaaggtttttggattatcagatttaaaaaatgcttaacctgactatttaagaataaaactgtga

SEQ ID NO: 4041 - DNA, 467 bp, Glycine max
  unsure at all n locations
agctttatgatcacacatcaggggaatagaagtcaatcctaacaaatgcactgctattttagagatgcacagtcctattatcgtccaggaagtccataagctgaatggaagactagcatccttgtgagactaaacctgcgaacaacctttcttagccttcaagaagaccattgtcacattgccagtcctaagtcaacctaggccaggagtacccttactcctatatctctcagtagttgatgaagcagttagcccatcccttttacaagaggaagggaagcaccagctccctatctacttcaccagcagcatactctatgatgccgagatgcgctaccaaatgatagaaaaggtggcactaacactcattacctcagcccagtgtctcagaccctacctttaaagtcattgagtggtagtcaagacgcactataccctatcaaacaggttntgccaaagcctaaact

SEQ ID NO: 4042 - DNA, 377 bp, Glycine max
ttgacagaaatccgacatcgtaacattgtaaagttacatgggttttgttcacattcacaatactcatttttggtgtgtgagtttctggagaatggcgacgtcaaaaaaatttttaaagatgatgaacaaacaattgcgtttgattggaataaaagggtggatgttgttaaaggtgtagcaaatgctttatgctatatgcatcatgattgctcacctccaatcgttcatcgtgatatatcaagcaagaatgttcttttggattccgattatgtagctcatgtcttagacttcggaacagccaaattttttaatccagattcatccaattggacctcctttgcagaacctttgatatgctgctcccggttaatttcctt

SEQ ID NO: 4043 - DNA, 519 bp, Glycine max
agcttgtcttgtgcagaattagggcacacaatttttgtacagcttttacacactttatagaacttccagggcacaaaattccacagcaaccatagtgcctatttagggaatagagccctagaagcagcaaagaggagcagcttgtgcattgaagcctaggttttgtcatttgagagagattattgagtagaaagtgagtgtgagatgctgagaaaaggaggaggaggaatcccccttcttgtgtaacgaactatcattctctgcttttaatctcatttattgttagggtttctttgtaatggctggctaaacaccctagttggggatttctaatgaacaactgatgtaaatacataatatctaattcattgtgttttctgtgttcaatgcatcattcaatgcttgatgtttggatgcttttggtctgtcacccatttgcatgcatagttaagtgactttagcattgggaaatgtattgttgccttaaaacttgattgaaaaagattgaaacttaatctt

SEQ ID NO: 4044 - DNA, 402 bp, Glycine max
atgcctttagggcttgtacctcatcactttcttccgaagctttaacctcattgtctctcacagactttaaatctggcagccaatccaatccttgtgtgcggactctcagccacttatgatagccgccgatgctcccattactgtttcccctaagctctctatcctttcttcacaccgcatcacatgccttgtgaactccttagagtaccctcgcattggggtcactgaaaccccgtgtgatgaaaggcgtgatgctttcgtctgatggcactcctctcatggggtagccaagctgtcttatggcgaggacgggattataatgaatacaaccccttgttccatcaagggaacatttggacatccttcgcatgaagatcgaatcctgattcttccttccttcta

SEQ ID NO: 4045 - DNA, 987 bp, Glycine max
  unsure at all n locations
tccactccgatcntagagatctctatcggactcggantgtcttcaaactctctcaatgactttcgttaactatcttacgtacatataataaaattctacacccnnnncnaaagagagatgttgttgtagtctctgtccccgggcatccttttgatncgacctgcgagcatgcaagcntgaaaagcatgaagcccgtaaataacttgtttgtttttataatatatacaaatggcgtaacaaagttttggataagatgaacgcatctcgtatatgatgagatcttagtcctagggcattgtgaagagctataaattttaattcttcttatccttattccatgccttggaccaatgattagctcatgaattagtatgaaagattattctttccctaaagcttcttacaaaaacctcaccccctactttgaaacatggtcttgcaacaattgaattgaatccaattgccctcatttggttaatcgactgtcccaagtcatatttcatgaatagaggaaggttgctatagcttgaaagtaattcgatatacctcactttgataaatcgaatacccaacctccagaaaacacaagaaaaggctctttggactgaatctaaaatcgattaccatacatgataatcctgtttcccagccagcatagaacgaactaatattttgatattgaaatgaattaatactcaccccttgtgaaatcgatgaatcagggtctggaatatcaaaacaaatggaatttcgacaaataaattggatacccattgtataatcgataaacttctttttaactggtaaaactactacatccccccatgcgtttaaatttaaaaacaacactgaatgtgcccaaaatttaccgacacacattttcatagaaatttcttaaaaacgaatagtcatctgcattatgttggtagaattcgaacttgacacaataatcgctttaattgggagacgcggtgatttcagggaccc

SEQ ID NO: 4046 - DNA, 550 bp, Glycine max
tgccaaaaataaagaatgaaaaatgggagatttgaatcaagtgagatgtattaaggaataaggatgaagtagggaaagttttggtcacaaatcaagatataaaaaagagatctaagagttattttaatatttttataagcattttgatgatggactgggattgactttgtaatagggaaggactattaatgtaggaggacaaacagaatttggcttaccaccgtagaattcagattggagtggtaaaataggtccttaagaggatgatggatggatagtggtgaaatgattggtctagatggtattcctattgaggtttggaagtgtgtacgaatctcgagttaagaatattttaagaatcttggataagactactattgaggtttggaagtgtgtaggaatctcgagttaagaatattttaagaatcttggataagactactattgttcttgatgctcattttaataatataaataatagagtattttatactaaggaatattcttcataatttgtttccttatttgatcaagagttcagtactaatat

SEQ ID NO: 4047 - DNA, 555 bp, Glycine max
agcttatgaccattcgaatttctcgagagtttccgttgttcaatttcgagcgtgtagatgagttatgtccccgaatcggacatctgtgtgaaaagttatgaccattcgattttctcgagagcttccgttgttcaatttcgagcgtctcgatatattatgaccccgaatcggacatctgtgtgaaaacgtatgaccattcgattttctcgagagcttccgttgatcaatttcgagcgtctagatgagttatgtccccgaatcgaacattcgagtgaaaacttatgaccattcgaatttctcgagagcttccgttgttcaatttcgagcgtctcgatatattatgttcccgaatcgggcatccgagtgaaaagttatgaccattcgaatttctcgagagcttccgctgttcaatttcgagcgtctcgatatattatggccccgaatcggacatccgtgtgaaaacttatgaccattcgaatttctcgagagcttccgttgttcaatttcgagcgtgtagatgagttatgtcctccaatggacattgggtgaaaagtt

SEQ ID NO: 4048 - DNA, 612 bp, Glycine max
  unsure at all n locations
tcatgggagagtcaaagatcaaattgagaggaaaaataatttctatgctaaacaagccaacaaaggaagaaagaaggttgtcttcgaacccggagattgggtttgggtgcacatgagaaaagaaaggtttccggaacagaggaaatcaaagcttcaacaatggggagatggaccatttcaagtgcttgaaagaatcaatgacaatgcttacaaagttgagctgcccggtgagtataatgttagttccaccttcaatgtctttgatttacctctttttgatgcagatgtagaatccgatttgaggacaaatccttctcaagagggagagaatgatgaggacatgaccaagagcaagggcaaggatccacttgaaggacttggaggacctatgacaagggctagagcaaggaaagccaaggaagctcttcaacaagtgctgtccatactatttgaatacaagcccaagtttcaaggagaaaagtccaaggttgtgagttgtatcatggcccanatggangangactaaatgacaccactttgtctcaatttttagagtgtttagtttgtctaaataatggcccaatccttgtaaagttgctgaccaaaaatatg

SEQ ID NO: 4049 - DNA, 530 bp, Glycine max
agcttagggtatgtcataccctaatttcgtccggggacctttgcttgatgacatgcgacctttgtttggtccttgtaaggtgcttggcacccatcattaggcaatttgtgaaattccgggacatgccgaaaaacaaaagaaaatattgatgcacaatccgtaaaggttccgtgacacaccggaaatcaaatggaagcatcgttgcataatttagtgaggttccgtaacattccgtaagtcaaaaaggggatgattctgtaatccgcaaggttccgtaaacattacggaaagaaaacaagtatcgttacgaaattcgtaagtttccgtaactttacgaaaaaagaatcaccaaaaaaaggtagagggggtgtacttagtaaaaatgggggtgcaaataacaaccaggcccacttgggccctccagaagattcctccagaaggcttgtgcttctggaggaagcaaccctgctcgcctgggcgagctgagctcgcctgggcgagctgggcggcaaacatctcccttattttgc

SEQ ID NO: 4050 - DNA, 362 bp, Glycine max
tgcttgtggagcttctatggaggctggatctttgagcttcaatgaggtcctttaatggtggatttccaccatggagaagcagcggaagacaaaagaaaagaggggagaggaggcgccatccactaaggaataagccatggaagaaggagcttcaccaccaagatgagccttggataaaaagcttgtacagaagcttcaatggatgaaaagaaagaaggagagaaagatagaggggggaggcacaaaattgaatgaagaaaacaagggagagaagttgaactttgagttgtgtctcacaagactctcaattcatcaaagatacaacaagtgttacacatgcttctatttatagactaggtagc

SEQ ID NO: 4051 - DNA, 730 bp, Glycine max
agcttgaaaaacaaagtgaagaaagttttatctgcattaattgggtacatagaacaagccacaagatactcatttgagatctcagacagaaaaccagaactttctatgtcaaatcacatggctcttgttgttcttcattatggcttgtctttttttgttgccctttggttcaaagcacatggcagtggtttgaactagcaagcgtaggaccattactaataagttatcaagcaatggaccggataggattattagaactttcgacgagctcagagaatcaaattctcattattaagtgcaaaagacaaggcattattaaatgtatagacaaagtactcgagggtgtacaagataatttggccattatggtagatgaaaacaaatggaccacataaaaactagcattttcagggtttctatttaaaaaattcccatcttattcaatggaccccgcggcatgtagtaatacgtaacacggccaaagtatcatcaggtggtaatttctttttaatttagtattttggggcaaattttaaattaatattcctatgggaataaggtgtagtagatgtttaatattaaaattatcaaactattatggaattttattttactttttacgttggaaaacgaaaaaaattttatgaattttttaaataaggacttaaaggtataaatttttttttttacgaattaaaggcataaaacatattttttttttaaaaaaaat

SEQ ID NO: 4052 - DNA, 554 bp, Glycine max
tgctcgtcttgctgatatttatcatgcagacttttctgatgatgaccgaggaacaattagggatcaacttgaaacttatgtgcttcaagtgagaagaaatgcttctttttccacttgtgaagatgttcaaagtttggctatgaagatggttcaaactgagaaacatttggtatttccattggtttataaacttattgagctagctttgatattgccggtgtcgacagcatccgttgaaagagctttttcagcaatgaagattatcaagtctaaattgcgcaataagatcaacgatgtgtggttcaatgacttgatggtatgttacaccgagcgggagatattcaagtcacttgatgatattgatattattcgaacatttaccgcaaagaagtctcggaaaggacacttgcctcgtaattttatttaacccgctattgtaagaatatgcttatctcttttattttaaactatatttttggtgacaaaatgacgagtctcttttattttgattgattactatttacatattatatacaaggtgaatttgctatctt

SEQ ID NO: 4053 - DNA, 715 bp, Glycine max
agcttgtaaagaaaaatgatggcatgacttttatccaatcttattatgttgaaaagctattgaagaagtttaattattttgatgcgaaacatgctcttactccttatgactcatccatcaagttaaagaaaaatttgagtaaatgaatttctttacataaatattctcaaagtatcggttctttgttgcatttgacaaacttctctatgcctgtctgatattgcacatgcagttggtagattggaaagtaattgagggatttagtgatataaaattgaagttctgattttgatgaaataaaaatgagaagtggttatgtctttgctttagctagttgtgcagtatcatgaaaatctactagacaagttattatttcacatgaaagcaaaaattattgctttaaatactgctactagtgaggttgaatttcttaaaaatgtattatgtgatttgtcattgttaaataagcgtatacctccaattccaatgcattgtgatagtcaaattgctatatctaaagtgacaagaaaaattttaatgaaaaaagaagacacttaagagtgagacataagtctttaagaaattggatttctcatgatgtcatttcttttgactttggcaggtcaaaaaataatattacagatccgcttacacaaaggttgacctgtcaacaagtatttgagtcttcgagggaaatgaaataaaaccctttatt

SEQ ID NO: 4054 - DNA, 615 bp, Glycine max
  unsure at all n locations
ttttcaaagtcaactttgaaaaccatgcaggggttatttttgaatttagcttcagctaagacctcattaactatcattacacccgggaggatatgtctgcctttgaaaaaaacaatttgtctttaatcaattaaatgaagcagcacaagagccagcctattagccagactttggacattattttgtagacacaccctatgagagagatgggtctatagtcattaagagattgggggctattggttttggggatgagggctatgaaggatgcattacttcctttggggaatctgccattaatgaataattcatcaaagaatctgataaaattaggttttagagtttcccaaaactgtttgatgaaattgaaattcaaaccatccgagccaagacttttatctcccccgcaagcccaaactgcagacttgatttccagctcggtgaatctatcaacaaggctttccttctgcctttgatcaagggaagagaactagatcccttcaaggttggtctgcaaggattctactttgagaatctttctttanagtgctgaagaactgcaatcttgacactgttagggtcantggatccatcctccatcaatacacagacctt

SEQ ID NO: 4055 - DNA, 917 bp, Glycine max
  unsure at all n locations
accacaccatacgtctgaagtacttatccaacttctttcaccacatggctttacctctaaacttacaaataacctctttcntcnccacagagaggtgttgacttcctcgcccgagcagcttaatatagaactaccggctgcaagctcgtctcacctgccaaccacaaataacctcgcatttgtatatcctactgactcccatcataatgcgacgtgtatcctatccaaaacagaagctcgtaggttactttaatgacattaactctctactaggagggcacacagagcacaagcaataaactagggcagctaataggaatacggaagagcccctatgatgtaaacaacactcactgcctccatgaagggagtctgacgcaacgaagaattctacacgtgcccggttaaaaacaatacttgtaggtcatatcaatcacaaatgacttactaccggaagtacgagtgagtctaatactatttacgaaacttttcataaatgaacatgaagcactgggtcagattcacaccacaataccttattcctttatagctcacgctaacacctggattctaccgcgaaccggcgaatgaaaatgcccatgccatcgttacaaacaccgtacatggtctcgatcatcatattgttgcaaacaacaaacccctcaaaatcgcaaaacattaaagggagaaaataacccgtattcgtgtatgtaactgatactaaaaagattctccaagtagatcaccatttatagagccttctgctgaccccctccacattctcgaacgtcatctgaagagtctatacaccagaccgtatgacattattcgactacgagaaatcataaaatcatcaggaatagagacaaccggtagtgaagaagtggggtcctacaaacacctgtgctccgtcctta

SEQ ID NO: 4056 - DNA, 429 bp, Glycine max
tccgttttcaatttcgaccgtctcgataaattaccggactcattcggacatccgcgtataaagctattgtcatttcaatctgctcagagcttctagtcttaattttgagcgtctcgatatattacccgattcaatctgacatccgagtaaaaagctattggtccttgaatttgatacgagcttccattttcaattgggatcatctctcgatatagtacgacgctctgttgcgcatccgactaaaaagatattgccgttagacatggtctaagaaatcccatcttcatttgggggcgtgtccatatatcacgggactgatccaaacatccgtgtatagtgtttttggctttccaattttctcagatctcctattctaagttgagcgcgtctccagatgtttcccgattctttcgcactatcgaataaaaa

SEQ ID NO: 4057 - DNA, 373 bp, Glycine max
agcttatgcacggaaaatgtaattatgaaattgagatgcctgaagaaaaaccatttcctagttaaccatgcattaagtaccatgtacaattattttgtttttaagtgaaacgggtttatgatcccaacatggttggctcgtggtgcctaacacatgatactaagaatgtagtgtgaagattcacgcttcccccttttttgtttttgatctgcagaggaaaactcgtggatgagcaaacatgaaaacctatgggatgcttttgaggatatcaaaaagttagaagatcacatatgcatgctgatgccatgactcatgcgttatgtgaagctggaacatcattaccgagaaatggaagacacatccatttttatgt

SEQ ID NO: 4058 - DNA, 310 bp, Glycine max
ttttggagtagaaacatgggaccaactcattttatttcaaaaaggaagtcgtatctagtcaaggtcttagagaccatacaaggttcctaccgatttctaattatgtgggccattaagtctatcatatgctgacaatagccgagaagtccgtggatctcttcgggggcggagtaagtgtctgccatcgccttggccttggctaacaatcggggaagttcttgactcccaatcctggaaacagctaaccgatccatccacatagttgccagcaggtgtaaatattatatcaccctttctctagcctattttt

SEQ ID NO: 4059 - DNA, 598 bp, Glycine max
agcttctcccccaattttctataaatagggggagaagtgaagtgaaaaagggttcagccccttaggcacttatctctctttcgaatttgcttggaaaaattgtttctgtgaagaaaatccaagccgaggcgcttctgaaacgttttcgtaacgtttccgtgaggaatttcgcgaaggtttcgaccgttcttcgacgttcttcattcgttcttcatccttcttcgatcttcaacgggtaaatacctcgaaccaagcttttcgattcattctatgtacccgtggtggtccacattgtgtttcgtgtatttttattctcgtttcattcactttttatacccccctttgacgtgcttaagccattttatttaagtcatttctcgcttaacctaaaaataatataaatttccaccgatcggttgaattgtattatccggtaacttcggttaaaatgaattccgaccggtcggtcgtgccgtaaccacgttggaaatcaaaaaagaggtacaataatattctcataataaaaaaagacgtcttttaataaaataaagcggaaaatcattcggccgttttcttttgggatttctcattcttaatt

SEQ ID NO: 4060 - DNA, 630 bp, Glycine max
tgccacccagctcgcccaggcgagctcagctagcccaagcgagcagggttgcttcctccagaagtaacagccttctggaaggcccaagtgggcctggttgctatttgcacccccatttttactaagtacaccccattgcctttttttttgtgattcttttttcgtaaagttacggaaacttatgaatttcgtaacgatacttgttttctttccgtaatgttacggaaccttgcggattacataatcatcccctttttgacttacggaatgttacggaacctcactaatcatccccttttttgatttccggtgtgtcacggaaccttacggattgtgcatcaatattttcttttgttttccggcatgtcccggaatttcacaaattgcctaatgatgggtgccaagcacctcacaaggaccaaacaaaagttgcatgtcatcaagcaaaggtccccggacgaaactaaggtatgacagcgtgtaaatcctgacattgacaaaaactgccacacatggggcaattttgaaagctgttgtagatatctctaatgactcatcacgattttcaagtttgtaccattattgtaaaccacagttacaatgttaaatgaaatggataaagttgatatc

SEQ ID NO: 4061 - DNA, 359 bp, Glycine max
tgcatgcttgctcacgttatatagggagtcgacagttctatcttttcagccttcttaccatgtaataacggatcattttttaaggtccattcggctcataagtgatcactttttaagttaacagaacccccagattcatctcttaagattgaactacgtaggtctgatttcctctgcaaaggaggactcttacgatacatgagccccgcttttgtcgacctccaaaataagaataaatccaaggtactgccccacaatttggacaatatcttgctttgaagctgctgttctttgaaacaaagatgagatgctctaatcccttactcagtcgaaagtacaactccctacctgctaatttt

SEQ ID NO: 4062 - DNA, 558 bp, Glycine max
ttcatcctaagcctaaactgtattatttgatttgatcataggaaaagggggaaaaagatacaagatataaacatgaatacaaataagaaattgtaaactacattacttgaattcctattatatacaaccagcataccgagttgaatttggataatttcctcccaccaccaacttcaacctcaaggggagaattacaagaacaaatggtttagtgtcaaaaaagatagcacacagacaaattaaaaaagatagcctgaacagctactggagttctatgaatatgtcttggcacttaagatgacctgccatacttgttaactgaattcatatgattcatctacatctgcaagttgtttggtcttgaaaattgattatgcatggctgagttaacaacaaggttattatcacaaccaacaaattgctgactaaatgccggagaaacagtatcaggcagaataggtagctcagagttaccaattgtttgggtatcagacctattacggataaaacaaactcttggctaaaagtatctatttgagtgttaacattttgattaac

SEQ ID NO: 4063 - DNA, 1288 bp, Glycine max
  unsure at all n locations
tcactcgcgcactctgcaanttcgtcaanactcgtaaactcttacactctgtcactctgttgcgtctgttattganacatgaaacatgccactttncagtatctcttnccaannncccccgaggagagaattgttggacatcgtattacgacccccatacttttcttatagagaacatctcaagccgtgcgaagtcctggtaatancacaacatgtcatgtgaacaagcatgctaatctatctgcttaatcaagcgcctaataacctcactcacggcacgtttagttgttctacccacgtaaatactatgcgtgctcagtcgctgaagaaatcctctatcgcttcaaagccataactaagggatttgcttagtacacacggacagaacctcgttatcactagatggatgccccacaccggaattagtggaaccttatcgctgcactaattggacgaagaaatcccttgtgatggccgcattgtatggatattagcaccactggccggtaggactcgaaaaatagcgaaatgtaacttttcctgaccgaattcgcgacctcaatttcagctccaccgctatcgttagaccaaaacgctagggcgctcaaacaatcagtcatcgagccatcgcggaactggaatcgaatactaaatcagcctgagcctgagcatctgctctgcctacgaatgcaaccacgaatcggatcgactcgggcatccgaaatgcttgagtgatttcctcttgcaattcttctgtatatctcattgcgactgtgcattgcacaactgaccgcgtgtgtctaatcggcgtcggaataacacactctacttcgtacatgtgcctctacacttcatcagagacacaattatacgtagaacgttagcccaccagtaacgcaacacgcgagggggtggcgtaaggtcggatcacacgatgaggtagtacgcgtctgcgagggcgaggaagaaagacacattctctatcggtgagtatacactaacattttctggcaatgtggtaggacactgaatgcttcacttcattttcacctgcggtctcgtatcggagacagcgacctcctaatactttcgtcattcacaacacagaaaatgagaagcagactcggataagcccaccctctatacttgaccgtctgagtgatatataacactcttcatgtgtataacgaagccgttcagatcgtcttggaacgtgtaatctacgcacacctacaaaagaactcgctcgctaatactttaagcacacatatcacagtcgcatatctca

SEQ ID NO: 4064 - DNA, 636 bp, Glycine max
tgttccggcgccaccagcgaccgctcgcaacgacgacacttgttgggtaccatgctgaattttactaatttacgggatcaaaccacgcggtgatgatatggtttgcctttaagaaagtcaaaaagtatattaccagtttgttggaaatccccattgggccttctgttgttaaaacgtgactccaagttctttcaaagataaatgataaagtgatattctcatggaacatgagaaattattgactattattttgaatgataaaaattatttccgtaaaatattaaaatttaatcaaacatattaaaagataaatagaatgtgatgggattaaaacaagaaaaaggttttacagcctaaaaaaagttacatagtatgtgtttagtcctttcaaaatgagtgaaatttaactttggtttctctaaatttctttttgaattttattcttaagaaatataatttggcctattcttatgaatttaatggttatacattattcatgtaaaacctaactctatatcattattgaatcattagtcatcatttaaattactttaggacaattattttgaaaataataaatttatcatacttaatttaaaattattttaaaagtaaccaaatttatcattgtgaatt

SEQ ID NO: 4065 - DNA, 463 bp, Glycine max
agcttatcctgccattttattcattcacgctattctgcatcattcttcctttgaccatgttccttcctgaagccgagctcccagcctgggttgtttgttacattcctggaatcatgtccctcctaagtgttctcccagctccacggtcatttccatttatagttccttaccttctatttgagaacactatgtcggtaactaaatttaatgccatgatatctggattattacgctttggaagttcttacgagtgggtggttacaaaaaagttgggaaggtcatcagagacagatttggttgcctttgagaaagaagctgaacctctaatgcgatctactagtcttcatagatcatcctcagattcaggcattgaggaactaagcaaactagaattgtcaaagaaaactgggaagaccaataaaaatcgtcttttcaagaaagaactttatctcgcattaatttt

SEQ ID NO: 4066 - DNA, 586 bp, Glycine max
tcatgactagggcttccaacaggatggcctttaaaatttcaattgattcttttgcgtatgcccttggggcagcgctgccactgcttattgcaatctttttctccgggttttttgctggttataaagtctcttctcttatcaccatggttggtgcttgttgacacacaaaagaaagaaaattaggatcaatctatgttttattttaatctcattgtactttgattaattacctaattaaaccaggattatgcatcctcgaggatggctattttacctaagctagctaagttgttctggccttggccctccttgtggatctaataatttttagcttgaatattgtacttaccaaaatccgaagctagcacacataagggtgaacgtggctaaggtggacttctgaacttcgcacatcgactaagagtgacctttgttaggaggacaaaagggggacctgcaaaattaaggacttcaacgctcaagtaaatttatgagttatgaaaataatagagtatgagtacacgagtatgaaaatgggtgtgcatgtgtgttagaaatgtgttaagggttcaaaggaacttgttac

SEQ ID NO: 4067 - DNA, 630 bp, Glycine max
  unsure at all n locations
agctttctccactaagttgcctgatgcttgaaatgtattttctgatggcagtggtcctagatgcagggaagaatttctccaagaacaccctcttaaggtcatcctagctggtaatggacctgggagcaaggtagtacaaccaatcttttgtcactccctccagagaatgaggaaaagcctttagaaagatatgatcttcctggacatcagggggcttcatggtggaacagacaatatggaactctttaagattcttatgaggatcttcacttgcaagaccatgaaacttgggcagcaaatgtattagtccagtcttgagaacatatggaacatcgtcatcaggatattgaatgcacaagctttcataagtgaagtcagctgcaaccatctccctaagagtcctctcacgaggtggagattgagccatgttcttagtatgaaaattagcagccgaatgctcaaaatcagaatgttcagaccaacaacagaatgctcaaaatgcacagaatgattaggatgcacagaatgataaggatgcccagaatgatcangatgcacactatgccttactaatatatgaaaggttctatcttattcagggatcaaggggtgtaaatcacctggattggc

SEQ ID NO: 4068 - DNA, 501 bp, Glycine max
acactatctagatctcaagcttacaacataaactaccctcattctttgattcatttaatataggggaacttattccaaggattaccaaatgaggacccctatgaacatttggcaacattcattgaaatctgtaacactgtaaagattgcaggtgtgccatatgaagccattatactcaatctatattcaatttccttagtaggagaagccaaaaggtggctacactcatttaagggtgacaatctgaaaacctgtgaagaagttgttgaaaagtttctgaagaaatatttcctatagtcaaagactgtgaaagggaaagctacaatctcttcatttcatcagttgcctgacgagtccttgagttaagcgttggaaaggtttacaggtctattgagaaagactcccacccatgggttctttgagccaattaagttgaatatgtttatggactggctgagaccacagaccaagcaactactatatgcttcataagggggaaaa

SEQ ID NO: 4069 - DNA, 511 bp, Glycine max
agcttgtaattgattaaaccgatacgagagatttctctgtaagctagaaacatttatgtaatcgattacgatcaatctgtaatcaattaaaatagaaagtcttaacttcaaaaaaaatcttctaactttataaactattcctcttactcctacaagatgatgcatgatgcacatatgaaataatagagactaagatggaacacacaatataaccctcaatacaaatgccactcaagagagttgggcatgtaaaagacaaaaaattttcaagctcttcttcaagattcaaggctaggtctttatgattctccccctatctataacaatctcccccttttggctttgatgacgccaaacttgaattttccatttgagtacatttggagagtcttaagagtaaagacttttcttagtcaaacctaaaactttcttaacattaagagaagtaccaattcatatcatcatcattaagtagagctttatatgaatgtatgatgccatggggtacaaa

SEQ ID NO: 4070 - DNA, 441 bp, Glycine max
tatcgttatggcctgcctccggacttcaccccccgtgccaccccggaagatttaagccaagcccctactttcgaggggcagctcccaccttatgaagactatcccgggcaagacgatggggaaggagatacccatcttggccccctgctccacctcaaagatccatccccgcatgaactaccccagccgaacatagtccgccatatcccggcctcacccacacccgtaaaagaatttgttcccttcgtggaagataagggaaagattgaggcgcttgaagagaggttaagagcagtccagggccttggcaattacccattctcggatttggcggatttatgtctcgtgcccaagatcgtcatccctcccaaattcaaagtaccggactttgataagtacaaaggtacgacatgtccgaaggggcatctttggatgtaatgc

SEQ ID NO: 4071 - DNA, 586 bp, Glycine max
  unsure at all n locations
agcttatcaggtaggcccaactgctattactaatataagaggcccatgatttaggaagagggcaagaatacagagggcaagaaagatcgtttttagagaagaaaaatgagtttggcggcgtctaagctcaaggactgcattttgtttttctcttcatcaaatcctttgattcccatagctatgagtaactaattccatgtctgttgggtttggtgtaattagactaccttcatctaattcctgctttttttattcaataaagcaattgttattgttcttcttttgtgcctattgcctttgattgatcacctaattacttgattcattgtgttcaattgtatttggaaaaatctatttgaactgtgaattgaagaagacaatgaataatttttatgcctagggatagtgtaacaaggattgttcatcgttaaaacccttatccttaatgcaagtcgtttggctacacttttcaaggattggtattgaagtcaaaggacttaagttctctcgcctaaagaattaaagttaggataaattgtgtattggtnataacgtaatctcaattgaataaagattattggtaatg

SEQ ID NO: 4072 - DNA, 634 bp, Glycine max
tgaaggtaaactagatgccttggttaacctggtaacccaactggccatgaataaaaaatctgcacttgttgccagactctgtggtttatgctcctatgctgaccaccacacagacctttgcccttctatgcaacaatctaaagtaattgaacagcctgaagcttatgctgcaaacatctacaatagacctcctcaacctcagtagcaaaatcagccacaacagaacaattatgacctctccagcaacaagtgcaatcctgggtggaggaatcatcccaaccttagatggtcgagtccttcacaacaacatcaacaataagattagccttattttcaaaatgctgctggcccaagcagaccatacgttcctccaccaatccggcagcaacaacaacaacagccccagaaacaacaaacaattgaggctcctccgcaaccttcccttgaagaacttgtgaggcaaatgactatgcaaaacatccagtttcaacaagagaccagagcctccattcagagcttaactaatcagatgggacaattggctacacagttaaatcaacaacaatcccagaattctgacagattaccttcttaatctgtccagactcccaaaaatgtgagtgccattacattg

SEQ ID NO: 4073 - DNA, 540 bp, Glycine max
agcttgggagttctgagtccatgagggtactcagaagctaaagggaatcactaatagggtctatttccgctgaatctttcgtctttgattttttttttttcctttcaatggggtagagagggttttctctctcaaaatccaattttatctcttcacaagagataaatttttctatgatgaattgtctaattattagagctatactaataaagaaattagaaacaaattgagcaatgaatttctaaatagggcaaaagttatggataaggaatttatttctctggatatattagaaaaccaaattcgattgtctaatgatgaaactaaaacaaatatttaactaaaatatctctcaatttggatattgaacagagagaaagagtggaagcattttggtgcctgttgtgaagatgatacccacaaatattctgatgcaagtagaataaacaatgtgaagcattttctggaggtttaaactggccgaaaattcttaaaacccttttaaaacacttttagccaagcattttttagcgggttttt

SEQ ID NO: 4074 - DNA, 380 bp, Glycine max
taaggagacgctgactcaatttatgtagatatccatgtccaaatacaggagcacaaagtcatccatcaagaacttggagatacaagtaagacacttagccaaacaaatggttgagaagcccactagttgctttggagctaacatatagaagaacccgaaggaggaatgcaaggcgatgttgactagaagccaaaggagagcacaaggtgaagaagagaaagctgaaggaaaccagtctgaggatagaaagagcagactatgaaagagagaaagagaaagaagagaagaagagtagaacgtcttaacctttaagaccaaaagccagctagctcgagaggtaagaaagaagagccactagtccctctaaaagagctctcata

SEQ ID NO: 4075 - DNA, 791 bp, Glycine max
  unsure at all n locations
agacgaggttgaancctgaggccctcgcagaggcttcataatatgggacagacaacccagcgggattgacattaattcattaaaatgatggtttttgtttttttaagatcacaaactaacggggcggaggggggatttttatttgaattagacttccctccattgaccataaaattaataaatattagtcaatattggaatactgccttaggtcattaattaattgaactcaaaataccttaaattatattcaattacaccgtaaatattgataaaacctaaaaaaaaatcatttaatatctgagcaaatgtaaaatccattgcttcaatttttgatttatcacatgcaattcaacatacatttcttaataagaaccctgcaactcacaaaaaatctaaaaaatcgcttgctgaataattcattgaacaccaacactactctttagctacacggtaaaacattcactgacaaattaaatgtacgccccaaattataatagaagaaacactaaaatttcttaaaaacacatttaataatctcgaataacttctaattcgctcccaatatcagatactcacaaacattatttatacaaaaacactcttaccaaccatgcttccgaaaatttatactccttaccaattggtagcactcaatatcttaacttacaaaaaattaaacctcatatccaataggctaactaccatttataaacactactaagtaatagtctatcattttatatacaaggaagcaatccctcttacacataaactgtacaaccgtataa

SEQ ID NO: 4076 - DNA, 419 bp, Glycine max
  unsure at all n locations
agctttntgtaagaatggaggagaggaagaaaatacaatagcaccaagttttgcccaatgaacttttcttgacaaagcaagtgttgaacaaaaactcttagaaagatgttgagaattaagcatctttaaattcgtgtcatggtcacatatttatagccatttgatggctcttgaggaatcatgttaaaagttgtgactcttggcaaaagctaatcactttaaaagttgtgactctctggcaaaaactaatcactttaaaagttgtgactcttgacaaaaactaatcacatacaaaagaattctaaggcggttagtcctttgaatgcttttgtataagggaaagggaagaatcaaaagaattctcagactgtgccgtcttgaattctttgacaagggagaagggagacacaaaagaattc

SEQ ID NO: 4077 - DNA, 458 bp, Glycine max
  unsure at all n locations
atatatttgagggactcatggtcactatgaatgacaaattccttgggataaaggtaagtgtgccatgttttcaaagcccgtactaaggcatacaactccttatcataagttgaatangtaagggtaggaccacttaacttttcactaaaataagcaattggatggtcttcttgcatcaacacagccccaatcccaacatttgaagcatcacactcgatttcaaaagatttttgaaagtttggcaacgcaagtatggnggcattaattagctnttgcttaataacattgaaagcttcttcttgtttctctccccatttgaaaccaacatttttcttgagcacttcattgagaggtgctgccaatgtgctaaaatccttcacaaatcgtctataanaactntctaagccatgagaactcctcacctcggtcacggacttatgtgtaggctattcttgaat

SEQ ID NO: 4078 - DNA, 497 bp, Glycine max
  unsure at all n locations
atctctaagtcacctgaggcatgcaagcttgtacacaataccatattgaaagatgaaaaatctaagactcagaatggtttctgctatccttgaacccaagctcctgatatgagcctgtcgatggaataatttatgaatattgagacacggatatttgaatacagtcaaacaatgatgaaaccaaatgtgtccatacatccaagatccaacaaaacattatcatctctactacattgagttctaaaaaagtgtccaattattagagtatgttgtcagtcaactgtaaaaacagttctgtaaactaattgtaagggctgttagcttttgctaacagcacctatcctagagttagttagagttggttaggttctgttagttagttagttacaatctgttacaataacagaacagaggtctatatatacctcttttgtaaccttctgtaattaactntgataatcaataaaatcagcctttctgtcaacgattttctcttc

SEQ ID NO: 4079 - DNA, 473 bp, Glycine max
  unsure at all n locations
tccctgatatattgagaacatattggataactacaactntgtagtaaaacaccttctattatttgaagccacaaagttcagcagaaccacaatgaacaccaggaaatattaattgatttaatacaaattcatctgcttgcgggagatcattctatcagagcgaatcacaagccgatgaaaatgctaataacaattggttgggatcagatataaaataatacaatggttcttcaacaataaatcaagttctcatcacatcttactttggcaatccctcctcgagaagtcacttcaacaaagaggcgatgcaaatctagttctcttcctccaacaatgggaatcctgcaacaaaatttcaaatgccacacaagtaactaanaaggagttggggggacatgctnttatgttacaaagttatgcaattaaaaggcattaataattaggaggagacaatagttccaaaaactacaaaa

SEQ ID NO: 4080 - DNA, 470 bp, Glycine max
  unsure at all n locations
agcttgtccnncaattttctataaacagggggagaagtgaagtaganaacggttcagccccttaggcacttctctctctttcgaanttgcttaggaaaattgttcttgtgaagaaaatccaagccgaggcgcttccgtaacgtttccgtgagtgatttcgcgaaggttttcgaccgttcttcgacgttcttcatcgttcttcagtcttcaacgggtaagtacctcanaccaagcttttcaattcattctatgtacccgtggtggtccaaatttggtttcatgtatttttagtctcgttttcatttactttttatacccccttttgacgtgcttaagccatttatttaagtcatttctcgcttaacctaaaaataaaataaatttccaccgatcatttgaattgtatcatccgttaactttgngtgaaataaattccgaccgatcggtcgtgccgcaaccacattggaaat

SEQ ID NO: 4081 - DNA, 479 bp, Glycine max
  unsure at all n locations
ctataattctcagcttggtctctatagatcttacacagcagaatctctcanaactctctggaacttggaccttctctctctagaaaccctagacacgcanagctctgaatcccagtccaaactccccttctgaaatctgatttcaggcttaaataggtggccttgtttgtgctcgtgagcttaacacacttatggaccgcttagtgcacattagtgaatttcggcttagcgtgttcctttctcgcttagcaaatgaactgaagcggtgcacttagcgaacctgtacatcttatcttcttccagagtcttcctcgcgcttagcccatgagtgttgcgcttagcggaggctcgctaagccagcagattggcttagcgagaaggtgaanaatagcactttccaaagcttgcctaattaacctgaaattgagagaacatgataattaaacaaacaaaaaggaagtactaagtatttattacct

SEQ ID NO: 4082 - DNA, 454 bp, Glycine max
  unsure at all n locations
agcttcttatccaaggctcatcttggtggtgaagctccttctttcatggcttattccctagtggatggcgccgcctcttacctcttctcctttgtcttccgctgcatctccatggtggaaaatcaccattaaaggacctcattgaagctcaaagatccagcttccatagaagctccacaagcaagtttccatcaggaatgatgcaatcctaccccgcaagggcattggatagaagactccaagtagattgggctagagatgcaagagaaggccctagggttctcatgagccttaggatagatttcgggcccatgggctaagtatgagcccacttatctttgtacatattagattaaggtttcattaattntgggtcttttatttaaggctccataatgtaggaagggtaccctagaaatataggaattttcagcccttgtattttagggcacct

SEQ ID NO: 4083 - DNA, 459 bp, Glycine max
  unsure at all n locations
tgaacgaatgtaagacacatcttcttcaactntggtgattcttgactccatctcattgaagcgcatatccacttgtaattccaaagtgtcaaacctttcaccaacaaaggtttgaagacaatcaaacctgtccaaaatctttgaaagaagagatgaatcttctccatcatgtccttcaccaacatgtcgagcaccctttttcacccaagagccatcatgctctttttgataaccaaaggatgctatgactgaagcgcctataaggaaggatcttttgattggaacatagggttcagaatcaagaggaatgttaaagtgttgaaagaaaagggtgactaaatgtggatatggcaatggagcattcaatcgcaatgccttatgcatgcgatatctaacaagacgtgcccaatcaatttgtaggcctttatgaaaagcccacataataatgagatcttcttc

SEQ ID NO: 4084 - DNA, 416 bp, Glycine max
  unsure at all n locations
agctnganagaacatttcctaagaaagtattttccaataggtgctagacatgcaaaggagatggagtttctacgactaattcaggagaacatgactatgaacgagtactcatccaaattcgaatacttgtctagattttgcacctagactacttcaaaagaatggagatgttgaaattatgaagaaggagaaagaattgagatacagaaaacaatcatcccggtgactattanagagttcccaaagctagttgaaaggatcaagacagttgagtgtcttgagtatggtaatagagttgttaggactcgtgaagcttgaccatgtggattaaggaaaagattccagtagaaaaaacgtgcagtaggccccaagaccagcaaaagacaagatctttaattatcagtagtatgcacaca

SEQ ID NO: 4085 - DNA, 472 bp, Glycine max
  unsure at all n locations
tataagaacannaatgcctcaatcatttccaaatatacatgtgaattangaagcatcgacaagaatcaagccaagactatggtgcaagcaatcaatggggcaaaacacaccaaatgattatgatgatggatggctcaaattctcacaaaggtaaactcatcactttcaaattgagctttcaaaactatcatgacatgtagaggagaatcaaggatttcaagtcacaagatatcaagaaattntattttcaaaacaattacccatttcttgaacatatcctataattcaaagaaaaacatgcaaagtcgtacatgcacacaaaattgacccaaaatattaaactaaaaatccgacgaaactaacaaattaacaaattaacacaactaacaaattaacaaaaccaacaaaactagcaaaaccaaagaacactcccccccatacttaaacaacacattgtcctcaatgtagcaca

SEQ ID NO: 4086 - DNA, 345 bp, Glycine max
actttgaagctatttaataatgtttaattatttacaagcctttgttcatgggtggacaatccttacaaataattacctgattcccttctagttatttgaagttagaatgaaattttactctgtagtttaagcttaagtttaagttagtagatgaaacaagccaatatacttgtttattctaaactactatcgttatgatgaattattttaattctgtcatgtaggtatatcatgaattcaattattacagtgttgtatttcaacggaagagtatatgaagacaatgatggtgtaatatctgaaggcagtaaaaatgcgattcacaataaacgcgaaattagtttc

SEQ ID NO: 4087 - DNA, 396 bp, Glycine max
  unsure at all n locations
atcctctagagacacccgccgcatgcaagctntgcatacnccaaggatccattatgaaattacttgtgaaagagagccatgtgggtgggttcatgggccactttggaatagacaagacccttgtcttactcaaagaaaagttttattggccccatatgaagaaagatgtccataagcattgcactacgtgtgtggcttgtttacaagccaagtctagggtgatatctcatgggctatacacacccttacccatcccatctgcaccttgngtagacattaatatggactttgtncttgggctttctagaacccaaagaggtgtagactctatctttgtggtggtggataggtgtagcaagatggcacactntataccatgctacaacgtggatgatg

SEQ ID NO: 4088 - DNA, 245 bp, Glycine max
caacccgggcatagtcggtcagcgagaacctgtaatgtacctaagcaggcgagctcctggcagtcaacagataaaaggaaaacaagaccacaaagcaaggaggcttgtggtggctggccagcttgtgaatttgtataatatgtggattgtggcctctggtaatcgattactaagggtgggtaatcgattacaaggctaaaaattgaagacaggaggctaagatggtctctggtaatcgattacca

SEQ ID NO: 4089 - DNA, 436 bp, Glycine max
  unsure at all n locations
agctagtaccatanattacaaccatgcctgtcattgtcttgatttaggagcaataacagaatcatgaataaagtatttgtgcagttgaagccaattaactgaaatgaaagcaaatacaattttctatttttttgttctcattnttttaagttttttcctgttgtagtagttactttttattgattcttggatatcatgatgatgctttgtataaacttgctactatcaggtatgtctatgcctaccatggaacaaagggaggaattgtatgatcccttggcaatggcctggtggaccaagcccgcttattaattattataactcggatgcaatgttttttttattagaaatcactatctatttgactggttgtagtgtaggtgcttaaattgaaacaatggtgtgttatgtataaaaaaaatggattatacatatt

SEQ ID NO: 4090 - DNA, 455 bp, Glycine max
  unsure at all n locations
tctgcatcgggaaggtaagtgttggtgcgaanatggaagaagaatccatgagatagagaatgaaagaatggatatgcgtgttgttgaagaagaaggagattgggaatatactgtgtgtgttgtgaatgtgaagtgaaggggatggaacatgaggctcggaacttggttgtgaaaatttgagggatggatcttcttagtgcctcaatagattttttattttttctagccacgaggggatatggatgaaatgaattttttttttttttacttttacatacactatgacaaacaattgtaggtataagtattttttgacttttacctacactaatttatgtgtgtaggcaaaagtctccgtaagtatatgtcattnttcttgtagtgagggagctatgggaccagcaaaacctgcagataggccagatcatgagggtgatgatcccctatatctgatg

SEQ ID NO: 4091 - DNA, 418 bp, Glycine max
agcttagaaatcaagtgcttagaaatcaagtgatcaagtgatcattaattccaaaacatagggggagtatgaaatgagtgaatgtaacattatatcttgcatatactctgcttgtatcttgatttcaggaattaaattgtcatcataaaaaagggggagattgtagaacaagcaaagactttgactttgatgttatgatgatgccatatgatcatgagggtttgatatcttatgaaaatgcacttctcaagtttaattcaagacaaaaatccaagaatacaacatacaacatcaagaagatctctagtgatttaggaagggaattccaaattgaaacaacaaaatgtttggccaagaaatttaagctaaaatgtcttttcaagttattactctctgcaatcgataccaaaggatgtat

SEQ ID NO: 4092 - DNA, 458 bp, Glycine max
  unsure at all n locations
tgttaactaatcaatcgtatttctgattctcaattganaaagaaacataatatttggccaagctatcactggccaatcaatcatccgatctctaacttataaagaagattcataattgataaaaatgttgtactttaaatggtagaagaatttaagttataacttgccaataagttaactgatctccaacgtataaagaagattcatgattgataaaaacactctaagttatttagttgtttaattttctgctagaagttattgtgtcattcatgtctatctcaaccatgtactcttgtatatggcggtttatttatatcgatcatgtcatttgtgtcgatttcatccatgaactattggtgtcatggcggtttatttgtgccaatcgtgtcaattctgctagagttttcccgtgatgatcatgatcgtgatcattccttacttcgtttcttattcgg

SEQ ID NO: 4093 - DNA, 397 bp, Glycine max
  unsure at all n locations
agcttgtagcanatgcaaacggcaataacattttactcgaatgttctatttagtcacgtaatgcatcaaaatgctcgaaattgaaaacagaagctcggtgcaaattcaaacgacaattagtttttactcggatgtccgattgagtcccttcatatatcgagacgctcgaaattgaaaacggaagcttgtactatattcaaacgacaatcatnttttactcggatgtccgatggagtcccgtaatatatcgagacgctcgaaattgcaaacagaagctctgagcaaattcaaacgacaataacttttttttcgaatgtccgatggagtcccgtaatatatcgagacgctcgtaatggaaaacagaggctctgacataattctacaacaatacatttta

SEQ ID NO: 4094 - DNA, 428 bp, Glycine max
  unsure at all n locations
tcgaaattgaacaacgtaagctctcgagaaattcaaatggacataacttttaactcgggtatccgatttaggctcatcacatatagagacgctcaaaattgaacaacggaagctctcgagaaattcaaatggtcataacttttaactcggaggtccgattcaggcgcataatatatcgagacgctcgaaattgaacaacggaagctctcgagaaattcaaatggacataacttttaactcggatgtccgattcaggcgcatcatatatagagacgctcgaaattgaacaacggaagctctcgagaaattcaaatggacataacttttaactcggaggtccgattcaggcgcataatatatcgagacgctcgaaattgaacaacggaagctctcgagaaattcaaatggacataacttntaactcggat

SEQ ID NO: 4095 - DNA, 298 bp, Glycine max
  unsure at all n locations
agcttatatggaggctggatctttgagcttcaatgaggtccttcaatggtgattntccatcatggagatgcagcagaagataaaggaaaagaggtaagagcaggcgccatccactacggaataagccatggaagaaggagcttcaccaccaagagagtgccttggataagaggcttatagagaaagcttcaatggaggaaaataaagagagagagaggaaaagagggagaaaaagtgaacttcgaagtatgtctcacaagactctcattcatcanagttacaacaagcattacacatg

SEQ ID NO: 4096 - DNA, 446 bp, Glycine max
  unsure at all n locations
ntaggatatgtaatttatattntatagttcaagacaagcaaaatgaaacaataactcaactactgtgaccactccaacataactattgccactgaacaagttacttcatgtttagaattctgcattttatataatcaacatatgaaagatggagaaaatattgtaatttcatgacattaaccccacttgtggtgattgatgtangtggtgattgagttatttattggattcttgcttccatttgggaccgtgttgctcatcatcacaggtacaaatgtttgttaccgattaattnttttattacttgttcactgccattaaagacaactaatatttgatatacaaattntgttcatgatgagagaaccttagattcccgtttgagactgaatgcaatgattcttgcagacagtttgcattaatcaatgtattcaatcttgaattgg

SEQ ID NO: 4097 - DNA, 303 bp, Glycine max
  unsure at all n locations
agcttctcccncattntcctatatatagggggagaagtgaatggaacanatgttcacccctcctggtaatttgagaatcacttgaaattagtgaaacaaattgtttccgtgaagaacatccaagccgaggcgcttctgtaacgtttccgcgggtgatctcgcgaagattttcaaccgttcttcgacgttcttcgttcgttcttcgtcgttcttcggacttcaaccgataagttcccgaaatcgaacttttcaattcattctatgtacgcttagttgtcctcatttgtcttcacgcgcctttat

SEQ ID NO: 4098 - DNA, 440 bp, Glycine max
agcttgtactgagattcttttcttattaataatatgccagctaaaatatttttggtacctatagtttggcaattgccagctaaaaaatacacgctcacacaaattgaaacatctaccccctcccacataccaacccagttatgttaatcataattaactttaattatgatgattatcattataaatacataaatattataaaacagaggaaagcagcctggataccaggttcttctttgattcttgagaggtggttggcaattttagcctagcaaacaactcctggataaatgtactgtcatccttcaacaaagagacaatctaaaaataatagagtagacaacaataaggacatcattcactaaattaaatgatatgtctttattcctagttaatcaaatcttagatagacctgaccctttcaaacctctttctcatac

SEQ ID NO: 4099 - DNA, 406 bp, Glycine max
  unsure at all n locations
tctatagaaactcccagccacccaactgataagcttttattaataaaacaatagaccttttattaagccactcaattccctctaattggcttgcaatcaagtattatgttgagctgaagaagtataatattaaaaacaacataaaatatcattattattgagttatataataagtagaataaaacaatcaaggaaaggttgatcatttgacctttcaccactaaccacacaaacaacacaagagtagccgatcacaaagaanagagatattcgtaggtcaggcacaaagtagcttatcacaaggaaaggaggagacaaatcacaagattaaacttacctttacaccatcatgtgtacatttcttctttatctcctctccaaaattatcctttcttataccatatat

SEQ ID NO: 4100 - DNA, 422 bp, Glycine max
  unsure at all n locations
agctngcaaaagacaatgcaataagggccttatccatgggctcttgcgaactccatccaacaaccatgatgcacatggatcttcaacttggtttctacattagccaattaatataagtgatgtggattgttctacattagtaggtccttgcatgtccttattgccatatcttttaataattaagtcactttatttatttatcggagttttctaagttgtgaatcttgattccaaaacatcaaccacatcaaataatgatgaaaataacccaaacatttgattaattaaacgaaataataagaagatgagtcaatcctttgcgatggttacgataagatttcaatgaattntcatttggttatcatatctctaggatattaaaataacataaaaatcttattatcattntgtggggggggggg

SEQ ID NO: 4101 - DNA, 469 bp, Glycine max
  unsure at all n locations
atactcagctttttcttccnagttgcccttggcggtcgacaacacctatcttctccaacggcttcatcggcctaaatccacatggtctctgatgctgaaggagcgtgtggcacaaatgctgagtggaaagggcaactttggaagataaaagtgtttgccaactatcgtgttttaattgggtccttggaataacctccatctctctaatacttcccttaaattaaactatgatgtataaagtttttaggtaagggaaatttgttaaattttaaataattattttaaaagtttatatcaataattattatttatttattattagttgttaatacatatttattcaactttaaaattaagaattatccttgtgataataaaaaaattatccttgttttattntgttntgcaacaattganaaagaaacaaataaagaattcatgattntaaaatatcaatttgaaccaattc

SEQ ID NO: 4102 - DNA, 434 bp, Glycine max
  unsure at all n locations
agctnttcanaatatttatgtatttcttttataaccttccttctctcttcttcaacctanaagtttccaaaatcttgttctcaaactcgtgactcttccctcacgtcgatgatcatcttcttcaagaaacgccgtctgaacttgcgagcgtctatcgggtgcgggcgtagggggacacataaaattgcacctgccagtcatgggagcagttgtcgctatccatcacgtgacggaggtgcttgccggcgcggaggatctcgatcattccttggatcgctgacggaatgctgtggtcgggtgaggtgatgtatgtcgccgtatcccgattcccctacgacttcccatgccgtatcagtattcttaattttagaagcacaccaaccatatattctcttctctttgcattccattttctttcatgctgacaaatttaa

SEQ ID NO: 4103 - DNA, 456 bp, Glycine max
  unsure at all n locations
tacgttacctatgaaaagaataganattntattgtttacattntgtttgttacaaatcactcatattttgcagaagaaacatcctacttgaagtgggtaaaatcactgtgcatggacagtaaagttttcttttttgtatggttctcaaatggagggaattagatggtcccactaatttttcaattattattttttttttttgcaatttgttaaagtttttgttaatttatgggcacaatttattcaccctcctaactctttctgatgatattacctggtgtacagtgaatttgcggtaattcccattttgagactgatgttgaagctcttatcccgaagcaattttagtgaagacttctccanataatcatggactaaaagtgtagctgagattcttaagttcgcttttcttttgttagtctaccattgttaatctcttttatacatagatttttt

SEQ ID NO: 4104 - DNA, 462 bp, Glycine max
  unsure at all n locations
agctntgtccgcanaaatcactaataaccgttttaaggtccaacgccttanacggccctctttgcttttatcgattaacatggaccgttcaaaagcataaaatcaatatgtaactttactgcttttgcaagaactacgtaggtctgatttcctcatcgcaattgaggatatgtaggagcaaaagccccgcttttgtcgaccaccccaagagatcgttaatggttcaacgccttaacatttctctcctttcaaaaacaagagatcgttaatggtccaacgccttaacgtttctctcctttcaaaagaatcaaagatcgtttaatggtccaatgccttaaacgacttttgtgcggttaaaatcgatcttgcgaaaaaagatcaaaacaacttaactggaaatactgatcatacattagtatgattaaacattgtanacacaatcaaacaattttcaacaattat

SEQ ID NO: 4105 - DNA, 415 bp, Glycine max
atgcaagtcaattgtaggaaacatctcggagaggatcttttctgtgcatatttgcgcaaaatgtcttgaactaagaagatgttgtccatcatctttctgttcttgatgaaggcagtttgagtttccccaacaatagtctcacgcactgtggctatgcggttggccaaaattctagacacaatcttgtattacaaattacagcaagatatgggtctaaaatggttaacctgagaggtctgatcatgcttaggaataagcgcaataataacatggttgagttgctttaaaaatttgtcagtggtaaagaattcatttaccggctcatagatatcatcaccaatgatattccaagccttcttcgaaaataaatcattgagaccatctggccctacagctttattgttatccatcacag

SEQ ID NO: 4106 - DNA, 323 bp, Glycine max
ttgtcagctatgtggagccaacttcaactgtcttttgatgattttatgaagcattctcgaggctatgaagagtgtgttaagagctccaaatctacaaacatggtgagaaattcatgtttaggtttaaccctccctgtgagagtgacctacttttgaattgggccttcaaagctcgcaataactttagatacaagtgtgaaattatgtttctaagtggaatccttctactgaggagaaaatctataatttgtgacgttgaatcacacactcacttttctataaagaccggccgtggctggtagtggagaaatctaatggtgtag

SEQ ID NO: 4107 - DNA, 380 bp, Glycine max
  unsure at all n locations
agcttcaggctgttcaattgctccatattgctgcacagaagggcaaatgtctgtatggtggtcggtagaggagcataaaccacagagtcttacgacaggtacatatctttgattcatggccagttgggttaccaggttaaccaaggcgtctagcttaccttcaagcttcttagtttcagatgatgcagctgagtttgaggctacctcatgcactcctccaatgactatagcatcatttctagcgctaaactataaggagttggaagccatcttctcatttaaattcctggcttcagtangggtcatgtcttcaagggctccaccactggcagcatctatcatacttctttccatgttactgagtccttcataaaaatatt

SEQ ID NO: 4108 - DNA, 348 bp, Glycine max
  unsure at all n locations
taagaaagcttctcaaggaagctacctagtctataaatagaagcatgtgtaacacttgttgtaactttgatgaatgagagtcttgtgagacacaactcaaagttcaacttctctctctttntcttccttcaatttcatgctccctcctctctctttctctctctcattcttttcctccattgaagcatcatctccaagcttcttatccaaggctcatcttgggggtgaagctccttcttccatggcttattccttaatggatgacgcctcctctcacctcttttcctttgtcttacgctgcatctccatgatggaaaatcaccattaaaggaccccattgaagctcaa

SEQ ID NO: 4109 - DNA, 358 bp, Glycine max
agcttcttatctaaggtactctcttggcggtgaagcttcttcttccatggcttattctctagtggatggcacctcctctcaccacttctcttttatctttcgtcgcaactccatggctgagaatcatcattgaagggccttattgatgctcaaagatccatcttccataaaagcttctcaagcatgctttcatacaaaatacacaaatttcttgtcgctaggcctggatctatggattattggagttaaatactccaatgcaaaatcaaaccttttcgctttcaacactaaatataggaaaaactttctattcttcttgcccaataagaagaaccctccaaaaccggaccagtgatga

SEQ ID NO: 4110 - DNA, 457 bp, Glycine max
  unsure at all n locations
gacactactgaaactcagcttacattgaattgataattcttttataagagattgataatattatgttgcacaagtagtaattagaatttacgagtacttgtatttatggctcgngaataatagagccatgcgccatgtctattttgatacantttttatataatattatgcaggtcccttaacgtgggtactatatatgtatgggtactggtagctatgcttcctcatcataaatcatgcttattggctgagatttattntctcagatgtgcataattaccaaaatatggtgcaaaatttcactattccttttgtttcctacttcattgacgatacttaatattcttaatttggacagctctctttgttccttctttttgcctaaaaaattttaccatacatagacatagagttcattaaatctagcactgaccattattacaaaatctgactggag

SEQ ID NO: 4111 - DNA, 353 bp, Glycine max
  unsure at all n locations
agcaagctttgtatattgcctctgtgctggatatagagactactttctactttctagaccaccaagatatcaagttgggaccaacatacactgctgcaccagagttagagtgcctatcaatagggtctgaagcccagtaagaatcacaaaaaccttacatgggaagagttttatgaggtgaggcaagatacaaaataagtcctgaatgtaaagcacccttaagataccttaaaattctttctactgttgtccagtgggattcaagaggtgcagacatgaactggcaactttatttcaacanaactaactctagatgagtgatagtacatactgacagctccacaacagatctg

SEQ ID NO: 4112 - DNA, 413 bp, Glycine max
  unsure at all n locations
tgtcgattaaattgatttggatccatttggcananaagaaattaaactacaattaanattgacaagaagagatggagaaattaagattgagaatgagaatgaggaattgtgtgggaattgtgaagatcaatgatacaatttataggattctttatggccaatatttagaattntttagtatganaaatagtgaacataacatttatgagttgcaactagtagcaaacagtncaattttttatttgtaaatcgtaaaattttgtagataacgttcaattattcaactactctgatcacctattacaaacaacgacaacatttccaattgtcacaatggtaataactttgtttcttttgacatgcactacacgaggcatcccaggtctcttaaatctccccacacagcattcctt

SEQ ID NO: 4113 - DNA, 370 bp, Glycine max
  unsure at all n locations
tcttacaagagactaaganatttctgacngaaaattntgagatgaaatatcttggggaagcctcttttgtattaggaatcaagatactaagagatcactctcaagcatnctaaggttgtcacaagagagtatatcgataaggcctagatagattcggcatgaaagatagtaaaccagtagatacccagatagctaaaggaaacaaatttagtctcaaacaacaccccaataatgaccttgaaagaatagagatgcaaaatatttcttatgcattagcattagaaagtctaatgtacgcttaagtttgcactcgtctcgatatagcatttgtagtaggagttctgggtagatattttgagtatcctggaat

SEQ ID NO: 4114 - DNA, 469 bp, Glycine max
  unsure at all n locations
agctngtatgagctagagagagagagagagagaggcacatgcttgatgctcgtgtgctgagcgtgtgatggattgtgtagaggggttcaatggaacctgtatttatagtaattgaggatgactgttggcctttgtttgtaggggctattgcagcctttctagataattctaggcttctagataatagccaggagcttacatataatgttagagataaacatttacttatagataaaaggtagaagataattgtaccttgtagataatgtgtgagcttatagataattaattatctgctaatagataagatattcaaatacatttgaatattcataagttagagatataacctgtttgttggagagcccgactactaagggtcaatcgtctgtgctcctgtagtagggctaacattgagggtggacacgtgtctttgcgtgtcatatangatgtcacgtgtattntatgg

SEQ ID NO: 4115 - DNA, 427 bp, Glycine max
  unsure at all n locations
gagctgcactngatcccacaagagaaaaagcggtgcaaacaagcatcacaaaggaatcttctttggttctaatgtccctacagcaagtggccaattcaattccaacagacagtagcaacacccccaagatccccactggaaactgccttaaaatgtgtgccaaagaagttcccaacaccaaacccaacaccaatttggcaacaccaagaagtgccacacacccaccactccttccaccaaatttgtattgtcctgcaagtccaccagcaccatggcaacatggcattgcaccaaaccaactaccaaccaaattcatcaaccctacactcactgaaagtgaagtggcagaaaattccctctctgggaacaaatcctttgacaacttgcaaacagctatcactgagtttagaattgacaatgggagctg

SEQ ID NO: 4116 - DNA, 495 bp, Glycine max
  unsure at all n locations
atctcagagtcacctgcggcatgcaagcttctaatatctcccacactnnttggngtgggccattcttggatggccttgattntctcagggtccacttggaccccatttctaccaactacaaaccctaagaaaactatattttctacacaaaaagtacacttctctatatttgcatagagggtgtttttcctaaggactgaaagaacttgtctgagatttcataagtgatcatctaggcttctactgtacactaaaatatcatcaaaataaacaactacaaatctacctatgaaatcccttaagacatgatgcataagcctcataaaggtgcttggtgcattagtgagcccaaaaggcatcactagccattcatacaaaccaaacttggtattgaaagcggttntccactcatcaccctttntcatcctgatttggtgatacctaactttaagatcaatntttgaaaagatattggcaccatgcaactcatcaagc

SEQ ID NO: 4117 - DNA, 464 bp, Glycine max
  unsure at all n locations
ntgacttaagtcatcaagagattataaatatgtgaccatggcatgaatttcatatcatctttctaaaacatctctttcaacaatcaagaaatctatctttcaatcttctctctcaacatcattcaactttttctatagaattttctgattctttttctcttcatctttctaaaagttnttgttcaaaaatttctcttctaagaaaagttctttgttcaaaaacttgtgctattcatctttttcagtctcttctccctttgccaaaagaatgaaggactaaccgcctgagaattcttttatggtacaagttgagggtacatctacttggggattgttatactaagaacaagagagggtacatctcttgtggatcagttcaagtggagggtacatccacttgggttttcaaagagaacaagggagggtacatcccttgtggatctttggcttgtaaaggaatttac

SEQ ID NO: 4118 - DNA, 404 bp, Glycine max
  unsure at all n locations
agcttacacaaacattcattagtccaacacacactcaacaaatagtcatcatccgtccatagtttcaatcaatcatgctcagtatgatgcatgcacctgacctcaactctcaaatgcaatgtgagaccatccccaacgaaatagcctaagtgtgtccacacgactctcttacttaggagaactaggcagtaagtgtcaaggttaccctatcgtgcaatggcaactccccccttcccctccccccccacggtgatcagcctgagtcttaagggagttccaaatcgagtgacatgcactgacccagcttatactatttccatgtcatatgaagnatgaaacaagggcaccatcaatgctctgaccgtggataatataagatattaaaccctctccctctagagatg

SEQ ID NO: 4119 - DNA, 351 bp, Glycine max
acccaacccgggcatactcagtccgagagaacctatgacgttcctaaacaggcgagctctcggcagtcaaccaataaaataacatagcccacgaagcaaggaggcttgagcggcgactagcccgctatatatcttgcgtcgtatatgaaaattagtcgctggcaatcgattaccattcgggggtaatcgattacagggtttaaaaatggagacaccatgataagtagcttctggtaatcgattaccaattgtgtgtaatcaattacacaatgctacctgctactgcgaatcgatttacatatatgtgtaatcgataacacaactgtattagtagacttcactctgcttctc

SEQ ID NO: 4120 - DNA, 470 bp, Glycine max
  unsure at all n locations
agcttgtggttgttgtggagctctatttgaagaacctacataagatntgttagaatgtcctagaaaaaagtgttagtgggaccagaatatgcattattattttgtggtctccagccataaggctaatttgaacatgagccacctctgtagccttgatagtttccttggaagttctattgaggtcttgcttgattctatatataatgggcctcctcttcctattgacaatgctgaatagtggccattctgatggtgaccaccacagaagtcacatcttagaactcgttgaacttgatgagcttggtgtgttttttgtgatccaccttattcatattgttgagggagttaacctatctgcttggttaaggcctctatttgttgagacaagagtttgttctgagccaacattgcatttagagtatcaactccattataccatttctttgaatcggagctctatcatggtgact

SEQ ID NO: 4121 - DNA, 484 bp, Glycine max
  unsure at all n locations
cgacactatgaaactcagcttataagtgcgggtctgggagacgaaggtcaagtggtcgcgatatacgaagatgatgttctgagtacattggatttggtacgaccatgccctcctgatttccagctgggaaattggcgagtggaggaacgccccgcatttacgcaacgagcataatgtaaacctttacggttttaaaagctctatagttgggcctaggatttagagtttttccttttgttaaggctttgtgtcttttgtttttgaatttataatacaaggacctttcttcatctgttcctacgtctctacccattctcattcatttgcatgtttacttctttatttctgaaacggcatatccgatgacgagtcccccgaaggtactaatacctgngacccgcttatcaacttcgagcaagaaacgaatcanacggaagatgaagggaacgaggaagtgggacttcccccagaattagaaaggatg

SEQ ID NO: 4122 - DNA, 459 bp, Glycine max
tgcgcatatatggattcgtccattactttataacagcttatgcatccaaagcgctacacaattgacctggccgaaaatcttttataaaaatattcatcagcgtccaacacatctttttgtccaactcgctaacaaaacttgtggaaatattttatactttcatttaagatttcttcatccaaaaatgaacactcgatataggtcttttctctatgttgttcgaatgctaagggttatttgtgcttacattcttcattgtatgaaccttacactgatattccttttcgtttctttcaaagatgctctaatgtctaaatttcaaacatgaagataaaacaattgtaaatataagcacaacctctgatcacaataaagctacacaacgaggttcacgacaaggagaagaattgaagtgggaagatgcataaatattgtatataccttcagagggtgtctata

SEQ ID NO: 4123 - DNA, 437 bp, Glycine max
  unsure at all n locations
tgtactccattgaatgccccattgtgcttttcgatctgcctcctacttccacaatcctgctcccctcctatcttcctccanatcaaagtccatagagtgctctaacatggagaagcctatttcaagctacatttcacttccttcacttgaaacacgatctttgtcagatctataactacccctgttacaaccacaatggtttaccactagaatggtatcctccacaattcttactaaatgaatcttgtcattgatcattacccttaacgatgaagatatcatctgaagggacgaagtgaacaccataattcaagcatagtctgctctcaagaaattctttgtttcttcatctatgtcaaccaaagctcatattccattgacaatccttgataagtattcttcccccaactaacaagggaatgccatagcactttacc

SEQ ID NO: 4124 - DNA, 358 bp, Glycine max
  unsure at all n locations
agcttagagatgcaataatttaatataatttactgtattgtacttagtatctcatagctaaactaaacaacgtatcgaatcatctaattcattaatgttttattnttgtaatatgtgaaggatcaataaaacataacagacaaggaagaacatttttcacgaacgaatgaaaagaaacacttatgtcatgggatgatcaacttaactaccttagactatgttaatatttgaataacttacgagacatttatgaactattataattctactacttttaaacttattcttgtaataaatgtaagatgaatttaatttgtctatcttatcataaggctctgacatgtttgtttgacttaca

SEQ ID NO: 4125 - DNA, 356 bp, Glycine max
  unsure at all n locations
gtactgaaccgtaccatgagacgtatgtcgtggtttgagatctcctttcttcttttgccacagtgccccgatcctcctagtgtcggcatttgtggaggagacgtgatgcaattctacctcgcaagggcattggatagaaaactcctagtacattgggccagagatgcacgagaaggccctagggttcttatgagccttacggtagatttcgggcccatgggctaagtacgagcccacttatctttgaaatattagattaaggtttcattatttttgggccttggatttagggctccataacgtacatagggtaccctaanatataggatttttcagcccttagattgtaggacatc

SEQ ID NO: 4126 - DNA, 395 bp, Glycine max
agcttgagttgaaatccaccaatgatggaagatcaggtttcagtttttcatcatatgagttacaatagattgtgacatttagtatgtcaagattcatcatctaattgttagtattgtatatgaatgggaacatgtggaaaattcgagtttattgctgtcagaatcaaagcagggagaataagtttgttaaaaaaacaaaaatagtgctatttagtgacccacttatatttatgttgtgactagtgaccacttactagtgacttcagggttgattacatgacttactggttttcttggagtttcaaaaattatactaatatgtagagctggcaaaatgacctgacccgatgggttgggctgggccagaaggctgcacatagggtcatgatgggctc

SEQ ID NO: 4127 - DNA, 436 bp, Glycine max
  unsure at all n locations
tattattttatattgattgtaactgtaattagtactcatcaactttntacttggactaaaaaattattctctctatttaacaccagtccatcacaaagagtaaacatacattnttatctaattaaaaaaatgattaaatatgtttttttatatctaaaagatatattatttttaagttaatacatacttttggtcaattattaattattaaatacctgaaaaaaatttattttaacataggacctgtattactcttactctgttattccgatgttccgtagctatttcttaatcataatcgntcatcctctttgcaacccagcttctaccctttcgttcctctntgcaatccagcttctaccctttctttgatacagcgacctcgttgaanacctatattacatgaggctatgaagcacggatacccaagtctctt

SEQ ID NO: 4128 - DNA, 434 bp, Glycine max
  unsure at all n locations
agcttntanaaaanatgactactttcntatagttaaagcaactcgtatcttccaattaccactaaataatccaatctttttacctaataaaagaaagaattaattacaaggatatgttgtatgatacaactaggcaacaaagaaagataaattgtgttcatctaacaaattacaacaataggtggtccagtgatcaagagtaaatttcagaatgacaactaacggaactaaaatgacattcttttacaactaataatgagctttcaatgccaaagttatagcctataaattcaacataatctatataacatttataaacattattagaaagaaccaaacacaagtatgtaagacccaagattcacagaattgatgcaatatgaaagggatggccacaccttttttaagagaacactccatgctctttgattcaa

SEQ ID NO: 4129 - DNA, 443 bp, Glycine max
tgtgcgaagatccatgtataaattgcagcttttggtgtcaatccatggttatatgtattcaagacatcctactatacataccacaagtataaaaggagggccacccaggacccacttcagggtggatcctctcttgaacccggaaaaaaaggatgactcatgagccctcactaggcagggataatgaataatgaaattgatagcacaaaaagatattttacatcaataaaacatgctacattaataaacatttgaagaacccaacgaacccctcgaaggatatcaattacacccaagaagattttagagacgccagacaaggaagcagtatttcaccattgatgaattgtaacttcaatcaaaacaaatatgctattagggaggtaatgaaacagggttgtggtcccctccgaatagaatcgttgaaccaattaccttgaagt

SEQ ID NO: 4130 - DNA, 439 bp, Glycine max
  unsure at all n locations
agcttgtcgtgccatccncgtttcaacctatacctattccgggctcatatccgtccctcaacataacccgagccaccatcatagcgacaccagataagcgtggctacaccagaggagatttcacataagcactactctcaatttccagtgcttggaatgatgttttcaatgactcctctgcagcctcaacatacgacatagaagacaaacaacttaccaatatgtcttcctcccccgatactataaccagatgcccttccactacaaactntaatttctggtgcagcgttgacgggaccaccccaaccgagtggatccaaggccggtctaacaagcaactgtaggcagggcttatgtccattatttggaaggttatttgacacacgtggcgcttatggatgtgaataagtgtgtggttaacacttgatatgacaactac

SEQ ID NO: 4131 - DNA, 410 bp, Glycine max
  unsure at all n locations
tctcccccaattttctataaataggcggagaagtgaagtgaataaaggttgatccccttaggctcttctctctctttcgaatttgcttggaaaaattgtttccgtgaagaanatccaagccgaggcgcttccgaaacgtttccgtaaggaatctcgcgaaggtttcgaccgttcttcgacggtcttcattcgttcttcatcgttcttcgatcttcaacgggtaagtacctcgaaccaagctttttttattcattctatgtacccgtggtggtccacattgtgtttcgtgtatttatattctcgtttcgtttactttttatacccccttttgacgtgcttaagccattttatttaagtcatttctcgcttacacctataataaaataaatttccaccgattcgttgaattg

SEQ ID NO: 4132 - DNA, 375 bp, Glycine max
agctttattgcctaacaggccaacttacaatatctagccccaagagacttatcataaggatgcacaggccatagtggagtatgtgaaaagattgtatgaccaagtgaaggtgcgaattgctaagaagaatgaaagctatgccaagcatgccaacaagaaaaggaaggaagtggtacttgaacccggtgatgatcctggacatttgagggcaaatgttatccaagaaggaaggaatgatgagaatcctgaaattggccaaatgcatgctaaaggcccaagtggagaagggcaaaggcccaagtggagaacgacaaagcccccgagtggagaaagatgaacgcccatagacaaaggctctaccaagactattaatta

SEQ ID NO: 4133 - DNA, 448 bp, Glycine max
  unsure at all n locations
tanaagaatacttaattaaacaacttaagagtgaagtagaaacacttggtttatactggttcactcaaatagagctacatcccagttctcctttacataattgtaaagggttccactaatcaaaactttgattacaaacaagtattcaatcctgccactcctgattgtacaagtattctctatgccactcttgttacacccttagactccccctgaatctaagaacacccaagtattgtttaactctaagccactcctagatttcacaaacaaaagtttgaatgaatacaatgattcaataacactcatagaattcataaatagttaagctaaaaggtcaagttcaattaacaactcattagttcatgaacaatntatacttttgtaaacatcaaaatccaaggtatgataaacaatataaattntgactaagataaaacataatcat

SEQ ID NO: 4134 - DNA, 265 bp, Glycine max
  unsure at all n locations
agcttncacaacatctaagcaattctacatcctacacatcatgaactatcaaaaccaaggaaaacaaggcagaggcggaaaactcagcccaacacaaaccaatatcacaagttttctcacttaaagaccccagtaacatttccttcgttccaatatgttcaccgatggatcgactcgaagactactggaagtccctagtgcataagtctacatcttgaccattgggatctactaaaagatttccagaaccccatctgtactactt

SEQ ID NO: 4135 - DNA, 269 bp, Glycine max
agcttctaataatgaaagttataatattgaaccatgaactctgcttgcacgaatttggttcggagaacaagaagagaaagacaaataacactggcttaacgtagcgcgtgcttctgttggatcgcgggcttaacgcgcgtgttgcaagcttagcgcgttcttatgttggatggcaggcttatcgcgcgcttctggtggatcgcgggcttagtgcgtgacgcgcgctcacctatctttgcaaataataaaacggcagtatcataattaaa

SEQ ID NO: 4136 - DNA, 427 bp, Glycine max
  unsure at all n locations
tctcccncaattntctataaatagggggagaagtgaagtgaaaaagggttcagccccttatgcacttctctctctttcgaatttgcttgganacaatgtttccgtgaagaaaatctaagccaaggcactttcgaaaccgttccgtaacgtttccatgaggaatttcgcgaaggttttcgaccgttcttcgacgttcttcattcgttcttcgatcttcaacgggtaagtacctcgaaccaagcttctcgattcattctatgtacccgtggtggtccacattgtgtttcgtgtatttntattttcgtttcatttactctttatacccncttttgacgtgcttaagccattttatataagtcatttctcgcttaacctanaaataaaataaatttccaccgatcgttcgaattgtattatccgttaactt

SEQ ID NO: 4137 - DNA, 474 bp, Glycine max
  unsure at all n locations
agcttgagctgactctatcttggatcattnttatcaggggttatattggcaacttggcataataatatgcatggaattatgttttggctgatggccatgccaaatatttgcccaccttttatctgtaaaaagtttgttatctcttattctatcgtatgagtacatggaaatttatagaagtttagtgattcagtccttttattaaattttcttttgctactcttgaacaaaatatatgtcattatcaaattggtacaaggtagccaaaagatcctaccttggattggattagaaaggcagagggaacacttaagttgtgtaataatatggacagtatgttcctgtctaaaatacaaaattatatccatacataattntttgtgcataactgcatataacataaataagaattgtactaacatttagttaaacatacactgaaagaggataaggtcacactcacatatgacttat

SEQ ID NO: 4138 - DNA, 392 bp, Glycine max
tgttgaacctctcccattactcatataatgtctctccaagttgttgccttattgatgcaagctccattggagcttgtaggcctaggatcttcttcatcaatggattcctttgcttcttggaagatgaatggcagtggaatgaagaaggaagagagagaggagacgccacttcaaggagaagatgagtctagaagaagctcaccaccatatgaggccatggataaaagcttggaggaagaaagagatgaatgaagggagagggagagaagagcacgaaattttgtgctccaaatgagctctgaaatctgaagtttaatattcaaatgatcaaagttgaaaaaaatgcacacacatgacctctatttatagcctaagtgtcacacaaaattgga

SEQ ID NO: 4139 - DNA, 168 bp, Glycine max
ggtgagagtgagatcttacagtgtgagtgaacgactctctgtgagcaataatctttgcatgaatctctgaatcgtagaccgaaacgttagatgaggacaagattacggctatgaatgtgcatacacaagggttatgccctctttgcttacctatgaaaacatgtggat

SEQ ID NO: 4140 - DNA, 406 bp, Glycine max
  unsure at all n locations
aatgtcaaagaactgggtgttgaaaaagcataacaagactttctgtgattggtttaaagatacaatctttgcatgtgagaatgcttcagaaacattaagaaagctagcagataggcctaaaagaaatgttataacttggcaaggatacgacataaacaagtattcattttacacaaaagcacaagatgagaaaagtacaatgcagaacagcggagtcaccctaagggctgaatctcaacacttcgcaagtgtgaatgacaccaatccctgtgtagcttccatcccttactttgggttcattgatgaaatttgngagcttaactatgtgaaatttactgtatgtattttcaaatgtaaatgggttgatagcaacaccggtgcgcacaccgatgatatangatttaca

SEQ ID NO: 4141 - DNA, 472 bp, Glycine max
  unsure at all n locations
agcttaacatcagaccacttccagggtgctggaactacttcacatggatttgatggggcctatgcaggttgaaagccttggaggaaagaggtatgcctatgttgttgtggatgatttctccagatttacctgggtcaactttatcagagagaaatcagaaacctttgaagcattcaaagaattgagtctaagacttcaaagagaaaaggactgtgtcatcaagagaatcaggagtgaccatggcagagaatttgaaaacagcaggttcactgaattctgcacatctgaaggcatcacccatgagttctctgcagccattacaccacaacagaatggcatagttgaaaggaaaaacaggactntgcaagaggctgctagggtcatgcttcatgccaaagaacttccctataatctctgggctgaagccatgaacacagcatgctacatccacaacagagtcacacttagaaga

SEQ ID NO: 4142 - DNA, 465 bp, Glycine max
  unsure at all n locations
tctgatagctggttgtaatcgattaagacaacactgtagtcgattaaaacaaagtttttgcctctgaagaaacttttctaacttagaaatgtttcttcacactaaccatgatgatgcatgatgcaatacagatattaaatttactaagacacaataaccaaggtaacaaccaatataaatgccactcaaggaagtggggcatgtaaaagccaaaaacttcgtcaaaacttcttcaagcttttccttgagctttaagctttagcctttaggttgttcaccatgttgctcatgttgcttatctcatgttgctccccctatctctaacatatagtagtttttcattntgacaattataataccaattctctaaatagctaatgaagtaatatcaaagctatactacacactntntgataaatgtcattcttctgaaattntaatgggttgtagtcggagattatacta

SEQ ID NO: 4143 - DNA, 467 bp, Glycine max
  unsure at all n locations
tagcttgacgagagggtggtttcatatactcatgctntgaaagatattggcgtggattatggagtcactttcatgacatatgaagtcagtgtggatgtgcatgatgagctgtccggcatgcagaacacgcgcgatgaagattacaatgaaaagaaacaacttccttcacgctcaaagccagaggcagatacagttgcaccatagcatagacctaaagaacaagaaccacatggttttcatgccaaacaagctcaacccactgcgacagctacgtggattccttctaataagggctcttatcacgattcaatgcacgtctcatatccaccatcaagaaataataattcaccagctaacctttcagatgttacctcatcaaaggagagaattactgatgccaaaggaaaagctatttctggntcttatgtctctgaagcaattgcttccatggacatgagaaatgacct

SEQ ID NO: 4144 - DNA, 476 bp, Glycine max
tataacactaagctggacgtcctgctaaataaaattaatctgatgcggtcaacattacttcacatgtagaaagtaatttcaaaaacacacatagctataaaaaataattgaattacgaataatgtatttctaagtaatcatgtaagtgttagttgtcacatcctccctgctgtagcctataaagactaattcttagtaattgtgaaagtaattaaaaactcttaaaaaatcctatggtaattagatacgcattttctagttgtagctgactaacaggtaagttacaaatattactaattatgatttgaagcatcccatgttctggtttgaatttggtttatccctagtttaacttctcatcttgctcttaagagaagtggaaagtctttactaagaatcgtatacatgcactcccaccatggcttcaatgtatccccaacatgaattctaataacaaccttatattattgattaac

SEQ ID NO: 4145 - DNA, 460 bp, Glycine max
  unsure at all n locations
agcttagacacatttagcagacaaggatgtccaccaataaatataattgccaggaacatttaacttacttgatttcttgtaagtgtcaccagcattgcttcttgaagaggacaacactggatcagcgactgatgtttgcgaggctagagatcgaattacactacaattcctctagctagtgcagttacttcttctcgttgacaagccattactgctgataaaatccctagacaccaatcttactaaattgttttgatgctcttggtgatgatttacattattcagataagaacgggactgcaaagtaccaatagcctgttaatatacttcagcagccatggatgaagaaacattatcatagaggatgaagatacatcttacattttggatcccaggaatatcaacaggttggattccagctaatcctttcgtgagtaatgcttnnaaaataacaaatatg

SEQ ID NO: 4146 - DNA, 447 bp, Glycine max
  unsure at all n locations
agctcataaatgtcttttctgtgattaactccatcaagttgtgattgataaatgttttacttattaaaagtaattntctagtctccatagtatacacttttaaattttagtccttacggaaacatctcaattttaatccttcaaaaataagacttttcacttttggttcgtggtgtttgactttaatcctaagaaaaatcttcagcagccaaattttctgtagccacagaggatctgcgttcctttaatcttagtaattntatattgaattagtccttctaatattntaattgaaaaataatatttttcactactatntaacttcatttcttaatcgtattgacattctagtttaattcaaaaactgattctaattctcaataactgacaaaaatatagtggtgagaatatcggcttttggatgtanataaatagtcactattatga

SEQ ID NO: 4147 - DNA, 200 bp, Glycine max
agcttcgtgcattgcacacacactattaagagtgcaagaccattaacagtcacaattgacactaaacgtaaggagctcgacatgaatatatacctttgtgataatgacttttttattaaatttgtctatgaacaaacagaatttggaccgatttacattccacaagcaatattaataaccacgtcgcgcgattgtgacgg

SEQ ID NO: 4148 - DNA, 442 bp, Glycine max
  unsure at all n locations
agtctattacttntaatcaggatttctttgggaatattttggaggacaagaaaagattgaaaataggcttaaaggtgtttaaagatctccggaaaggatcgattctacaagattagtttatcttgaanagcaactccaaagagattatgaccaaactttgtttcaagaattgctccactatcagaaatcttgagaaaattgcgttaaacttggagatattaataccaagttcttccatgcctaaactgttgttaaaagaatgaagaacaaaatacatggtttgttccctcccagaggcaaatggtgtttagatgattagattttaaagtttgaagcttagaggtactttcaagctcacttttaaattctcctgtgcaggtgtgttctaaccttanttctgttaataacaatcccaaataaaataggggagaatgaaatttgg

SEQ ID NO: 4149 - DNA, 451 bp, Glycine max
  unsure at all n locations
atgcgagacggagaccaacatgctagctatcatcgccaagtaccaagaagagttaggtctagccgcggcccacgagcatatgattgcggacgaatatacgcggaaaaagaggctagaggaagggtgatcgactctntacaccaagaggcaaccatgtggatggatcggtttgctcttaccttgaacgggagtcaagaacttccccgattgttagccaaggccaaggcgatggcagacacctactccgcccccgaagagattcatgggcttctcggctattgtcagcatatgatagacttaatggcccacataattagaaatcgttaggaaacttgtatggtctctcagaccttgactagatacgacttcctttttgaaataaaatgagttggtcccatgtttctactccaaaaagcttgtgcaaatcaagtcacttccgcattttatctct

SEQ ID NO: 4150 - DNA, 410 bp, Glycine max
  unsure at all n locations
ttgagccanaatcctgactcaccatanaccttgacccagggtgagaatgtcaatccttaccctcggaagcggaaagaatagaagggaaatttccaatcaaagaacaggaaagaaggaagatttccaatcaaagagaaagcaaaaaaagaaaagaaggaaaattccccaatcaaagagtgggagaaagcaaaaagaaaagatagaaaattcccaatcaaagaatgggagaaagtaaaaaaggaagaagaagaaggaaagacagctcctgatcagggatcgaaggaaaacagaagaaatgtgcagaaaggtctttgaaccggacaatatctgaacaatacagaattgtcaccaaatgaacaaaaagaaggaaaggaaaccacgacctanaatggtcttctccctttgattac

SEQ ID NO: 4151 - DNA, 455 bp, Glycine max
  unsure at all n locations
agctntgnngaattcagattattggttcatgacaacttcaaagcaaataatcccataaatttcagttgatttcaaaagatgacaaattaagttactcaaagatggcgacagaaatccctccccattacttttcttgcccttcacatgctggaaaccgagacaagaataagattaacaacaaaatcagagccaataattctgtctacattgagaatgttgtcagttaaaagctttcattggcaacaaaattacaaggttggatacgaaattattttggcaaggcacaccatatgccaagttctttacacaaaaagttntagttgaatttccaaagattgtacataaatggctaaacaaaaagtcatcatagaatgtaatatatgagtctaacaaggtaatgttagtaccatttctttacatgagaagactacttcagcaatctgtaaacnaaacat

SEQ ID NO: 4152 - DNA, 411 bp, Glycine max
  unsure at all n locations
tgtcattcgaatggaacccccaaggtcaaactctaaactntccaaccattttccttcttcctcctttctagttnttttatttttttttttatttttttatgcagctgaatagtgtgcttcatgttatgtttttgcagagttgctgtggataacatttcaagcggaacagacactgtcataaaggttccaaattcacctttcgttggctttgtcttttctgcattgccaaagggtcctttttctctttgtgtgaccaattttccgtgtgtgttgttgcaggttgatagcgcgaacaagcgtgggagcttgttggaggtggttcangttctcactgatatgaatctcagtgttagaagagcttatatttcctctgatggagaatggttcatggatggtacggatcccttcacg

SEQ ID NO: 4153 - DNA, 399 bp, Glycine max
  unsure at all n locations
agcttggaagaatatttcatgattctatagaagtcaaaaatgttaattattgtggtttaaaaaaatgattatgttcaaacttattagaataaattaaaacattccgcataagctacttaaattaagctaagctcaaataaattaacattctttcatagcctctttcattntagttccataagttctaccaaacttatattctcttttccttttctatcttttcttatattatactttatttcttctattaaattattattatttttggccgagacaaaggcagcgcttgagaaaaaaaattggaagatcaaaataattaaaattataatatataaattaaatgtaattattatgataatatcgtctcttatgagtgattttaagcatctcagctatttc

SEQ ID NO: 4154 - DNA, 453 bp, Glycine max
  unsure at all n locations
tcacctttaggtcctcctcatagttgttgcatgagaaaacatgctctattttcatctcccactccaagtaggcctccggatcattctttcctttaaatggaggaatgttgagtttaataccatcaatttggttttgtctaggaacaccatcattccctcttctcctcctttcttcttcattatgatctctattctccatttgatccaacctctcatggagcgcatcatctcgttgtttcattaacctctccaaatgttgcatcgaagcttgcatttggaattgcgaaagccccactccatcattaggattagtacctgacatctcaaacaaacaaatcaaatgtaacaagacaattatagttgttggttgaatacctcacccactcaagtgtatcacacaattatggctcttctctaatgaaacactcttgccttntaccactctaattcccc

SEQ ID NO: 4155 - DNA, 148 bp, Glycine max
cgcttgaaactcaacgaatagcttgattaacttgtttgaagaaattgtggctgttacatgccccactccctggagtgacaattgtattgcttgctattttggatgatgcatcatagtacatattgatatctcgagcagcattgctcat

SEQ ID NO: 4156 - DNA, 468 bp, Glycine max
atactcaagcttcttgagatgcctttcggtaatctcccaaatatgatgaaattttcaaactagacacaattaagagagtgtctctcttggttcttatgtgaaaccttaggttcttatcaaagaattctattctttgtagcgaatcatcctcaacttatcaatctcccaagattgtggcgttgctcttttcatcaccttctctaactccgttttttccctttcttttccccaaaagagccccaaattggttccacggtttgctgatgctaaaaattggatccgcaaatcacggttccatcacattgcgtgtgccaattttgttgttgtgagaaatcttaatgcttaactaaaatgaatttagctataattgctctaacacaattctaaaatttgaaaagtgactcaaggatttagttgtcaagacggaaaatccgcatcttgacttgagtgtggactctcaagttacta

SEQ ID NO: 4157 - DNA, 333 bp, Glycine max
  unsure at all n locations
agcttcttatncaatgcactctcttggcggtaaagcttctccttccatggcttattctctaatggatggcacctcttctcatggctgaaaatcaccattgaaggatctcattgaagctcatagatccaacttttatagaagctttctcagctagcttccatcaagcgtaccttgcgatttgtagatgtgagtaccaagggtagaccttgtgtctgttataaacctatattcctacacaagataaagttaagaataggaaatattgccaatggtacaccttgcgtaccttgagttcctgtggaggtggaactttagtaatatgaggctttcacc

SEQ ID NO: 4158 - DNA, 408 bp, Glycine max
  unsure at all n locations
tcctcggngccatttcctgcgaagggcaaacattggaaagttagttntaccagtgggacactactcttaaaacaaaaatgacatacaacctcctcccataaatacaaacatcaatgtaaatttagagcaagcttatgcgcatatttccctacgaacgttcacttgcacaagacatcctattaactaagaaaaatgcacccatatacaatcaaggtagcttcattacctagattatttacatgtacttccaaggtgtatttggtatttacatcacacacgcctccttggctaaatttacatacatgcatactcaaagcatttcggngtaccaaaaattgcacatgcgctcatcttggtatttctaatacctatacatatacaaacttcatgatgaatcttgactaccta

SEQ ID NO: 4159 - DNA, 380 bp, Glycine max
  unsure at all n locations
agcttgagatgaggaagtgtaaaanggtgaacttcctgcttttattcgttgaccacagagtggtacctggagatatgtcgcgggggtcaggagaccttgngaacgtcaggtggggtgctattgcccaaaaccaagcttgaccaatcccgacccaacccgggcatagtcggtcagtgagaacctgtgatgtacctaaacaggcgagctcctggcagtcaacagataaaaggaacaaaaaccacaaagcaaggaggcttgtggtggctggccagctgtgaattttgtgtgatatatgggttgtggcctctggtaatcgattaccaagggtgggtaatcgattacaacgcttaaaaatgaagacaggaggctaagatggtctc

SEQ ID NO: 4160 - DNA, 422 bp, Glycine max
  unsure at all n locations
tgcctaattaacctganattgagagnaaatgattattaaacacacaaaataaaaatactaagtatttattacctatacttaacagaaaatacttataaccttacaaaataaccataaattgggagagtttgatacaatttatataagttttatacacaaaagttagtcattttcaccaactaacagttgccccaaatttacagttttgcttgtcctcaagcaaaaagagaacaactcacttgtcctcaagtgacaatgacatgcagtgattatgtacgaaggtgtatgctacaaagtgactaattgcatgataagagaatggagtaaaatgccctcaacacttgtctttcacaacagttatctatagacaagaatanaatgtaacctggacagatagatgaagntaggcataagacagatat

SEQ ID NO: 4161 - DNA, 475 bp, Glycine max
  unsure at all n locations
agctntagcaacaacatgctcatctccaatgactaaagccacgacctctccaacgatggaagagaatgtagcattcaaaaatctgcaattggatgagttgatggaaatgctcagacaataaaagatagtggtcaaggagcaacacaaattgattgcagatttgtgaacgggaaaagaagatatgtagaacaaacatttgaaagctatcaaatatgaagtagattcgaaggcaaagaanaagcatagcaaaaataagatgagcaagttgaaatcacaaattccattgaagtctatgaaaatagagtctccaatcactgtcatcacgaaagtagaaggagaagtggattatgatgaaatcattcctttcaatatgccattctccaagcgcttaataaaaatttaggttccaaaacaattatggcaacttccgacagtggatttgtacaatggatctactaatccgaacgattattta

SEQ ID NO: 4162 - DNA, 463 bp, Glycine max
  unsure at all n locations
tccatcaagtggtaatcagagcacaagagcttcaagtaggtgctcctntaaacctccattaatttttttctttaccttctcttccattgttgtttcttcatttttctccatgtatctcctcacatgtcttgttctaaatattgttaacatgattctttagagtttccaccgattaaacttgctatagaagttagatttgattttctatggttcaaatttcttgttcttagttcttgaaccatgaattgtgttgagtttaggttcctttgagttttgtcttgttattttttgtggctgaaacctaaaccataaaattcttacaaaaatattaaagtagaagaaaacctcaaaaatctagagtgacttgttcacctattgtagttttgtcatagaagtcatgtctagtcatgaaacttgtcacataagatttcttatgttgtgctgagatttattttcttggttc

SEQ ID NO: 4163 - DNA, 478 bp, Glycine max
  unsure at all n locations
tgcagcttggcaattaccatgattacagttggaggatataaaggtttctcttcatcaaagaagttgacacttgcattacacctctgcacagcagcttgaccaatgatgacctgcataaatgatcagccttagcccctaccacaacaacaacttgaaggccacaaggcaattaacacagaaatcttattcttacattaataagaaaaatgttactatcaatccactctctaacaccatgttgaacgtactttttttattggttcaaaccgaataaattttataaatctcgcatcatgattctctctcttaatttgtaggttttaataaattttaaataatcatgttcctaacagtcctgcagtaatactataaaggttaaccatcaagctagctcataagcctgtcaaacatcaacaaaggaaattggaactactatggtttattgtatgtaccaatctctacgaagaanaactataca

SEQ ID NO: 4164 - DNA, 470 bp, Glycine max
  unsure at all n locations
tctcatccatctcccaagatggtccattgaagaaaanaatgaagggaaagaacaacaaaaatgaagacaaagggagtattgtcaatctgtttctcggattcaagagtttgttattggcaagtattgacttttaaactaaggaaaaaactatttttcttctgtgttctataaatgactgacaacatcatgagaaaatacaagattattagattatacaccactcaagatgcttatgactcatgcctgttattttagagctacacttaaaaacacaactatttgcagtttaccaagtaacatgtgtgtgtaattaagagttgaaacttacaacagcaactacttgttcttcttctggaagatcttcaacaaaaacagctcccttctcaggagtcttcacaacttcatcagctgtacccatcatcattagctnttgaccctgganaagaagattatgtagatcaattaaatga

SEQ ID NO: 4165 - DNA, 471 bp, Glycine max
  unsure at all n locations
agcttgaaccttgagtcttgattcttgaaatcaaatttcctcttgaaccttgaagtgttcttaattcaatcttgaacatcttgaacatcttgattcaatcttgaacatcttgaacatattgaactcattctttgattatcatgaattgacctttgagctttttgtcatcacctttgttatcatcaaaacatctttgaatcaatcttgattcatcatgaagctttgcttctacacatacttagtaggatcaaaagttattgtttatactgaccatgaacccattaagtacctgttgaataaagctgattccaagcccagattaatcagatgaatcttgttgctttaagaatttgatctggttatccaagacaagaaaggatctgaaaatcttgtagctgatcacttatcaaggttagtcaatgaggaggtgactttgaaagagctatagataanggatgaatntcctgatga

SEQ ID NO: 4166 - DNA, 464 bp, Glycine max
  unsure at all n locations
tagcaacagccnncnnaacccaattttgtcgaaaccaagtgtcatgatttctatattaccaattttgctagctgttgatgttgcatcatagttttgctatgtcatctacctttggtctcatctctttaccttacaattcaggcaattctatcattaccctttttcaatatatagaattggcaacatgcaaacatatctaatccaggaaattccaccactaatagtcagcctataatccataaccaatgaagtcccccatctccaatttattccatcttctaattttattgtagtttctgcagatttaaaataagcgtttggttcttcgttttaacataaatctattgtttagtttataattcacccaattctgcctttagtcattttcaacatgcagaactatcaacatgcaaagagatctgattatacaaaagccaggatcaacagaaaacgtattatgcaac

SEQ ID NO: 4167 - DNA, 456 bp, Glycine max
  unsure at all n locations
agctntggagtttccaagtgccaattcgtcctcttctttagtccagtcttcttctggcttcaattcatcagtgggctttccttctgtgtccagcatcttgngatgttcccagcctatgatgacagctttccaggttctgctatccactgatttgaggaaggccaccattcttgctttccagtattcatagttgcttccatcaagaattggtggtctgttcactggtcctccttctttctccatgttcatcagaatttatctccccagatctcactctgtgatttcgagtgtttgctctgataccaattgaaattctgataccacgggacagatgtcgtacaggatgtcacgacatcacgcttcataacatgcagattgtatgtgtccgtatgaacagactacacaagtnaataacacaagagaattgtaacccagtcggtgcacctcacctacatt

SEQ ID NO: 4168 - DNA, 452 bp, Glycine max
  unsure at all n locations
tgtaatcgattacacatatactgtaatcgattaccagagcagattntcagaaaatattctcaacagtcacatcttttatgtggttcttgaatggctatcaaaggcctatatatatgtgacttaagacacgaatttgctaagagtttttcagaacaaaaaggtcttatcctcttaaaaagcaaatcgttttatcctcttacaaattccttggccaaattacttgtgattcaataaggaattatttgagtactcaaattgttcaatctatctctttcaagagagatttcttcttctcttcttcttcattctgaaaagggattaagagaccgagggtctcttgttgtgaaagaattctaaacacaaaggaagggttgtccttgtgtgtttagaacttgtaaaaggaatttacaagatagtggaactctcaagcgggttgcttggggactggacgt

SEQ ID NO: 4169 - DNA, 463 bp, Glycine max
  unsure at all n locations
agcttgtatcttcatgccaaatactttcctccaactntcctttatatagttggattgtgcagaaaaaggcaaaaaaaagaaaagtagcgttaaacttttgcttttaataaatatttttaatttaataaaattttaaaatacaaagtgacaaattatcataaatttaatcttgcaatattttatgtttctttaataaatgttnttatatataattctgttcatataaaaataaagaaatcgttctttaatttattcattccatttcaaaattatactctcaatcaaaattttggagaaataatattaatattttatttttaatttattttcttgaaaaatctcaattactaattaaatttatcaaaattcatataattatatatacaatttataaaaataaaaaatatgttaggaagttccacatcatatgcctcagttcttgagggtacagtttatatatcta

SEQ ID NO: 4170 - DNA, 148 bp, Glycine max
gcttgctgctcgagccatcaaatgtgttttccttggatattctatattacaaaaaggttaccgatgctactctcctattcacaatcgctattatatctctgcagacgcaacattttttgaacgaaaaccataccttgctcccttcatg

SEQ ID NO: 4171 - DNA, 393 bp, Glycine max
  unsure at all n locations
agcttatgcatgganaatgtaattatgaaattgagatgcccgaagaaacaccatttcctagttaaccatgcattatgtaccatgttcaattattttgtttttaagtgaaacgggtttatgatcccaacatggttggctcctaacacatgaaactaagaatgtagcgtgaagtttcacgcttcccccttctttgtttttgttttgtagaggaaaacgcaaggatgagcatacatgataacaaatggtatgcgattctgcagatcaaaaagtttgctgaacgcatatgcatgatgatgccatgactcatgcaaaatgtgaggctggaatatgataacggactaatgcaggatatgttcattatgatgttatgaacagatgcttatgcgatgatat

SEQ ID NO: 4172 - DNA, 455 bp, Glycine max
  unsure at all n locations
ntgcacgtatcagtcaagtgtatggaccatatcgtagccaaagtgctcatcgataatggttccagtttaaacgtgatgcctaagagcactttggagaaattaccattcaatgcctcccacttaaagccgagttcaatggtggttcgtgccttcgacgacacccgccgagaggttaggggagagatcgatctcccagtacagataggccctcacacctgtcaagttactttccaaataatggatattaaccccccctacagctgtctgttggggcgctcgtggatccactcagtgggagttgttccctctacactccaccaaaagttgaaattcgtagtggaagggcatctggtcatcgtatcaggcgaggaagacatcttggtgagctgcccatcctctatgccttatgtggaagccgcanaggagtcattagaaaccgctttccagtcttttga

SEQ ID NO: 4173 - DNA, 469 bp, Glycine max
  unsure at all n locations
agctggcttgtggngcttctacggaggctggatcttgagcttcaatgaggtcctttaatggtgattntccaccatggagatgcagcggaagacaaatgagaagaggtgagaggaggcgccatccactatggaataagccatggaagaaagagcttcaccaccaagatgagccttggataagaagcttggagaggatgcttcaatggaggaaaagaaagagggagagaaagagagaggggggagcatgaaattgaaggaataaaagagggagagaagtggaaatttgaagtatgtctcacaagactctcattcatcaaagntacaacaagtgtcacacatgcttctatttatagactaggtagcttccttgagaagctttcttgagaaaactttcttgagaagcttctttgagagaacttcctcgagaagctagagcttagctacacaccccatataatagctaacctca

SEQ ID NO: 4174 - DNA, 444 bp, Glycine max
  unsure at all n locations
tctagcaacttgttgattgacattaatttcaatccacagatcagagaaggaataagaacatgaacagaaagaagcttgcagggattctagcaggacttattgcattcgttataggactaacaattcttgtgtgggccacttcctcatttataaaaaggatgaatctaggcaagccaggtgaaaatttataagtgaacttttaatgatatactcttgatagttttatattctaatgaatacataattatattgacataaaagaagtattcttcaattctgaagtttattttctatttcatgtatatccctctaaatagttaacattataacctccaatatattaattatgagaaattcatgtctcccacaaaatcagaaattataaaaaagctaattcactggaagcacatganagagatggaagagaatgacatacaaacaata

SEQ ID NO: 4175 - DNA, 416 bp, Glycine max
agcttgatacacgcagagactaacgtcgtcttttgcggccttcgtcaatcgcggccgacaagcccgttgacacgcagagatttatgtcatcttccgcgcttacaagatctgtcatactgagctttgagtcacgctgacgggcggaaatacccgagtggctatccgtataaactttttgttgtatgtaagacgaaaagcctggtagcacgcagagactaacgtcgtcttcggcgcccttagtcaatcgcggccgacaagcccgtttacacgcggagatttacgtcatcttccatgctcacaagatctgtcatactgacttttgagtcacgctgacgggcggaaatacccgagtgtgtatacgtataaactttttgctgtctgtaagacgaagagcctgatagcacgcagagactaac

SEQ ID NO: 4176 - DNA, 410 bp, Glycine max
  unsure at all n locations
nttcgtctaacagaatgcaacaagtttatacggataaccactcgggtatttccgcccgtcaacgtgactcanaagtcagtatgacagatcttgtgagcgcggaagataacgtaaatctccacgtgtcaacgggcttgtcagccgcgattgacgataggcgcataagacgacgttagtctctgcatgctatcaggctcttcgtcatacagacaagcaaaaagttatacggataaccactcgggtatttccgcccgtcagcgtgactcanaagtcagtatgacagatcttgtgagcgcggaagatgacgtaaatctccgcatgtcaacgggcttgtcggccgcgattgacgaaaggcgcagaagacgacgttagtctctgcgtgctatcangcttttcgacttacagacagc

SEQ ID NO: 4177 - DNA, 437 bp, Glycine max
agcttaagaacatgacaccaaaagtaaattcattaacttcaaaagattgaaagaagtgactgcagaatccaacatttaaaaataaataaataactgattgtgagataacaatttttgatcttttcaaaggtagatgctaccagcacgctataaagaggcatattgaagcccgtcatctagatttcatttcctaaattataaaattttcaattatttaaaaaaaaaggaaagaaagaccaaagactgcataagaaagaatcataaagacataaagaagtacattttcaaaaggactgtcaccttgtagacatcctccaaccctttgtcatttccttcaatgataaatgtttgaacaggaattcttccacgaggtaagtcggttatctgtgatgcaaggcaaagttgaaagcatttgcaaaagaaaatgatttcacaca

SEQ ID NO: 4178 - DNA, 431 bp, Glycine max
  unsure at all n locations
tcatgatgatgaatcaagttgattcaagaagttntgataatgacaaagatgttgacaaaaagcccaaagaatgatttcaagattaaatcaagaacaaattcaagaatcaagagaagtttgatttcaagattcaagaaaagatgaattcaagttccaagagaagaaatcaagaagacttcacaagggaagtattgaaaagattttttcagaaaacaaacatagcatagttttgtttttcaaaagagtttttactctccagtaatcgattaccagtttcctgtaatcaattactagtggcaaagtttgatttcaaaatggtgtaatcgattacaagatattggtaattgattaccagtgcatctgaacgttggaattcaaattcaattgtgaagagttacatcctttcataaaaagctttgtgtaatcgatta

SEQ ID NO: 4179 - DNA, 415 bp, Glycine max
  unsure at all n locations
agcttgcctcccagctcgcccaggcgagcaaggttgcttcctccaaaagcaacaaccttctggaggaatcttctggagggcccaagtggggctggttgctatttgcacccccatttttactaaatacatccccctgccttcttttttttgtgattcttttttcgtaatgttacgaaactttacgaatttcgtaacgatacttatttttcttccgcaaggttacgaatccttacggattatgtatttactcttttttagctttcgaagaagttacggaaacttaaagattgcgcaaaaacacctttnttcgacttccgccacattacggaatttcacggatcgcgcaagcctgcttcctttagatttctgagacgtctcgggacttcatttattgtgcaacaaaggacgccaagta

SEQ ID NO: 4180 - DNA, 460 bp, Glycine max
  unsure at all n locations
tgtaagtctccagacgacgagagtaaaaacctgcaaaatttttgaaaataatcagaatcggacgaccaacatcatccagataccgtcgaatttgttcacctcgattgatgaaaggagcggatgatcataaggtatctctgcctgccacctaacttgctgtccctggatgacaaaaggtgcggaagacgatgttattctctgtatgtcaacgggctcgtttgcccctggttaacgaaaggtgcggataaccatacagtatccccgcatgtcacctgacttcatgggtcaggatgacaaaaggtgcagaacacgatgttagtctctgcgcgtcaacgagctcgtttgcccctggttgacgaaaggtgtggataaccatgcggtacccccgcatgtcattggacttggcatctctagatgacataaggtgcanaagacgaccttagtctctacgcgttaacgg

SEQ ID NO: 4181 - DNA, 348 bp, Glycine max
  unsure at all n locations
agcttgccgacagtagtaatggcggattgcatgtaaataacagacccgcaccggatattgttntgaaacggaccctctctcgtaaattggttctaaaaggaaccccatacagtaaatttgccaagaaattaatgctgtacccataaaataattttttaaaatgaatactaatgttatacgagataataaaaactgatattaattctatgattttattttttaatattatagtatcgaccatgaataaattatataatatttttgaaaatatatatacgcgtaaagaataattataatttgctacaatataagcattctgaatccttttatcatgagattatatatttt

SEQ ID NO: 4182 - DNA, 354 bp, Glycine max
  unsure at all n locations
tatgaagcttgtctatgatctcttactaagtctggttatttggatgtagtagtggctcattttataatgaactcacccttgcgattatgcatcgtgtggntgatacctgtgatgatcgcgaaccttgttcatgggagcacaatgacaacagcaaggtgcaggaagtgagactctgctgaggagccgtcgagtcgacgtgatgacgctgggattattttgngagagaggcgtatttcgctgatcaactcctccatagtaggctcatgattcccttcgtcgaactatagatgtaaagctcatatgttgaattatatgtgaacacattttaattttcattatgtgtgtgacgtatac

SEQ ID NO: 4183 - DNA, 430 bp, Glycine max
  unsure at all n locations
agctatattgaaaccattntcttcaggcaatggagctnttacatgctagtcattcattntttccacccgacgtttaaatttgggcttcaaagattcaagctcatccaacacagctcgtgatctctataacggaaaaatgatagaaaagaagaaaatgaccacatatcaaatataacaaaatcaaataaaagaataaaacaaacacacacaaaactatcatataaagtggcatggaagtttctcgcttatatgctgctctttcattgggcagngaagcttgataatctcgatgatatggtatagtttcagaaatcaaactttaagaaaaaataccaatagttggcacagtgaggaaaaaatgaagatgccatactcaatttaattgcnnnctgacgagtccaccatagagaaaatccattacgctttcata

SEQ ID NO: 4184 - DNA, 399 bp, Glycine max
  unsure at all n locations
tagaaacatcttcaaatttgtctaaatattattacaactcataaccaatccatattcaaaacgacaaaagcttccaaagagctcataacattntaagttcgttctcaatatcattctagctcggaaccaatacatattcaaaacaacaaagtatttcaaatcatcaaaacagaaaatagttccaaatgaaccaagtttaataaaaatcatcatcttcaaggcgggagattgcaacagaagtaacgtcagttatcaatggttctgtcggttcacctatattgaaaaataaaagttagaatataaatatttaacttgacaaaattaattcaatctttaaaaagaataccttcatcatcaaactccatttcagtgagtaaaatagcattttcatttcccaca

SEQ ID NO: 4185 - DNA, 472 bp, Glycine max
  unsure at all n locations
agctngaagtgagaaagtgtggaagagtcagtcttcctacttttatttgttgaccacagagtggtacctggagatatgtcgcggnggtcaggagaccttggggacgtcaggtggggtgctactgcccaaaaccaagcttgatcaatcccgacccaacccgggcatagttagtcagtgagaacctgtgacgtacctaaacaggcgagctcccggaagtcaaccaataaaagaataaagaccacaaagcaaggaggcttgtgtggtggctggccagctatggatcttgagtgatatctggaatatggcctctagtaatcgattaccaagggtgtgtaatcgattacaaggcttagaaatggatacaggaagttgagatggcctctgataatcgattaccaaggggtgtaatcgattaccaggcttaaaaatggaaatgggatgttgaggtggcctctggtaatcaattaccagt

SEQ ID NO: 4186 - DNA, 456 bp, Glycine max
  unsure at all n locations
ttttgtcatcacctaaannaaccattttaaaggtccaacgtcttgaaatggtccctttttcttttattggttagacatggatttaaaaagcttaaaaaaaacaacacatagctntgtcacctctttcaaaaaaccaagagatcattaatggtccaatgccttaatgttttctctcctttcaaaagaattgaaagatcgtttagtgatccaacgccttataatgacctttcattcaacataaatatatcttgcaaaaaaaggataaagacaacttaaccaacgttcaattctcaaagaactacgtaggtctgatttccttatcacaattgaggaatacgtaggagcaagggaaacacccttgtcgaccacaaaaagataaaaaatataaaaaggcataaaaagacataagaatgtaaaaaaggggaagataaatcaaaatgaagtcatattcgcaca

SEQ ID NO: 4187 - DNA, 467 bp, Glycine max
  unsure at all n locations
agctntagcacaatggcaaggttactttcttatgagttactaattcaattcttaacccccactatgtaagagccttgtccattgggtcacctcttttttattttgtaacatttatattaataaagcaaagtatgatacatagtaggaacacaataatatacaaaagttaaataatatattttatcgctcaatatataattcgctgataaatgaatccttgaacgatgaatatataaaatttagtccctaaaagtataaatagtgtgaaaagtaagtaatcgacaacgtgaccatgctgattagatttgatgaaaatgtcaacaagatacaacgtaaatgttaatcattntttggtggacaaaaaatgtcaatatttcttattgaagataatatcagtaatttgttatttacctaaatgtcaatacatttcattggatcaaaatatcaatacgttatcattattggac

SEQ ID NO: 4188 - DNA, 468 bp, Glycine max
  unsure at all n locations
tcagggtcatangttttaaggtttcactcatcaataattgatgtgtggngagcttagcaatggcgtccgccaagtgatttgaagaagccttcaacctggttgattccgccattgaagaacaacgagagcaccaatgttattccgccattgaagaacaacgagagcaccaatgttaggaaaggcagaggaaagggggatagggaaagggtctggacttctagggacagtacctccaaagcacaaacttggataaggtatttctcatatctgccctattacataggagtctttataaagtagtgattcctataacagaatttgtattcttgtgacaacatggatcttaacagataatagaatcaatggtaaatgacacacaatgtgaacactaccgcactaatgtcagctaagcactctctccttcttcctctcataagaagtgaagactagaatattatttattgacta

SEQ ID NO: 4189 - DNA, 447 bp, Glycine max
  unsure at all n locations
agctntagatagcttgttgtaatcgattacgacaaccctgtaatcgattaaaacagagagttgtgcctcttgaagaaactcttctaacttataaacttttcttcacactaatcatgatgatgcatgatgcaatacaaatatcaaatgtactaagatgcaacaaccaagataacaaccaatacaaatgccactcaagggatttaggcatgtaaaagtgaaaacttcttcaagcttttctttgagcttcaagctttagcctttaggttgttcaccatgttgctccttctatctctaacactgcactccattccatcccaccatgtttgtccttaaccacgaaaaacgactttgttatcctttgtgtagaccaagcaatgaagtacataaaatttgngataaatatacttggacacctacttagagagagagagagagagagagagagag

SEQ ID NO: 4190 - DNA, 452 bp, Glycine max
cctatcgcccttagactaatggctagattgaacggaccattcagtcgctggaggaccttttgagggcatgtgtcttagaacaaaagaggagttgggagagttaaagactactcaaagtaggcagaaaaactatcaggctgctcaagaaaaactgagaaggtcaagttaatccaagaaaggctaaagactgctcaaagtacgcagaagagctatcatgacaagaggaggaaagacctgaaatttgagattggtgatcatgtattcttgagagtcattccattgattgcgttggtcaagcattgaaatcccaaaaactcatacctcgttttatcaacccttgttaaattctcaacagagtcagtcctacggcataccatattgcattacctctgtctctgtacaatcttgacaatatctttcatgtgtctcaactcagtaattatatctgtgat

SEQ ID NO: 4191 - DNA, 446 bp, Glycine max
  unsure at all n locations
agcttgaaccttgagtcttgattcttgaaatcaaatttcctcttgaaccttgaagtgttcttaattcaatcttgaacatcttgaacatcctgattcaatcttgaacatcttgaacatattgaactcattctttgattatcatgaattgacctttgagctttntgtcatcacctttgttatcatcaaaacatctttgaatcaatcttgattcatcatgaagctttgcttctacacatacttagtaggatcaaaagttattgtttatactgaccatgaacccattaagtacctgttgaataaagctgattccaagcccagattaatcagatgaattttgtcgctttaagaatttgatctgggtatccaagacaagaaaggatctgaaaatcttgtagctgatcacttatcaaggttagtcaatgaggaggtgactttganagagctag

SEQ ID NO: 4192 - DNA, 465 bp, Glycine max
  unsure at all n locations
tagcaacagccnncataacccaattttgtcgaaaccaagtgtcatgatttctatattaccaattntgctagctgttgatgttgcatcatagttttgctatgtcatctacctttggtctcatctctttaccttacaattcaggcaattctatcattaccctttttcaatatatagaattggcaacatgcaaacatatctaatccaggaaattccaccactaatagtcagcctataatccataaccaatgaagtcccccatctccaatttattccatcttctaattttattgtagtttctgcagatttaaaataagcgtttggttcttcgttttaacataaatctattgtttagtttataattcacccaattctgcctttagtcattttcaacatgcagaactatcaacatgcanagagatctgattatacaaaagccaggatcaacaganaacgtattatgcaaca

SEQ ID NO: 4193 - DNA, 469 bp, Glycine max
  unsure at all n locations
agcgttgtgtggggagattcacataatcatcgtaagagtcatagagtggctcggaaggagctatgtatgcccaagggcactggaggcttgtgctttaaagaatccataaatttcaatttaaccttcttgatgaagagcgggcggagcttatgttcgaatacgatgcgttgcgggtcacaataatcagagaaaagtatcactgtggagaatctttgatcccagatattgattgtaataggcttgagactaatttctggtggggcctttgtaanacctggcctgaggtacacaagaacctttgctgaaatactgtggatgggaacaatgttagagtttctgggagagcgtttggcgtccttctcaacgtaggctttaatttggacaaagcaattttcctctagacgtatggagcatatgaattaatatgtgcgtgagtatgttgataatcatgggaactataacttaccgc

SEQ ID NO: 4194 - DNA, 407 bp, Glycine max
  unsure at all n locations
tcctaaatggcatatctcatttcctcaagctntggtggaaactctccctcttcataattttgatcataaccccatgttattaagctactttaaatctcattccaagaagttgagatcctttcaatttcaaggaacttggatgtcccatccagattactcaccactagttcgaaacacttggcaagatgcaaaggggtctatcccttataaactgcgtcgtattcagatgaaatccaaggagtttaatgagaaggtgtttcggaatatttttcgtaacaagaagaagcttgaatcccatattaaaggtgttcaccaacagcttgagtggaggcaggatcattctcttattatgttggaaaagatcttcaaagtcaatataataatatcctagcccaagaggagttatt

SEQ ID NO: 4195 - DNA, 383 bp, Glycine max
  unsure at all n locations
agctagagcctacnagtccaaaggaataatagttgttcttcacagagagactctaatgtttgtcatattactggcgcagtattaactatgggcttaacattctacagggcattcaaaatgagaacaaatacttacaaaaaccactgaaggcaatttaatattagaagttacaaagataaacctttctccatcatattttgcggagagatattgcattactactggtatgcatctagtttctttaccttgtcatgagatgggcactgcggaaaagggcgtctaaaataaatatgacatgaccccccttttgcccattgacctgcattgtattagattattttcaaggatagaccttattggtggagggcatttgtaatccctgc

SEQ ID NO: 4196 - DNA, 459 bp, Glycine max
gacactatgaatactcagcttgtaggctagatatgaactgttggactctgttaacactgtgtcgctgtgtgagcattctggacatacacgcacactttctgattcatgctcttatgcacacacacacagagagattcgttctctcgtcagaaacactacgcatacgaacaggcagacgctcacgctgagaacctgtaacacagacacttgtcagactcacgcacttacacagacaccacagactgactatgacctattcagagacaagcgcactcccagatacacgcactctgatagacttagatggcagaacttttcacagaagcacacacacccacagattcactgtcacacagttgctgacacacagagaccatgcgctcatccacacttgtagacacacacatacacacacgcacactcacactgagaactagccccagacacacacacacgctg

SEQ ID NO: 4197 - DNA, 376 bp, Glycine max
  unsure at all n locations
agctntgagcanattcanacgacaataacctttttactcggaagtcggattgagtcccgttatatattcagacgctcgaaattgaatgttgaagctctgagcaaattcaaacgacaataaccttcttactcagatgtcggatagagacccgtaatatattgagacgctcgaaatggaataccgaagctctgagcaaagtcaaacgacaataactttttactcggatgttcgattgagccccgtaatatatcgaaacgctcgaaattgaatgctgaagctctgagcaaactcaaacgacaataaatctttactcggatggccgattgagtctcgtaatatatcgagaagctcgaaatggaataccaaagctctgagc

SEQ ID NO: 4198 - DNA, 451 bp, Glycine max
  unsure at all n locations
gtgaagctcctgttttagctttacccgattntactcaaccattngaagttgaatgtgatgctagtggagttggcattggggctgttttgatacaaaacaaaaggcctatagcttatttctcggagaaattgggaggagccagattgaactattgcacctatgacaaagagttctatgccattgtgagagctcttgatcattggaatcattatttgcgttctaatcactttatattgcattcagatcatgagtcattgaagtatatcaatgggcagcagaagttgagtccaaggcatgctaaatgggttgaatttcttcaatcttttaatttctcttcaaaatacaaggatggtaagagtaatgtggtggctgatgcactctcaaggaggtatgctttaatttcaattcttgaaactcgtttacttggttctgagactctgaaagattatat

SEQ ID NO: 4199 - DNA, 453 bp, Glycine max
  unsure at all n locations
ctgaagcaatctctgctgcttgaatgcaatttcagagccaatcccttcaatagctttgtcccctgggatgataagagcaaagaaataataaatttggaaatctcttttgttagctcactaaaaggtgatacttaaaagcaaacacttttcaagtttcaaaactgtatataaagaatgtatacttacagtattctttgtcaatacattaagtgaatcctcatgaaaccacaatcgactgcgcttcccaggtttctttgttgaactttcacgaattatctctcttcccatgtctcgtagtaatggatgcattccaagttcgttgttctttgcaacttttacgaggctacgctccatgagaactgttattcctatatcagcatgtagtccacagccatntagtatctctgtaacataagctctatctttaccaataaagagacaacatacatcaag

SEQ ID NO: 4200 - DNA, 364 bp, Glycine max
agctcgatgcaatcctaccctccatgggtattgtatagaagactccaagaggattgagctagagctgctaaagaaggccttggcgttctcatgaaccccaaggtagatttctgagcccatgggccatggttgggtccactcttctttgtaaatattagaatatgtttttccttcttttgggccttgtatttaggccattctagtagtataggattttagccttgtctttcatggcaatttgagtagactttgtagtagggacttttatttttcatgtattttggcatgggggcgagcttatctattatagggagtgcgtaactaagccctaccttttttaggaatcttcccaaggaatcttctt

SEQ ID NO: 4201 - DNA, 396 bp, Glycine max
tactcattgactataagcctctcaatcattttcttaaagatgataagttccctatcccaaaggcttcatctttccccaccttgataagagaatcaaactcattctcaaagaatgatttaaaatcaggttctcggcaacttggcctaaaaccacataatcgatacaaaacagcatcctgtatgccaaatgctcaatatcaatggacaggcttacctttaggcttaaaagtagcttcttctctcttgcagaaagccatgaccaaaatctttgaacccattctggaaaacactcttgtctacatagatgacattctcctttgttcaaaagatattgcctctcactaaaaattgttgaaccaattctttgaaatagcacaccaacatgggatcatgcttt

SEQ ID NO: 4202 - DNA, 326 bp, Glycine max
  unsure at all n locations
agctatgtgaaactgccatgttttgatgagttatacatacccattctgttgtacgcgttttgtgatgatgattgcgatgtttatcttctgacaatactgatggaaatctgttagagacgaagggtcaaactaacctaaggttacaaagtgagaatgtgatgttatgagtggaaaaagagtgagactctgagagttggaaggttaagtctgaattctgtggtaaatggaggttaaaatgagttaatcctagcttganatgtcatttaagacatgtgagaaaggttaggctgagctacagagattatcacttgaccaaagtgaacaaa

SEQ ID NO: 4203 - DNA, 417 bp, Glycine max
  unsure at all n locations
tgtagaattcaccccaattctggtgtcctatgttgaattgctcccatatctactcgataattcaatggttgccataaccccaaccaaggttcctcaacctccatttttccgaggatacgactcgaacgcaacatgtgtttgtcatagaggggccccagggaattccattgagcattgtaggaccttgaagcataaggtgcaaggcctaattgatgcgggcttactgaaatttgaggagaattgcttgtgaatcctgacattcacaagagatgccacacatggngcaatttgaaggttggtgttagatgtctctaatgactcattatgattttcaagtttattccattattgtaaaccatagttacaattctaaataatatggatgaatttgacatcgctatctctcttatcctctca

SEQ ID NO: 4204 - DNA, 407 bp, Glycine max
  unsure at all n locations
agcttgtctcagtgtttatgcgagacaaagaccaacatgttagccatcgtcagcaagtaccaagaagaattaaatctagccacggcccacgagcacatagtgacggacgagtatgcccaagtgtatgcggaaaaggaggctagaggaagggtgatcgacttgttacatcaagaggcaacaatgtggatggaccgatttgctcttactttgaatgggagtcaagaacttccccgattactagccaaggccaaagcaatggcggacacctactccgcccccgaggagatccacggaattctcagctattgtcagcatatgatagacttaatggcccatataattagaaaccgctaggaagtttgtattgttactcagatcttgactagntataactttctgaataaaat

SEQ ID NO: 4205 - DNA, 412 bp, Glycine max
  unsure at all n locations
ntgngagaatgcataccctgatcaaaatntgatgtgtcctcctccagaaaaggttaacacaaaaggtgcatcgaagaaactgattaacagaaacccaaggtcaacaaagcgtgatccatcttactaggagtatgtagatgttttttattctcagcaaaatagcaattcgtcagtgaagcatagtgcatcatcttctaagcagcccaatccaagaaggatcatgcctatcttggatcacatttagccatttatccatgacttcattgataacattgttgatgtccaagctaatggaaactatgggtatcggtcggttgtcggtttattaggtataggtgaaaactcttggtcgttggtccgcacccatctgcttatagaacttggcaaattcttagaagactatatcatattc

SEQ ID NO: 4206 - DNA, 301 bp, Glycine max
agctcttggcggattgaatagtgggtccaaagaatcttctggtttagccttgtgacaactggaatcacctataggctctgcactgtaggctgagtaatcaccactgcttcttgtgtgacataaaagggactcctgcagcactcacttactgaccttctcgtttgtgagtcttgacatcaagaacaattaaatgcttgattacaaccaacatccctataactgaagtgtgaaacaacaactatcgtccattaatttccataaattatcatgagaatcatctctctctatccctttcaacaca

SEQ ID NO: 4207 - DNA, 437 bp, Glycine max
  unsure at all n locations
tcatcccttgataatgaggataggagatttgccctggattcagctagggactactttccttagcacccttatgttcaatacgttcgataaataaatcttnttcttttgctatatgcatgagagtttcaatgctagttgtcacacaaatgtgtgacaccctctaccccgcacatatattttaatataggaataaaaactcacatattaattaacagtattgttaaattattcttaaatacaagcctttcaaatgggtaacaggctcacattcactttcttctacatcatattcaaacttgtccatataaataataaagtcatatcggctcaaagaacgccatctaagtatcatacaattaatatagaacccatatcctaatgtcacatcttatcagagcgtggtgttcccgtgttctctagcatgaggatcttcatag

SEQ ID NO: 4208 - DNA, 477 bp, Glycine max
  unsure at all n locations
agcttgntccccatcaaagataagacaaagtatataacaagtacactccccattctgctagctatcatgtccacagaaatccatatatgtcaatagagattgtaaagtaataatcatatcacaatatcacatgttatttgctacggcctacgggaaagctcgagcgagcaaacttgcttggtgagtaatgctaactgtttgttgaaaacgcccaagtaattcattacattnttacatcacttgacaaggagtttcggatcaatgtcttttgttttgcgtgatagcacggatgcagatcaacttggacactacttcaaaaatcaaaacgtgaatgataataaccaaataaataagtggataaactctgcaaatgcagggtgttgcaaattgcatgaagcccaagtactggacttggaagtttattgtttttcttcaatcaattgataacatgagcattccnccttcatctggagttca

SEQ ID NO: 4209 - DNA, 461 bp, Glycine max
  unsure at all n locations
actatgaaactcagctgatagatttanaccacacctttatctctatagtactttataattgaagaatacacattcgtttatttattatttattattttaaaatgataacaaaattgaataaaagtgagtttattctttattcgttgcaagtgtaatttttttatattgtcaagtaactagaaatcatgttagatattatttttaagatcattttataaaattcaagaaacttatttaatctataattgaataattctgtaaatttaaattaaactttaaaagtaattataaacattcaatagataatttaacttcaaaccataattatgaatgcctccttttcataactataagatgttttagctntatttcttatcttanaataattgatattntagaaattcanaatttaattaatattttttccaattatatccttatttattatctcattattaatg

SEQ ID NO: 4210 - DNA, 440 bp, Glycine max
  unsure at all n locations
agcttatctaacaagatataaaatacatagctctgtcttattattgtctaaagcgtttctttataatacacaaaaacagttctctgctttttttagacacaaattctatctggttctcaaaaaatcacttctttaaacaacacttttttctgaatcacttttttgaacgttaaacatactgttccataaacaatctcagaaatgataagttcaatccaattatacacccacagagacagtggattagtgaatctttnaaacaagttacatgcaacacatgtccacagaaaaaaacacaactaagttaaactaaataccattctactactgaggaattgatacagctctatcttcaccatataatcgccgttgcgtttttagcgatgttcacaatactggcatgacggtgatcagagaatttcaaactatacccgaacaca

SEQ ID NO: 4211 - DNA, 372 bp, Glycine max
aagtccaacgcagcacgcgtgtcgttaaagttgttatatgttatgctttgaaggagatgaacgtggagtgtagttaccactgtactctactctagcagtggttgtggtgttatcaaaggcaacaccaacaccacttgaatatgctcttgcagcaagacacccatgattaggttcttggttggcatgcaataacacatacattggtcgtcccggtgatatgcaaatgtattcccttgccaatggcttggttaacataccatcagcaccaacaacagcgaggttgtgttctgtatcatagaacaagagaatgagattcattgccgcattgtctacacggagataataagtcctgccttgctctacatgaaactc

SEQ ID NO: 4212 - DNA, 466 bp, Glycine max
  unsure at all n locations
agcttaaggatttcanattctgcctgacaaataataaattaggttntattgttagtaaattataaattttggctactaaacaaaatcaaagaagaaaacaaacatacctgaatatcctcctatatcaaattcttgcatcccgtatacaaaggcttctttgaatcactctgcaatccttcatacataggggcatgtgcttgctaaaaagactcttgtccaaggtcacgaatcatatcctccaagcgatctcctatttctacatcaaacggttcagattgggacccactttgcatgtctatcaattcaccatgccatatccacgtcgtgtaattcttcttaatcccatcacacaatagatgctcccacatgccgtccagtagttgttgtcttccattcaaacaattgatgcaaggacaataatgttttccatcttcatccgatcgacctcttaatgaagtaaattaca

SEQ ID NO: 4213 - DNA, 469 bp, Glycine max
  unsure at all n locations
ggatggagaatatgggtccatacttgtcagccaagtcacccaatgttntatgaggtgtctttgaaccaagcaacaatgggaggtgaccaattattggccacgcacctgcaactgtgggaggaccctcttcgccactcttcgaggaacgacgacacaaaaacaagtataagaggatcagagaaacaacaccaactccaattgttgtggtgtttagaactaagtccattntgacttgtttttgtgttgttgcatgcagatcctcatcagtttaaataggaactgcaccgtgcatctgtgtgccgttgtacgacctgactagatcgagtagagatatttagatattntaatattntagaatatattcattacttgaattaactaanaaataaaataatgttgctgaaatgatgaaataatatagccaaataaaatcttgatattntaagatatnntttaattttatattaca

SEQ ID NO: 4214 - DNA, 459 bp, Glycine max
agcttgtaatgaagatgaacataaacttaggatcacttatttctggtcagatttcactcattgctcaatccaactccttgcggcttggatttccaaccctgattactgccttgtgcaaggcccgaggagtcacctcagattctcttaccttcgagtcactcagcctagccattaatttggcctatattaagaagaattgttggaacctggatgacccttttgtcacttttccaaggacccaaaaatccagggctagaaaatctgaggacccatctctctctgctccccctacttctgctcttccttcaccaccagcagctccaattctttcaggtccctccacttggagctcagagcctttcatgtttatgctacagagcctgcaccagggccagctcctgattatgcatagcttgcaggatgtggcccagcagtggccagttatgagcctggaggagt

SEQ ID NO: 4215 - DNA, 465 bp, Glycine max
  unsure at all n locations
taacgtctntcacagtanaaggaccactccatctctcaattntaattntccaggaaacaactttagttntaagttgtagagcaatacttgttgtctgggactaaattctttgtggaggatctttttgtcatggtccctcttataatccctgaacactttaaacttggagccaaacaggtaatgcctccacatcttaagggcaaaaactacagtagccaactccagatcaagggtgggataattcctctcatgagtcttgagttgtctagaagaataggccactccttggccattttgcatcaacactcctcctaaacgcatctttgatgcatcacaatacacctcaaggngttctcttgggttaggcaaaactagcatgggagcggccgtcaacttttccttaagggtttggaaactatgctcacattaggtatcccacacaaaagcttgacccttacgagttag

SEQ ID NO: 4216 - DNA, 458 bp, Glycine max
  unsure at all n locations
gcttgaggattatggngtacccatcacatgtggtactatgtggcggtcgggcgatggtgcacaacaagttttccacatccacaatgcgcgcataaacccaccatcccctgttacccacctccatctgagctcacgtactcccacgtagcccatatcctcgtttctctcaacaccgagtccccatcaatcctcccaagcttccacaacatccaagcagaacaacattcaaacagcacaagctatcacagccaagcaaaacagagcanagccagaaaactctgctcaacacaccaacaaaatcacagcttttctcacttaaagaccccagtaacaattccttcgatccaattcgttaaccattggatcgactccaaaattttactggaagtctatagtacataagcctacattgtgacgcgtgggatctactagaaaacatncagaactcattctgcact

SEQ ID NO: 4217 - DNA, 456 bp, Glycine max
  unsure at all n locations
agatggaccatttcaagtgaaagaatcaatgacaatgcttacaaagttgagctgcctggtgagtataatgtttgttctaccttcaatgtctctgacttatctctttttgatgtagatgaagaatccgatttgaggaaaaatccttctcaagagggagagaatgatgaggacatgactaggagcatgggcaaggatccacttgaaggacttggaggacctatgacaagggctagagtaaggaaagccaaggaagctcttcaacaagtgttgtccatactatttgaatacaagcccaagtttcaaggagaaaagtccaaggttgtgagttgtatcatggcccacatggaggaggactaaatggcaccactttgtctcaattntagagtggttagtttgtctaaataatggcccaatccttgtaatgttggctgaccaaaaatatgttttgggttaatc

SEQ ID NO: 4218 - DNA, 461 bp, Glycine max
  unsure at all n locations
agcttctagtctntaggtttctattgtttatggtgaatctgttctttggaaaatactttcacattctgacgtcaatctttttctgagatatcctgtatcttcattaaatttaagtccattcatttggtgtgttggggtgtcctggtctggtttctgtccatttgtcctacccttttctggtacaatagatgcatgtaggtgtgtaggataattataatcatcttgcccctattgcctgttttgttctttttcttcatgactttnttctctttcctgttcaatcttgtgatatttgcagataatttgttttctctctttccaaagggtattatgcactttctgcanacattnttctatgcntagcgttttaaccatttacattntgcatgtttagtttataggggcaacaatggtgtcttcagaattgcagatacanactgataatggtctaattggcatgc

SEQ ID NO: 4219 - DNA, 460 bp, Glycine max
  unsure at all n locations
gggaattcaagtaacctctagttgtctttttttatttgtgtttgtatatataaataataaataataataatagttaaacatcgcctttcttttctcttcacttgaagacatatcanagtcatataggtggattattatatttatccgataaccacaaaagtaggtattaatatgataaagcagaaggaattaattgccaaatcttaatcaaagtattgatacgtattaaccccccttccaaagcatgtttaagatattggtgtggaaaacaaaaaacaaaatacatgtttaattcaaaaaaataattntgcgacaaaaataattntgttaaagaattaaaactcatacaacattntaaacttcaatccaaaaatctacaaaagaagacaaggngcacaaaggtagctgtggctatcagtcttacaagggatgttcatataaacactgagcctttctcggg

SEQ ID NO: 4220 - DNA, 466 bp, Glycine max
  unsure at all n locations
agcnttgtccccaattttctataaacaggnggagaagtgaagtaganaacggttcagccccttaggcacttctctctctttcgaatttgcttaggaaaattgtttttgtgaagaaaatccaagccgaggcgcttccgtaacgtttccgtgagtgatttcgcgaaggttttcgaccgttcttcgacgttcttcatcgttcttcagtcttcaacgggtaagtacctcaaaccaagcttttcaattcattctatgtacccgtggtggtccaaatttggtttcatgtatttttagtctcgttntcatttactttttatacccnnctttgacgtgcttaagccatttatttaagtcatttctcgcttaacctanaaataacataaatntccaccgatcatttgaattgtatcatccgttaactttggttgaaaaaattccgaccgatcggtcgtgccgcaaccacattgga

SEQ ID NO: 4221 - DNA, 449 bp, Glycine max
  unsure at all n locations
tgtaggcgttggatcttcttcatcaatggagtcattggcttcttgaagatcatggcagcggaatagagaaggaagaaagatgattggagaccccacttcaaggagatgatgagtcaagaagaagctcaccaccacaggaagccatggataagagcttgaaggaaggcgaagatgagtggagggagagggagagaaggggcacgaaattntatgcctcaaatgaggtctgaactttgaagtgtaattctcaaatgatcaaagttcaaaaaatgcacacacatggcctctatttatagcctaagtgtcacacaaaattggagagaaatttgaatttctattcaaatttcacttgaatttgaaattgaatttgtggagccaaaatttcaataattatgattaatgaattttagatatggttcagcccactaatccaagatcaagtccaagat

SEQ ID NO: 4222 - DNA, 355 bp, Glycine max
agcttctaaggaagctgtctcattatagcttctcaaggaagctacctagtctataaatagaagcatgtgtaacactcgttgtaactttgacgaacgagagtcttgtgagacacaactcaaaggtcaacctctctccctttatcttccttcaatttcgcgctcccccctctctctttctctcgctctgtctttgcctccattgaagcatcctctccaagctatcttatacaaggctcatcttggcggagaagctctttcttccatggcttattccttaatggatggcgcctcctctcacctcttttcctttgtcttccgctgcatctccatgagggacaatcaccattagaggacc

SEQ ID NO: 4223 - DNA, 448 bp, Glycine max
  unsure at all n locations
atgcttcaatggaggacaaaaatgagagagaaagagaaaggcgggagcataaaattaaaggaggataagggggagagaagatgaactttgagttgtgtctcacaagactctcattcatcaaagttacaacaagtgttacatatacttctatatataacctaggtagcttccttgaaaaacttccttgagaagtttctttgagaagcttctttgagaagttagagtttagctacacacactcttctaataactaagctcacctccttgagaagcttccttgaaaaacttctttgagaagcttccttgagaagatttatagagaagttagagcttaactaaacacacccctctaatagttaagctcacctncttgagatgagaagctagagcttaactacacacaactcctataatagctaaattcatcccatgccaaaatacatgaaaa

SEQ ID NO: 4224 - DNA, 390 bp, Glycine max
agcttgctcagattccacatatcctgtgactgttaaaacaacagctggtttagtgacggaagaatagtccatagttaaggattcaactatatataggaacgtcaagttgttgactttgaacttgatagtttatagtttggaacgacctatgtctagttaatggcccagaggctaatattaaagacattgactaaatcaggagtcttaaaaattattattttttaaatctaaacatattctcactattttttttttttacttacgctatccattttatttggtcaattcttacttgttcgaagcactcattggagcattttattaatgttatcctctcttttctcttaacatcaggcatatataatccatatccttcctccatattctttc

SEQ ID NO: 4225 - DNA, 434 bp, Glycine max
  unsure at all n locations
nttataanaagcatttctaagcataaaactaaaatatgttgtattgagctcttggtattttttttatgataacatttttaattatgagtataattttataattattaaaagccatcagtttttttttaaataataatttgttcacattttgttcaaataaacttaatgtaagttctctgaatttattgcattctggcgactgaaattcacaatcaaaacttaaagtgtgctgaataaaagtttttcatagatgtaatctagtaaaataatgcttcataaataattaggtgtctaatagaagaataaagttaatacaactgttctcgaaattaaagtagaatcgatacattcacagatgtgtatacataataatggtgtagtattcaatacatattgttttgctttactgtcgaactatggaattccatatacat

SEQ ID NO: 4226 - DNA, 417 bp, Glycine max
  unsure at all n locations
tggagggaggtccctcactcgtatctgtcaggtgatagtggcacccataagaaagtatcatgttgaagcacctgatgacaagtctcttttatatgagattacatataccatcaactatcttatcaaaatatggcaatcctgtagtcattaattctccaatccttcagttaggttataatatctgaaatgctagctaggaccagattcttcaactcaaggggaatatgataatgtggaattcattntaagaatgcttcgtgcattcgtcactggcatcacattattggaatgccgttgatgatgccgtacagtagcataaattaactaacgctagcagaatttcacgtaatattctaattacacagttttaccttagnttaaatttcaagagagctctctctgngttctcaagcatat

SEQ ID NO: 4227 - DNA, 353 bp, Glycine max
agcttcttatacaaggctcatcttggtggcgaagactcttcttccatggcttattccctagaggatggcgcctactctcccctcttctactttgtcttccgctacatctgcatggtggaaaatcaccattaaaggacctcattgaagcttaaagatccagcctccatagaagccccacaaacaaggtgtccatcagtaatgtcttacgcaagatataaaggttgaaacatattgaggaagaagtggtttctgttctcacacccagcatgaagacaaccatgagttacagtgggagggacaagattgagactctagagcacgcgacgtttgtgaggccatatgcttactatatg

SEQ ID NO: 4228 - DNA, 374 bp, Glycine max
tcatggtgaatcataggtgattcataggtgtctcgatgataacaatgatgacaacaaaagatgatgactgaggtgatgaacataaagctcaaagatcaatcagagaacaactcacgtgaatcaaagaacatctcatatgaatcaagaacaagtcaagagttcaagataagaatcgagaagaattcaagactcaagaagacagtctagagtcaagaatcaagattcaaggttcaagatctcgagaatcaggactcacagattcaagaatagagagaaaacttaatcaagataagtattagaaagttgttcaaaactttgaatagcacatgagttcttgcaaaaccttttactagaggttgtactctctggtaatc

SEQ ID NO: 4229 - DNA, 330 bp, Glycine max
agcttgagctttgaattgagtgtcattgtcagtggcaatggcgtaaagaagaccatattttcatatgaagggtttgcatgagaacttctctacctcatctggtgaaatttctcgcaatggtcttgccttaatccacttagtgaaataatcaatagcgactaataagaatttgacctatcctgcggcttttgccaatggtcctagtatatccatcccccacatggaaaaagggccaggtcctagtatgaccaataagaatgtaccctttggctcgctcacgtagctcgtccatgctgctagggggtttcttgcatatactatcagggaact

SEQ ID NO: 4230 - DNA, 334 bp, Glycine max
  unsure at all n locations
cgcctctatagctagccatcacaagaagatcatattnttcaattgacgtgttatccacatcacattctacacggtctcaccatgaataaaaagggaaatggntatttcttctccttccatactcacaaacaaacatgattntacaagcatcaaactcaacttatgaaaacatgtgcatcatgcaccacaacagcacatcacaatccacaacaatgccttgaagcattctcacctattccacgaattggattcatgccccaccccatgttttattgcatgttatgttatccttccttttctcaatattatgcggagtttatcatgactcatattc

SEQ ID NO: 4231 - DNA, 471 bp, Glycine max
  unsure at all n locations
agctnntgcgtttcctcatgcatttcattaaaggcttccaaaacttcctcaaattcagagtttacctgaagtaattatcacagcatcacaatcataatctcgttctatttgcaatcaaaatgttatgctctattcctagaaacataatgtaaagagtaaattcattcagttcaaattctaagagtactttccaatcaaaattaaaatccaatttcatgaaacttgtgatcaaatagaatcaaacattaagaatagaatgaaatcaccaataatgagtataaaatattcatacatatatataatatcaaaagagatacataagggtacaaagattacatccaatcctttagagaaactaaccgatcattgcatagagtacaagatcaacaagagaaatgatgaaggatgcgatccatggttacaactctgtaacacctgggctccactntgtgctttcttcttccttctatg

SEQ ID NO: 4232 - DNA, 471 bp, Glycine max
tagccaattctactgcctggggcaaagacaatggtcaaagtgctggacttcgcgatggagctctggattcaggccagacacaaagcccttgacaatctccattgataggcaactaaatacatgcaactggaggagctcaccaagtacaaccggcagttgaggaatgaagcatccgactcaaagaaggagttagaaagggatgcccaaaaaggaaaaagaacatgcacgcaagactagaggacctttctacaactattacactccccttaatgatagccaatcaaggatcttggaacaagcccttgctactgaatttttcatgatgccaaagcaggctaaccccccctaagagccaaccactcaaagcatttttgataccataggaattggggtcattcctcagaagaatgcataacacataaatacaagattaaggatctaattaaaaaaacatgcctaaaggatttcaat

SEQ ID NO: 4233 - DNA, 444 bp, Glycine max
agcttatttaaaaaaatataaaataaatagctgtttcttaagattgtctacagtgtttttttataataaaaaaaaacagttttctgctttatttacaagcaaattctatctggttctcacaaaatcacttttttaaacaacacttttttcggaatcacttttttgaagtttaaacaaactggtccataaacaatctcagaaatgaaaagttcaatccaattatacaccaagagagacagcggattagtgaatcttttaaacaagttacatgcaacacatgtccacagaaaaaaacacaactaaattaaactaaataccattcaactagtgaggaattgatacagctttattctcaccatataattgcagttgtgtatttagtgatgtttccaataaggtaatgagggtgatcagagaagtccacactagacccgaacacaattt

SEQ ID NO: 4234 - DNA, 444 bp, Glycine max
ctcagcttgaatgaagtccaacgcagcacgcgtgtcgttaaagttgggaaggttaggcaatgaaggagatgaacgtggagtgtagtttccactgtactttactctagcagaggttgtggagttatcaaaggcaacaccaacaccacttgaatatgctcttgcagcacgatagtaatgattaagttcttggttggcatgcaataacacatccattgtttgtcccggtgatatgcaaatgtattcccttgccaatggcttggttaacataccatcagcaccaacaacagtgaggttgtgttttgaaacagagaagaagagaatgagattcattgccgcattgacaacacggagaagataagtcctgccttgctctacatgaaactcgaacgtttctgaaaattaaaagaaagttttgtgtttagatgagcttaacctcatagatac

SEQ ID NO: 4235 - DNA, 471 bp, Glycine max
  unsure at all n locations
agcttgtggtgcacgatggttccttcaaggagatcttctgccttccacagctganagtattatgcttggaaccccttggagaactcatttccattggattaaagaactcttggattgagcccttcctacgaaatctagaaaccttggaagtaatgagttcttttagttccataaacttggtaccacacacagtgtctttctccaatatgacgtatttggaaataagcagctgcaatagcctgttatatttgttcacatcctcaacagccacaagtttggttcaactcaaaagaatggagataaaatgctgcaattcaattgaagagatagtgtctaaggaggggggtgaatcacatgaggatgagatagtatttcagcagctaaattggttgaatctttgctaattacaaaacctcaaaagtttctacatagggagtttaagttcccatccttggacaattgtcaataacc

SEQ ID NO: 4236 - DNA, 475 bp, Glycine max
  unsure at all n locations
tctaagcttacctacgctngagtgaatgggagtaagccaagatcttaaagtggagatgaaggaatgtagaagctctttgtcttggagtctcgaaagcaagaaaatgagaagataaatgacaattgttaatgaaaatcgttaatagttctttaaaagagtttatacctattaaacactaatttttactagtgattttattaactaataaatatttaagagatttacttaattattaataaaaataataataataatttcaataataacgaccattataataactttttatataaaagatttatgtaataatttcaataaaaatagcaattcttgatgataataattttgatgataaattcaataatgcattcgataacaatgttaatagtaatttcaatagcactaaacaatgaagattgaataaaaataatgtttagaacagaaatggagattaacaagagatgtgagtttatag

SEQ ID NO: 4237 - DNA, 470 bp, Glycine max
  unsure at all n locations
agctntaagcatacatgaaatacaggcgccaatcttgttttctatccaaactcacgcacttgcattgtgtgattctaaacagtaattaatgttggttcttttatgtatcgaaactgttaggagagagaaaacacctcaccacttgaaggattatgtttaagggattttggcacaagttcatttatttggtagcgcagtactgcattaggataattctgttagtgttccctctgcttgcctagaggattctgttggtggctgttgtcctatagtgagcacatataactatatatatgcagngtattgacagaagggaaataagaagaatataagcaaagttttctctctatgtcttaagcttttctactctcttctctctgcttctgcattctgcatttctgcttctattcaagttcttaacatttggggctttcattgagctcccatggcggaacctgaccgatggaacc

SEQ ID NO: 4238 - DNA, 365 bp, Glycine max
  unsure at all n locations
ntgtccgcaaatccctcatgtaagactaggcctaaactaaacagcattattgtaacagcataattaaaaccaaaacttaactcgcagaatcctcatgtaaagctaagtttcaatcctgcttcaatcaaattctaaggcaacagtacatttctcgatgctaaagtcacctaactgtgcacacaaatgggtgatcagacccaaaacatacaaatattaagcattgaaggaagcattgaacattaaaacataatcaattagatattaggtatttacatcagttggtcattagaaatccccaactagggtggttagccagccactacaaagaaaccctaaccataaatgagattaaaagcagagaatga

SEQ ID NO: 4239 - DNA, 367 bp, Glycine max
  unsure at all n locations
tctgagtcacctgccgcatgcaagcttggactcttggaaattctttgcactagtcactcttacagttgtgacgtttgaataaatctacagaaacaagtcacttatagaattgtgacttctggaaatatattctgtgagattagtcactggtgatcgattaccattaaggtgtgatcgagtacacatcaacagatgtgacttttcattttgaatgttgaanaattaaaacatttagaagctctggtaatcaattacaagtattgtgtaatcgattacacaagtctaaaatactgtaagactatctaaacataagttataactcttgaaattgaaatcttaacgttttaaaacattggtaatcgattac

SEQ ID NO: 4240 - DNA, 423 bp, Glycine max
ctaagattagcctgtaggcaatttcttagtgcgctaaaaattcaattcatcactcatgccaaatattagcagagagcatcagaccggtcaactatgataagaaacagcacagtagacaatctgcttcatttccttaaacagcaaccgctcgatgaagcaaacctcctgcatacaaccatctttagttgcacttacttggtacattaaaatactcagaccaagaaaattgaaatgcattagtctttgcaatttgtattgcaccatacttaaggatttccatgtgaatagtttataccataacacagattatgctgaccaaattgacccaagtatacacacaagacttcaataaagtgattacaccaactcacttatcatcatcttaaaatgaataatccttcacatcagatcttgaatcaccca

SEQ ID NO: 4241 - DNA, 419 bp, Glycine max
  unsure at all n locations
ggatcttaagcacctgcagctgcagcttttatccaggaaattcttgtgggcgaagctccttcttccttggcttattccctagtggatggtgcctcccctctcctcttctcctttgccttacgctgcatctccatggtgaaaaatcaccattgaaggacctcattggagctcaaagatccagcctccatagaatcttcacaagcaagcttccatcacattggaccattaatgatctttttatctttggaagaggtaataaagctacgtggttattctaggccttctttagaaatctatgcttaaacaataaaggtggaaaagaccattttaaggcactggaccttnaaacatggctctttggtgatgaaaaacactttgcttatgaattgattttagccttagcttcactgtggttatta

SEQ ID NO: 4242 - DNA, 437 bp, Glycine max
  unsure at all n locations
nttanatgccaaaatagcccctacctcctttcttcattaaaaatgtaactnntttttttccgganaagttgtttagctccattnttagaaacgttgngcttcttgttttctcttttttcgtgcgacattgcctctggttcgtaggggtagcagcgttgagcacagcggtgaaggtgaaggtactggcgtcgagcgttgcggtggtcggtgggggcaaacgaggtacgcagatggtggtttgactgttgcggacgtacggatgagttccggatcaacttgatccgtaagcttttttcagatcaacttgatccagaagctgcttaataatcttctggatcaagttgatctgtaagagactttcggatcaacttgatcccttgatccggaagagtattaagcagcttccggatcaaantgattcaaaaaagtcttatgga

SEQ ID NO: 4243 - DNA, 394 bp, Glycine max
agctagtagaatggctagacatgatacatgtcaaggtttggtttggttcaaggataaaagggatgccccacattatttccatgacacaaatgcaacaatgatgatttggaaattttatgcaaaactggtcatgcatgcacctatgtggacactcaagtgtcaaatttttatggtcatgtgatgctagggctcaagattcatttcctctactttagtccacccaaagtttccaaaatatgttcttttatcaatttgtgcattcatccgagtccattatgagcgtccgggaaaattttcacagcattcacccttcaggtgtacacacacattatccaaaaatatggtatgatcagtgaattgtttcagagaataggtggagatcatctcttttcat

SEQ ID NO: 4244 - DNA, 356 bp, Glycine max
  unsure at all n locations
ttcaacaagagtcttcacatataaccatcatgaagcagatatctaacaaaactacccatcatatctcccaaaaccccatacccacgaaatttaagagagaaagaagtncacccagacctgaattttcgaagtcccacttggaatcacgcactttacgacatgcgaaaggctctggttgtcgggctaggagcanaaatgagcaccccaggttggagctctgttggggtttcaatggagaatggaggagaaggaaaaagcaccgtgatgaagagggagagcttcttgaatttctgttttggctgagtgaggagagagaacagctttttgggttaaataaaaggatttcctcttttcta

SEQ ID NO: 4245 - DNA, 434 bp, Glycine max
agctctactacactaaccaaattccgaatgtatgatacgatggtgcatatcttatattactatttacaaacacaactgaaatttaaagcaaccactactagtccaggatctatactattgcaatttccaactgttagtttattagtggctaaaagagtaggtaaaagttaaccagactaattaaataataatatgccctgtttctatatattgttaccataaatatatttaaaaaatcagaccaggcttattgctttaagtttttcactatatataaattcataatgaaatgtatatttgataatatatgctctaaaatttagatatttatttattattaaattcttatatgatggatatattactacatataaaattcactataagaactcagagtgccttccaaccaccaattattttatattgtagaatcg

SEQ ID NO: 4246 - DNA, 347 bp, Glycine max
ttagacctttgatggcatgctggcatcaccctcattcttgctcttgtcagcttcaaacttatcaattgctacctgcagttcatcagtgcctccaacagccctcatggtgtagaagtatgcaccaaagacaaaagctgtcaaacccccagcaactaccagattctttgccttaggtggaaggctcctatatcctaaaagtccagccatcttgatcaatgtgggaaaaaagggttagcacaatttcacacaattacaattacccttcaattgcagaaagcacaaaagatcacaaaacagataattcagatctgtaaagaataatgagtagacattttcacaaacagatt

SEQ ID NO: 4247 - DNA, 464 bp, Glycine max
  unsure at all n locations
agctntaatggtgttaagaagaaatcacatgttttgtatcatcaacaagagggagaatgtgaatgtatgtatacatgattttgatgatgtcaaaagaagaatcaaacaaggctcattttgcttcaagattaatacaagattggttcatcaaacaaagccttgattcaagatttcttcaagatcaagccttgcctcacaatgaaaggtttcaagtcattcaaggcacatgtaatcgattaccaatacatgtaatcgattaccaatggtttgaaagtgtgtaatcgattacacatcatatgtaatcgattaccagagactctgaacgttgggaattcaaattttacatgaagggtcacaactgttcaagacaaacaactgtgtaatcgntacactaattatgtaatcgattaccagagaggattttcaggaatatcgccaacagcacatcttatcatttgaatttg

SEQ ID NO: 4248 - DNA, 362 bp, Glycine max
  unsure at all n locations
ctgtcgaaatgccatgtgtgggtgagttagacatacccattctgttntanggtttttgtgatgatgtttgtgatgtttatatgctgaaattgctaatggaaatctgttagagacgaagggtagaactaacccaaggttagaaagtgagaatgtgatgttatgagtggaaaaagagtgagactttgagagttggaaggctaagtccgaattctgtggtaaatggaggttagagtgagtcaatactagcttgaaatgtcatttagaacatgtgagaaaggttaggctgagctagagagaaaaataaatgaccaaagtgaaccaagagccatttctagggcaaaattgggtgttgaagagtcaaa

SEQ ID NO: 4249 - DNA, 399 bp, Glycine max
  unsure at all n locations
tatcaaaatgcaccttaagtgcatgtttggaaaagattaatttcacgaaatattcacttcttntttgaaagttctcttggaaagctaacaaaaaataaaagtgattatctctagaaaataagttgaatcaaacatgaactaaatcttttaagagcctaaaagtgattattggctgcaaaaaagacttcaactaaccaaatccatacaaaacaagcactaaccaaagttctctcatgtacaacattgacaaacatgtgttctacttctaatgcgccctttccaatttccaaattcagtttctaaacctttgaagagctcgagtgattactgaccggtaaaatcatattctcagggccaaaatgcagcgagctatgggactctattatctactacaaaaaa

SEQ ID NO: 4250 - DNA, 341 bp, Glycine max
  unsure at all n locations
agcttaatcacaaaggatggcatggtcactggctgccatattttcaatcagctccataacttcatcaggtgtcttcagtttgatcttcccaccagtggaggcatcaagtaactacttcgaatggggtcgcaagccatcaatgaatatgttgagctgaaccggctcgttgaacccatgggtgggagtcttccggagtaaaccgtggaagcggtcaagagctctccaccttttccttcggagtcttggactctggaaaatatttcttcaaanatttctccaccacctcttcccatgtctgcaaactatttcccttgacgagtgcagccatttttttgcttcac

SEQ ID NO: 4251 - DNA, 429 bp, Glycine max
  unsure at all n locations
tacgtgacactataaaactcagcttaatagtcaggaaataatataattcaccctcttttatattcgagccattgatcaacaagggatcaagcagtatcttgaaaagttcacaactacagatcatggctcttaattttgttctgaggaaaccatcataggccaccatattaatggggagggttaccactattttggaaatccgaatacaaatctttattgagccataganttaaacatttgggaagcaatagaaataggaccttacatacncaccatagtagatgtaagcactagcaccacaacacanaaacctagagataagttgactgatgaggatagaagaagatccaatataatcttaaagacaaaaacattatcacttctaccctatgaatagatgaatattcacacatatagtcaatcatcttg

SEQ ID NO: 4252 - DNA, 293 bp, Glycine max
agcttaccaatttcactaaacttccagctgttgctcatttaccctcttgtgctcgcctggtatgtataattatgcacaaaatcgctgcccggctctatgtttaatatcctgcatataataccatggtgtcttcttctacaatcgcacaacaatatttacttgtcatgccggcttctcagtttaataatcattaacactctttaattaaagaacgatgcccatttttgattgcatgaataaatgaatcggaatccatccaatgcttagaataacttttcatgctgtcatgcatg

SEQ ID NO: 4253 - DNA, 365 bp, Glycine max
tctgtggttatggaataattgattatcaaaagtgattatcgattattttaacacacaaagaactcctaataaaggttccaaacaaaatctaatcgattactaaatgtagtaatggattatctcgagccataaagtctttattctggtgaaacttacatatgtaatcaattattgaaactgggaattgaataattccgtgattcttgccaaatttcaagtagaagtgaactatgtggcttattctaacactttgtaattgattattaaactttggtattgattattaaactttgtaatcgattacattatattgaactcattgctttaagaaactttgagaatcaatcattaatctaccatggttg

SEQ ID NO: 4254 - DNA, 393 bp, Glycine max
tgtagcaaggttattattatggttaatagttggactacattgtgagatacattgcaagttgtctataacaatagtttttgtaagtataatataatattaatgtgatgatatgaagaataataataatctataaatgaattgcaaattacaaattacaaatctgtattaagtatcaccattaatagctgaatgttgtcttttttgttcttgcaaaatagttttcctacgcttccttcgttcaacatatatgtccatgagtaattgatttctgcaacaactgccttataattgccaaacaataggaaaatcaaatgttgaaattgagttaaataagttgctgtagtaggctgactttaaaatgataccaacattatagttatttgcatttgcttc

SEQ ID NO: 4255 - DNA, 414 bp, Glycine max
tattcaagtgacacagctagaagcctggctggaaccttcgagtgacagcaatcttgtacccatcccaagaatgatttgggttccaagattcccaccattggaaccaacccaaagcttctccatccatcgcgatcatcactgcttccagcttgtcctcttccctaactgcccataaccgaaagtattgctcaatcttggtatccagcccattggatcctcaccatcgaatatgggcaattctaaattcctccaccgattgccgttgtgcgctgccataccttcatcccctccgctcgcctaaactgtatgcacatttgtcgctggagattttttctcccacgccactgtcaacctttggatcatcccttcgatcgagctcagccgcgattccactgcttcgcgattctcctccat

SEQ ID NO: 4256 - DNA, 399 bp, Glycine max
  unsure at all n locations
gcagaggatntttcaaactcctcactttcttagatctcttctctcagataaaactttttccctcttaccattttcttaccgtctattcacacccagcacacacaagagaacaagaagagagagacagaaagagagggagaaagagaaaatcaaaaaccctctctttcaaggcatgtcatagatcgtgtttatggaatagggaggcaataacataggagataagatatataccaagttattagaatcatatgtacataatttgttttgtagcacacatttctgattccaaaatcagttgaataagaactttactgaaataggaggcagattctcatctgtagtaaaagtgttccttctcatattaaattagatgaacagacaaaattgtactatgttttt

SEQ ID NO: 4257 - DNA, 398 bp, Glycine max
tgaaaagtgcaagaaaacgaactacattttctgcattttttgaaaaaagagatgaactcgctaagcgagcatgctgcgctaagcgagttcatcagtactcattgtatataggcgttctctgaagaactcgttgagtgtgcttaacgcgctaagcgagttcatcctttgaggatgaacacttatcctcttgcttaattacctgtggctaagtgaggatgaatcgctaagcccaggttacttagaaaattttttattgatagccgcgcgctaagctgagctttcctgggccaagcacgatttgttgcggcatccgctgagttaagcgagcttcgctcgctaagctcccaatacttagtgaaattttttaggagttggtgccgctaagcacaacctttaag

SEQ ID NO: 4258 - DNA, 402 bp, Glycine max
  unsure at all n locations
taagctctttcaactgcacaaagctattaatattngaagagtatccatatggaaccttcacccgacgaagacactgacaaaaacttatcttctcctttttggacaaagcatggcaagctaggggcaagtaaattttcttcccatcagaccttggatgcaactgtgatcgtatccccatataagctagatcttgatgggtattcaagccatccttcgtctttccttgaatgttaaggagcatcccaatcacactgtcacaaacatttttctccacatgcataacatcaatacaatgtctaacgtctagatcagaccagtacggaagatcaaagaaaatggacctcttcttccatatgcaactcttacttttatccttcttttgggtttttccaaatataatat

SEQ ID NO: 4259 - DNA, 369 bp, Glycine max
  unsure at all n locations
gtaaccgccccanaatggctatttccctataaatagccgtgatgggggaggggtttaaggggttccaaggttcaagagttgatagaagaaagaaagaagaagaaacaaagatgaggcgctaccgaatcgtgactgtgatcattccctacatcgttttcttgttctgtgttcctcgtgcaacaatcggttagttttgtttttaaggattgagtatgatctatgtacccttaggggtcccctctgttattatgtgcatattcatcttctccatctatcattggtaatctcattttttatttgtaaagtttaatcttaactgatcactagtttcgtaaagttgtctttaaagagattgaaagctaataaaca

SEQ ID NO: 4260 - DNA, 386 bp, Glycine max
tatgtaaactggctctctgtttgtttgttacaaaccctaattaatcaatcagtttgatttgattttggtgtacaataatttaatctgtgaacataatttgttgatcgcatcacacgtctgctgaaattggttatattcaaacggtgcgttaattaattagaagatttgataattgatacgtttgtgtacttaaaagcaacgtatggtcttttgtagtcgatctagttgaagattttgaagtggacacaaacttcttattatttaatttttgttttttatagtcgacagtggttaaaaaatgttattaaagctctatttactgaatgtttttggtttattagaccatgtataaggcgatattgtttaaaacatatccataattaatc

SEQ ID NO: 4261 - DNA, 378 bp, Glycine max
  unsure at all n locations
tatcatagaaggcaanaaaaaggtctttataacgtcttccaaaccattgggattctaagccgcaatcgaaagtttggaactcatgatcccccttagtttttgctctatccaagggaaacgcaaccatgtgtcagagcatcatggagtctatgacaacaacgagtcgtgacgaagatggatttgtgatagcggcaaaactatgtcagtcgatggagatgttgttgtattgtgaaagatgtaagaaagaagaatccgtggaagaaatgttatgacaaaaaaatgatcatgattacatttgacactctcttaaatatatgaataccatacataaattatcatagtagaccagtcttaacttaacctttaagatagataata

SEQ ID NO: 4262 - DNA, 350 bp, Glycine max
agaatcggacctcagtgtgaaaagttatgaccatttgaatatctcgggagcttccgttgtacattttcgagcgtctgtatatgagatgcgcctgaatcggacatccgagtgaaaagatatgaccatttgaatatgtcgagagctttcgatgtttaattttgagcgtttagatataagataagcctgaatcggacatcctggtgaaaacttatgaccatttgaacttctggagagcttccgttggggattttttaacgtctctttatgtgatgcgcatgaattggacatccgaattaaaagttatgaccattagaatatctcaagagcttccggtgtacaattctgagcgc

SEQ ID NO: 4263 - DNA, 354 bp, Glycine max
  unsure at all n locations
tnctcttttcttctgttgcgcggggccggccttccgtggacaaaactattggatgtgtcgcgatgttgggttgaggcaacgtgctgggtgccggcccttctgggatcgggggatagaactcgacatcccttcgagcatagtcttgagggtctttgtggacttcttcggctgttgaggaggctctctttcaagacgggagaagcaatatggcccgcatcctcctgcaagacgggtggtgagttattgggcggcaatccataagtgtaagccggtcggtgtatcccaggtgagggctgccatcgtgccccagaggtcccttccccgcctactatgttgagggagatggtgcgcatt

SEQ ID NO: 4264 - DNA, 399 bp, Glycine max
tagtatatggacttgggtgttgcccagtttcatcatatcttccgtaatacttatcacctctatcatatctaataattttcacatttatgtctaattgccattttacttcattgtagtaaatttctaaagcatccattgcctaagaaatctcgggcagtaagtagacataaccgtaacgtgaataatcatcaataatggtgataaagtattattcctttccgaaagaactaacatcaaaaggtccacaaatattagtatgcacaatttcaagaagctgagtgcttcttgtagctcttttctttgtatgttttgcttgttttccattaatacaacccacacaaatatttagatccataaaatctagataaggaagaatttcattctttattaatttttcca

SEQ ID NO: 4265 - DNA, 392 bp, Glycine max
tgtaggattatggggtacccatcacatgtggtactatgtggcggtcgggcgatggtgcaaaacgattctccacatccacaaatcacgtataacccaccatcccctgttgcccacctccaactgagctcacgtactcccacgtagcccttatcctcgttcctctcaacgtcgggtccccatcaatcctcccaagcttccacaacatccaggtaattccacatccaatcatcatggactaacaaaaccaagcaaaacagggcaaaggcagaaaactctgcccaaaactcaaaccaaaaatcacagctttttctcacttaaggaccccagtaacatttccttcgttccaattcgttaaccgttagatcgactcgaaaattttactgtaagtccct

SEQ ID NO: 4266 - DNA, 381 bp, Glycine max
taaagcacaacattgaccatgagctcttcatatcgccctcagtccaatggccagactgagaatcttaataagaccattgagatgtatctaaggtgctttgtatttgaacatcctaagagttgggttactatgctaccttgggcttaattctagtataatacttcctttcaccaaagcttgggcatgacaccatttcaagcagtttttggtagacctccaccaacggtgatgcactacgaggttgatcctaaagatcccgatccactcaaggctttattacaactacgtgatcaacttttgagcaagcttaaaggtaatttactaaaggctcaacaatatatgaagatgcaagctgataagaaaagaagagaaagagaattg

SEQ ID NO: 4267 - DNA, 397 bp, Glycine max
  unsure at all n locations
agcttctacaatctccccctttntgatgatgacaaccctgaaatcaagaaacacacacacacacacactttttcctagtcgatcactcacttaattctccatattctccccctttgtttttgagtttatgcttcacttgaaattaagttaattacttatgtgagttcttgatttaatccctatttctctccccctttggcatcaacaaaaagccaaagtgcgtaacaaatataaatcatacatacattactaatcattcacaagacattcattgaaaaatctaaaccaatcatgaagcaagaaacatgaatagatcaaatatataaaatccacatagtcatataacacaattcataattgttcaatcatactatgcaaataaaagaaatactaaatt

SEQ ID NO: 4268 - DNA, 402 bp, Glycine max
tgtaagatttgcaagatcatcttccttgacaactccttgaaaattattgccatcaatacgcagagatgacaatttagagagtgatccaatactttcaaatggatttccactgaatttattaatagacagattgagatatcttaatgatgaaagttttccaaatgatattggaagagcaccaccaattaagttgttggaaaaatctagcatgtcaatatttttaaaagccccaatttgatctatcagattgcctgaaagttgtgaactccgaactgcaagtgttgtgattccctaggaaatacaaagagcaagaatttctaaaagttcattaacctgttggttgagtttgagatatgataaacctatctcccttaagttgcagagattatccaaagaagttga

SEQ ID NO: 4269 - DNA, 390 bp, Glycine max
tagacaacacagcatacaaactacattaattggatggcaaagtatttccaagaacatggaacgccacccacctgaatttctactttagttgacctaatgcaaaactagatgttattcttttttttcctactcaagtcttttttcccaaaagagaaaaaatatgggttttagcttgagaggttttcatgaggtacatctaagataacaaagggaatttgtactcaatcaaatacattgaataaaattctgcatcccttcattttcataattttcttgtgtcttcaagacaggtacatccgtggttgcagctccacatgcttgtcaaacccaaggtccacccttggtgagtcttgccaaaatctaggataaatgggtcattggtcattttcc

SEQ ID NO: 4270 - DNA, 389 bp, Glycine max
tgaggtttgggtctcaaaaccagttacaacaatttttgaagcgaaagaaagataaaatctcaacattgaagtttgtttggtcgtgggtgtggcttaatctccaaattcatttttgaaaccaaccttaaactatccacattagtgaaactcccaccatcaatgatcaaagagcataactacccttggatgaggcacctcgcatgaaaaatcttttctctttgactatcatccaattcaactgcttggctacccaacatccttctaatcgtgaacaaatctccttctaactctctttcctcttgatgctcctcttcatcgctagatgggaaagattttgaagaagattcactaattatttctctatcctccttaagtaacatagtcttctt

SEQ ID NO: 4271 - DNA, 397 bp, Glycine max
ggacactatgaatactcagctcgattggagcggatgggccagtctgcctcgtttttcacgaatcaataaatgattcgccctgcctcgtgaccccacgggtcaaacgtgccgatccgcgacctaatttaaaagaattcgattttataaaaatacaatacaatgaaattaagttgaatacaaatgtaaataaaatctcaataattagtcaattacatcaataaaataaatattgtcttaataaaagaaaatccaagcaatacatctaaaatatgaaatttaaacatctccaacaacaaatgattccatatttgataatgtttaatgaattctgactttaataaaaatataatacaatgaaattaagttgaatacaaatgtaaataaaatatcaataatt

SEQ ID NO: 4272 - DNA, 361 bp, Glycine max
tgaaggtacgagatgatgagaggatggataaagagtgtaggaactctatcgcctgtgcctcagagaaggtctaaacattgaagagtaatcctcaaataatacaaggtgaaaaatgcacacacatggcctctatttatagactcagtgtcgcaaacaattggaaggaatttataatttcttttcaagattcacttgaatctgaatttgaattggtggagcccaattttggagccgaaattgcagtaattattattagagaatttcagttatggttcagcccactaatacaagacctggtgcaagagtttggactaatagtgctgatgtggcatgacgaatgtatagcatgaaagacatgcac

SEQ ID NO: 4273 - DNA, 380 bp, Glycine max
ttggagaatgatttctatacaaaagttagtcgtataaagcgactaacagtgtgttacattatggcatttgcctatgttcctgatgcaggaggcttgaggaagaagattttggaggaagctcatcattccttttacaccactcatccgagttctactaaaatgtatcaagacttaaaggagttttattggaagggagggatgaaaaggatgtagctgaatttgtatctaaatgcctagtatgtcagcaagttaagacagagcatcagaagcccgtaggtttgttttagaggattgatatacttgaatggaaatgggagagaattgtaacaccccagattctagttcaaaacattgctttgaaaactctcgttaattatttt

SEQ ID NO: 4274 - DNA, 379 bp, Glycine max
tctaaggaccaccgaaacgaattgcatcaattttcttctccagtgaagcagggtcacccaccaacaagtttgaagcaaccttcatttcttccatttgcaaatttttcccgcaaacagaactagaaaatgataccctttaacgaaaaagtgtcataataattaataaattcataaaaggaaaagaaaaatacaaactttaacatatagatgtgcaatacaaatgagggtcttgaattattatttacctggaacctacaaatatagttattgttgcccatgatggcccttgaggctctgaatgggctttcgattaaggtttttggggcagaacacaatccataagctagccacgacactttcgcttggaactcaaacttct

SEQ ID NO: 4275 - DNA, 415 bp, Glycine max
atgcaatgctcaagcttccgttgccgagagcatcgatgatttacgcatttcagcctatggtgccttgtagcttatgacaagagccggaccttgttctttctttcgtgcacatccctgtctaaagttccaagtgctttctgcatcacccacatccacgattagccaccacaaaccatcattgttctccatggaaaacccacaccgagaggaacccttgaaccgaagcacaatttccaacttggcttgcgggttctgtagagaacgaaaaccctaatctgatctttcgctttctttcgaggtaaccatggctctatgcttgtttcttgttagtttcatcttgtctttgcatcttttctaactttgcaaccaccattgcatgtcttatgcttgctttgaaaaaccttacaaaaagaga

SEQ ID NO: 4276 - DNA, 397 bp, Glycine max
tgttgaacctctcccattactcatataatgtctctccaagttgttgccttattgatgcaagctccattggagcttgtaagcctaggatcttcttcatcaatggattcctttgcttcttggaagatgaatggcagtggaatgaagaaggaagagagagaggagacgccacttcaaggagaagatgagtctagaagaagctcaccaccatatgaggccatggataaaagcttggaggaagaaagagatgaatgaagggagagggagagaagagcacgaaattttgtgctccaaatgagctttgaaatctgaagtttaatattcaaatgatcaaagttgaaaaaaatgcacacacatgacctctatttatagcctaagtgtcacacaaaattggagggaa

SEQ ID NO: 4277 - DNA, 394 bp, Glycine max
  unsure at all n locations
ntaattaaatccataattntgttttgttgttgagtgtgattttttttctggtatccatgacattggtgtgaagtattcatctgatgactaattttcattgaaaaatctgactaatcacttttagtggagtatctccttccaactatgctttttttcatctataatgttcgaacccaacaccttacttaagggggatgtgtgtatgatttgaaaatgactaagttgggtattatgttatgtgcaggaccctttatgtgaggagcaaaacagattaggttcaatgcctcccacttgccacaacaagtgcaaccagtgtcatccatgcatggcagtgcaagttccaacctcgcctaaccatgaacgagttcacccaggtcttcttcccccaactgct

SEQ ID NO: 4278 - DNA, 382 bp, Glycine max
gaaggagtacaagatttggtgttctgtctatattctattttctcttgttacatctttcttggaaaattattccgatatgcagaaaaagtcttttttaagaatatgacatatcatacattgaatacacctttcattatatctcagattacagtaaaaaaagatattattatggcccaattatcttaccttttaatgttgataataactctcttatatagatagatagtataatgtatttttttttatataaaaggagtgtcaatatacaacagagtgtttgcgaatgtattgttggattaccataatatcgatatagcgacttgctggtatggataaataatgtatttacaataattaatgagattgatatagggaaagaaaa

SEQ ID NO: 4279 - DNA, 406 bp, Glycine max
  unsure at all n locations
ntgagccaaaatcctgactcaccataaaccttgaccctggtgagaatgtcaatccttaccctcggaagcaaaaaaggaagagaaggaaaatttccaatcaaaggaaaaaagagaggaaaggaaattcccaatcaaagagtgggagaaagcaaaaagaaaagaaagaaaattcccaatcaaagaatgggagaaagaaaaaaaaaagagaaggagaagaaggaaagaaagctcctggtcaaagatcgaaagaaaacagaagaaatatgcagagaggtctttggaccagacaatatctgaacaatacggaattgtcaccaaatgaacaaaagaaagaaaaggaaaccataacctaaaagtggtcttctccctttgattaccaaccaaaatcatgtgcattcgtgacttg

SEQ ID NO: 4280 - DNA, 391 bp, Glycine max
taataagtgcatatgatgtagctccatgtagagcttgtaagccttggatcttcttcatcaatggagtcctttgcttcttgaatatcaatggtagcggaatggagaagggggaaaggtgattggagacgccacgtctaggagaagatgagtcaagaacaagctcaccaccatatgaagccatggataagagcttgaacgtatgagaagataaatagagggagagggagagaaggggcacgaaatttatgcctcaaatgaggtatgacctttgaagtgtaatttctcaaataatcaaagttgaaaattgcacacacatggcctctatttatagcctaagcgttacacacaatcggagggaaatttgaatttctattcaaatttcacttgaatt

SEQ ID NO: 4281 - DNA, 380 bp, Glycine max
tgtcattggtttagacatgattggtacatgatttgggactaggattcaatttgggcaaaattggatgagggaaagagtggttttcgaaatctgcactttatgcagaattgtgctgttgaaatgtgcagcacaattttgtataagtgcagaaaaatgcttgtgtatggctggttgtgaaagggtagtacatatggggttctagatatttactagcagatcccaacggtcaaaatgtagacttatgtactagagacttccagtaaaaattttgagtcgatccaacggttaacgaattggaacgaaggaaatgttactagggtaattgtatgtgaaaagctgtgattttgagttgtgttttgggcagagttttctgcctttgc

SEQ ID NO: 4282 - DNA, 361 bp, Glycine max
agagatgaggaagtgttgaaaggtgttactttctgcttttattggcgaccacagagtggtacctggagatatgtcgcgggggtcaagataccttgtggacatcaggtggggtgctattgcccataaccaagcttgaccaatcccgacccaacccaggcataatcggtcagtgagaacctgtgatgtacctaagcaggcgagctcctggcagacatcagataaaatgaaaacaagaccacaaagcatggaggcttgtggtggctggccagctgtgaaacttgatagatatgtggattgtggcctctgggaatcgattaccaacggtgagtaatcgattacaggcttaaaattgaggacagga

SEQ ID NO: 4283 - DNA, 387 bp, Glycine max
tccatcacagttggaagcaatagagggaatgcactatctatgacggtaggacgagagtgagatagagtagtgtgggcatgacagagcttgcaacagactttagaagtcacggcagactgaagggcgaaactgagtaaattaaaggcacatatgtattcgatcaaagagtgaaaagtgaaaattaaagtaattaaaaatctaatgacttcaaagatggtttttaaaaaatcgtagtagtcaagttagaaacaaagatggtttttataaaacttccttcgtaacattcatatcaaagaaggttctataaaaaccatcgttaacgccttaaaatagttggtattaatttaaaaaatgtcaccacatgttttactacattggtttttcgat

SEQ ID NO: 4284 - DNA, 372 bp, Glycine max
ttggaaaagataagctttgaaaggaccccttcaatgagtaaagaagaacaaactatcaccctaagtcagccacaaccataagcatcaatggtgcccttgaccttacatttcatcaaaatggcataacatattgattctgcaaaaggccaatggccaccatacgacctttcacccaactatacacctctaaccatggcaaatttttcagaaagtgacccactaatgactcagcaactagtggtgcaacaataagctcaaccgcagatcttgttcagaacatgtctcagccccgaaataataaaccttgcttctcaaggaaaattcttggactatctagacactacacactcccctctaattggttggtaaggg

SEQ ID NO: 4285 - DNA, 465 bp, Glycine max
  unsure at all n locations
attgaacgtgttgagccggatgatacctcgcaanncangacnanaagagnctcactcagtgatgggatagttccttcaaacataaccacactttcggttggattagaagatttatgtgctgagatttacctagcgaacgacttgtacgagatctatgtttcttacctcctctagtctggcttacgctttctaaggaatgtggtgctttgtcacaatgattgacccttcctcggtaagaattagctcattcatgggccatttaggccttgtacttatggcaggacacttgaaataatccagagctagccatgagaccggagctgccttagcagaaaggcccttctttggtttagggcaaacggtcagagctgtattttaaaatacgctttcattaaaaaatctcacgactatacgttatttatgatcgaggccttgatatncagtccatcgttatggggcatatcg

SEQ ID NO: 4286 - DNA, 369 bp, Glycine max
tctaacggtgaatttttgtgattactatatgggcgtatataaaatttgcaatcatatgttcaccgacacgacattttctttgtttggtgaattctattatatatcttattggcccctcttgtagtatatcttcatctgttcaacaaataatagtattcattatttagcattacagttattaaaacgttcttgatctttctgctgaacacaatttctctataaagacaagatagattctttggacctagataaaagtaacaaatttacaaaagggccgtgtccttgttgcttttatttatatctttccttactgatatattacaacataagtcttattaaaaggacaagattttgaagtatgctacttac

SEQ ID NO: 4287 - DNA, 396 bp, Glycine max
tataacttacaagccttcaactaacttatccgttagttttatcaaacataaccatactgaaggttcattagtttttttatttcatatatttactagcaacattctaaactctagtttccacaacttacttgtttagcttctaaaaattagtttttaaacatatttacataattctaaaaaaacaaattatgaaaatataaccttttacttatagagtataatttcaaaaattttaaatttagtcatgtatacaagagcatctttagaagaaagctttttttttcttttataaaaaaaggtcaaagctgtatttaaaaaaaaattcaaaaaaaaaaactcacatatatacgtcatcattgatcgaagccttactatcaaaccaaaaattaggtgaat

SEQ ID NO: 4288 - DNA, 120 bp, Glycine max
tgtacgtgagcaagattgtggaggatggcgtaacatcaacaacaaatgttggtggcgagcttcccaagggaggaactgggtggctcattcaggagagcaccaaagaggatctgaaggagg

SEQ ID NO: 4289 - DNA, 100 bp, Glycine max
  unsure at all n locations
tanagtatgcccgagtcattcatccctataagatgttgttgaagtattggcgatcagaattgccatctcttggactatagggctgaaccaagctcatgct

SEQ ID NO: 4290 - DNA, 176 bp, Glycine max
tcgaactctagcatgtacatcgtgaaactcaaggtctaaatacaatttggaagtggcattagataggatgcccaagagcaagggaccagaaaaattttaaaccaacaattaaggcaaacctattctaaagggacagaaaaaaaatgattttggttaagtgaaatgaaccggctatt

SEQ ID NO: 4291 - DNA, 269 bp, Glycine max
  unsure at all n locations
tanacatgtttttaatttctcaaatttaggtcattttttttgtctttcaaatttaaatttatttttttagtctctaggtttttaagggtgctttgtagtccctcttgttagtgtgggtcaaattgaaaataatgagtcttttttttaccacatttgagcaatttttctaattaatcacataagtatgtaaatttccaatgaggtacgagaaatgagtgatttgtggttaggaacacgatttcatatgtgaaggaatcatccctgctcgt

SEQ ID NO: 4292 - DNA, 382 bp, Glycine max
aggtgatgagtaattggagaaaatttttgaatgctgtttaggtgaatggttaaagtaaaggtgaacgatgaaaagaatatttgaaggaaaataaggaaagataatgtgtgaaaaaaaaatttaagtttaatgaaatttgattttgatttgttttttaaagaagaacagaaaataagtttgatcactttttgatttgcttaagccaatgtttgacagagagaattttaaacaattagaactgaaacaatttggtttaggagcttgagcttaagccattttgttttatactaaggccaaaaacaaatagaattcacccttttgctcccaatgggctaggcttaagccaaagttttcaagcttaaaaatttacgcagaaaaaaag

SEQ ID NO: 4293 - DNA, 368 bp, Glycine max
tgttggcaaaaactttgttggcgaaggacaagaaattgtaaccgacacactcgaagaggtaccacaatgcgatggcataaatgagcaccgcaaccgctccacgccaattcatccacaacactacatcagcaactaagcctttgtcgagaacacgatgaaaggatgagaaactaaggcaatgccaagattgttagaagaatgaagaatgagggggttagaatcatcaatggcaggcttggccttgaaagaaaaaaaagacccacccagccatccgaagggttcctaaaaaacgaataataaggaggggcctggccattattttaggacctaattatcaatggacttcaagggcctgagagaaaaaaaaa

SEQ ID NO: 4294 - DNA, 389 bp, Glycine max
  unsure at all n locations
tagatgtagcttttgggagaaaaagagcatgccaactagcttagatgtaatacttggngaaaaaagagaataccagtccaattcctatgccaaatacaagtctcccaagcaccaatacaggaaaattaggagctaatgctgttacaagagctccaacaagataaactactgcagctccaatcagctcctttcttctacctaaatataaaatttgtcacagcagtttcaccagggaaggaaatagcgaagattataactgacaaaaagggaaattacctaagaagtcagcaacattgaaggccaacaaggagccaattaaggcaccatacaatgatccactagtctggaaaagaagcaaatgccattgccccagtttatattcaagatca

SEQ ID NO: 4295 - DNA, 385 bp, Glycine max
tagagtttgcggaagtccataaggatcatacggcctttaccactcttttcactactacggaatatggattcaagggagtccatctttgatctcttgtaggaatgccaatggtgactaaaggtactatgtcattgttgtttataaggtgttattgttggcagtacgtattactagcttgaggtcgagccattaccttgacatcgttagcattaaaaaaagatgtttgtgtgagctgacgaaggatattatgggaactcaattggatgtccaatgtatctcactacatcaaggccaaacattgtatttttgtaaaagaacaaaacttgaatttttgttgcatttcaagagccattgttaaacatttcaacatcaagttctattattt

SEQ ID NO: 4296 - DNA, 376 bp, Glycine max
  unsure at all n locations
ttgagccaattcaaacgacaataactttttactcggttatctgantgagtcctggaaaataacgagacgctcgaaattgaatgttgaacctcagagcgaattcaaaccacaataactttttactcggatgtgtgattgagtcccgtaatatatcgagacgctcgaaattgaatgctttagctttgagccaattcacccgacaataactttttactcggatgtctgattgagtcccgcaatatatcgagacgctcgaaattgaatgttgaagctctgaaccaattcaaacgacaataactttttactcggatggctgaatgaggcccgcaatatattgagaccctcgaaattgaatgttgaatctttgagccaattc

SEQ ID NO: 4297 - DNA, 307 bp, Glycine max
tgcttctatagccaaaagtacatattcgattgtattattaataaagaggagtcaaatcacatctaaacagtgttttgtcgtttatattgctgaaattgataagacagacaaaggttgcagttctcaatgggaaaggaatcattcagccataggacacgcatataggccaactattcttatttaaattaatgattttcatcatttggctaattgtacccttttaacggtttattcaagcataagacagtaaatgggccatattaggcatgctcttattatttaaaaaataaaccattgaatttttgac

SEQ ID NO: 4298 - DNA, 202 bp, Glycine max
tcagaggaagagaaagggtcatagaagtggcgaggttgatacgggtagggtttgggtttcaaggaaatgggtatggcgaaacgagaaacacgacttcagtgtttgaaaagaaagagaagttgaagagagagaaagtaagagaagcatggggaagagaggaactgactgagaagaaacgaggctgtagaatggtctcttggta

SEQ ID NO: 4299 - DNA, 314 bp, Glycine max
cgtggaagaccgatgaactatgaaggcgaatgacacatggaaaacgtcgaacctgtgcgcattcatcaccgtaaatgtatctgaaacggactcgaagcgcctcagcacatactgactttactgaatcaacactatcgcacaaatgcgaacgagagagaattgtctaacgggctgaaccctttgacttcgacttgctcccgtatgtatagcaaactaggggagatgcttgacgaccagctcgctcagacgagcagggttgcttactccataaacaacagccatcgggaggaatcttcttgagggcccaagtgggc

SEQ ID NO: 4300 - DNA, 394 bp, Glycine max
  unsure at all n locations
gtattggacgataactctgtcttgtgaganaagattttaaaaagttctaaaatcacaactcaatcctctgtcttgtaatacttgtctttacacaaatgaatttgaccatcattaataagatgctttatgtgcgatgacatcaacattaatattatgttggctgtagaaaataacttaatcgaggcatacaccgcaacaatgaagagggtttgattatccttttagaactgcaaagagataaattgagatgatgaatgtaagacaactgattgcaaaatgcaaatgttccttgcaaagaccccaaaggttgggcagaggaagacctctgtcattcacaacaaaaggcataagcttaatgcttttccaaaaaggactattttattgttaatctacc

SEQ ID NO: 4301 - DNA, 414 bp, Glycine max
cactatccactactcaagcttgctctacatttacattgatgtttgtatttatgggatgaggttgtacgtcatttttgttttaagaatagtatcccactggtaaaactaactttccaaatgtttgccttcgcaggaaatggccccgaggaagcttgcctcaaagaggtccaggaaggacaaggcagcagaaggaactagttccgctccggagtatgatagtcaccgctttatgagcgcggtacaccagcagcgcttcgaagccatcaaggggtggtcgtttctccgggagcgacgcgtccagctcatggacgacgagtatactgatttccaggaggaaatagggcgccggcggtgggcaccactggttactcccatggccaagtttgatccagaaatagtccttgagttttatgc

SEQ ID NO: 4302 - DNA, 406 bp, Glycine max
  unsure at all n locations
actcaagctagtagcacattcaaaccacaataactnttaactcagtatgtctgattgagtccggtaatttatctagacgctcataaatgaatacggaagcacgtaacaaatgcaaactgcaataaattttaactcagatgtccgaatgaatcccgtaatatatcgagacactcgtaattgaaaacagaagctctaaacaaattctaacgacaataactttttactcagatgtccgattgtgtccagtaatatatcgagacgcttgaaattgaaaactgaagctctgagcaaattcaaacgacaataactttttactcggatgtatgattgagtcccggagtatatcgagacacttgaaattcagaacagaagctctgagcaaatttaaacgacaataacatttaac

SEQ ID NO: 4303 - DNA, 397 bp, Glycine max
tctcatccttagtaacagctactactggacacacacttctacatattgtgttccctctctgaatttcggaagtaatagtcccttgactactcttctaatttctttccctctaatcctaagggatggactctacactttttgggatatcttttacttaagctccatagatgaatttatttacatgcactcttttagatttgaatctactaactccacctagagcgttttggctatagaagttccttctaataaggggttaattatctcacttgacattaccctcactttttggcacttattccttgcaattttctccttcaaatttgaacaatttatatagtgatatgggactagtcgttgttgtgaccattggacgatgaattcaacattcaaatgt

SEQ ID NO: 4304 - DNA, 385 bp, Glycine max
  unsure at all n locations
ntgcttcttgctcatgtagcgcgtctgagcagtcacttgctgaatctccctcgatcaacttcacgcacttgcgaacaaccaataagttgtactcgcatcaagatcctttgagtttctctaacttccgcggtggctctagctgtggctgtgccaatggtgatcaccgcagcggcgtctgtgctagtggtggcagtggctgaggtcgaggaggcagctgcttcgtgaacttccaatttcaactgttacaagtatggtcacactgcctatgtgtgccattattggtttgaaacaaactatcaacctagttcatctcttgttcttcatgatccaacctcttctaactatggacctcattctcagaacaattttcatctggtcagaataa

SEQ ID NO: 4305 - DNA, 350 bp, Glycine max
  unsure at all n locations
ntggagtttccaagtgccaattcgttttcttctttagtccagtcttcttctggcttcaattcatcagtgggctttccttctgtgtccagcatcttgggatgttcccagcctttgatgacagctttccaggttctgctatccagtgatttgaggaaggccaccatccttgctttccagtattcatagttgggtccatctaggattggtggtctgttcactggtcctccttctttctccatgttcatcagaatttatctccccagatctcactctgtgatttcgagtgtgagctctgataccaattgaaattctgataccaggggacagatgtcgtaccggatgtcacgact

SEQ ID NO: 4306 - DNA, 386 bp, Glycine max
catcttcctttgagtgcgtcacatttgaattctagctccatggtggtgcgagccttggacggtactcgtgaaggagagatgggggaaatcgacattcccatctctataagcccccacacttgcaatgtggcgttacaattcataggcataaatcctgcctatagggtgtctcttggggagacctctgattcatgcgccaggagtggtccactaaacacttcaccacaaatcgaagttcgcagtgggtggacttttggtgatagtatcgggtgaagaagatatgtcggtgatctgcccctcctctgccccatacgtagaagcggcagaagaatcattggaaacggctttccaatccttcgaggtggtgagctgcgcctctgtggaac

SEQ ID NO: 4307 - DNA, 396 bp, Glycine max
ctggaaggatgcttcaatggaggattatatagagggttcatgatagacgatatggggtggagtcacctacaagttgatagtgaattataatgaggggggaggaacgtataacttctgaattgtgtctcataagactttccttcatcagagctacatctagtgtttcacatgcttctattataaactaagtagcttcctttgaaaacctttctgagaaaacttccttgagaagcttcttttgagaagacttccttgagaagctaaaacttagctactcacacccctctcattactaagctcacctccttgagaagcttgcttgagaaaatacctagagaagctagagcttagcaacacacacgtctctaatagctaagctcacctccttgagatgag

SEQ ID NO: 4308 - DNA, 383 bp, Glycine max
tcttagtttcagatgatgcagatgggtttgtagctatctcatgcactcctctaatgactatggcatcatttctggcgctaaactgctaagagttggaggccatcttctcaattaaatatctagcttcaacaggagtcatgtctccaaaggctccacctctggcagcatctatcatacttctctccatattactgagtccttcataaaaatattggagaagaagctgttctgaaatctgatggtgggagcaactggcacatagtttcttaaatctctcctagtactcatacaggctctctccactgagttgtctaatacctgagatatcctatctgatggctgtggtcctggatacacggaaaaaatctttctaagaatactct

SEQ ID NO: 4309 - DNA, 340 bp, Glycine max
tttggtcaatctcaaaagtggtgtcttcatgctgcaaattgatggtttctgagtggaaaatcctaatttggttaagcctgaaattttgcagcatttgcaaagcagattcaaattaattgaagttatgtacgagcactgtagcttttacaaaaataagcactgcagcttatttaaggcacaaattctgcagcatctgcagtatgtgggtggaaaaagggtgggagtggaaatttaaatggagaagacacttgtttgacagagagcttgagatggcagattgtttccgtaatgatgttgttggtagttgtattcagattcacaaaaaagatgactggagaac

SEQ ID NO: 4310 - DNA, 398 bp, Glycine max
tgtagcatattcaaaccacaataactgttaactcggatgtctgattgagtccggcaatttatctagacgctcataaatgaatacggaagcacgtagcaaatgcaaactgcaataaattttaactcagatgtccgaatgaatcccgtaatatatcgagacgctcgtaattgaaaacagaagctctaagcaaattctaacgacaataactttttactcagatgtccgattgtgtccagtaatatatcgagacgctcgaaattgaaaactgaagctctgagcaaattcaaacgacaataactttttactcggatgtatgattgagtcccggagtatatcgagacacgtgaaattcagaacagaagctctgagcaaatttaaacgacaataacatttaactc

SEQ ID NO: 4311 - DNA, 393 bp, Glycine max
  unsure at all n locations
ttgnggctgaggacttatataacagtatcaaggttttatttttaggagtttttggagatgagaataattctaggattttagaattccagtttttactattcatgcgcactattcacgtagaataaaattcattttctgcaattccatttttgcttcaatctacaatttcgttttctactgattaatggaaggctaagtctccagcgttgttttctcttgaggatcaaacacatctctctttgaggttttgttattactattgaattctaatcagttttttcttcttcaccaattactctgtatttgttgctattaatccatgcatgcttaatgcttgattaattttctctgcgcttaatttacattcatgcttaatgatcaatttctgtcatg

SEQ ID NO: 4312 - DNA, 398 bp, Glycine max
tggttcgaggtactcacccgttgaagatcgaagaacgtatgaaaacgaatgaagaacgtcgaagaacggttcaaacctttgcgagattcctcacggaaaacgttacggaaacgtttcggaagcgcctcggcttagattttcttcacggaaataatttttccaagcaaattcgaaagagagagaagtgcctaaagggctggactccttttcttcttcattttctcccctatttatagcaaaataggggagatgcttgccgcccagctcgcccaggcgagctcagctcgcccaggcgagctcagctcgcccaggcgagcagggttgcttcctccagaagcaacagccttctggaggaaccttctggagggcccaaatgggcctgggtgctatttgcaccc

SEQ ID NO: 4313 - DNA, 397 bp, Glycine max
  unsure at all n locations
ntactatgcagagaatatccaaggaaaataccttcatctgacttagcatcaaattttcctaagttatcttttccattatttaatacaaaacatttacaaccaaagatatgaagatgtgagatgtttggttttctgccattgaacaattcatatggagttttctttaagatgggtcttattaaagccctatttaaaatgtagcatgcagtgttaacggcttcagcccaaaaatattttggaagaggtgtatcatttaataaagttctagcaatctcttccaaagatctatttttcctttcaacaacaccattttgttgaggggttcttggtccagaaaattatgcttaatccctgcttatcacaaaataattcaatttttattttcaaactcaccccg

SEQ ID NO: 4314 - DNA, 403 bp, Glycine max
tgattatcaattgtgtgctgtgttatggcaatcagttgatccggatattttggatattcttagatcatttaaaacgagtcgttctttttggaagaaagctcaagaaatttttgccaatgatattcagagcttatttgatgcaaccatgaaagttacagccctcaagcctaccagccatgacatgactgctcatgtgggtaaagctcgggctgccgtggaagagctgagaaagcttcttgaggctgattcattagaagaagtgaacaagaaactggacaagttttacatggtccttatcctgagaagcttacactcagactttgatcatgttcgtgatcaagaactcgctggggatcaagtttcatccatggatactctcatcactaagcttctccgcgggcct

SEQ ID NO: 4315 - DNA, 387 bp, Glycine max
  unsure at all n locations
tgtaatcaattacacacatattgtaatcgattaccataggagatnttcagaaaatattctcaattgtctcatcttttcatttggttcttgaatggctatcaaaggcctatatatatgtgacttgagacacgaatttgctaagagtttttcagaacaaaaaggtcttatcctcttaaaaagcaaaatcgttttatcctcttacaaattccttggccaaatcacttgtgattcaataaggaattgtttgagtgctcaaattgttcaatctatctctttcaagagagatttcttcttcttttcttctttattctgaaaagggattaagagaccgagggtctcttgttgtgaaagaattctcaacacaaaggaaggattgtccttgtgtgt

SEQ ID NO: 4316 - DNA, 388 bp, Glycine max
  unsure at all n locations
ntntggagtagaaacatgggaccaactcattttattttaanaaaaaagtcgtatctagtcaagatctgagagaccatacaagtttcctagcggtttctaattatatgggccattaagcctatcatatgctgacaatagccgagaagcccatgaatttcttcaggggcggagtaagtgtccgccattgccttggccttggctaacaatcggggaagttcttgactcctgttaaggtaagagcaaaccgatccatccacatggttgcctcttggtgtaaagagtcgatcacccttcctctagcctctttttgcgcgtatacttgggcatactcatccgcgaccctatgcttcggggccgtggctagacttaactcttcttggtacttggc

SEQ ID NO: 4317 - DNA, 316 bp, Glycine max
ttttctaaactttagtttggattaccaagactaagtctttccttactagatgattaagaggatgcatatttatgtgtgcaatcctaagatgccataaaccattcttatttgtagtatgcttttgcacgttgagcaagtgattaagatcactctttcctttgtttaattatgcaaacatatctttaagatagaaaaaatcaatttgcaacttcatacgttcagcatagtgatccttttttatattttaaaatttagtttgcatagacttgttatcatccatgtttaaagaaatagtagtacaattacaactagtggc

SEQ ID NO: 4318 - DNA, 345 bp, Glycine max
tggagggattgatggggacccggtgttgagaggaactatgataagagctacgtgggagtacgtgagctcagttgaaggtgggcaactggggatggtggatttatgtgtgatttgtggatgtggatagtcgacttgcaccatcgcccgaccgccacctagtaccacatgtgacgggtaccccataatcctacaagcttgaagtgaggaagtgtggaagggtgagacttcctacttttattcgttgaccatagagtggtacctggagatatgtcgcgggggtcaggagaccttgtggacgtcaagtggggtgctattgcccaaaaccaagcttgaccaatcctgacc

SEQ ID NO: 4319 - DNA, 377 bp, Glycine max
  unsure at all n locations
tggattnttgcttcttctctctgatacctgcaacaactcaaaatcacaattcagttccagtcatacatattagaagccacagcagcttccacagttgagtgaaaagcacaaagaagcactagttaaaaatttgagtgaaaggcacaaagaagccatagcaggttctgctaaagttagacaatgaaataccttaagctttcttgacctggcctctgctttagcattttcgaggtttacccaagcttggatttttggttcttctctctgatacctgcaacaactcaaaataaacactagttaaaaatttgagtgaaaggcacaaagaagccacaacaacttccactaaagtacctcctcagcttctacggctaccgctt

SEQ ID NO: 4320 - DNA, 332 bp, Glycine max
tgaagaggatgatttaatggaggaaaagaaagacttaagaggggagcacgaaattgaaggaatgaaagagggagagaagtggaactttgaagtgtgtctcataagactttcattcatcaaagttacaataagtgttacacatgcttctatttatagactaagtagcttccttgagaagctttcttgagaaaacttccttgagaagtttctttgagaaaacttccttgagaagctagagcttaactacacacacccctctaatatctaagctcacctccttgagaagcttccttgagaagattcctaaagaagctagagcttagctacacaca

SEQ ID NO: 4321 - DNA, 397 bp, Glycine max
tatccttatggcctgcctccggacttcaccccccgtgccaccccggaagagttaagccaagccccttcttttgaggggcaactcccaccatatgaagagtatcccgggcaagacgatggggaaggagatacccatcttggccccctgctccacctcaaagatccgtccccgcatgaactaccccaaccaaacatagtccgtcataccccggcctcacccacaccctaaaagaatctattccctttgcggaagataagggaaagattgaggtgcttgaagaaaggttgagagcagtcgagggcctcggcaattagccattctcggatttagcggatttatgtctcgtgcccaacatcgtcatccctcccaagttcacagtaccggactttgataaata

SEQ ID NO: 4322 - DNA, 395 bp, Glycine max
tgaacgagcctttggcgatcaaactcaaacctcagagatgaagacacaagtgcaaggctaattcagttgcgcaagaaagtcacacacgcaggagacctgttgtgcatcaagggaggtaaaccaagaagatttataccaatgagtcataagccattatataagtaaacctaacatcatactttaatccaaaatcttaaagttcaagtttatgaatcttctccttacttatatggttctcaatttttccatttctacttgatgtgagacttcacctcatacttgtactttaacaatcatttcatcaagtgtgagtctttttcacatgttagtctccctctcgagcggaagtcattatcatccatgagtattccatggtgaccattaagctcatatgc

SEQ ID NO: 4323 - DNA, 381 bp, Glycine max
  unsure at all n locations
tatggaccaaaatgagaaanatggatcatttacagggacttaaaatgaaactttnttaaaaaaattaaggatttatttgaaatttccttaattttaaggataaaaatgacattgggatacaaatctagagactatagagagaaaaagagatgggagacaaaaaaatagatatagaaagaggaaagaacaagaaaaaagaggagggagaaaagattgagagaaaaacaagagagaagcgagagggaggagcatatgaaaaaaaaaacaattttctacttttttagatgaaatttgaaattctataattttaggtaattaaaatacttcaacaaattattagaatttcaaatatttttattatctaaaataaaacataagtga

SEQ ID NO: 4324 - DNA, 402 bp, Glycine max
tatcctttgaaagatcaatactctcagttcttttgaattcgttcactagaaaatccaataaagcattatcaaaatcctctcctcccaagaaagtgtcaccatttgttgctttcacctggacacaaaaaagttattagtgacaatttccaacattatttccaattactggctatgaaatataagcatagaataaacaagtgttaatacctcaaaaacaccattagaaatctctaagatggacacatcaaatgttccacctccaagatcaaaaactgcaatgagaccctccttgttgttcatcccataggaaagtgcagcggcagtgggctcattgatgattctctgaacatcaagaccagcaattctaccggcatcttttgttgcctgcctctgagcatcatt

SEQ ID NO: 4325 - DNA, 315 bp, Glycine max
  unsure at all n locations
tgggaatacgggagatctttcttgcatatgaagttctgctttgatatanatgtctaatgcaaatggaaggccattgaatgttattcttgtgggaatactttgatgagatagcttgaaaaactagcattccaaacattttaatgtcagcttgttatagcatgatgtgcttgctactatttttgagttctttgacccttcgaatggcctaactatcttttgttttgttcataagagcttggtggaattctatcatgggcttttgagcactggtctcatgtcatttggaccactacaacataacctatcttcaaagca

SEQ ID NO: 4326 - DNA, 384 bp, Glycine max
tctttaggaccttgaacaagcaatttactcctctttcagaaccatgctatgtgctcgcgactggtctctttcttccctccgcaacttgagttcactattgctaccccatagagctccgcgaaatttgttccggccatactcttccttgcgagccctcttggtctcttgttcaagggctcttgcggtaatttcattctcttcccgtaacccggcacactccttccgaacgtgtgtagcggccaacatgatcttctccttggcaagttttgcctttcctaactcgcttttgagagcttggacttcttcgtcctcttccggtgcttcaaaactctcttcgctgacgacttttaacttggcgagccaatctaaacctcgtatatgaac

SEQ ID NO: 4327 - DNA, 389 bp, Glycine max
tgagatgaggaagtgtagaaaggtgaaacctgtgatgtacctgtgatgtacctaagcaggcaagctcctggcagtcaacagataaaaggaacaaagaccacaaagcaaggaggcttgtgtggtggctggccagctgtgaatcttgtgtgatatatgggttatggcctctggtaatcgattactaagggtgggtaatcgattacaaggcttaaaaatgaagacaggaggctaagatggtctctggtaatcgattaccaagggttgtaatcgattaccaggcttgaaaacgaggtcagcaagctatgggggcttctggtaatcgattaccaagggggtgtaatcgattaccaagcttagaattgaaggcagcaggttgtagaggcctctgg

SEQ ID NO: 4328 - DNA, 383 bp, Glycine max
tcttgtacccccgctccctgcagtatatacacccgatgcatcttccttccaaatccacttgtcttctcgatccggatggatgctgataccttctagatcttctaagaactttacagccatctccatcacaccatcgaaaagttgccttctccatttaaagtctcattcccaacctatagttgtgaagttgcccatcatctttatgacatgttgttgctgtttggaaatggagaaaagtgtaaggtatttcaacttaagtggtactccatcctccttccatccatcctcccaaaatttgtccttttctccacaccccactttccattttatccctctatcgaaaccgctgccatctgcatctaaaggatctatgatatttatat

SEQ ID NO: 4329 - DNA, 391 bp, Glycine max
tgaaagtgcataccccaccatttttcatagtaaaacactggtaatgtgtctactattattgagatcatatctttctttgtcattggaggtgccacttgagctgccaggtctctccacctttgggcgtattctttgaaagattcgtgcccctttttgcacatgttctgtagttgcatcctatccggagccatattagaattgtattgatactgcccaatgaaggcaaccattaagtctttccaagaatggactcgagaaagttccaagttagtgtactaggtaacagctaccccgataagactttcttggaagaaatgtatcaacagtttctcatcttttgcgtatgcccccatcttccgacaatacatctttagatggttcttggggcaag

SEQ ID NO: 4330 - DNA, 378 bp, Glycine max
tcgatggtgtcgagaagaaatcacatgtgtgtcatcatcaaaaagggggagaatgtgaatgtatgtatacatgattttgatgatgtcaaagaagaatctaacaaggctgcttcaaatgataagcatttgcttcaagaataattcaagattgcttcaacaaacaaagccttgtttcaagattcactaaagaccaagccttgccttaaaacaaagtgctttcaagacatgcaaggctctggtaatcgattaccaggaagtgttatcgattacccgaagacagggttgacaaatagctggtgaaaaaggttttgaatttgaatactcaacatgtaatcgattaccacatgtctgtaatcgattaccagctacgaaactttt

SEQ ID NO: 4331 - DNA, 334 bp, Glycine max
  unsure at all n locations
tcatacaattctcaactcttttagccattgggaatgcaaaaggcatgggtctaccttgccttgggtaggagccttctcacagagagaacaaaaccaatcatttctccatttgaactgaaagttcaagtataaccatgataagaacttatatatctagtgaatccaatatttattccactaactgaataaactacaactataatgatcctcanagcacaggctctttaacaggtcacaagattaacaactttgtggatgtgttgtatttaagctgcttgaacatctcacaataacataaaacatatccaataagtaaagcttattccatgtttgc

SEQ ID NO: 4332 - DNA, 385 bp, Glycine max
ttgcggatttggtcttcgctggcgaaatgatcgaagtgggtctaaaaagaggcaaatctgatcatcatgctttgataaatgcaaaaaaaaaaattggggcaagtgaagagggtgagaataagggacaaacccatgctgtgactgccattcctatacagccaagtttcccaccaacccaacaatgtcattactcagccaataacaaaccttctccttacccaccacccagttatccataaaggccatccctaaatcaaccacaaagcctgtctaccgcacttccaatgatgaacaccacctttagcacaaaccaaaacaccaaccaagaaatgatatttgcagcgaaaaagcctgtagaattcaccccaatttccgtgtcctatgc

SEQ ID NO: 4333 - DNA, 460 bp, Glycine max
  unsure at all n locations
agatggaggttttnntttcattagtcatcgatganncgctagacnagcaagacncacgcttgctaggtngacggtctaagttcagattggaggcacttcatccacgtttctaacttgagtaccggcagccgcttgggggtgaggctaggcaagatccctactgggaggataaggtgccacctctaggcttagttcataacattgtcatgctagcatctgatctaccattattgtcacaatcacaccagacagagtggggaataccaaattcggatgcaacgtggaaactatttgtacaatcctaataaaaagtctactgctaatcaaagcaaaatatgacgtatttgcatcaagcaaagaataagttattcattattctcctgcggagtaaaccataacctggaggagatcattaagaccttgttggccgttttttttactaagatactacattcccagt

SEQ ID NO: 4334 - DNA, 186 bp, Glycine max
tgcacttcaatacaatgctcgattgaaggatttgtttttgagcttaacgacaacctcccgggagccaccttcgtccttgccaatgtgtatgatttagtgctggaactcataaaaaattatgataaatacgggaattaaacatgcaatccctttcattggattttactttttatatgaaccattata

SEQ ID NO: 4335 - DNA, 371 bp, Glycine max
ctcaagcttaacaaaatataaatctaggagcttctacctatgtattataaacaaatttaaattaaaactcatggagagtttagtaagggaactcagaaaaatagccccgtaaaataaaactcatggggtgcctcctcacaaagggggtcgcagtgaccaggcttgggcgactggttatcaaaaacacaggtgttcacaaaggcataagatcatttatgggggcttagatgtaatctggaatatgagagatgtttaatgaaaggaaaatggactccatttggataaaaataactactttctttagacgccttttttttgcctagattcttcacaacctatctaagtggttaagctactttccgcgttttata

SEQ ID NO: 4336 - DNA, 382 bp, Glycine max
  unsure at all n locations
tatgcgcatatttccttacgaacgttcacttgcacttgacattctattaaccaaaaaatgcacccatatacaatcaaggcagctttgttacctagattatttacatgcactcccaaggtgtacttgttacttacatcacacacatctccttggctgaatttacatacatgcacactcaaagcatttcagggtacccaaaaattgcacatgcgctcatcttggtatctctaatacctatacatatacaaacttcatgatgaatcttgactacctacacaataaggtgctacatttcatgcctttttttttcaagtttttactacctaaagccgtgtcataccctaatttcgtccggngacctttgctcgatgacgtgcgacca

SEQ ID NO: 4337 - DNA, 383 bp, Glycine max
  unsure at all n locations
tgctntcacagttcactctctttcataaattaggcctttctctctttcactccctctctcctctctttcactctctctcctcattaggccaccaccagccgattgcaaaccttccgtgcaatactggagattgtggaccggaagttcggctgtgtgtgcaatgtgctggcgtatggcggcggcgcaagccaacatcagcagcagcaccacgcgttccaaaggtgttcaaggcgtacatgaggctctggaagcaccagcaggagaaccgcgcgaagttggtggagtgcgggttgaagcagtgggaacttgacgagatcacgagctgaatccaacagctgtactttgggcagtacctgaggagcagtgagtgcaagttcctcggc

SEQ ID NO: 4338 - DNA, 352 bp, Glycine max
gtgtgatcaacaagtaaccatgcgttttgtctccagactttaaagaagcgctactaggaggcaaccaaaaattttctacgaagaagcttcctgcgtagtggtctatgtagggcaccattaaagaggattctagtgtgtccccacaagctgacacaggctttgacatactccatatatggagcgtgggacaataattacatgggggggcaataaagtgttctcatttctatacagagacaggggcagctgagagatgatgattttcgcactttcttggaggaggtggagcttgacaacagggatcgtcaaacttgtgatttattcttcattaatgttcgcaatgtctctatta

SEQ ID NO: 4339 - DNA, 355 bp, Glycine max
  unsure at all n locations
tgtaaaccccctagagcttggacaagtattgtgcgtgtctacttctgtcaagntatccggggtggacatgcttttggttttacaagtaaggtctaacgtgtttggtgagggaagcctctatatttgacaactctgcccttgtctgaccggtagagagtacattgaatacaaatgttatgctttttctattacgacaggtgtgtgcggcgctcgcatagcactcgtgcatatgtatcactcatggagtgggtacgtactggagatgtgatccgtgggtgagaagggttgtgtcatggtgcataaaaataagacaccgaatcagcttccgccagttaccaaagagtccatttaaatg

SEQ ID NO: 4340 - DNA, 353 bp, Glycine max
actaaaaactccgctttgcactccactcatatcggccttgacttaatctgactaacaccatcgacatagcggggtgtattatggacctcatatacaaaggcttctttgaacaactctgcaatccttcatacataggcgcatgtgcttgttgtaaagactcttggtcaaaggcacgtatcatatcccccaagtggactccccattctacatcaaacggtttatattgggacccactctcgatgtatgtcatattaccaagccatatacacgctggtgaatcgttctaatcccatcacacaatagatgctccccgttcgtgtccagaatttgtcgctttccattcaaacaattga

SEQ ID NO: 4341 - DNA, 262 bp, Glycine max
  unsure at all n locations
gtgatggtgtagatatgaaatcacatgttnggcattattaaaaagggggagaatgtgaatgtgtgtatacatgattttgatgatgtcccatagaagaatcaatcagcgctcattttgctctaagattcattcaagatctgttcatcaaacttattctngactcaagattacttttagatcaaaccttgcctcacactgaaaggtttcaagtcattctaagaacatgttatttattaccaatacatgctattgattaccaatg

SEQ ID NO: 4342 - DNA, 294 bp, Glycine max
  unsure at all n locations
agctntgataaagaaggcgatgggatgttcctattgtgacaaaaccgcccccattccgactctcaacgcgtttgtttccactgtgaatggaaggctgaactcatgcaaggccagcacaggcgccgtcgacaatgcatgtttgagattgtcaaaggccaaatgagctngcggggtccagtggaagggatcaacantgatgaactagactaacggagttgcaatcgttgcatatccactaatgaagcgacgataaaatcctaccacactaangaagctttgcacagcttttatgga

SEQ ID NO: 4343 - DNA, 432 bp, Glycine max
  unsure at all n locations
ntgaggctgaggacttatataacagtatcaaggttnttgttttaagagtttttggagatgagaataattctaggattttagaattccagtttttactattcatgcgcactattcacgtagaataaaattgattttctgcaattccatttttgcttcaatctacaatttcgttttctactgattaatggaaagctaagtctccagcgttgttttctcttgaggatcaaacacatctctctttgaggttttgttattactattgaattctaatcagttctttcttcttcaccaattactctgtatttgttgctattaatccatgcatgcttaatgcttgattaattatctctgcgcttaatttacattcatgcctaatgatncaattcgttcatgattaattggngtatgtgtngcttaatcacataatgacaa

SEQ ID NO: 4344 - DNA, 387 bp, Glycine max
  unsure at all n locations
agtcacctgaggctgcagctntcactacatcatttagaagcgttcaagagttttagaggcgcctaactggggcggatacattctttcctttgggtagaggtgcattcggaatgtgcaaaagagcattgggactagaaaatatgatgtatggcaagatctatctcagaggacaacaggctaacccatctgagatcacttcgggaatcctaaattagctctattacaaatgtgattcgaacatctttggagggaatatgtccataaattgcatcagatttagagatcaatcctacttgtcattgtgatcactgatcatatgaatcataattgtagttatcaatggttgcacgcatgatcatgagttgtgaactagagatgtttgactac

SEQ ID NO: 4345 - DNA, 354 bp, Glycine max
tatgcagagctgatgtatctcatgctgaaattggagtctctgaaagggtgcctcacaaatgagctgaggactccttaaatagccataacatctactgtagctacattgtcagttttgtgaccagaactatttacacagcataagtaatttcgaattaatcatcatttaatgaaataccaaaatagttgtcttcattttggtagaaaggatcatatttttttgaagaattattatcttccttctttgacgaagagccttcatcttcttcttgttggagaagatgtacgacttctattagattttgggccagactttcttttgatctataagtggcaaggaaaacagctaattgag

SEQ ID NO: 4346 - DNA, 413 bp, Glycine max
  unsure at all n locations
agcttgcgcaaatgggacgagaatgatgtgtgccattagatttattattaaaaaaggaatggatgagatttgttgatgtctacctgtttggtgggtaattgtaaaaaataaggttagtgaaaatgttcaattggttcggcatgcaaaatgcttcttatttgggatcgaactcacagtacactaatgctcgtggcccattaacattaaattactacccttcaataaccaagtaaacaactataaattttaaacgttatctaatattaaattgcacttaanaataattataaatgattagatgagttttaattacctatagattacgttaaattatatgtttggttttatttttcaaactacaccttttctctcttatctttttttaaattacacatanttttggaaaaattttc

SEQ ID NO: 4347 - DNA, 217 bp, Glycine max
ctcaagtgccacagatcatgtcacagcctttcctcctttattctctttatgcaagaaaataaatcctataatgggtaggattctcactggtcacacagtcactgcaacttatgcatgcagaattcagtttctcagtttctatacctagaagatattctatacatacctaattgtcattcaatgtgatctcagtatccaagttggatttcttctttgc

SEQ ID NO: 4348 - DNA, 405 bp, Glycine max
  unsure at all n locations
agcttttatgtgaaaggatgtgactcttcacttttgaatttcaacgttcaaaggcactggtaatcgattaccaaaacattgtaatcgattacagctttttgaaattaattggaatgttgtaaattcaatttgaaaactttttcaaaatagttntgctactggtaatcgattaccagagagtaaaaactctttggtaaacattttttgagaaaaatcatgtgctactcaattttttagaaaaactttttatacttatcttgattaagcattctcttgattcttgaatcttgagtcttgaatcttgatcttgatttttgagatcttgaaccttgaatcttgattcttgactcttaactntcttcttgagtcttgaattcttcttgattcttatcttgaactcttgaa

SEQ ID NO: 4349 - DNA, 316 bp, Glycine max
tgaaggtaaactagatgccttggttaacctggtaacccatctggccttgaatcaaaaatctacacctgtcgccagactcttgggtttatgctcctctgccgaccaccacacagacctttgcccttctatgcaacaatctaaagcaattgaatagcctgaagcttatgctgcaaacatctacaatagaccttgtcataccctaatttcgtccggggattataatttgatgatatacaaccattgattgaccgcttcgagatgtttggcaccctttgttgcacaatatgtgaagtcccgagacgtgtcgaaaatcaaa

SEQ ID NO: 4350 - DNA, 412 bp, Glycine max
  unsure at all n locations
agcttgttccttggtagtttaaacttatccttgcatcattttctgtctttggaaccaccattgtatgttttacgcttcctttggaaaaccctagagaaagagactttgtcaaagctatccttttctgaaatgggtgttattttcgtgaccttcattgaactccgttcgcattgacgtgattggaatttcaaaatgatgctccttttgtagaacccgtaataccccttagccttttcatgtagtgacatgagtatttgactcagggtatcgttgtcaacattatttctgaaatccgtatgaagtttccttcattttgacgtatagagactagcgttggaccgacaagcgtgaacgaggaagagacctctaagtgacgcacagaggaacccggcggngagctcacaataggtga

SEQ ID NO: 4351 - DNA, 423 bp, Glycine max
  unsure at all n locations
gtatgcccgagtcattcattcatatgagatgttgttgaagtattggcgatcagtattgccattccttggattatagggttgaaccaagctcatgcttttataaaaagggtcattaagtcaagttgaaatatggaagtaaccgtcttgcaaaattggggcaaaagatgaatcgagtcacatcactgcttcgtctactgccaaacatatttaggattattgatgtccttgttacatccagtttcaccttgacaaagatgtcatggaccatgttgaaaatctaaattgattcaaccccatatcctgcgtaaaaattcgcaatacttcaactgtacatcattcgcatacatccatgcttttcattggttgcattgctcattgcattctttccttgaaaaataaaatanaataaaatgaacttaatca

SEQ ID NO: 4352 - DNA, 331 bp, Glycine max
agcttcccgtatccatacttggaaggatctaattactgccttcctaaggcaatatcagtataattccgatatggctcctgatcgcactcagctgcagaatatgttcaagaaagagggcgaaacctttaaagaatacgcacaacggtggagagacctggcagcacaagtggctcctcccatggttgagagagagatgatcaccatgatggtagacactctgccagtgttctactatgagaagctagtaggttacatgccgtccagcttcgcggacctagtgttcgtcagggaaagaatcgaggtagggttgaaaagaggaaagttcgattac

SEQ ID NO: 4353 - DNA, 393 bp, Glycine max
  unsure at all n locations
tactcccgcttaataagtgcatntgatgtagctccatgtagagcttgtaggccttggatcttcttcatcaatggagtcctttgcttcttgaatatcaatggtagcggaatggagaagggggaaaggtgattggagacgccacgtcaaggagaagatgagtcaagaacaagctcaccaccatatgaagccatggataagagcttgaacgtaagagaagataaatagagggagagggagagaaggggcacgaaatttatgcctcaaatgaggtatgacctttgaagtgtaatttctcanataatcaaagttgaaaattgcacacacatggcctctatttatagcctaagcgttacacaaaattggagggaaatttgaatttctattcaaatttca

SEQ ID NO: 4354 - DNA, 401 bp, Glycine max
agctttgagccaaaatcctgactcaccataaaccttgacccagggtgagaatgccaatccttaccctcggaagcaaaaaaagaatagaggggaaatttccgatcaaagaaaaagagaaggaaaatttccaatgaaagcaaaaaagaaatgaaggaaaattccccaatcaaagagtgggagaaagcaaaaaaaggaaaagaaggaaaattccccaatcaaagagtgggagaaagcaaaaagaaaagaaaggaaaattcccaatcaaagaatgggagaaagtaaaaaaggaagaagaagaaggaaagaaagctcctgatcaaggatcgaaagaaaccagaagaaatgtgcagagaggtctttggaccagacaatatctgaacagtacagaattgtcccaaatg

SEQ ID NO: 4355 - DNA, 421 bp, Glycine max
ttagaaaatgatttctataccaaagttagtcgtataatgcaactaacaaggatgaagctttaagtgtgattcctttctttttcttatcattctcctcatgttgattcagtctcattagatccatttcgtgttcctataactttccaaataaagttgcaagagacatgttagaaagatcccttgattctgtaatagttgttacctttggttgtcattccctacttaaacatcttagaactttattaataagatcctcattgggaaatatctttcctaatgatgcaagatgatttactatgtgtgtgaatctcttttgcatatcatgtatagtttcatttggattcattctaaacaattcatattcatgggttaaggtatttattctagacccttttacatctatggttccttcatgggttac

SEQ ID NO: 4356 - DNA, 403 bp, Glycine max
agctatgctgatttagttttcgctgatgaaaagatcgaagtgggtctgaaaagaggaaaatttaatcatcctgcttggacgaatgagaaaactggggctaatgaagagggtgagaataaaggagaaacccatgttgcgactgtcattcctacatggccaaacttcccaccagcccaaaaatgtcattactcaaccaatatcagctcctctcattacccaccacccagtcatccacaaaggtcatccctaaatcaaccataaagcctgtctaccacacttccaatgacgaacaccacctttagcacaaactaaaacgccaaccaagaaatgaattttgtagcaaaaaaggctgtagaattcaccccaattcccgtgtcctatgctgacttgctcccatatctac

SEQ ID NO: 4357 - DNA, 357 bp, Glycine max
tgtatagttccccaatctatggttattttgtagtcaagaacactcaatcatccataaaggcaacccctaaatcagccacaaagcctgcctgccgcacatccgataccaaacaccacccttaacacaaaccaaaacaccaaccagggaaggaattttccagaaaaaaagcctgtagaattcaccccaatttccgtgtcgtatgctaacttactcccatatctactcaataatgcaatggtagccataatcccagcaaagattccacaacctccattttcttgaggatacaacttgaatgcaacatgtgcttatcatggaggagttcccgggcattccattgagcattatatgaccctg

SEQ ID NO: 4358 - DNA, 379 bp, Glycine max
agctataaaaatatttctcacccataactaattaaaaagagatttatgtatatttatttaaatgattattatgaaaaagaaatattagtattattttttatttttttagctcaacaagagtagtctggtatttctacgtattttcacgcgcaataaaagaataagagttatgttgtaattctttgtagaaaatatttgtaaattgatatttttatattcttaattttgttataagcttttttgtttacttaattatgaaatttttattgtggcagtaaattaaatttgatttaataggatcaattaaaagagaagttttaaaacaatcaatcgtcacacaacttatgtttcaacatctcaaaattaaaaagatgtcaca

SEQ ID NO: 4359 - DNA, 363 bp, Glycine max
tcatagctaatattagtcaatgtcaacctagatatactcaccaatatattacaaaatttgacattcataaatgtaactgacttttgattcatataacttgtgaaattataagaaatgactcaactcacagcaacattttctttatgtagtagaaagtggacaaggagatacccaagcaatattcatcaactaaattatattgatttaaaccacaaatattaaaatttggaaattacatctatgcttaataagactcagtactaaccagtgagtagagatccagagtactaaccttaataaaatactgatacataccacttggtgtttcttgtgtccaatgcacgctgataatcaagaaagcat

SEQ ID NO: 4360 - DNA, 383 bp, Glycine max
agcttcttggcaatccccattccagcgatcagtttggtttttgcgtaagagcttgaacaacggctcacaaatggcggtgagctgtgatatgaatctggcaatataattcaagcgtcccaggaagcctcggacttgcctctcagtacgtggttctggcatctcaaggatggccttcaccttttcggggtctacctctatccctttctggcttacaatgaaaccaagcaatttccctgatttgaccccaaaggtacacttggcggggttcaaccttaactgatatttcttaagcctttcgaacaacttccgcaggttgacaaggtgttcttcctcagatttagatttagcaattatgtcgtccacgtagacctcgatctcttgat

SEQ ID NO: 4361 - DNA, 398 bp, Glycine max
tgaaggtaggagaagatgagtggagggagaaggagagaaagagcacgaaattttatgcctcaagtgaggtctaaaatttgaagtgtaattctcaaatgatcaaagttgaaaaaaatgcacacacatgacctctatttatagcctaagtgtcacacaaaataggaggggaatttgaatttctattcaaatttcacttgaatttgaatttaaattggtggagccaaatttggagccaaaatttcactaattatgattagtgaattgtagctatgattcaacccactaatccaagatcaagtccaagattctccactaagtgtgcttatgtgtcatgaggcatgtaaaacatgaaggatatgcacaaagtgtgactatatgatgctgtaatggggagtagc

SEQ ID NO: 4362 - DNA, 218 bp, Glycine max
agctattgcgataacttcatgtgctactcaacgattggaagaactttttttttgtacttatcttgattgagccttttcttgattcttgaatcatgagtcttgaatcttgatcttgattattcttgattcttgaaacttgaaacttctcttgattcttgaattgatcttgactcaatcttgaaattattctcatgggctttttgacatcatctctgcta

SEQ ID NO: 4363 - DNA, 414 bp, Glycine max
  unsure at all n locations
tttcgcaaatcttacggttttatctgagatctagccatgcgagaagtatccacagaggccaattcctcccttccccagtattatgatcagccgttgagatgctttacctttggggacttccaactgtcacccatggtggaagaatttgaagagatcctatgatgtgctctacggggaaggagaccatacctcttctcagggttctatcccttattagctagaatttcaaagatagtccaaatctcggcacaggaattagaccatggaaaacaagtcacaaatggggtggttggaataccgagaaaatgtttggaggcaaaagcaagaaccttggcaggtagaggcgaatgagccccgctcatagacattctcgcactggtgatcttcngaggagtcctctntcataatatggat

SEQ ID NO: 4364 - DNA, 102 bp, Glycine max
agcatttgacttactataccaagctctatgaaccagggacggaaaaagatctatatttacgcttgctcacggtatacagaggaaaactagacatttggatca

SEQ ID NO: 4365 - DNA, 399 bp, Glycine max
  unsure at all n locations
tgaaccagaaccggtgagtgtgtgaccttaaactgcgagtgaacgactagctatgagtaagaatctttgcatgaatctctgaattttagaatgaaatgtataaactatgacatgatgaagaccataattgtgcattacaagccttttgaccaaaaagcttaccttgaatgataattatattctctgcaccctttttgagctgaatgatattgtcaaaaatttgaaccctgaacttaaataaatgtctcctgataccttgtttagattctatgagagcatatggttcaaggcaaaattaccccaaatntgcgggaagggaactaattgcgatgcaaagaaaanaagagaaagcatcagcncacacaacaattaagttgtatggtaaaataaacagagaga

SEQ ID NO: 4366 - DNA, 378 bp, Glycine max
agcttagcatgacctccgcgatacaagccatttgatctttaaaggtcgatagggcggacttcatctgctcttgcactccctcttcattatccattgttctggatcgagtgttataggggtgcctctgcactttcttagttattgtgagttccctacagaaacagacaatggtgagtatgccaccaaaacatgaatatgctcatgaattatcggagcacttggatccacctcaagatttttacataacgtgaagagtttcagaacttctcgttgtataaaaaggaacaaagcttttatctagccaagatcatacaaaagtgttacaacaaaacctaacggtttctaattatatgggccatcaaatctatcatgtgttga

SEQ ID NO: 4367 - DNA, 355 bp, Glycine max
  unsure at all n locations
tgtagggaccaccggnacgaatagcatcaatgttcttgttcagtgaagcatggtcacccaccaacgagtttgaagcaaccttcatttcttccatttgcaaatctttcccgcgaacagaactagaatatgaaaccctttaacgagaaagggtgataatgattaatagaatcataaaaggaaaagaaaaatacaaacgttaacatatagatgtgcaatacagatgagggtcttgaattattatttacctggaacctacacatatatgtattgttgcccatgatggcccttgaggctctgaatgggctttcgattagggtttttggagcagaacacaatccataagctagccacgaca

SEQ ID NO: 4368 - DNA, 421 bp, Glycine max
  unsure at all n locations
agctntataagcaaaaagtaaaaatctatcatggcgaaaagctatcaaaaaggaatttttagcttggtcaacaggtattgttatttaattcttgattaagattgtttccaagtaagctgaaatccaagtggtctagaccattcatcatcaaagaagttatgccatatggagcagtgatattggaggacccaaccaccaaaaggacatggaccgtgaatggtagaagaatcaaacactacctaggtggagatttcgagaggataatcactgttgtccagatgcaaaaggcttgaaccataacgaagacgtccaattataaagacgttaaagaagtgctcttgggaggcaacccagtgttttttaaactttgtcttaacttgtgttactttaatcttatgccttatatatctaanacttactt

SEQ ID NO: 4369 - DNA, 362 bp, Glycine max
  unsure at all n locations
tctccccaatttctataaatagggggagatgtgatgtataanagggttctgccccttaggcatttctctctctttcgaatttgcttaggaaaattgtttccgtgaagaaaatccaagccgaggcgctttcgtaacgtttccgtgagtgatttcgtgaaggttttcgaccgttcttcattcgttcttcatcgttctttagtcttcaacgggtaagtacctcaaacctagcttttcaattcattctatgtacccgtggtggtccacaattggtttcatgtatttttattctcgnttcatttactttttatacccccttttgacgtgcttaagccattntatttaagtcatttctcgcttaacct

SEQ ID NO: 4370 - DNA, 409 bp, Glycine max
  unsure at all n locations
agctttataagcaaaaagtaaaaatctatcatggcaaaaagctatcaaaaaggaatttttagcttggtcaacaggtattgttatttaattcttgattaagattgtttccaagtaagctgaaatccaagtggtctagaccattcatcatcaaagaagttatgccatatggagcagtgatattggaggacccaaccaccaaaaggacatggaccgtgaatggtagaagaatcaaacactacctaggtggagatttcgagaggataatcactgttgtccagatgcaaaaggcttgaaccataacgaagacgtncaattataaagacgttaaagaagtgctcttgggaggcaacccagtgttttttaaactttgtcttaacttgtgtactntaatcttatgccttatatatct

SEQ ID NO: 4371 - DNA, 364 bp, Glycine max
  unsure at all n locations
tctcccncaattntctataaatagggggagatgtgaagtagaanagggttcggccccttaggcatttctctctctttcgaatttgcttaggaaaattggttccgtgaagaaaatccaagccgaggcgcttccgtaacgttttcgtgagtgatttcgtgaaaggtttcgaccgttcttcattcgttcttcatcgntctttaatcttcaacgggtaagtacctcaaacctagcttttcaattcattctatgtacccgtggtggtccacaattggnttcatgtatttttaattctcgttcatttactttntatacccccttttgacgtgcttaagccattttatttaagtcatttctcgcttaacct

SEQ ID NO: 4372 - DNA, 374 bp, Glycine max
agcttcttataccaatgtcacgaggagtgtggtagtcagattcatcaagaaggagctaatttgtcgatgcggactccctaggaagatcatcactgacaatggcaccaatctgaacaacaagatgatgtaggaaatgtgcgaggatttcaagatccagcatcataactccaccccttatcgtccaaagatgaatggggctgtagaggctgcaaataaaaatattaagaagattgtccagaagatgaccgtgtcatacaaagattggcatgagatgttgcctttcgccctacatggatatagaacttcagtacgaacttctactggggcaacgccgtattccttggtttataggatggaagcaatactcctatttg

SEQ ID NO: 4373 - DNA, 344 bp, Glycine max
  unsure at all n locations
taagcctccagcttgcctgggcgagctgngcggcaagcttctcctccattttccctataaaatggcgttggaggcttgagggaaagggttcagcccctttggcaattagatttcacttaaaattagtgaggagaagaaaaaagaaggagaaaatccaagctgaggagcttccgtaatgcttctgggacgtttccgtgatcaattccactaacgttcttcaccattctttgtcgntctttattcgntcttcatcctttgttgatcttcgaccggntagttttcgatttcgaagctttgaattcattctatacacccttaggggtcaattctcgctttggtttaaa

SEQ ID NO: 4374 - DNA, 412 bp, Glycine max
agcttggagaagatgcttcaatggaggtattgaatgagggagagaaatagagaggggggagcacgaaattgaaggaataaaagaggtatagaagtggaactttgaagtatgtctcacaagactctcattcatcaaagttacaacaagcgttacacatgcttctatttatagactaggtagcttccttgagaagctttcttgagaaaacttccttgagaagcttctttgagaatactttcttgagaagctagagcttatctacacacacccctctcataactaagctcaccatcttgagaagcttccttaagaagattcctaaagaagctagagcttagctacacatacctctctaatagctaagctcacctccttgagatgagaagctagagcttagctacccaccccctat

SEQ ID NO: 4375 - DNA, 403 bp, Glycine max
  unsure at all n locations
ctcaagcttgagatgaggaagtgttgaagggtgaaacttcctgcttttattgntgactcacagagtggtacctggagatatgtcgcgggggtcacgagaccttgctgacgtcaggtggggtgctattgcccataaccaagcttgaccaatcacgacccaacccgggcatagtctgtcagtgagaacctgtgatgtacctaagcaggcgagctcctggcagtcaacagataaaaggaaaacacgaccacaaagcaatgaggcttgtggtggctggccatctgcgaattttgtgtaatatgtggatcgaggcctctggtaatcgattaccaatggtgggtaatggattacaaggcttataaatgacgacaggaggctaatatggtctctggtaatcgattaccac

SEQ ID NO: 4376 - DNA, 388 bp, Glycine max
agctaggagaagatgcttattggaggataagaaagagggagagaaagagagaggggggagcacgaaattgaaggaataaaagaggtatagaagtggaactttgaagtatgtctcacaagactctcattcatcatagttacaacaagtgttacacatgcttctatttatagactaggtagcttccttgagaagctttcttgagaacacttacttgagaagcttctttgagaaaacttccttgagaagctagagcttacctacacacacccctctcataactaagctcaccttcttgagaagcttccttaagaagattcctaaagaagctagagcttagctacacatacctctctaatagctaagctcacctccttgagatgagaagcta

SEQ ID NO: 4377 - DNA, 282 bp, Glycine max
ggtacctggagatatgtctcgggggtcaggaaaccttggggacgtcaagtggggtgctatttcccaaaaccaagcttgaccaatcccgacccaacccgggcatagtcggtcagtgagaacctgtgatgtacctaagcaggcgagctcctggcagtcaacagataaaaggaaaacaagaccacaaagcaaggaggcttgtggtggctggccagctgtgaattttgtgtaatatgtggattgtggcctctggtaatcgattaccaagggtgggtaatcgattac

SEQ ID NO: 4378 - DNA, 408 bp, Glycine max
  unsure at all n locations
agcttggtgtggaatcgatattggggaatgccatgtgggttcgngnatttatagactaagaaatggaaatggctttggattttggattcggcttatttttcaactacataagggtttacgttatggaagctaggatatgagagattgagacgaacggatctctatggtacgtacacactgacttttgctccatacaggcttgtacccagaaggtttacgaatgtacatgtcatttattatgtgagtacgtgtattgaatatgctagctcttaaatagtaggataataatatgtaaagacgattaatagttatatcttttttttcgatacctgagtaatacgtcctatttgtttctagatcaacattatatgttatatcaagtagccatagaccacgtttacgtataaa

SEQ ID NO: 4379 - DNA, 465 bp, Glycine max
  unsure at all n locations
ctgancctgatgacgcgtcgtaaccgagacctataaaactcagctttaaccgccccagagaggacgtgaattctataagagctttgacggttgagggagttaatgggtttcaaagttgcttaggagaagaggaaccgaggaagaagaaccagccatgacgcgctaccgaatcgtgactgagatcattccctacatgcgtttcatggtctgtgattctcgcgcaacaatcggttagttttgtgcgggtggatagcgtatgatctatgttctcatacgggtcctctccgcgatgatgtgcataatcagcttcacgtctatcattggtaatctcattacttatttgtaccgcttatgataactgaacactagtttcgtaaagtagtctttaatgagactgaaagctaataacaatacccagatggaccgactcataattggacttctctcctcagaaagacacttgat

SEQ ID NO: 4380 - DNA, 354 bp, Glycine max
agctaggagaggaagctactatggaggataagacagagggagagaacgagagaggggggagcacgcacccgaaggaagaaaaacggagacaagctgaaccttgagacgtgtgctacaagactctcattcatcaaagataccacaagagttacatatgcctgtatccatagacaaggaaactcccttgagaacctttcctgagaaaacttccttgagaagcctctttgacaaaacttccttgagaagctagagcatagctgctcacacccctctaataactaagctcaccttcttgagaagcttccctgaaaaaattcctaaagaagctacagcctaactacacccacccctcta

SEQ ID NO: 4381 - DNA, 461 bp, Glycine max
  unsure at all n locations
aacattgacccttgatagaccggtcctatgcggagacactcataatactcagcttagcttctctagggagacccctgttgttttcctttttgtccagtaacagcgcggacggagccgagaccaactggaccacaacctccagcaattaatacacttgcttctacagagttgagaaactatatcactgaccagattcaccgtgaccagctctcgtnattcttcctgaagactcacgtgatgacantgctgctccttctaattcaccaacctgctgcctataggatggtttggacctttgtggatggatggacgactgaggaagatgtggtcatcttgacatgaatgtgacactcttgagggacatgggcttcttttgttgcgcctattggttactattgatataatcatggctttacaacaacatcttctttttggttattttgcgcatgggtagcttagat

SEQ ID NO: 4382 - DNA, 373 bp, Glycine max
agcttaatctttccctatctcaatagaccatcttcttgatcaaaacttgaagacacaacacgaacaaaacaaacaaaatggttgatctggaatgattacatccaccccaaaacaaatgcgaaaatgatttgaacagaagctcatataccaatttattgggtttaagactgtaaaatatgaaaaagataggaaaacaaatgatataaggaaaagagagataacacaacaatgaaagtttattgcatataatagaaaatggtacaatgaaagaggtgttcataagctctctctaactaactaattccttttatagaagtgtacacacaaaacagaataactgaaaaacagttataacaactaaagcagttataac

SEQ ID NO: 4383 - DNA, 145 bp, Glycine max
tcatgtattcctagattacaagacatttttttggagatttatccatgttcatcatatgccaaggatcgtggattggttgatttacactaagctcatagactgcattcattagatgtaaggacttgctacataatgtgatgtttgt

SEQ ID NO: 4384 - DNA, 384 bp, Glycine max
  unsure at all n locations
agcttgtaaattntttacacctcgtgctgtttgtattaattattattgttaaccttccagaatatatattcgtatatcatcattcattttggtgtctttcctctgtgggcatggggatattgtcctaatttcttttagaatgcatttagattcataattttacttgaggaaagtaatttattagataatttaaatttctttaatctaaaattgattgtttgaatgtttttttataaagaatttaaatttttataattttaaacaattaaaaatatagaattttaatttccttctaaaaagcgagaaattgatattctcttcttgataaaagagccttacaaaatatttgcgtattttctttataacctcccgtctctcttccac

SEQ ID NO: 4385 - DNA, 420 bp, Glycine max
  unsure at all n locations
tgaacatagaagaatctgtttcgcattacaactcaatgtttcaacatatgaagacagtgctatgtaaaaatatacatacactgatctaaacatgcaaataaatttaaatagcatatttagatcaaacaacggaaattaaaagaattacgagcatatctctggccattgcaaattgaacgggaagcggcgcacacactaacctgaaagacagttntgttcttccatacccttactcactctgaatagatgatgtattttttctgaatagagaagtgggtttggtgatacaaaacttagagcaccccatcctatttatagagtctgtccatcacagagctctcagcttgttatcagacagcttgtcatcagaacgtgagatangaagttatgaaacgtgacatacaaagtgatcagtacatg

SEQ ID NO: 4386 - DNA, 276 bp, Glycine max
tttaggccataccaagatttccacattaacttcctcctgttgcatactcgtgattaaggtaattggagcttgacaaagatccgaaaggagaaaaggtcacgaattcattcctcgctatcaaaaataacaattgtcattgaccgattaaaaaaaatactgtggtgctaaataacctcttgaacaaacgatgcatcaacaatttcgtttatacagactaattgattaattactcactttagtaaacagtatatgagaagcatgacattaagatagtga

SEQ ID NO: 4387 - DNA, 338 bp, Glycine max
agcttggaaaatggcagggcaatcttgctaaaatcctggatgaatctcttctaaaaacttgcatgtccgagaaaagaacgtacttcctgcatagaagcgacgtaaggaagagaagtaataacatcgatcttggccttatcaacctcaatacctttactaaagaccaaatgccctaagactatacctttatggaccataaaatgacatttttcaaagttaaaaacaaggccaatctcaatgcattggtcaaaaaatctagagaggctactcaagcaacccacttgagatttttcactccctttgtaaaaatcgtttacaacttctgaaccacacaggga

SEQ ID NO: 4388 - DNA, 300 bp, Glycine max
  unsure at all n locations
tctataccaccccatttctcttcccctttggcaacttctaaaatccaaagtacgtggtaataacaacacaatagcattcatataattcaatataacacacaaacactaaaaccaaaaataatccaaacattcataaggtaaataaataatccaaacattcataagtcaaaccacatagaatctaatcataaaagactaaagtccaaataccaaaagataactaaagtgcagaaaatgatagcctanagatcatagccaaatacacggcttataagaaaagagaactataaactaaacact

SEQ ID NO: 4389 - DNA, 423 bp, Glycine max
  unsure at all n locations
agctnttaggcagtaaaatagtataaaatctaatgaaagaaaaaataagttggaggaaaataatcataagctacaaatgttcaatttcataaaaaataacttttttcttagaaagaaaagcattttgtaaatttaatttaggattccaaatatccaacttaattgtttcggaaaaaacttaaaaaaaaacagttaaaattttagattatgagttctcccaaacattttaatcacataaccttatatttcctagattaatacttaacctttctactatttttgtcccttttttttctctcttcttcaatcaatttaattctctcacaatcttatctaatattatcaagtgtcttaatttagtcatatttactatatttttttaaataaaatgtttaataaaaaaattaatgaaacatataaagc

SEQ ID NO: 4390 - DNA, 365 bp, Glycine max
  unsure at all n locations
tattgtgtcacttactntntggttagggcgtctcaatttcatgttagctcttagattttttttttttattaatccctgggtgtattcatcatttcattaatatagaaatgatgagctgatttcataaaaaaaaagtctgagatggacttttgtgctaaacaaagggcaacgagtaaaatatcaaattagtccctcatttttagaagcactgtcaatttgatccctgagatttaaaaaatatcaaaatgatcctcgattttacatttcgtttgccacgttagcccctgtcattaataatctcctaagaccgctagtaaatgtgtgatatgacacgctaaatgtcacctagacacacacgtgaaact

SEQ ID NO: 4391 - DNA, 417 bp, Glycine max
agcttcttagtcttggctgatgaagatgaattcgtgtttacttcatgcactcctctaatgacaatagcatcatcacttctatcactaaattgatgggagtttgaagccatcttctcaattaaacttctggcttaagtaggggtcatgtctccaagggctccaccactggcagcatctatcatacttctctccatgttactgagtccttcataaaaatattggaggagaagctgctcaaaaatctggtggtgagggcaactggcacatagtttcttaaatctctcccagtattcatataagctatctccactgagttgcctaatgcctgaaatatcctttctaaaggttgtggtcctggaaacacgataatattttctaaaaagaatactctcttgaggccgcccatctcgtgatgga

SEQ ID NO: 4392 - DNA, 329 bp, Glycine max
ttaccagaatttctaggcgaaattcatgttaaatatatttgatgtgctctaactcatatatatatatatatatatatatatatatatatatatacacacacacacacaaatattaattacaaagacatctagaaaattttgttttctctttcacaatattaacaaagtagtgaatagaataatataactcaagaaaaagagtagaaaacaccctcaaatttgacaagagagttacaaagcatttcttttactggcacttaatagaatttttgtagttacatgtaactagtgatgacatttatcatcttccatggattagaaatgactct

SEQ ID NO: 4393 - DNA, 410 bp, Glycine max
  unsure at all n locations
agcttggttcaaccccataacccaaggaatggcaattttgattgccaatacttcgacaacatttcatagagatgaaagactcgggaatacatatgttatgcatggaaaatgtaattatgagattgagatgcccgaagaaacatcatttcctagttaaccacacattaggtaccatgctcaatcatttagntntggtttttttcttttttttttggaaataggtttatgatcccaacatggtaggctcatggtacctaacacatgaaactaagaatgcattgtgaattttcatgcttcctttttttgtttttgttttgtagaggaaaatgcaaggatcatgcatgagtaaacatgacaataaaaggtatgcaaaaagcatggtagatgcagatgcatggtcatgaaatgac

SEQ ID NO: 4394 - DNA, 309 bp, Glycine max
tgaggcacctgccttttaacctaatgtccccaaagtggtcttacccaaggatcttgttttccatacattacgaaaattggcaccttgattttttgacatctaaatggaaaattaacttaaatagtattatttatcattttttgaatttaatttcagaaaccaaagttcattcctgaaaattcagtagcatgttatgtcaaataacacttgctgcatctgatccccacatccctataaagaataacttcagattttcacatcccttacgatatattttgctaagtttcacaacctcacacacaaaagatg

SEQ ID NO: 4395 - DNA, 394 bp, Glycine max
agctttgagctttgaacacccacgagtgtttcagcaccctagtagcaacagtgtatgttgggttttcttcgagccagacttccaagaacagtgtaaggggttctgtgggttcgagcgaggacaatgtgggtgttgaaggagcattttccggcagatttcaggcgggaggagaaagagaagagcgattttagacaggaggatgacaaagagaagagggagggaaaggttttcgagcgcgcggggcttgtgaaatctcaagttttaacttataaacataacaacatcggttttttatggataaccgatgttaactgaatataaaagctgatgttaacatcaaatagattacatcaattttttaaccaaaccgatgttaaatcaactccctaacatc

SEQ ID NO: 4396 - DNA, 418 bp, Glycine max
  unsure at all n locations
tagtaaatatggtccaatgaaggaggtgaagttttattgagaaggcaaatgggaagtcgaatggctattgtcaagttgagttatttgacccttttgctgctactacttgcaaggaagggatgaatggattttttttaattttaatttaatttttcattctaaattaattttaatttaattaaaatatgatgttatatcagatgacaagtggtcagcatacatgtcacacttaatctaacgtgatatcacaagtagtttgtcgacgtatcaaataaataaccacatcagcaattaatggatcctttntaacgacagagacctcatacaaaacttttaaattatagtgacccatctcannaatgaaaaattatgaggaatcaaatgtaaaattcaagtatatatcangggatcaaaatat

SEQ ID NO: 4397 - DNA, 366 bp, Glycine max
agcttatctgctataagttagaagctaaataactaaaagcttatattctctagctgatttaatttacagtatttaataagactaatatttaaaaaatataaatgtcaaatgatgaaaaattatatatttattatttctaacatttaaattttatgtctaataaatttcatcttaaaaagtaggtaaaattttaatctctttttgttggggtttcaatgctatacaatggattatgcataattttgatatttttatcatcaactctgatttagaaaccaaatattttaaccataaatccaaataaacaatgcaataattcattaaaataaatagtttgacattaaataaattaataaaaaagtagaa

SEQ ID NO: 4398 - DNA, 440 bp, Glycine max
ctcaagcttgtaggctacatttacaaccatacattggctttgaactctatgaggaaattcacactttaaactgaattagagacatggagttacaagatttgctaccactttcttaactttgcaaagattgcataagcaaaaggccaatcttagaaggatgtttaattcagatgaatggttgaagtctaaggcagctaaagagcccaaggggaagcaagcaacagatgttgttcttatgccatcattttggaatgatgttgtttatgctttaaaggctatggggcctcttgtaagtgtgttgaggttggtggataatgaaaaaaaacctacaatgggtttcatttatgaagcaatggatagggccaaagaagcaattcaaagagctttcaataacaatgaagggaagtataaggatatcctttgcatcattgataaaagat

SEQ ID NO: 4399 - DNA, 391 bp, Glycine max
  unsure at all n locations
gatccttaagtcacctgcggcatgaagcttggtacctccttcttcactacatcaagaatcaccgggttgagtcttctctgtggctgttgtcgcaacctacccttcggcgggagggtgacgcatgactcgcgggtgcatgttccaagaaaggaatatgcgcggagtcgccaccaacgtttatttgaggaaaacgtcagaaaaactggaaaagacgtgatctacgaactttaagtgaaaggttcgggagttgtatttacgcacggggaaggtattagcaccccacacatccgtcacaagagacgacaacctttattcaaatgtgcaaatataacttcaatttatgttatctttcctttttacgtacttatgtnctttttatgcctttttatat

SEQ ID NO: 4400 - DNA, 372 bp, Glycine max
  unsure at all n locations
taactccttcactgtcttttaaggtttgtagtacgaccatgttgcaggatggatgcatgaaaaccaggttgctatgcttaatgaagaaaccgatcaagatcagccgaattgggtgcaagcatgtcccctagactttgaattgagaaattggcagatcatagagcaacccgagatttatgatttgatgtaattaaacattcccagatcctattgctatgcctaaggctttaggattcacatgttgttgagcgtacttttcttttcaattctagtgatcgntaataaaatgcatttcaaagacatatttccttctgcatctcttaacatatttattttcgttgcaattaaatgagttgctgcatatctaataat

SEQ ID NO: 4401 - DNA, 383 bp, Glycine max
  unsure at all n locations
agcttattggatagaatactccaagaggattgggctagagcagctaaagaaggccctaggattctcatgaacctcanggtaaaattttgagcccatgggccaaggctgggtccactcttctttgtaaatattagaataggttttctttcttttaggggttgtattttgatgcaatnctaccccttaagcttattggatagaagactccaagaggatcgggctagagcagctaaagaaggctctaggcttctcatgtacctcagggtagatttctgagcccatgggccaaggctgggtccactcttctttgtaaatattagaatagtgtttccttcttttaggccttgtattttgaccattctagtagtataggaatttaccct

SEQ ID NO: 4402 - DNA, 278 bp, Glycine max
tgaattgaacaatggaagatcttgagaaattcaatcggtcttaacttttcactcggaagtccgattcacgcgcataatatattgagacgctctcgtgaaattcaaatggtcataacttttcactcagaggtccgattcatgcgcataatatatcgagatgcacataattgaacaacggaagctctcgagaaattcatatggtcataccttttaactcggagctctgatttaggcgcataatacattgagacgctcgaaattgaacaatggaagctctc

SEQ ID NO: 4403 - DNA, 385 bp, Glycine max
agcttcatgggaaaccagtggttgaagggcaaggttggatggtgaagttgatgtgcgggagtcataatcatgaattgcgaagtcattagttggacatccatatgctgagtgattgactaaggatgaaaagataattattgctgatctgacaaagtcaatggtcaaaccaagaaacattctgctaacgttgaaggagcacaatgtcaatagttgtacaacaatcaaacaaatatacaatgcaagaagtgcatatcattcttccattagaggaagtgatactgaaatgcaacatctaatgaagcttcttaaacgggatcaatatatttgttggcatagattaaacgatgaagatgtggtacgtgatatcttttggtatcaccctgat

SEQ ID NO: 4404 - DNA, 350 bp, Glycine max
  unsure at all n locations
tgtagaaattgattacttaatttttttttgagacaatgattgatttattcatgaatctctgctttaatcgattaccatgtgatataattgattacttctcccttaaaaagtgtatcaaaagttatcaagaacacattgatcaattacattgaggatctagtcgattacattgttcttaaaagttttctagttctcggaagaacactntaattgattgaaatgataatataatcgattaactgatggaagcttgcttgtggtgcttctatggaggctggatctttgagcttcaatgaggtcctttaatggtgatttctccaccatggagatgtagcggaagacaaaggaga

SEQ ID NO: 4405 - DNA, 336 bp, Glycine max
agctgttggagtagaaacatttgaccaattcattttatttcagaaaaagaaatcatatctagtcaaggtctgagagaccatacaaatttcctaacgatttctaattatgtgggccattaagactatcatatgctgacaatacccgacaagcccatgaatctctttcggggcggagtaggtgtctgccatcgccttggcctttgcttacaatcggcgaagttcttgactcccgttcaaggtaaaagcaaaccgatccatccacatggttgcctattggtggagagagatgataccccttcctttagcttctatctccgatatacttgggcatactca

SEQ ID NO: 4406 - DNA, 401 bp, Glycine max
  unsure at all n locations
tttcgattcattctatgcacccatgtgtggtccacattgcgtttcgtgcatttttactctcgttctgtgtactttttataccccctcttgacgtgcttaagccgntttacttaagtcatttctcgcttaacttataaataaaataaatttccaccgaacgtttgaattatattatccgttaacttcggttaaaatcatttccgaccgttcggacgtgccgtaaccacgttggaaatcaaaaagaggtcaaaaataatataataatcaaaaaatatcttttttagtgaaataaagcggaaaatcaatcggacgttttctctttgggatttctcattcttaatcgaattgattaataactaaggtgaaactaaggctaacatcaactcgcctagtcgagctcg

SEQ ID NO: 4407 - DNA, 374 bp, Glycine max
agctttggctattcaactatcataatttttgactcgaatgtatgatcgatgccgattatatatcccgacactcaaaatggaacaacagaagctcttgagaaattcaaatggccaaaacttttctctcggatgtctgattcacgtgcattttatatcgagaccctcgaaattgaacagggaagttttggcaaatatcaatggccatattttttagtcgaatatatgatcgacgcccatgaaatatcgagacgctcaaaaatgaaataagacagctcgcgagaaattgaaatggttataactgtttacctggatgtgagatttacgcgcataatatattgaagttttgaaattgaaaacgaaaagtgttggctaat

SEQ ID NO: 4408 - DNA, 402 bp, Glycine max
  unsure at all n locations
tcacaacacagcaacacattatctaggngtccaatacactcttaatctaagggagtntctaggtttgagaagtgaaaccgagaatgaggtaaatttgaagcaaactctcacctcacacaagtccataacatgaatttaaacttgttcaaactggatttacacctaaaatttcaccgaatcaaaatttgacttttcaacacccaaatttaccctagaaatggctctttgttcactttggtcatttgtttttctctctagcacagcccaaactttctcacatgttctaaatggcatttcatgctaggattaactcactttaacctccatttaccacagaatccagattgaccttccaactctcatagcctcacttctttttcactcataacaccacattctcac

SEQ ID NO: 4409 - DNA, 362 bp, Glycine max
  unsure at all n locations
agctattcacttttcatcgatggacaaattatgtcctgatatcaaaaaataaatttccacatcctcattgcataattgaatgaggaaacttgtgagaaaaacaagaatactgagggctcagccatgagcacataaaaattgagaacgaaaacctattgaggtagtcctacaaccaaacctctgcagaaaatacatagttttgtaaagatccagtactgaagcaaataaacatgttgagaaaaatgttgtcaataaagaaagatataagtcatgtggtaatcttggtcctgcgcctattgaacccctacaaaacgagcataatccacccacctgccaaggaaaaatacagaanatgaccactg

SEQ ID NO: 4410 - DNA, 406 bp, Glycine max
tagatgtagcttttgggagaataagagcatgccaacattcttagatgtaatacttggggaaaaaagagaataccagtccaattcctatgccaaatacaagtctcccaagcaccaatacaggaaaattaggagctaatgctgttacaagagctccaacaagataaactactgcagctccaatcagcttctttcttctacctaaatataaaatttgtcacagcagtttcaccagggaaggaaatagcgaagattataactgacaaaaagggaaattacctaagaagtcagcaacattgaaggccaacaaggagccaattaaggcaccatacaatgatccactagtctgcaaaagaagcaaatgccattgccccagtttatattcaagatcaatatatggagtaattac

SEQ ID NO: 4411 - DNA, 466 bp, Glycine max
  unsure at all n locations
cgcgcncanncncncncnntttganncnttgcattgtncgtagtatagangacgtaagcttctagaanactagtggtttctgaattatatgaagccagtatataaacatcttatccttgtataccagtttcactagtgttagccttgatgtacccttcgtgacagggtagacgtggggacacacaccaacggttcacctctctccttttttctccttcaaattcgtggcccccccccttctttcttccctctttttttcctccttgaagcatcctctccaagttcttatccagggtcatcttgggggggagctccttcttcctggcttattccctaatggaagggccttctctaccccctttctttgttttcgtgcgtctcatggggaacaacccttcaaggcccctttgagcctcaagaccgccctctaaaagccccacgcaggctcataagtacatgcgggccg

SEQ ID NO: 4412 - DNA, 209 bp, Glycine max
ctttccattgatgacaattttgcattgtttatgtatgtcttgggggtttccctttatcaatgtaacgcttcccacttgcggtagtataaataggtcatcatgtggattagtgtggaatctttgacgatgcaggaagcaagaccttgccgatgtataggtaggaccatggcggtcttcgaaaaagtagatgacaaaaaatcatcttaggc

SEQ ID NO: 4413 - DNA, 404 bp, Glycine max
  unsure at all n locations
tctcaaggaagttntctcaagaaagcttctcaaggaagctacctagtctataaatagaagcatgtgtaacacttgttgaactttgatgaatgagagtcttgtgagacacaactcaaagttcaacttctctccttttttcttccttcaatttcgtgctccccctccctctttctctccctctttcttttcctccattgaagcatcctctccaagcttcttatccaagggtcatcttggtggtgaagctccttcttccatggcttattccttaatggatggcgcctcctctcacctcctttcctttgtcttccgctgcatctccatggtggaaaatcaccattaaaggacctcattgaagctcaaagatcccagcctcatagaagccccacaagcaangcttcatc

SEQ ID NO: 4414 - DNA, 116 bp, Glycine max
tagatactaagcttccgttcccgagagcatctcttatttaagcatttcagcctttgctttcttgtagcttaggaaaaatgccatttcttcttctttctttcttccaaacccatttc

SEQ ID NO: 4415 - DNA, 206 bp, Glycine max
tctgattgcctttgaagtttgaaacctctccagacatatctcattatcactcttcgaggcagaattttccacgttgccctttgtgctgagaataaaatattcgcatccaaatggatgtacattggctgggtgggtttcaccccttccataattcataaggagtatttgtaagggtaggtcttatgtaaactctttttgaagataac

SEQ ID NO: 4416 - DNA, 381 bp, Glycine max
  unsure at all n locations
agcttattttcatcaaatcttatgttaataacttcttcaactaccaaggttcttgagttatacactctgagtgcctttgaagtttgaaagtatccaagaaatatctcattatcacttttcgagtcaaattttcccaagttgtcctttgtgttgagaataaaatatttgcatccaaatggatgaaaatatgttatgttgggtttcatcccttccataattcataaggagtatttttaaggttaggtcttatgtaaattcttttttgaagataacaagtagtattcactgcttcaacccagaagtgtttaagggttgaattatcattaagcatgggcctagtcatctcttgtagatatctattaattntttcaattacccctg

SEQ ID NO: 4417 - DNA, 412 bp, Glycine max
agcttctcatccttagtaacagctactactggacacacacaactacatattgtgttccctctctgaatttcggaagtaatagtcccttgactactcttctaatttctttccctctaatcctaagggatggactctacactttttgggatatcttttacttaggctccattgatgaatttatttacatgcactcttttagatttgaatctactaactccacctagagcgttttggctatagaagttccttctaataacgggataattatctcacttgacattaccctcactttttggcacttattccttgcaattttctccttcaaatttgaacaatttatagagtgatatggagctagtcgttggtgtgaccattggacgatgaattcaacattcaaatgttgcatgagtta

SEQ ID NO: 4418 - DNA, 354 bp, Glycine max
  unsure at all n locations
ngctctanatttacattgatgtttgtatttatgggaggaagttgcatgccatttttgttttaagagtagtgtcccactggtaaaactaactttccaaatgtttgccttcgcaggaaatggacccgaagaagcttgcctcaaagaggtccaggaaggacaaggcagccgaaggaactagttccgctccggagtatgacagtcacctgtttaggagcgctgtacaccagcagcgcttcgaggccatcaagggatggtcgtttctccgggagcgacgcgtncagctcatggacgacgagtatactgatttccacgaggaaatatggcgcccgcggtgggcatcactggttactctca

SEQ ID NO: 4419 - DNA, 412 bp, Glycine max
agcttgaagagaatggaagagggaggatattaaaacttgagatagcaacatggaaagaaatgaaggtgtttatgaggaagacattcttaccaccttcttgtgagaaagatgcttatgaaaggcttcaaaacctcacacaaggtagcaagagtcttgaagagtaccatcaagaaatgataatgactatgaggagagctaattacaagagcctaaaacttccatggcaaggttcctatgtgggcttaatagagacattcaatgcattgtgaagttgaagcactatgaaagtttggaggatatggtgcagaaagccaagaaagtggagagacaacctgagaggaagcattcctacaagaagacctatcactatgacttttctagtggtaaagacaagtccaagaaggagggatct

SEQ ID NO: 4420 - DNA, 421 bp, Glycine max
tatcataggtggggtagttgagggaggcactatgaattttttcactaaaataatttatagggtgcccaccttgtaacaatacagctccaactcccactccagtggcatcacattctagctcaaaaggtttagaaaagtcaggaagagctagaacatgttccttattaagcttttctttgagaaaagcaaaggcttgctcttgtttttcacccaagtaaatgccacattctttttcactagctcattgagaggtgatgcaattgtagagaaattaggaacgaaccttctatagaagcttgctaacccatggaagctcctaatatctcccacactttttggggtgggccattcttggatggccttgatattctcagggtccacttggaccccatttctaccaactaccaaccctaagaaacta

SEQ ID NO: 4421 - DNA, 388 bp, Glycine max
  unsure at all n locations
atatatagattggctgcttcaggcgctttccagaatttcttttggagcactcaaacacgtacatggccaaccatcacaactaggggaggtggatcaatgcgagaactatgccttttgtggtgaaaattctatttgcatgtatccaaatattggccttctgttttgtttgcttgtttaagctttttgtaagagtcggcttcatatatagcgatttccggtaattatacattttgtatataaaatgtgtctctacatgggtttgattatgattcttaaataacagccaatattactttatatatatatatatatatatatatatatatatatatatatatatatatatatatatatatatatatatatatatataagagaagccatgccn

SEQ ID NO: 4422 - DNA, 361 bp, Glycine max
tgccgcgacacctaaattcgatgtacggcaaatcctcatgcgggatcagttggaacatggatgccagagtggcaagggcatcggccatctaattctccactctggggatgtggtgaaaggatacatcatcaaagtactctatcagttttctaatgtaggcctggtagggtatcaacttatgatccctggtctcctattctactttcaattggtggattaccaaggctaagtccccatataccttgagcaacttgaccttgaagtcaatttccgcttggatcccaagggcatacgcctcatattcagccatgttgttcgtgcagtcaaagcccaacctagtcgtgaagggtatacattgatc

SEQ ID NO: 4423 - DNA, 403 bp, Glycine max
agcttgacacaatttatctttctcaaacttgagtttctgaagaccaattactaagtctttcgtaactagatgagttagattatgcatattagtatgtgcagtcctacaatgccacaaccatgaatcatctattttactcaccaagcaactaagctcatgaaaagatgcatgctcaatattcagcatatagatgttacctattctcttaccaaggtggacaactttaccggatatggcttcacttatcagacaacaatttttgttgaattcaatcttgacacctttatcacaaagttgactaatgcttataagactatgctgtagtccatccacatataacacattctttatctgatttttgaggtgatcccctatatttccttctcccattatattacctttg

SEQ ID NO: 4424 - DNA, 357 bp, Glycine max
  unsure at all n locations
tgcatatggaattgcgaaagcccccctccatcatgaggatntgttcctgccatctcaaacaaacatatcaaacgtatcaagacaaatatagttggtgtttgaatacctcgcccactcaagtgtatcacacaattatggcttttctctaatgaaacactcttgccttttaccactctaattccccttgagttcttaggcaattcaagagattatggccacaacaaagaacaattcaccaatatgtgtaaggtaacgctagagagacaaggaaaaggttaaccaagacaaaggctaacaatgttattaggcacaaatgaaggaaataaaattctgaatctatgaattcaagtaacaatc

SEQ ID NO: 4425 - DNA, 409 bp, Glycine max
  unsure at all n locations
agctntataattagtagtgaccataccctaatatagaggtcagtgaaatctcacaagtgcatatctttgttctcatgtgaaacacactgtttggtcctagctagcttttcccttgccattttctacctagcctttcagagatcacatgtagtgttcccttcatttcatttggaagcaatttgaaagatatcactctttgaaaatgagggtcctctgttttttcactttttgctaacaattagcatacatacacgagctacaagcttagtcaactcaactaagattacgctatgcaaaagctgcaatgtgtctaatgtctatgctcgagccaaagcttcttattagaaacttttgtgaggtttatagatacaatacaatttacaaacgtttggatagaataagttactta

SEQ ID NO: 4426 - DNA, 377 bp, Glycine max
  unsure at all n locations
tcaatttgcttggatagcaacttgttatgtgccaacaatgcatcatatgatgaaagttccagcacgcttcttttggttgggatgtccttcagcagtcttggactctgtgaagtatttcttcaagaatctttcaaccacttcatcccaagtcttaagactattacctttaaatgaatggagccatctttgtgcctctccagacatggaaaatgaaaacaagctcaatctaacagcatcttcatgcacgccagccagtctgacagtgttgcaaatttcaatataagtggctagatgtgcatacaggtcttcttttggcagaccatgaaacanattgttcttaatcaactaaattaatgaatgtggataggttatatttt

SEQ ID NO: 4427 - DNA, 408 bp, Glycine max
agcttggagaggatgcttcaatggaggaaaagaaagagggagagaaagagagatgggggagcacgaaattgaaggaagaaaaagggagagaagttgaactttgagttgtgtgtcacaagactctcattcatcaaagttacaataagtgttacacatgcttctatttatagactaggtagcttccttgagaagctttcttgagaaaacttccttgagaagcttctttgagaaaacttccttgagaagctagagcttagctacacacacccttctcataactaagctcacctccttgagaagcttccttaagaagattcctaaagaagcttgagcttagctacacatacctctctaatagctaagctcaccttcttgagatgagaagctagagcttagctacacaccccc

SEQ ID NO: 4428 - DNA, 415 bp, Glycine max
  unsure at all n locations
tgaatgtagttccatccctccttggaggtgactgcaaattgagttgagaatgagcgagaaaggttatcaacgttagtggaataaacattatcaaagttgtatgagtaggagttgtggttttattggacaaccactggcgtgaagaaccacacacactctggacattgatgctctattatccacatctctagtatagttagtaagactcccaagaattgagttctggatatttcttgatctttcanatacgttctctccacaccttcccaatgtgttccacaaccacaagttctaatattatgattaagaataattggtaaatgagaatattatcattattaaacgattaaattgagtgataataatataaaaagtgaacgttgctattcatagttctaaattcatcttttcttta

SEQ ID NO: 4429 - DNA, 404 bp, Glycine max
  unsure at all n locations
agcttgttgatctcttcatgatgatcaacacaatattgcatttgctgcttcaattttgggctgcagatttcataagcaatgcatttagtatgtttacttggtaggtttaaattttcaataaaagtaattaatttttttagaatttaattttttatgcaaggtcaatgtgagttcttgttacacaaatgtaattcattttattaccatattacccaattcattaatatgatgcagtgaatttgtattaaaaaaatatacttttaattatatataatatagaagttttagcatttagcaactcactctttaacacatttttatataagaaattntattatacgttaaaatttattanaaaatataaaagaaaaaagactcacaaaaattatgaattttaattaatt

SEQ ID NO: 4430 - DNA, 412 bp, Glycine max
  unsure at all n locations
tatgctgcaaacatttataatagaccctctcagtagcttaaccaacaacaatataataattatgatctttcaagcaacagatataatccaggttggaagaatcatccaaatctgagatgggcaagtcttccacaacaacaacagcctgtccctcctttccagaatgctgctggttcaagcaggccatatgttcctcctccaatgcagcagcaacaacaacaacaaagacaacaagcagctgaggccccttctcaaccttccttagaggagttagtgaggcaaatgatcatccagaatatgcaattntagtaagagacaagagcctccattcagactctgacanattagatagggcagatggctacttagttgaaccaagctcagtcccaaaattctaacaaattgtcttcac

SEQ ID NO: 4431 - DNA, 387 bp, Glycine max
  unsure at all n locations
agcttgctgaatattccaatgtagaatatcggttgtataaaaaaaatgtagaaaacaatggagaggaagtattgaagtaacactaactaataaatatttcttgagcaccattgcagatactcccaagtcccaccatagatgttggtcaatcttgttgctttctaactagtctcaaataacatcactcaatcaaataatcaaatgaaaaatcaactcatatctcatgcatattaatttttcacttcaccgtatacaattataaaatccttttttttcataagctataaatcaaatacttatatatcaattgaaaatatctcataaggtaaaatctaatccaacctttaccataagcttttgttaagcaagccagacacanacatatac

SEQ ID NO: 4432 - DNA, 389 bp, Glycine max
ttagaacaagctaaacatgcatactattaactgaaacataaatatatacccacattataaaatgtgctaaaagcacgaaatgataataaaagtgttcaaaagacaggaaaatagaatataaatcctgtcatgagtcctagtgatgctttaaatgggtcatcatatggagcataaggggcaaaatccatggctgcaacatcatcttcattctcagagagctccatcaccggtgtcgtcattggggatgcctatagaatagagagctccagcacacgtgtggtcactggtgatgcctgtggagtcgtctctggagttgcctccgcagagtcctcatgagtagctaggacagtctctgggtcagcctctggcatgtctagctcttcgatatc

SEQ ID NO: 4433 - DNA, 347 bp, Glycine max
  unsure at all n locations
agctttgaaatttatataaagcctgaagttgttcatgttatacaaagtaaatcgagaagaacaagagaatattttgaggtaaaacaaacaagtattgtaatgctatcagttcactaggttaataaacaagaattgttttcagttttcaccaaatgattgtcaatgcattaaatttaattttttgagtgcatcctttttctgctagttacagctctctagctacttatcacaatttcacaatattcttttttgtatttaacctcacatttattataatctattactatttaaagtatatgtttttgaagggtggtggatntacatttgcaagttcaatatccatctac

SEQ ID NO: 4434 - DNA, 174 bp, Glycine max
tctagccaaatgagcgtaccctgaattaattcctttgatagcccctttgagcctatgttcccctttctttgttttgaagctcattacaagccttaagtgaaaaaccatgataccctacccttaaggaattttggagctttggaattgttttgggaataagtgtgaggggggggg

SEQ ID NO: 4435 - DNA, 378 bp, Glycine max
  unsure at all n locations
agctntacagcatattntagtaatgacctcctaacctagaattaaaataacttaatgccattaatctagggaattgaaaaaaacttaatggctgagtgtaactgaaatagtggcaaccaaaagtcacccccaacagccaacttcagccaccatttggtctcccanaaggctgatgcctaggatgccaattgggcccttattacaacttgaactaaacctactaaagcccttttaggtgattaacccaaaacatatttttggtcagccaactctacaaggattgggccattatttatacaaactaaacactctaaaattgagacaaagtggtgccatttaattcttctccattttggccatgatacaactcacaacctt

SEQ ID NO: 4436 - DNA, 404 bp, Glycine max
tataatatattgatatgctcgaaactaaacatcggaagctctcgagaaattcaaatggtcataacttttcacacggatgtccgattcgggtgcataatatgtcgagatgcgtcaaagttgaacaacggaagctctcgtgaaattcaaatggtcataacttttcacactgatgtttgattcaggcttataatataacgatacgctcgtaattaaacatcggaagctctcgagaaattcaattggtcatcacttttcacacggatgtccgattcgggtgcaaaatatgtcgacacgctcgaaattgaacaacggaagctctcgagaaattcatatggtcataacttttcactcggatgtccgattcaggcgtatcacatatacagacgctcacaatttgacaacgg

SEQ ID NO: 4437 - DNA, 335 bp, Glycine max
agctttataagtgcgggtctgggagactaaggtcaagtgttcgcaatatgcgaagatgatgttccaagtactttggatttggtacgaccatgctctcttgatttccagctgggaaattggcgagtggaggaacgccccggcatttacgcaacaagcataatgtaaacctttacggttttaaaaagctctatagttgggcctaggctttaaagttttcattttgttaaggctttgtgtcttttgtttttgaatctataatacaaggatctttcttcatctgttcctggtctctacccattctcattcatttgcatggttacttctttttctaaaac

SEQ ID NO: 4438 - DNA, 398 bp, Glycine max
  unsure at all n locations
tggtcacctcctttntcaccacatctagaatgatggggttgagtcgttgctgtggctgcctcactggcttagctccatcctctaaaagtatcctatgcatgcaggtagatgggctaatgccaagaatgttttctaaagtccatccaatggatttcttgtgcttcttgagcactagcagcaacttctcctcttgctcagtagcaagggaggcanagatgatcactgtanattnttccttgtcctcacagtaagcatacttgaggtttactgggaaggacttcaactctggtgtgggtggtggctgaacagtgngaggaaccacngtaggagaagaagaaaaacgttctcggcttgtacctcataaagcaagtaagaagatatgtaccttctgcaacatg

SEQ ID NO: 4439 - DNA, 397 bp, Glycine max
  unsure at all n locations
agcttggcacagtcatgccttcctgatttccaattaggaaattggcgagtggttgaacgacccaaggttttcatggcgggcataatgtaattctttagctttaaccctacaactgggcctaggctttagagtttttctccctgttaaggcgttatgtttttgctatcgagatatataatataagatctttccttcatctgttcttgcaccttcacccattctcattcatctgcatgtttatttctgttgcgattaaatggtatagatccgacgatgagtcctgcgaaggtactaataccgagggccctgacgttgattntgaacgagtagcaaaccaagttgaggatgaagaagatgaagatgcggngtttctcccggagctagaaaggatggtcac

SEQ ID NO: 4440 - DNA, 365 bp, Glycine max
  unsure at all n locations
tattgggcattaaagtttttgaacttcgattcanatgcatctagtgaacacaggaagctcccactccatganatggaagaattgtggtttccagcttatgagaattcccagctttataagcaaagaagtaaaatttatcatgacaaaaaagttgtcaaaaaagaaaattttcagctttggtcaacaagtattggtatttaattatagattaagattgtttccaggtaatctgaaatccaagtggttcggaccattcatcatcaaagaagttatgccacatggagcagtgatattggaggacccaactaccanaaggacatggaccgtgaatggaacataataaacactagttagatgatatttca

SEQ ID NO: 4441 - DNA, 403 bp, Glycine max
  unsure at all n locations
agcttattntatacacagttttcatcttgaagtatctgttgtctcacagtcgttggattcttcactctgatattcgtctaaagtcttaagtctgttatttaatgcaaacattaaatgtacatctcttcttcatgcaaaatccatggtgataggatatcgtgtcttttacatcaacaggaaagccacttttttcattataacatgtatgcaacaacaaagcgtgctttttaatgaggatcaacgtctttcagactgtagactttattcttcataggactttgacagatcccatgagaatgttttctactttaaagaatattagacatagagtattaaatgaaagtcttaatgtattacttaattgttacatcatatcgtcttacgagtgcatcatctaanaact

SEQ ID NO: 4442 - DNA, 412 bp, Glycine max
ctccgcttcatcagtggtataaagcacaagagcttcaagatttgctccttaaacctccattaatatttcgctttaccttctcttccattgtgtgttcttcattttttttctccatgtatctcctcacatgtcttgtgctaaatggttttaacatcattctttagagtttccaccgattaaacttgctatagaagctagatttgaatatctatgggtcagaattcttgttcttgttcttgaaccatgaattgtgttgagtttaggctcctttgagtttagcttggtattttctcgggctgaaacctaaatcataaaattcttacaaagaatataaaggagaagaaaacctcacaaatctagagcgacttgttcacctattggtagtttgtcatagaagacatgtctagtcatg

SEQ ID NO: 4443 - DNA, 408 bp, Glycine max
agcttcacatgtttgagtggactcgtctagtgaaacatctacttgatcctaaagggttttctcaatttttaaatgatctttggatagattcttgaaatttcattgtaggtttttgtaagcttttgagagaatagactagttagatagaagctcatgataagcatttctaagagatttagggtccgaaatttacctcatcttcttagtctgattcaaactcctcagaggttgtatttgtcatcaggcatatgtgggcttcttcgttgtcttcattagatgaggtgttgtccaggtcttccttcccactgctcataagaaccttcttttctttagtcttgaagaatttcttcttatcttgacttttctccagatctagacattcaaacttagactttttatactcgtagc

SEQ ID NO: 4444 - DNA, 427 bp, Glycine max
actcagcttaagccaggccagactcgtgcatgcagaggcttctatggaaaaatgccaaactcctacaaaaaatctgatttcaagcttaaataagtgggctggtccgtgcttgcgcgcttagcgcaaatcttaattgcttatcgcacatatgtggattttggcttagcgcgcttctctcgcttagtggataagctgaagcggtgcgcttgatgacctggagcgatgcactcagcgaacctgacagcttatcttcttctggcttcttcctcgcgcttagccactgagtgccgcgcttagcgaatgctcctaagccaacagattggcttatcgagaaggtgaaaacaacactttttccaatttgcctaattaacctgagattgagagaaattgattattaaacacacaaaacaaaaatataaattatcta

SEQ ID NO: 4445 - DNA, 412 bp, Glycine max
agcttataataagaaagtgaagtcaaattcttttaatgttggagatttagtttggaaggttatcctgcccatagatagtaaggatcgagccttgtgcaaatggtccccaaattgggaaggaccgtttaaaataattcagatctattcgaatggtgcttatgagttagaggagctaacccctcagaaacgtactttgagcataaatggtaagtatttgaaaaaatataaaccaacactgctcgaagttaatataagcatagaataagagaaatacgggaaacataaaaatggcgataacagtaaattgccacgaaagggcatgtgtcaatattacatcgagaagtagaatcgaaatacagaattcgaaataaagaaatcataagttctactaagtcatgaccaaatcttcata

SEQ ID NO: 4446 - DNA, 380 bp, Glycine max
tgtaagaattgcaagatcatcttccttgacaactccttgataattattgccatcaatacgcagagatgacaatttagagagtgatccaatactttcaaatggatttccactgaatttattaatagacagattgagatatcttaatgatgaaagttttccaaatgatattggaagagcaccaccaattaagttgttggaaaaatctagcatgtcaatatttttaaaagccccaatttgatctatcagattgcctgaaagttgtgaactccgaactgcaagtgttgtgattccctatgaaatacaaggagcaagaatttctaaaagttcattaacctgttggttgagtttgagatatgataaacctatcttccttaagttgc

SEQ ID NO: 4447 - DNA, 389 bp, Glycine max
  unsure at all n locations
agctngctccactatatttggattggatcataaagtttgcacccctgaatcaataacattntgttcactcattgatggcttggccagacatggcaaggtgaatgatgcctatatgctttatgaaaaaatgttagattatggtcagactccaaatgcagtgttgtatacatcccttattaggtactttttctcgtgtggtaggaaggaagatgctcacaaaatttataaagagatgatgtataagggctggtctcctattccttgctccttaataattacatggattgtcttttcaaagctggtgaaattgagaaaggtatggctctatttcaagagataaagcctcaaggtctaacttctgatgtaagacgtattcaatttttattcat

SEQ ID NO: 4448 - DNA, 436 bp, Glycine max
  unsure at all n locations
actcaagcttgtcctaagctccctttcatagtaagagggaatgtgcctcttcctaagggcactcttaagatcattccaatactctactggaggatccctatggatccttcgttcgagcttgtccataagctccttttcatagtaggagggaatgtgcctcttcctaagggcactcttaagatcattccaatactctattggagaatccccatgaatcctttgttccctaaaaagggaagtccaccaatagagggcatacccttganagctaatggtagccaatggaacttttctctcttcgctaatatgatggcaagcaaagagttgttcaaccttcatttcccaatctaagtaggcctcaacattatcttttccatggaaatataggaggctaatggtatcctcttgaagccttattntcttttctcttatttgg

SEQ ID NO: 4449 - DNA, 375 bp, Glycine max
agctctgagccaaaatcctgtctcaccatataccttgacccaaggtgagaatgccaatccttaccctctggagcgaaaaaaagatgagaaggaaatattttctatcaaaggaaaaaggagaatgaaattttccaatcctagaggaagcataacaggagagaatgattatttccaatcgaaggaaaaatgagaagaaaggaaattcccaatcacagagtgggataaagcgaaaagaaaagacagaatattctccatcatagaatgggagaacgattttagagatgtccataacatgattgttcctgatcattgaaactagaaaaaatgtgcctaaagatcttttgaccagatgatatctgaacaatacataattgt

SEQ ID NO: 4450 - DNA, 338 bp, Glycine max
tttaattgaatccgcaccgcccaattgtgtctgtaaatggtgtaatcgattaccagatattggtaatcaattaccagtgtatctgaacgttgaaattcaaattcaattgtgaagagtcacatcttttcataacatgctttgtgtaacggactacatggtttcggtgatcgattaccagtgacaagttttgaataaaaagtcaagagatgtaactattccaacgcgttttaggttttctcatggttataactcttccaatggctttcttgaccagacatgaagagtttataataacaagaccttgattatcatttaataactatttataactttttgac

SEQ ID NO: 4451 - DNA, 409 bp, Glycine max
agcttaaagataaattaagaataatgattgaatatcttatcttatattctgataatatattctatcaaatacaaactgattagttaggctaaaaatactgatataatatcttatcatatattctataactcgtaaattaccccacaaaaattatttacttcgaaatcttctagctgaaatttcttggacaaatttccaaattcaattgtaagcattattatcacagtttcagataaaacaaaaataacattacctctctactcttataatccatacaaaaattatcatattaaggctatgcaacttcttctgaattctttttaaccacttgatcaagcataattaaaatatccaatatccaatgtcaatggataaaaacatgtagaatgggagtataattctacatgtt

SEQ ID NO: 4452 - DNA, 404 bp, Glycine max
  unsure at all n locations
tctaattttattataccactagnattatattatcataaaataagtaccttttggggaacacatgtcaagattaatagagaaataaaatggtaaacatttaaattaaaggagagattaccaaactctgtattctaatgactaagacatgcgacaagatggggcaaatagtggaagcatttccatgactaagacatccattatgataggagccactgttacatcccatgacactataataaggtggagatattactttagtatgatacaaaaatattggtataattcccaattaaatagatcaagtaaaaactatggagtatagacgatggatccttgcttagacttatctaagagggaataaaagagactatactacgagtacatactcacaagatctggtaaat

SEQ ID NO: 4453 - DNA, 305 bp, Glycine max
agctattgtattcaattttgatgcgtctttaactattaaatgactcaatcggatatccgagtcaaaagctattgtcgtttgaatttgctcagagcttctgcttgaaattcgagtgtcttgatttattacgggactctatcgatcatccgagttaaaagttattgtcttttgaatttgcttagagttactgttttcaatttcgggcatctcgatatactacaggactcacttccacttttcagtaaaaagttattgccatttgaattttgtgagagcttctatattcaatttcgagcgtcctgaat

SEQ ID NO: 4454 - DNA, 333 bp, Glycine max
tgtccaaaatgcagacaataataatttttaactcggatattcaattgagtattgtaatatatcgagacgctcgtaatggaaaacagaagctcgtataaaatgcaaatcgcaataacttttaactcggatgatcgagtgggtcccgtaatatatcgagacacttgaaattgaaagcagaagctctgagcaaattcgaacgacaataacttttgactcggatatccgattgagtcatttaataattcgagacgctcacaactgaatacacaagctctaagcttattcaaatgacaataacttttgactctgatgtccgattgaggcattatataa

SEQ ID NO: 4455 - DNA, 396 bp, Glycine max
agcttgtgcatccaataccttgatgaggatgtcccatatgttcttaagactggactgattcatttgcttccaaagtttcatggccttgcaggtgacgacccgcacaaacatttgaaagaatgtcacattgtctgctccaccatgaaacccccagatgtccaagaggatcacatatttctgaaggcttttcctcattcattagagggagtggcaaatgactggctgtattaccttgctccaaggttcatcacgagctgggatgaccttaagaaagtattcttagaaaaatttttccctgcttccaggaccacatccattaggaaggatatctaaggtataagacaactcaatggagagagccttgttgagtactgggagagattaagaaactatgtg

SEQ ID NO: 4456 - DNA, 365 bp, Glycine max
  unsure at all n locations
tgtatactgaactgagtattgggcactcattgcatgtctgatatgccttttagaggcttgaaaagtgcgagaaaacaagctatgttttctgcatttcttggaaaacgcgatgaaatcgctaagcgagcatgctgcactaagcgagttcatcaatactcattgtatataagttttatctgaagaactcgcttatcacacttactgtgctaagcgagttcatctttntgaggatgaacactcatcctcttgctgaactacctgtggctaagcgaggctgaatcgctgagcccgggtgacttaaccaaatttcatggtgttagccttgcactaagccgaggttataggagctaagcgcatttcatcac

SEQ ID NO: 4457 - DNA, 288 bp, Glycine max
ctttgaattcccatgttaatagctcgaggaaatcagtgatgtgcacaggtaagctattacatcttctggtcatcgattaccagagagttaatttgttgaaaaagactttttaacttatctttcttggcccaaccttgtgatacgttccttggaattcccttcctatttaatataccctctctaagactctagagactaggttgatcatccatcttgaatatcattaatttctttgtcctgaataaagcttcgaacacatcgtaaactttggcatcagtgaaacattca

SEQ ID NO: 4458 - DNA, 240 bp, Glycine max
  unsure at all n locations
agcttntcggtatattatgcacctgaatcagacctccgggtgacaagttatgaccatttgaatttctcgagagcttccgttgttcaatttcgagcgtctcgatatcttatgcgcttgaatcggacctccgagcgaaaagttaagaccatttgaattgctcaatagcttccactattcaatttctagcgtctcgatatattatacgcctgaatcggacctccgagtgaaaagttgtgacca

SEQ ID NO: 4459 - DNA, 388 bp, Glycine max
  unsure at all n locations
tggaaggatgcttcaatggtggaaaagaaagagggagataatgagagaggggggagcacgaaattgaaggaataaaagagggggagaagtagaacttttgagtgtggctctatagactttcattcactaaagttacaacaagtggtacacatgcttctatttatagactaggtagcttccttgagaaactttcttgagaaaacttccttgagaagcttctttgagaagacttccttgagaagctagagcttagctacacacacccctctcataactaagctcacctccttgagaagcttccttaagaaaattcctaaagaagctagagcttagncacacacacatctctaatagctaagctcacctncttgagatgagaagctagagc

SEQ ID NO: 4460 - DNA, 149 bp, Glycine max
  unsure at all n locations
agcttgagattaagaantgttgaacggtgagacttcctgctatcattgttgaccacagagtgttacctgaagatatgacgcgcgggtcaagacaccttgaggacgttaggaggggagctattgcccaaaaccaattttgaccaatcccg

SEQ ID NO: 4461 - DNA, 366 bp, Glycine max
  unsure at all n locations
tccanagattggaatcgcctggtatcatactgagctgttggtctagaagcagagctcttcctcttcctggatgccatctacaataaaaaaaaaaagaaccattggtttattacactagaagtctatctaaattaaaactgaaattaaagactgaaattgagaacgtgcgcttagcgagacgcatctcacttagcgcgccttatgaaaaacaacacaccaacttaacgtaacaggccgtgcttagccggtgataacatataaaaaaattctgcataattggcttagagagacaacactcgcttagccacatgtttgtcattaatgacgtgtacagcagctgtgcgcacacggtggtcgctcacccac

SEQ ID NO: 4462 - DNA, 397 bp, Glycine max
  unsure at all n locations
gnnctagtataggcatgtcttcctccattattcagacacccgctatgaggatgctactggaggctttattccgttccggacgcgagttcactatcgctaccccatagagctcccccaaatgtgttccgggcatacattctcttgcgagccctctcggatcttgccaagggcttttggagacatgtgattcttttgcagtgacccggcacactgcttacgaacgagtgaacccgcccacttgaacctgtccgtggcgagacctgccttacctaacttgctatcgagagcttggacttctttggcctcttcggtgcttcaaagtgccttcgctgacgacttttaacttggcgagcccatgtatacctcgtatgcgaacttgtaggctgtcgtggaaccg

SEQ ID NO: 4463 - DNA, 300 bp, Glycine max
tctccccttggcacatcattagccaagaactcggaaatcaacacagttataacaatgggagtagcagatataagtatcagagtattaaatacaataagccagactctttaacaagaaataatcaaaccagaattcaaataacataaaatgtcaacaaccacaaaacatccaagactgaaattttaaaacacaagataaataagcaaagtacttagcataataatgtagattctaagaaactaaaagccaaaatacacggcttataaaagataaataatcagaacctaaaatctaagaaga

SEQ ID NO: 4464 - DNA, 408 bp, Glycine max
agcttctatagaagcatacatagcatgatgcttttgatgatgccaaagatgaaagctattcaagattgatcaaagtcaagatcaagaattcaagagaaacgatgaacaaattgtacatagtatgttaaaagaattccttataaaagattgcataggcttggccttaggttaactcaacaaaacatcctacaaagttttaaagtgaaactctgtttttaaaagaaatgattttctctctggtaatcgattatcagaggttgtaatcgattaccagaagccaaaatgagttttaaacagttttgcaaacttgtgaatttgaattttgaattgtgtaatcgattacacacaattactagagataaaactgttctaaacatcttttagaaattctgaattaaattttaaaac

SEQ ID NO: 4465 - DNA, 280 bp, Glycine max
tcggaagaaagtgatgaggtacaagccctaaaggcagatcttgaaagagcccgggtagtcgaagagaaactcaagtccatagccatcaaagtctgaaaagagtatgatgaactaagggacgtcaatatggccacagctgaagcctttgaacgaaaaaccaagaatgccccgaaagaaaaacacgaccaatacaagttttgaggggctttatagggcaacaatagtgagctcaagctccgaagaggtgaaaggaatcatcacgggtcaaaggaatgatctt

SEQ ID NO: 4466 - DNA, 410 bp, Glycine max
  unsure at all n locations
agctntatggccatataaacactaaggcttatggtttttttttccccgttcaaatcaaaccaatgcttctaacaatgctctttttatcaatttacgaacacattcgagtccatttaggaatttgggaaaaaatttcattgcattcaccctttaggggcacacacattttttttttcaaaaatccatttatgttctgacccgtgaattttccaaagaaaactggcggtcatcttcttttaaaagcgtgttagtttttttcttttggctttttctttcaatcaatctcttttaagcaaaaatgattagaaaaggtttgcaacccgggcacagttggcatctgagattacgctttatcggaaggagtaaaaggcgtgcggataaaatacacagacccctattttggcatttaa

SEQ ID NO: 4467 - DNA, 412 bp, Glycine max
  unsure at all n locations
ngaagtgagaaagtgtggaagagtcagtcttcctacttttattcgttgaccacagagtggtacctggagatatgtcgcgggggtcaagagaccttggggacgtcaagtggggtggtattgcccaaaaccaagcttgaccaatcccgacccaacccaagcatagtcagtcagtgagaacctgtgacgtacctaaacaggcgagctcctggcagtcaaccgataaaagaacaaagaccacaaagcaaggaggcttgtgtggtggctggccagctatggatcttgagtgatatttgggttatggcctctggtaatcgattacaaagggtgtgtaatcgattacaaggcttaagaatggtgtcaggaagttgagatggcctctggtaatcgattaccaaggggtgtaatcgattac

SEQ ID NO: 4468 - DNA, 302 bp, Glycine max
agcttctcgatatattatgcgcctgaatctgactttctgtttcagaagttatgaccatatgaatttctccactgtattccgtgtgacaagatatgaccatttgaatttctcgatagcattcgttgttcaatttcgagcgtctcgatatattatgcgcctgaatcggacttccgtgtgacaagctatgaccatttgaatttggcgagagcatgcggtgatagatttcgagcggctcgatatattatgcgcctgaatcagacattcgtgtgacaagttatgcgcatttgaatttctcgagagca

SEQ ID NO: 4469 - DNA, 257 bp, Glycine max
tctcgatatattatgcgcctgattcagagtttcgtgtgaaaagttatgactcttggaatttctcgagagcttccgatgttctatttcgagcgtctcgatatattatgcacctgaatcggacttccttgtgacatgttatgaccattttaggtactcccgagattctggtgttcaatttcacacttctcgatatattatgcggctgaatcagacttccgtctgaagagttatgaccatttgaatttatcgggagcttt

SEQ ID NO: 4470 - DNA, 199 bp, Glycine max
agcttgagatgaggaagtgttgaagggtgaaacttcctgcttttattcgctgaccacagagtggtacctggagatatgtcgcgggggtcaagaaaccttggggacgtcaggtggggtgctattgcccaaaaccaagcttgaccaatcccgacccaacccgggcataatcgctcaatgagaacctgtgatgtacctaaac

SEQ ID NO: 4471 - DNA, 427 bp, Glycine max
  unsure at all n locations
tgcctgtccgatgcagcagtaatgatggcctgagttatgttggggaacggttacgaactcggaatgggtttaggcaaagacaaaggcggcataactagcctgataaatgccaaaggaaatcgtgggaagtatgggttaggctataagcccactaaggcagatgtaaagagaagcatcgcgggaaggaagagcggtagtcaaagctcgcggttgagacaagaaggtgaaggaagcccgccctgccacataagtagaagctttataagcgcgggtctgggggacgaaggtcaagtggtcgcaatatacaaagatgatgttccgagtacattggatttggtacgaccatgcnctcctgatttccagctgggaaaatggcgagtggaggaacgctccgacatttacgcaacgagcataatgtanaccttta

SEQ ID NO: 4472 - DNA, 402 bp, Glycine max
  unsure at all n locations
agcttctttcggaccttgaacaagcaatttactcctctttcagaaccatgctatgtgctcgcgactggtccctttcttcccttcgcaacttgagttcactattgctaccccatagagctccgcgaaatttgttccggccatactcttccttgcgagccctcttggtctcttgatcaagggctcttgcggtaattgcattctcttcccgtaacccggcacactccttccgaacgtgtgtagcagccaacttgaacttctccttggcgagttttgcctttcctaacttgcttttgagagcttggacttcttcgtcctcttccggtgcttcanaattctcttcgctgacgaactttaacttggcgagccaatctatacctcgtatgcgaactttcagccattcgt

SEQ ID NO: 4473 - DNA, 347 bp, Glycine max
  unsure at all n locations
tgtgcaaatcaaatcactcctacatttcatctctagcatgcattntttctttacccactcctcacgtttggttttttaaggaaaaacaccataactaaacgcgccacaaggcattcctatcgcaccagatccaaatctaaaatgatgggtgatcaagaggagacacaggaacagatgaaagccgacatgtcggctctgaaagaacaaatggcctccatgatggaggccatgttaagtatgaagcagctcatagagaagaacgcgaccaccgctgccgctgtcagttcggctgccgaagcagacccgactctcttggcaactgcgcaccatnctccctcaaacatagt

SEQ ID NO: 4474 - DNA, 404 bp, Glycine max
agctatataattggataatatgtctcaccaaaaagtactaagagacatcatattccccaatacaaataaatataacagaaataaaccataataataaagcctcacaaaaagaaatactatgagaaaccatcattgtaaataaagatttaagccatttccttttgttcttgctcaccatcattgaaaaacacaacttctaactctggttcatcaagagataactgagcaacctcaagagttccattgtcatcaagtggaccaaattcatcttctgcaatgtcccacattttagttttcccttgattgtattgtggggaatttctataaaggaggtgaagattactatgaacacaacttctaactctgtgtcatcaagagataactgagcaaccttaagaattcca

SEQ ID NO: 4475 - DNA, 405 bp, Glycine max
  unsure at all n locations
tgcaatggaaaatattgnctatttatgactctgagggctatctaaacacacaaaccaaggccatgatggaaaatatgtaaggtagaaatgatcatagatattggcggaaatatttacttctgtaactgctactaagcttgcaatggaagacattgtatatatgttgataaattttccattcactaacacaaatttgtttaatttgtacgctcaaatctattagctcatgtgttcaatttgaaatatgaaatatctattttacatcttttatgtggcattatgtaaccttgtccagcacatcacaaattnttctttgatttctcttcgccatagagtagaacctgtctatatagttctactttgctgtagctaaaatcaagaataaagttgcgtaagccatcaatg

SEQ ID NO: 4476 - DNA, 324 bp, Glycine max
agcttctatggaggctggatctttgagcttcaatgaggtccttcaatggtgaatggagatgcagtggaagataaaggagaagaggtgagaggagtcgccatccacctaggaataagccatggaagaaggagctttgccaccaagaatgtgccttggataagaagctcggagatgatgcttcaatggaggaaaagaaagagagaggggggagcacgaaattgaaggaggaaaagggggagaaaagttgaactttgatttgtgtctcacaagactctcattcatcaaagttacaacaagtgttacacatgcttcaatttatagcct

SEQ ID NO: 4477 - DNA, 351 bp, Glycine max
  unsure at all n locations
taaatgggtttagttnttctcagaattggggataaactttggacaccaagttgtgcaaccaaactccacatgacagttcacttttgcaacacctaatgtcactgcactactactctgtttcactttactactcctttgttttactactactctattctattgctaacacttattctatataacaacattaacaagaccaatgcaatatgcaatacgcggagataccttacggttatccgcacccttttgtcatccagaggcggcgggcccgatgacaagcagagaccaagtttggtcattctgcacccaagatacgcggagataccttacggttatctgcacccctttgct

SEQ ID NO: 4478 - DNA, 404 bp, Glycine max
agcttcatgcttaagtatgtatggcaaaatcttattactgttgttcaagacatacaagtgagcttgtaacaaatcttctagacttggagtgatcacatgtagtcctcttgaacccttaccacccactcaggaaggccaacaggtttagccttctcaatgtattttgaacaaaattcaatggcttcttctgcaatgtacctttcaacaatagatgcttctggatgatatagattctttgtatacccttttaagatcttcatgtatcgctcaaccgggtacatccaccgcaaataaacaggaccacaacatttgatttctcttaccagatgcacaatcaagtgaattgtgatgtcaaaaaaagcaggggggaaaatacatctccaactggcacagtataattggga

SEQ ID NO: 4479 - DNA, 414 bp, Glycine max
  unsure at all n locations
tcaagaataatggcctcaacaaacttcttattcatagaaggaaattcaattaataggcctcctacttttaatggagagggttaccattactggaaaacccaaatgcaaatcttcattgaggcaatagacttaaacatttgggaagccgtagaagtacggtcttatgtacccactatggtggctggaaatgcaacaatagaaaaacctacagaagagtggactgaagatgaaagaagattagtgcagtacaatttaaaggctaaaaacatcattacttttgccctaagaatggatgaatattttagggtttcaaattgtangagtgctaaggatatgtggcacactttacaagttacacatgagggcacaactgatgttaaacaatctangatacatactntaactcatgagtat

SEQ ID NO: 4480 - DNA, 374 bp, Glycine max
agcttgaaggtgtgtaacccaccattgtccatagtagaatactggtaatgtgtctactatcattgtcatcatttttcgtcattgaggtgccacttgagctgccaagttctccatttttgggcgtattctttgaaagatccatgccccctttttttgcacatgaattgtagttgcatcctatctgaagccattataccaacactgcctaacgaaggcaaccattatgtcctcccaggaatggactcgggaaggttccaagttagtgtaccaggtaacaactaccccagtaagactttcttggaaggaatgtatcaaacaattctcatcttttatgtatgcccccatcttccgacaatacatctttagatggttct

SEQ ID NO: 4481 - DNA, 407 bp, Glycine max
  unsure at all n locations
tcttagtctcagctgatgaagatgaattcgtggctacttcatgcactcctctaatgaaaataacatcatttctggcactaaattgctgggagtttgaagccatcttcttaattaaatttctggcttcagcaggggtcatgtctccaatggctccaccactggcagcatcaatcatacatagttttttaaaatctctcctagtattcatataggctctttccactgagttgcctaatgcatgaaatatcctttctgatggccgtggtcctggaagcagggaaattttttttctaagaatactctcttgaggtcatcccagctcgtgatgaaccgcggagcatggtaataaagccagtcctttgccactccctctaaagaatgangaaaggccttcagaaatatgtgat

SEQ ID NO: 4482 - DNA, 400 bp, Glycine max
  unsure at all n locations
agcttgagggttctcttaactcaatttatgcaagtctccatctcaaatcacaaaagcaccgaatcgacaattaaaaatcttgaagtgcaagtaggccaacttgcaaaagaacttaggagaagtctaatgggaatttatggctaccatggagcctaacccttaggagcattgtaaagcagtgctcataaggagcatgcatgaagagggcctagctcatgatgttgttaagggtgtagttgaggatgatagtaatgatgaggaagagaaaaatatagagagagagagagagagagagagagagctgtgtgtggaaaatgcagacnaaatgatgaaaataataacaattgtcttaaggagggtgggtattcatgaggtcttaattcaaaaaccaagagtcatg

SEQ ID NO: 4483 - DNA, 369 bp, Glycine max
gttttagtttcagatgatgcttatgggtttgtagctacctcatgcactcctctaatgactatggcatgatttctggcgctaaactgctaggagttggaggccatcttctcaattaaatttctagcttcagcaggagtcatgtctccaagggctccaccactggcagcatctatcatacttctctccatattactgagtccttcataaaaatattggagaagaagctgttctgatatctgatggtgggagcaactggcacatagtttcttatatctctcctagtactcatacaggctctctccactgagttgtctaatacctgagatatcctttctgatggctgtggtcctcgaagcagggaaaaaattt

SEQ ID NO: 4484 - DNA, 136 bp, Glycine max
  unsure at all n locations
agcttgtcagctatgtggagcccactcctagtggctattagatgactctataaggcatttgcgaaggctatgaagcacaagccgaagcattccanattggtaattcctcgcgctcgatcccttacngagaaaccta

SEQ ID NO: 4485 - DNA, 243 bp, Glycine max
tataagatactcaagcttagcgaatcagcctcgcttagccacaagtatctcaatagtgaggatgagtgttcattctcccaggatgaacttgcttagcgcggtaggcacacttaatgagttcttttgaaaacgcatatattcaatgaattttttatgaactcgcttagcgcagaatgccggttagcgagttcatcgcgctttccaaaaaaaaacacgatctacacactcccctttcttccattt

SEQ ID NO: 4486 - DNA, 114 bp, Glycine max
  unsure at all n locations
agctttgagcaaattcaaacgacaataaattcttactcggatgtctgattgagncccgtaatatatcgagacgctcgaaatggactactgaagatctgagcaaattcaaccgac

SEQ ID NO: 4487 - DNA, 152 bp, Glycine max
agcttataagaacaacattgccttaattatttccaaatatgcatgtgaattaggacgcatcaacaagaatcaagccaaggctattgtgcaaccaatcaatggggcaaaacacaccaaatgattataatgatggatggctcaaaatctcacaa

SEQ ID NO: 4488 - DNA, 84 bp, Glycine max
  unsure at all n locations
tgaaggtgtatagcccactcatcttttcatagtagaanatcgttaatgtggctactataattatcattgtttctccgccattga

SEQ ID NO: 4489 - DNA, 81 bp, Glycine max
agctttaaaatttgaattaaaacattcatcatattactggtaatcgattaccatatatgcgtattcgactacacagcgcac

SEQ ID NO: 4490 - DNA, 303 bp, Glycine max
tgttaaagctttatatggattaaaacaagctccaagagtttggtataaaatgacgcgctcattcgtctggaatgctaacactctcttaactgttgcgaacagtgcaccttcccaaagcgaatcttagaacgatggttaattcttaagaatcagcgaaatctaaggcagctaaaaaaccccaggggaaagcagcaacaaatggtggtcttatgccatcattttggaatgatgttgcttatgctttaaaggctatggggccccttggaagtgcgttgaggttggtggataatgaaaaaaaaccca

SEQ ID NO: 4491 - DNA, 320 bp, Glycine max
ggggtgaacctagctcatgcttttatacaaacggtcatcaagtcaagtctcaatatggaaggaaccgtcttagcaaattggggccaaagatgaatcgagtcacatcactgcttcgtctactggcaagcatatttaggattattgatgtccttgttacatccaatttcaccttgaccaaaatgtcatggaccatgttgaaaatctaaattgattccaccccatatcctgcgtaaaaattcccacatactttcactgtgcatcattcgcatacatccatgcttttcattggttgcattgctcattgcattctctccttgaaa

SEQ ID NO: 4492 - DNA, 304 bp, Glycine max
catggtagatatgtaaaattctaaaactaaactttttagttggatctatacaattcacctagcagttgtaaaaagtccagggggctgaaaaaggatgattatataatgcacaatattgaaaatattgttgtatgattgtgctaatcctaattgtattgagaatattgctacatgattgcgctgatcttaattgattctatttgcattaattctgattgtatgtattaattcttattgtattttaattttattttgtatcttgatctcttgattattgggatcacttatttttaggatagatagt

SEQ ID NO: 4493 - DNA, 363 bp, Glycine max
tccatcaagttgaatccttgtttgttcggattccccatataattcacttcctatgcagcatcatcaaggggtatacaacaactagattcatatgctcctccacatatactacaacctccaacctgtattactactgaatgggaaggttgaactacttgcagttgggttggcagcttactaagtgtctctgtcaatgattccagttgtttagctaacaacttgttcagtgccaacagtgcatcttgtgaagaaatctctagtaggcttctctttgtgggtacatgagttctatcacacagaatagcatgatcactattagccatattctcaataagttccatttcttcttcaggagtctttaat

SEQ ID NO: 4494 - DNA, 452 bp, Glycine max
  unsure at all n locations
ntgaaccccntgaannnctttgatccctgatagagccgggatgcttacagtccacctgcaggtaccactctggtattttcgaccgtcaacgagatttatttgtgagtatgacacaccatgtgagcgcggaagatgacgcctatctccgcgtgtcaacgggcttgtcggccacggttgaccaaaggcgcacaacacgaccttagtcttttgcggctgtcttgcttttcgtctacagacagcacaaaagaccgtctatacggattaccacttgggtcttttccgacgtcagcgggactcaaatgtgaggctgacagaccttgcgaacgcggaagacgactaaatatgcgcgctgcaccggcttgcggacggggtgaaaagggccctaaaaacgcgataattccttgcgcgatttggctttccgcttccaacagcaaatacaggggctctcggcc

SEQ ID NO: 4495 - DNA, 356 bp, Glycine max
ggagctgcctcggtaaaaatgcttcccagcgctctttaaccgttggatcttctcgaaattaggtttacaacgtcaaaagacacttgtccatgatctgaccgttgcgatctgtgagaagatgtctggagtgtgctagaagcttccgttcctgagagcatctcttatttaagcatttcagcctttgctttcgtgtagcttaggaaaaatgtcatttcttcttctttctttcttccaaagccatttctaaagttccaagaactttctccatcacccacatgcaccattagccaccacaaactatcattgttctccattgtaaacccacaccgagaggaacccttcaaccgaagcggaat

SEQ ID NO: 4496 - DNA, 332 bp, Glycine max
agcttgggggagccttgatgctctcatagggaggcttagggctgcttatgaggaaaatggtgggtccccagagactaacccttttgcaagtggctccatcaaggtgtatctcaaaaaggttagggagtgccaagccaaggcaagaggtatcccttacaagaagaaaaagaaggcctcaaatcaaagcaagggaaatgatgaatcatcctccaccatgcacttctcttgaacaacatcttcagtatcgatccctttggacctttcaagtcatggtaattaattaattaactaatcttgcttgccatcacactcatgatcataaactatgctta

SEQ ID NO: 4497 - DNA, 379 bp, Glycine max
  unsure at all n locations
tgatttattgtgttatgtacagaggatgaagaagccaatggaagagggtatgcaatatatagagaaattgtaggcaagttgcatcagacacagcaaggtagtgatggagatatatattgaaaagagagaaatgcgagagaaaaaaattgtaccaactttcaaacatgctgctccgatccatacgtgctttttactttttaaagtttttgggagctactttggaagaaacctttgagataaaagatgagatgggtcaccgagaagttgacacttatcactaaatatatggattaactcacctaanattattttaacttgagtttgaatcttaaacatataattatattaaatatttaaataaaaaatttatcatttataa

SEQ ID NO: 4498 - DNA, 342 bp, Glycine max
agcttgtaggattatggggtacccatcacatgtggtactaggtggtggtcgggcgatggtgcacaacaagttttccacattcacaaagcgcgcataaacccaccatcccctgttgcccaccttcaactgagctcacgtactcccacgtagcccatatcctcgtttctctcaacaccgggtccccatcaatcctcccaagcttccccaacatcaaagtaatacaacattcaaacaacacaagctatcacagccaagcaaaacagggcaaaggcagaaaactctgccccaaacaccaaccaaaatcacagcttttcacatacaaataccccagaaacatttcct

SEQ ID NO: 4499 - DNA, 280 bp, Glycine max
tatactaaccggaacatactttaccattagaactgccaatacctactggggttcgctattggaaggaattgatttagctcaatttttctctattcatatgcaccataactccataagcattctctttcttttcagtcctattcattattttttacacatttgtgagtaggtgggtggattttgctcgatggggtggagtccaaaagataaaagattgaacattattttttgccatacttgaaaccttaaactaattctccattggtattagaatttgaca

SEQ ID NO: 4500 - DNA, 270 bp, Glycine max
  unsure at all n locations
agcttatcatcctttnttagtgactcatgatagccttaagtttacttcaatagttgttctttacagaaattttcatttctgaatacacttaagctaactcatgagtaggcataaacttaaaaggctcatgattcctgctcaaaatgtgtttcataaataaaacacctctaattttggactcatcagttctttaattttgacacactcataatgatgctcagaaaggtttatagagcaactaccagaattgagaacttggaataattcttg

SEQ ID NO: 4501 - DNA, 308 bp, Glycine max
tatcggattatggggcacccgtcatttgtggtactatgtggcgatcgggcgatggcacaaatcaactatcccatttccacaagtcaagcataagcacaccatccccaattgcccacctttaaatttagctcacgtgcacgttgtagccttctcctcattcctctcaggcccgggtccccatcaacccctccaagctttcacaatatctagacaattcaattccatttgtcatgaaactaccttaaacaaagaaaaataaagtggaggcagaatctttgcacaagaatcattcaaattccacagagttt

SEQ ID NO: 4502 - DNA, 354 bp, Glycine max
  unsure at all n locations
tagagcttagctacacacacccctcaaataactaagttcacctccttgagaagcttccttgaaaagattcctaaagaagctagagcttagctacacacacctctctaatagctaagctcatctccttgagatgagaagctggaacttagctacacaccccctataatagctaagctcacccccatgacaaaatacatgaaaatacaaagaanagtccctactacaaagactactcaaaatgcctcgaaatacaaggctaaaaccctatactactggaatggccaaaatacaaggcctaaacgaaggagaaatacctattctaatatttacaaagaatagcgggctcatacttag

SEQ ID NO: 4503 - DNA, 412 bp, Glycine max
  unsure at all n locations
gtaaccccccttntaaatgataggcttagaatgcagattaagacgaagaagaagaagaagaagaagaagaagacgaagaagcaatcaatttaacaatgttcttttaaatgcgtaagatcaaattgattgcgataaaataaatgagataagggaagagagaaatgcaaactcaatttatactgggtcggccacttctcgtgcctacgtccagtcctcaatcaactcacttgatattttcactaacttcgtaaaaaaacctttttacaacttctgaacacccaaggaatccctttcccttgtgttcangaaactcacaattcaagagacaaccagtctcttgattacaacttactttctgagatgaatataaagatttctctcctttagagtggataatacaacttgatgttct

SEQ ID NO: 4504 - DNA, 384 bp, Glycine max
  unsure at all n locations
agcttcctttacaacanagagaagagaataatgaaggattgaagaaatacaagtagtggggatgtctnctccacctctagaacctcacaatcactcacagactcatctcatgctctcaggatggcttcctcttctcactctgttctctaccagtcttctcacagcaaaagctttgaaaactctctggaacttggacctttctctctntagaagtctctaaacatgcaaaagctttgataatttcccaaactcccctccaaaatctgatttcaggcttaaataggtggctttgtttgtgctagcacgcttagtgcaactatggaccgctcagcgtgcattagtggatttcggcttaacgcgtgcgtttctcacttagtggatgga

SEQ ID NO: 4505 - DNA, 360 bp, Glycine max
  unsure at all n locations
tgaatntggtttagacatgattgatacatgatttgtgacttgtatgaattgatttgngcaagaatggatgagaggaaggtgtgatttcgaaatctgcacttatgcagaaattttgctgtgaaattgtgcagcagaattttgcacaagtgcagaaaaatgcttgtgtgtggttggctgtggaaagtctagtgcagaatgagttcttgatgttngctagtagatcccaacggtcataatgtaggcttatgtactagagacttccagtaaaaatttggagtcgatccaacggttaacgaattggatcgaaggaatngttactggggtctttaagtgagaaaagctgtgatnttggttgatgtg

SEQ ID NO: 4506 - DNA, 336 bp, Glycine max
agcttgtgcgaatctttcccttttgttctaatgatctccatggttaagatagaattcattaatcaaggcaaggttgtttggttttgtctttatcgggtacccaaattgtcgtcgagcgagaagcgggttgtagctaattccgccacgcatacccaaaagaggtacgttgggatattcaccacaactcacaataatctctccaacatcactagctgcttggtaccaaacaatgtcagatgggtcaagagtcatgattcggcgaggccaagaaagcttatcatcattggtcttgaaggcacgggattgaggtaagtggaaggtaaaccactgatagag

SEQ ID NO: 4507 - DNA, 371 bp, Glycine max
  unsure at all n locations
taataaaaaaagcatttccaaatattccaaatcatcattagctatatttgatgtgcctaacatcagtgacgtagtcgataaatttgcttctattacgacttagttaataatagggaagatagaaataagaagcaatcacactctctatggcttctattangagtgaaagaaagagcatttacccaacaatatctctactcttatgccacatttcatttaggaatctggttgcttcttttttgttacaactattgatgataatatntctggatgagacaagcatctcagtaggtttataaaacatggctcagacagacctcagccagtaaaccaggttaaacgcttctaatagactagagattataacagac

SEQ ID NO: 4508 - DNA, 383 bp, Glycine max
  unsure at all n locations
agcttttgtcactccacctatatttggtcttcacattaaccaaacttaacaccgctaacaacaatgccaatgacttcttgcaccccggatacaaaggcttcttcaaatcattttccaatgtatcatacataagagcatgtgcttattgaaaagattctcttgtccaagatcacaaatcatgtcctctaatcgatctcccatttctacattaatcggttcaatttcggaccctctcaacatgtctgtcaattcatcatgccatatccatgtcgtataatttttcttaatcccaccatacaaaaaatgctcattcatgtcatctaatacttgtcaatctccattcaaacagnttatacaagaacaaaaattttttcatcctcatc

SEQ ID NO: 4509 - DNA, 338 bp, Glycine max
tgaaaggtcaaaataagactcatagtgtcattggatgatgagaaaaactttaagctatgagaagtaattagcaactaaaggacacgaaaaatgttgcaggcctgaagaattgcataatgaacatgacatgaagaacaacattgctgcaacacactcaacttttatgaacaccgtcggggctgaaacaacctaaatcatggacaaaattaagcttgaagctgcaaatgctaatatgcctagatagcttaatatgtgtgtagtaatttgaagactacttgagccacataagggaattgagatgatctcactggttggggaaagttaaaagaatatataca

SEQ ID NO: 4510 - DNA, 286 bp, Glycine max
agcttatcatccttttttagtgacccattatagtcttaagtttacttcaattgttggtctttacagaaattttcatttgtgcatgcactaaaacaaactcatcaattagcatggtgctaatgggctcatgactcctgctcagaatgcctttcataattaaaacacctataattcagcactcaacagttctttaattctgacacactcataatgatgcttacaaggcttagagagcacctaccaatattgagaacttggaataatttttgaagcccattaatatgat

SEQ ID NO: 4511 - DNA, 261 bp, Glycine max
ctcagcttgtggtagaatggtagcatagtcagtcaaattataagtttggtttgaagttcataccataaggcctgtcaaagggaagctcttagttgacctcattgtcgaattccctcctagtgaaagcaacaacgaagggtggggattttttacgtagatgaagcttcaaacaacaaaagtagtgatgttggagttactttggaaagaacaaatgacatctcaacaaaacagtcatttgaaggttgattggaaagattcaaa

SEQ ID NO: 4512 - DNA, 335 bp, Glycine max
  unsure at all n locations
cacctgcggcatgctgcttggcaaggcataagcatatgatcctaagtgggtaaaggcgcacgatctatgtgccgaanagggtttaaaactacagggtgggttaggctattttaattatatgctatcttgctattttgaattttcttcgaattggtatttttgttttgatatttgaaatagctcatctttgaagagtgatatgtacaaaccccaatttgctgggtttgtagatgtggatttggccgcagataagaacatttttcttaagagtttggtatgtgaaaattcaattcatttggtgcttatatatagccattatgagctcgaanatacta

SEQ ID NO: 4513 - DNA, 400 bp, Glycine max
  unsure at all n locations
tgtgagcaagctntcttggccttcatgaagactattgccatgccgccagtcctaagtcgactcaagccaggagtaccttcacttctatacctctcagtggctgacaaagttgtaagcttaaaccttgtacaggaggacgggaaacaccagcttcccatctattttaccagtcgtatccttcatgatgctgaaaagtggtaccagatgatagagaaggtagtgctggcactcataacctcagatcgacgcctcaggttgtacttccaaagtcaccaagtggtagtcaagacaaactaccctgtcaaacaggtgttgtgaaagcctgaactggaggaaatgatggtattatggtcctaagtcgacccaagctaggagtacctttacttttatacctctcaat

SEQ ID NO: 4514 - DNA, 239 bp, Glycine max
agcttatggtatccatggggctttccaaaccactaacttcttatgcaagaaatagttaatccattgggagttacatcccgaaggatatgatcaaatagctaattgggtcattctatctcagtaccaactctattttgttaaatgggtttttttttatggataatcgattctggtgaattgggaagagttacttcatgtataatgccttctatttcacaaactcattaaataaaacatat

SEQ ID NO: 4515 - DNA, 375 bp, Glycine max
  unsure at all n locations
ttttaccctgtttctgacttcaattgtgaaatttctgaatgtatatttttcttgttttgcatccataacattgctgagctccagtaattagtatttggaatattgctgagtctaatctctagggaggtagcatccttatgtagagaaaaataccttctttccaagttgagagaggataacaaggaatnnttctctcttttttatggttcaacttcaagccatgtcattcaggatgttgatttcttatttttccttttccttttcttttttcttttcttttatctataaagtagatgctctcatttcacacagtncaacaatttcttgtaatntgttagtggtgtagagaataaattgcaagtgcatgatgaatga

SEQ ID NO: 4516 - DNA, 273 bp, Glycine max
catgccagcttgtaccgatcccatatggttggattattctcaaagacttgtcttcctatgattttacctaatgagagtgacctaacttaccaacgtgtgatctgctttatcatgtactcatgggcacttgacgaagtttttcactaacatggtaccacattgcatataagattgagtcttagtatatttggtgcataacgcttgtgtattgatcgatattgattggttgagtgatgttgtgttttgatccttgagtacgtgaatgatgggaaa

SEQ ID NO: 4517 - DNA, 412 bp, Glycine max
  unsure at all n locations
tgcaaccactgtgactcatattcagtaaaggaactctgttggtatgtttttactntcagaatcttcactgacagagcaaaacttaactactgaagttgtagtccctaattcccatgagagttatagtaagactaatagttctgactccttactcctaattcctgaactcttccaatcttgagctttttatggtgtaaaattgtttaatgctgtgctttgtgtttaatatatctagaactttagatgattcttagagtcaataagagattgatctatgttatatggaggagtgaagtatctattataaaatatgtaacatgaacaaaactacaaagttaccctgtgcatgccatggacaacgggtccatgaccccccatagccacatcagtcctttgagttgcagaaatatta

SEQ ID NO: 4518 - DNA, 319 bp, Glycine max
agcttaatgttttgtgatggtggttagcttgtaagggttcacttgtatgagctcatgagccatatgagtcatgtatgtaaagatcattttacacgaggtagtaatctaatcttggaatcaccgttagttcacatttgtgatctaaagctttcaaccattgaattaatttcacacaacaaattcaacaaacttgatcgaataacacatccatcatcttttccaatcatacgagacctttgaagaagaagaattttcaaaaatcaaactctgattttgaatgcaaacatgaaacgattatcaccgaatggctttgaacaca

SEQ ID NO: 4519 - DNA, 327 bp, Glycine max
  unsure at all n locations
caagctttaaactttgctaactaaataaattgaaatataaaacttaaactaaaacattaactgaacataaaatgtatcaaaagcagaaaaataaatggtaatcctgtcatggctcttcctgtgctgctgtgggctcatcctgaggtaaggagggagcatcctgngctggctgagggatatccttagctgtaacaggccatggatcccaaagtgtttgcgctactaccatatctgctacataatctatatctgcagcgccatactcctcatctgagacctctacccctggtgtagtaactgaagaagtctgcggggtggtctctggag

SEQ ID NO: 4520 - DNA, 205 bp, Glycine max
agcttttcagcatatatctagctcgaaatatttatctacatgtatgacattcaatccagtcctatatgtccaaatgctgaaacctgacactactaatatataaactgttgcgtgtcactcttgttaggaagaataaataaaataatgaaacataacttcttcggaggcatgaagatgacgataacttcatgtcacaaaaacaatt

SEQ ID NO: 4521 - DNA, 365 bp, Glycine max
tgttagaagccgtgatgtgaaattcatggaagaccaatttattgaagacattgagaaggtggaaaagtatacatctaaggaagacaatggtgtggctgattttgaaatagttcaatcgcctattcagaatctgaatattgatgtttagaatgatgttggtgtccaacaacttggagatgaggtaaatgttcctactgatgatgatgaagaggagcatgacatgttacaagatgaaaatcttggtaatgctactgaaccaccttaagttcaactcaggaggtccaacagggagagataaccttctaggaggtattctcctaatgagtatgtgatcctaacagatgatggagaacctgagtacttta

SEQ ID NO: 4522 - DNA, 316 bp, Glycine max
gctacctgaatgcccgcatcgagaattaatatgccaagagagatttttctgtctttgaagaaggatgtgcggctctcatcaatgaggacctgtataacatgcctcagcctatttgctaataacttagcgatcaccttgggcatacacccaatcaaagaaatggggttgtgatcatcaaaagactgatggtgattaactgtgggaagtaaagccaaaagagaaacattactgcctatagggaatcttccatgcacaagagaatcatgtacaaatcttctggagtcaattattaccactccccacaattacttaatga

SEQ ID NO: 4523 - DNA, 196 bp, Glycine max
ccattcatgctggccgaacaacaccaacccctccgaactgaagctaggggtttcaaactagcgtatgaaacaacgaactctccctcgtgcttttcgattcccttcaatttttcatgtttccaactgaacaaaattaaggtttaacttggtgtgtgtgatgaaaattgagaattggatgatggagagtgtgtatgga

SEQ ID NO: 4524 - DNA, 458 bp, Glycine max
  unsure at all n locations
tgaaacccttggaagncccttgaataccttagagtccaccgtggatgctctacagtctacctgcaagcatgcaatctgtgcaactggaatgtacgaagatatccaagtaatcctgtaatggaacattggaaaggtgcaaagaaagatctgagatacttacagggaacgaaagatcacatgcttacatataaaaagtcaaatcatattcacgtgattgagtattcacactcatactttgttggatgtggggatataaaaaaaaaccctcttttctatgactttcttttaaccgaaggagccatatcatggaagatttgccaccaatgcggtgttgctgcatcaccctgggagatgatcttgtggccgtcaaagctacatgtaatggaaatggtgagcaccctatgcatagccttcattggcttcagactttatgtgaataccctaaacaggcgtggacc

SEQ ID NO: 4525 - DNA, 286 bp, Glycine max
agctcggagaggatgcttcaatggcggaaaagaaagagggatttaaagagagaggggtgagcactaaattgaaggaagaaaaagggagagaagttgaactttgagttgtgtctcacaagactctcattcatcaaagttacaacaagtgttacacatgcttctatttatagactaggtagcttccttgagaagatttcttgagacaacttccttgagaaagctttttgagaaaactttcgtgagaagctagagcttagctacacacacccctctcataactaagctc

SEQ ID NO: 4526 - DNA, 399 bp, Glycine max
  unsure at all n locations
tcagcctgattgctaagcgacatcttatccttggcttagcgtgacccagtgtcgccaagcgcaattccttacagccataactggggttcataaagctaagcaccagtcatggcagctaagctgaattccttgcagcaatgtgagcgctaagcgaggcctgatctgtagaagcacagactatgagcttgatgctttcatgatgccatatgaacatgcgtttcccaagttaagatcaagacaaaaatccaagagattcaagatacatcatcaagaagatctctagtgatttacggagggaagttcaaaatgaaacaacaagaggtttggccaagaanattaagctaaaatgtccttttcaagagaattactctctagtaatcgataccagaggatgtaatc

SEQ ID NO: 4527 - DNA, 305 bp, Glycine max
  unsure at all n locations
agcttgtaagtgttatgctntgatctgtgcgtgtatgcttctaacatgtcttcattgtttcttttataagcagtatgctttgccctttgtctttctgctgactggggtcatttctgatcatgaaatgcttgatttgttggacttggctttatcaactgacacttcaaatacaattgtgagagcccaggaactcgtcaggacaaggatagatcctttacaacttatatcacaattggaaaatcttattatagacattcttgtangtcaatgtgaacttggtgatttttgaaatcaaacaagatttt

SEQ ID NO: 4528 - DNA, 364 bp, Glycine max
  unsure at all n locations
ttaatctagcttgactagcattcttagtcaatggctattctaatcagtcctattcagcttacttactctctaaaaaaggttaacacgtattagacttttatatcgtataaccgaggtaaaagcatcgacgtttaaaataatatcggtaacatcggctcttcagaaccgatgttaatatataaatacaacatcggttattgaaataaccgatgttatataataagaaatataaaaaaagtaatatatcttcatatcaacatcgattgttatcaaaattgatgttaatatatgcaaacaacatcatnttttttggaaaaactgatgnttgatgtctatattaatatcgggttaaaaccgatcttac

SEQ ID NO: 4529 - DNA, 247 bp, Glycine max
  unsure at all n locations
agctttttgaaaacaatttttattatcattaagttntgnaacatatgactttgtgacattgagagattgagcctaatacttaaaaatagttcanaaggtgaaatgaacgatagtantaatggtgtatatagatccgttttggtatagaccaaatatcaaaatgatattattttcttatataaaattacttatatttctttctttaaaaaatattgtttattatcataagaataaaatttactaactt

SEQ ID NO: 4530 - DNA, 353 bp, Glycine max
agcttacccattcagttttagggtttttatgatgatgcttgtgatgtttatgtgctgaaattgcttatggaaaactgttagagatgaagggtagagttaacctagggttagaaagtgagaatatggtgttatgagtggaaaaagagtgaggttttgagagttggaaggccaaatctggatttagtggtatttggaggttaaagtgagttaatcctagcttgaaatgtcatttaggacttatgagaaagtttgggttgtgctagagagaaaaacaaatgaccaaagtgaacaaagagccatttctagggtaaaattgggtgttgaggagtcaaattttggttcggtgaaatttt

SEQ ID NO: 4531 - DNA, 359 bp, Glycine max
  unsure at all n locations
tgaaggcgtgtaacccaccatcttctcatagtagaacatcgataacatgtctactatcattgttatcatctccctctccatcattgggggcgttacttgagctgccagatgccttcacctttgggcatattctttgaaagattcatgctcctttttacacatgttctgtaactgcattctatcangaaccatattaaaattgtactgatactacctaatgaaggaaaccattacgtccttccaagaatggactcgggaaggtttcagaatactatactaggtgacagctgccccagtaagactttctagtgtcataccctaattcgtctggggatgatcgtttgccacatttgatcctt

SEQ ID NO: 4532 - DNA, 318 bp, Glycine max
  unsure at all n locations
ntccctctntgaacaaatacctctcagccaaatagaattcatcttgtgcctttttcccacaactcttgtaaatgggagagaaatgttcatctaaagcatacaagtccctaatgttatcaaatcctaaaatttgagctcctatggagcaaaacaatgtgtgtctcctaaagagggcatcaactacaacattttgttttccctttttgtatttgataacatatnggaaatgctctangtactctacccattttgcatgccttttgtttaacttgctttgccatctaatgaactaaatgattgatgatcactatgaatgac

SEQ ID NO: 4533 - DNA, 340 bp, Glycine max
agcttattgaagtttgctaaaaaccgtgttaggtttggtctgggttacaaccatacaaaggctgacaaaaggaggatttttttggaagggaaaaaaataagttaacccaattaacaaggtgggggcccacaagtgaagagggtcctaattggtcaaatcaccaaaagcttaatcagtgtaggatggatgattgaagatcaagttgctgtgctagatgaagaaaccaatcaagaccagcccaaatgggtgcaatcgtgttccccaagctttgaattgaagaaattgcaaatcatggagcgactcgagatttttgtgtcaaatccaatgtaatcaagtagtt

SEQ ID NO: 4534 - DNA, 342 bp, Glycine max
  unsure at all n locations
tcttagagatccactttntctttgctgttttgtttttgaaaactctagcacatgagtgttcactatngaaaagttttgactttggaaacattttttcaccttttgttccaagaacaaaaaatcttccacttacactcttgttccttacacttcgctctaaccctttcacgatcattcttctttcaaacanattcccttcctaggtgaattgtgtagtctctaagcgcatccttaaacaagtcaagggtttcaaattccatccccaactctaggtgaacttgaccaaaggttgaatttggattaaaaattgggaaaacaaccttttcatcatcctcatcatct

SEQ ID NO: 4535 - DNA, 346 bp, Glycine max
  unsure at all n locations
atgatagcctggagttaacttcaatggttgttcttggaagaacttgtcattttttatacactaaagcangctcatcaagatgcataaactcagaaggctaaggattatgttcagaaggtnggcataattaaacaccaagagtttggactcaacatgaatgacctctacnctggtatgataaacacatgagccatagggacttctgatgtacctatgagacacaatgaactcattgaatcttttgtaccactactttggtgatttcttcagcccataaagagacctcttcaatctacagaacaaaaatttcctttctttcaccttcaaacccttacaatgttgcatt

SEQ ID NO: 4536 - DNA, 337 bp, Glycine max
tgtgaaccaatttaaaaaatctttgtaatacagtatgacacgtattaattattaaacctcatccttaaaattaatattggaggaccaaacttattatattcaataggggcttttaatgttcttccattaaatggtaaaagttcattttagtaatttctttaataaatggttgcattcaattaccaaagatgaactcttattatgattagagaacaaaataaaaattcctatagaaatccttcacacaacaacttatgccattcatagacacaaaagtctagatattgtgctatctacattctcacatgtctctagcttgtcataatctctgaaacac

SEQ ID NO: 4537 - DNA, 156 bp, Glycine max
tggaagtcaaccgataaaagaacaaagaccacaaagcaaggaggcttgtgtggtggctggccaactatggatcttgagtgatatttggaagatggcctctggtaatcgattacaaaggatgtgtaatcgattacaaagcttaaaaatggggtcaag

SEQ ID NO: 4538 - DNA, 426 bp, Glycine max
  unsure at all n locations
agctcataagaacaaaattgcctaaatcatttccaaatatgtatgtgaattangattcatcatcaagaatcaagccaaggctattgtgcaagcaatcaatgtggcaaaacacaccaaaatattatgatgatggatgactcaaattctcacaaacgtaaacttatcactttcaaattgagctttcaaaactatcatgacatgtagaggaaaaacaaggatttcaaatcacaaaatgtcaagagactttattttcagaacaattacccattacttgaacatatcctataattcaaagaaaaacatgaaaatttaacacaacaaaactaacaaaaattaaactagaacccaacaaaactaacacaattaaactaatttaacacaactaacaaaaccaaaaccaaagaacacactccctcctatacttaa

SEQ ID NO: 4539 - DNA, 285 bp, Glycine max
  unsure at all n locations
agcttgagttctacataagccttccaatttctactagcaagntgttttcaccttatggagaaatgcctgatttgaaagagaagcatgaacagcttaaacttttcaggataaatgtcaagttggtctcaaagatcaatgggaaggagttgagtaattacttgagcaacgagggtgatgattggattccacttccacaggattatctgcatgctttggatgtagttcttagggaaagtccaactgagaaatgcatacctgtagggaggtcattctattcaagttcaa

SEQ ID NO: 4540 - DNA, 408 bp, Glycine max
  unsure at all n locations
gaaaaatctagtctttgtgggtgtcgtggatctaatttgttttncttcctgtgttgaaaatggagctntgcaaattagaggaaaaatgaactttatggtaatgcaaaggactaaagcaaggaaagttgtacatccttctanggtccactataacaggctctatcttaactatttcacaagctgggagccatgcgtccaatgataatttgttgtgacatctgtgtctagcccacatgagtgaaaaaggactggaaattatgagcaagcgaggcttacttggaaatcacaatgtggaacctctttagttttgtgagcactatgtctatatgaagcaacatcgaaagaaattcccaaagggtttgtagactaccaaagtcacattggactattgccattcttattgttggg

SEQ ID NO: 4541 - DNA, 94 bp, Glycine max
catgcaagcttctaattacgagcgtctcgattattacgggactcaaactttcattccgaatttatgttattgacggttgaatttgctcagagca

SEQ ID NO: 4542 - DNA, 167 bp, Glycine max
tcaagcttaagaaaagtcaacgataataacttttggactcgttgtttcattgagtctcgttatatatcgagacgctcgtaattgaaaatgggagctctaagaaaaggtaaaccgggataacttttgactcagaatgtcgattgtgttccgtaggatatcgagacgct

SEQ ID NO: 4543 - DNA, 198 bp, Glycine max
agctctggccaatctgatctatggaagctataggcagctaattatttgaattgccgtttgctggctctcccttttacttacctgggaatacccttaggagcaaacccgaagagatgtaatttgggggcaccctatatccacaaatgtgaaaaaaaggtagcgaggtggaaacataaacccatatcttttggggggaga

SEQ ID NO: 4544 - DNA, 396 bp, Glycine max
  unsure at all n locations
agagtttttctattgatcaagagggtttgtagcaatttgtgttttgtaccctgtaactaaatggatttggaagntgaaatttaatgggacttccaattatatctgatgaaagtagatctttgcacttttattcttggaactattaccgggattttggagcaacaccgggctaaataaagcctgttgcttggggaaaattactaatcttttctttccccacacaccttttcattctccaaggtgcttctaaatatgtctccagaactataattgagaatttaacagattaaatatggacggcttgatgtacgcacaaagaaagcgttccagcttgggcccaagaagtcaaaccctctatgtaggaccatcacaacttctcagctctttcattgaacn

SEQ ID NO: 4545 - DNA, 286 bp, Glycine max
gctcgaagacaagactatacgaggatcttccttaggtatatttatatctctaagggctaccgtgtctacaacttgcaaactaagaaactcgtcatcagtcgagatgttgaagttgatgagtacgcttcttggaattgggatgaagaaaaagtggagaaaaacgttcttatacccgctcaactacctcaagaagaagatgaggaagaagacctaggtgaaccaccttcaccttcaccacaacaacaagatcaagaactatcatcaccagagtctactccaagatgag

SEQ ID NO: 4546 - DNA, 369 bp, Glycine max
  unsure at all n locations
tcttgactgtcactaagngacaacatggccggacattctaagaaacatttctgatgggcattctggagaaccatgctaatactcattgggatgcttactgaaaatgacaccatgcttgttgaatatccttgctgaagctcatattgatattttattctaaagccacacatcttcatcattcataacacttattcacaactcttaagcattctaaggctgattactttacaatgacttaatgaaagttcactcattgacgtgtaatcgattgtccatgctagactcagcagnggtctcaatcctgtggacctatgcttctcatcggagcttctcatggaccacgacttcattctttaacaatcctgtatc

SEQ ID NO: 4547 - DNA, 402 bp, Glycine max
  unsure at all n locations
aggttgcttagtattaggaagtattgtgnacttaatttttatggatcaacagatactccgaggttagggtaacttgtatgaaactgttatccggtcgttgtatatcctattaagacttatatacgtgatagatacatatatacatatatatgatactctaatgatgcacacgtgaataaccactaccacgatcaacatgtacatacgtttactcgtgcatggatactctgacttattgaagggacttgtttgttgacacaagcaataacgatgcttccattctgtacctttaaattttacgtgacttttgatgactatggcatatacatgaggacctgccgacttgcttatctatataatagatgcgctgagccccacatatagactaaggaaacgacgaag

SEQ ID NO: 4548 - DNA, 326 bp, Glycine max
  unsure at all n locations
agcttctgtattcaattttgagcatctgtatatattacgggtactcaatcggatattcgagtaaaaattaattgtcattagaatttgctcagaagatttattttcaatgtcgagcatctcgatatattacgagactcaatcagacattcgagtaaaaagctattgtcataagaattgcacagagcttctctttttaattntgagtgtctcgatatattacgggactcaatcagatatccgagttaatagttattgccgtttgcgtttgctacgagcttccggttcaattactagcggctcgatatattatggcactcaattggaca

SEQ ID NO: 4549 - DNA, 333 bp, Glycine max
  unsure at all n locations
tccgttgctcaattgcaagcgtctcgatatattatgcttctaaatcggaccttcgagtgacaagttatgatcatttgaatttctcgatagcttccgttggttaatttcgagcgtcttgatatnatacgcgctggaatccgacctacaagtgaaaagttaagaccatttgaatttctcaagagcttccattggtcaatttaacccgctcgatatttatgtgcctgaatcggacctccgcggtaaatgttatgaccctttgaatatctcgagagcttccattgtcaattgcgaccgtttctattgtgatgcgcctgaaatggaccaccgagtaaa

SEQ ID NO: 4550 - DNA, 301 bp, Glycine max
  unsure at all n locations
agcttgatgtgagaaagcgtggaagagttagtcttcctactttngnnttgtgaccacagagtggtacctggagatatgtcgcggnggtcaagagaccttggngacgtcaggtggggtgctattgcccaaaaccaagcttgaccaatcccgacccaaccccggcatagtcagtcagtgagaacctgtgacgtacctaagcaggcgagctcctggcagtcaaccaataaaagaataaaggccacaaagcaaggaggcttgtgtggcggctggccaactatgaatcttgagtggtatctggaaa

SEQ ID NO: 4551 - DNA, 312 bp, Glycine max
agcttatgctgcaaacatctacaacagacctcctcaaccttatcagcaaaatcagccacaacaaaataactatgacctttcctgcaacaggtacaatcctggatggaggaatcatcccaaccttagatggtcgaatccttcacaacatcaacaacaaccttattttcaaaatgttgctggcccaagcagaccatacgttcctccaccaatccaacaacaacaacaacaacagccccagaaagaacaaacagttgaggcccctccacaaccttcccttgaagaacatgtgaggcaaatgactatgcaaaacat

SEQ ID NO: 4552 - DNA, 305 bp, Glycine max
  unsure at all n locations
tgaactnggcaccttactagtcttaactggtccctgtttgtcctgagtaattagagccatgtttggattggtttattttgaagaaataaattcactttttttaatcttgaaagagccttataagaaaaagttattcttttcccataaataatccgaacttaacatgcattcaatctgttggcaacaaaaaacaactattcatgcaacaaattataatacagtgcttaccttaatctcaaaatgctccattttaatcaacaacgtatgttacagagaaagagaggtccactgaaagctctgtaaaa

SEQ ID NO: 4553 - DNA, 381 bp, Glycine max
  unsure at all n locations
agcttgaagaaagagtcatagatgcttgtataanatctataatttatagnttggaattgcaataagtattattgagctcatcacctcacgaacgaattctattaattattttaatacggctaattctttggacataaaacataataacttgcattttacatgcatttgaaggatcaaatcagtataaagtaaaataaaggaaggtaataaggagaaattgtttatctttgaaggacataatgagaaattgttaagaaaataatcaaatactactgcccagttagatactttgacttggtgcccaacagcaattagagtgcatcaacaatttctattttgacttagtgtgcatgtgcaacagcaattatagctttcaacggc

SEQ ID NO: 4554 - DNA, 298 bp, Glycine max
  unsure at all n locations
ggacactatgaaactcagcttgcagngattgctgttatgaggattctttctttttagtatttatctttctgtcggggagtttcactaggtcccatgtcaaccctctaacatggcaactaanaaatatgaagtacgtaaggataggtcattcaagtctttttctaattgaatcaactagtatcacttcgtacagtatcctcttatcacggaatgcgaatgatgaataaataagactttttgtttcttacaagggataacatgatgagttatataactaaatatataatctaatttgttt

SEQ ID NO: 4555 - DNA, 302 bp, Glycine max
  unsure at all n locations
agctttgatgcaacatttggagaggttattgaaacantgaaatgatgtgcctcatgagaggttggatcaaatggagaatagagaacatagtggaagagaanaggaggagaagagggaatgatggtgttcctagacaaaaccgaattgatggtattaaactcaacattcctccctttaaaggaaagaatgatccgaaggcctacttggagtgggagatgaaaatagagcatgttttctcatgcaataactatgaggaggaccacaaggtgaagtttgccgccacggagtttccgactatgctc

SEQ ID NO: 4556 - DNA, 311 bp, Glycine max
  unsure at all n locations
agcttgctccanaacacaatgtttgcttacttgaatggaaggagatcaagagnttttgaaagtagaaccaaaacataagatcgcccagtgaggtaaaagccgtcagctaatgacattaaaaaagcactttctgggaggcaacccagntttaatttctataatttttggtttcatgcattaaatcattgggaacttgctacataatctgtacataggagtatatcagcctatctttgaatgttagatataagggtttcaatttgttgaggaagggactgaaaaataactcaaaaaatattttctaaaaaatc

SEQ ID NO: 4557 - DNA, 409 bp, Glycine max
  unsure at all n locations
tcaagcttgtgcaaatcaaatcactcctacatttcatctctagcatgcattnntnnntctttacccactcctcacgtttggttttntagggaaaaacaccataactaaacgcgccgcaagggatccctatcgcaccagatccaaatctagaacgatgggtgatcaagaggagacgcatgaacagatgaaagccgacatgtcggctctaaaagaacaaatggcctccatgatggaggccatgttaagtatgaagcagctcatagagaagaacgcggccaccgccgccgctgtcagttctgctgccgaagcagacccgactctcttggcaactacgcaccatcctccctcanacataataggacggggaagggacacacntgggcacgatggcagccctcacctgggatac

SEQ ID NO: 4558 - DNA, 297 bp, Glycine max
agcttctagccaaatgcacttaccttgatttaattcctttgatagcccttttgagccttggttccctttccttggtttgaagctcactacaagccttaagtgaaaaaccatgatatcatcatatccttaaggaattttggagctttggaattgttttgggaataagtgtgggggtttttgtttcattggataacatgttttggtggccatgcttcatgatatattttgagccatacttgatatacattgcatattgggtaaatgttggacatgctaaatatgatgttgtttctcaaa

SEQ ID NO: 4559 - DNA, 394 bp, Glycine max
  unsure at all n locations
ntaatgtttctttgccatcatcaatagctccaatcatattaaaaactcagaatcatgactgacaacaaaactttaatgaataaacataataaggaacgaaaagaatatgataaaaaatgcaacctcaaatacaacaacagttcagaattcttcatgcaacatgtcatatggaccagggaaaaaaaacaaattcatttaacaatcaagtcacataaagagataagaagaaaattaagaaatgcagaattaaatcgtattattgttgaaagcacaggagacataaaggtagtaatgaatagttgtaccttggaaatcgcataaactaatgcaatgcgttgttgatgattggaattnnttactaagttattgtggaatttgattagtctggaatatg

SEQ ID NO: 4560 - DNA, 349 bp, Glycine max
  unsure at all n locations
agcttgactttgcgagttgattttagccttattttcactttagttattagtcaattcaattaggaaagagaaattccaaagagaaacgtccgattgattnttttggtttattttactaaaagataatttttgattattatattattattttacctctttttgngttccaacgtggttacgacatgaccgaacggtcggatttcattttaacagaaattaacggatattacaaatcanatgatcggtggaaatttatattatttttttattagacgagaanatgacttangtaaatgactaaagcacgtccaaagggggtacaggaaagtaatgaaatgagaataaaagt

SEQ ID NO: 4561 - DNA, 333 bp, Glycine max
  unsure at all n locations
atccgacaggatgaattagattctcattactatgagatgtacaaaatataaaggcacttagaaccctgggctgattatccaagaatgctctaatgattatttttttcttcccaaatacctatttttttttcttttctaagtaatttcaaaagcaacactttcgcttagcaaaaattaggtctcactaaagaaaaagtcaccttgaggcgaaaggagtttgaaggactcctcgctcaacaaaaaagaagggtcgttgagaaaaagcattgatacacgcanacttaattaagacattctcattgagcaaagtgataattttgcttagcaaaactg

SEQ ID NO: 4562 - DNA, 140 bp, Glycine max
agcttcgatctttatgacatatggaagtttcatgtcggctagtatttgtttattgccggatgctgcctgtcccttttacttacataagaacacccttgagaacaaaactggaggagaactcataagggggaccacacact

SEQ ID NO: 4563 - DNA, 167 bp, Glycine max
tgcacccgaatcagacataagtgtgaaaagtcatgactatttgaatttctcgagaggttcgcgtgttgaaagcttagcgtctatacatagaattaccctgatctggacctgagagagaatagttgtgaacatgagaaatggacgagagcttccgaggttcttttata

SEQ ID NO: 4564 - DNA, 381 bp, Glycine max
  unsure at all n locations
ctgactggagacattttatgaccaaanatgtttgtgcatggcgaggcatcaacaatgaaacaagccaaggctattgtgcacgccgtcaatgcggcataacacacctttcgactctgtttacggagaggtctaaattttcttactgtcatctttctaaaagatttggccaaaccttctcttcaaaaagaagtctttgtcaaaaactgtggaatcatctttttaatctctgctcctttgctaaaaaacaaagactaacggcctgatcctttgtgctctcttctccttacaaaaagccaaagactaccgcctggaattcttgggtctccctcccttaacaaagattctaagacaaccccctgaaatttttgttctttacaagat

SEQ ID NO: 4565 - DNA, 303 bp, Glycine max
agcttgcatatataaattaattaaggataatccatgcatgatgcctaaactggcatagcaagaagggctctcttcacttttatgtagcagccattgtaatcaatattgatcctcatcaccatgcagaagtactgcaaaccaaagaaaacaaaaaggattcaaatggtatctatagaactaacttaattaagaaaaccaaaagatggtgattagagcttgccttcaatgtcatgaaaaccatccaagagagagagaaagtaacaggaatttgaaaatccaaaatagtatgagtgagctagcaaa

SEQ ID NO: 4566 - DNA, 361 bp, Glycine max
aagctggaatcatttattttatctccgatagtctatgggttatgtccgtccaggtagtgccgaagaatactggcctcacagtgatcataaatgagaaggaggagtttattcctactcaggtgcagaacagttggagagtctgcattgactattggaggctgaaccaggctaccaaataggaccatttctccctgccattcattgaccagatgcttgaacgcctggcaggttaatcccactactgtgtcctgatgagtttctggtatatgcaattactattgctctgagatcacgaaagaccacttacctgcccataggactttgctataagagatgccttctgctggcatgcccctgtcct

SEQ ID NO: 4567 - DNA, 317 bp, Glycine max
  unsure at all n locations
ggcccgggatccttaagcacctgcagctgcagctgatttttttagtaggaattatccttcctaagatggagccaaacccagtcaccatcattaagaactatctcttttcttcctctatagcctttagntgaatacacctttgtttggatctctatttgggtcttaaccctttcatgcaacttctttacaaactctaacctagattccccttctttatgtataaaagaagtgtccagtgtgaggggaatgaggtctaacggtgttaggggattgaactcatagacaacctcaaaaggggactgcttgggggttctatg

SEQ ID NO: 4568 - DNA, 356 bp, Glycine max
  unsure at all n locations
tcgaatgggcatcgtttcatcttatttgccaatgatatctttaccaaagggtggaaaccggcctcatatgctaacctgactaagaatgtggtggttagaattcatcagaaggagataatttgcagatatgggttacccaaaaagataatcaccaataatgccaccaatttgaacaacaaaatgatgaacgagatgtgtgagggattcaagaaccaacaccataattcgacgccttatcggcccaagatgaatggggcagttgaggcttgccaataaaatatcaagaagattattcagaagatgacaatgtcatacanagaatggcatgaaatgctacccgtcgcattacatggtta

SEQ ID NO: 4569 - DNA, 387 bp, Glycine max
  unsure at all n locations
agctntntgttgtttttgaaaaatttattccagacttcggataaactttaatttatggctaattcaagaccaactttttgatatatttcttgctaggactatccctaatcctagggataattagtaggaccaaataaatggaggttgtcgaattataccacatgatttcagcaacaacaaaagttgcaataaagacaacaatgatattttttttattgcaataaagacaacaatgatatttatggacattatcaatgtttcccatgtgtaatcctttatataaaccttgagctggtcacacagtaagatgaaagagaccccgntaatatattatctaacattctgcaatgatgataaactatttctcttcttcttcaaaaaaaaaaa

SEQ ID NO: 4570 - DNA, 366 bp, Glycine max
  unsure at all n locations
tgaaggtgcgtagcccaccattttccctaggagaaacttggtaatgtgtctactatcaatgcaatcgnttttttcgtcattgaggtggcacttgggcctgcacggtcctcacctttgggcgtattcttttgaagaatcggggccccttttttgcacaaaatttggaggtgcatcctatcccaagccattataccgacactgcctaacgaaggcaccattaggtcctcccagaatagactcgggaaggtccaattagtgtatcnggtaacactaccccagaagactttcttggaagaatgatcaacaattctatcttttgcgatgccccatcttcgacatacatcttagatgctcttgggcaagtac

SEQ ID NO: 4571 - DNA, 462 bp, Glycine max
  unsure at all n locations
atgacnaccgtgctcggacccgcggancnntaatttgatcctttganngccagcnnngangatagaggcctcaccgctgtataagacaaagtatgtctctaacgaggctatatttgatcatcacgcctctacacactgccaaaaacacctcggtccgacgatgagggtgagaatgaaggtagacttccatgctgacgttgccatttctatacagtcatgtttcccaccaacccaacaatgtctttactctgcctataacaaacctgttccttaccctccgcctaattatttacaaagggtatccctatatcaaccacaaaatatgtctaccctacttgcaatgacgaatacccactctataccttcctaaaacaccaccaacaaatgaattctgctcaacaaagccttataaatatcccatcatcagcgtcccatgctacttgctccctatcactagaaact

SEQ ID NO: 4572 - DNA, 188 bp, Glycine max
tgtgcaaatcaaatcactcctacatctcatctctagcatgcattttctttctttacccactcctcacgtttggttttttagggaaaacaccataactaaacgcgccgcaagggatccctatcgcaccagatccaaatctataacgatgggtgatccagaggagacacacgaacagatgaaagccgaca

SEQ ID NO: 4573 - DNA, 327 bp, Glycine max
  unsure at all n locations
agcttatttattcagttgaagttgcacatatctttatgattattgagatgataggtaaaatgggaacccagctttggccaaccatttgggccagccttaaccataactttccttgatgggccctaaaaatggattaaaaagtggaaggctctaattataaacctttaaaatataaaaaataaattaaaaaaatctcaaataatttagtaatgtaagattaatcanaatatagtcgtggaaaagtatatgttcttacaatcttttagcgatggatatatttatattaacttaattgaactnatcttttatatttatatcgatatcaaa

SEQ ID NO: 4574 - DNA, 338 bp, Glycine max
  unsure at all n locations
ntgatgttatttttttatgcatcgctntgattttntgttttaatgttngtgctagtccaaatttttttttaataattttcttttaataaaactcatttcatgatattttgcaaagtgatgcatatcaagctattggctactaaaatttcttacctcaatgattattcaagtcaatagtgaaatagcaatgggtgcaaccatttccccaattctgcataccgaaactcccagttcaatattagtgtacttatctggaaggataatcccaagaatcttcctagtgattaatctgcaaatggaaaccagcctttaagcatctggggtctcatctcattatt

SEQ ID NO: 4575 - DNA, 351 bp, Glycine max
  unsure at all n locations
ggagggttattccacccgctcttatggatgaccacagagtgtgacctgaagatttttgactgggctatccattattggggaaccacgagagctgctatggacaaaatgcacggtagacatttccgacccatcacggggtagacgggccgacgcaacctgggatgggcctaaacggaccagcttctggcacgtaacagaggttaggaacaagaaccacttggctgggaagcgtcgcggggatggtcatcttagaatttttggcggaatgaggactatatgctatggttcatcatcacaagcctaatacatgaagactaacgcgttgccgggctcttgcgatngttaccaaan

SEQ ID NO: 4576 - DNA, 330 bp, Glycine max
  unsure at all n locations
ttgcatgcaagctntatacaattaattaagatcaatggccaatatacaattaattaattacatatatacttatatagtgggagaatagtgtctatcagagttttaattttttgtactgttttaattacaaagacttcatttatttttttttaaaaaaaagttgattcatggattattttaaaattcaaaagtaaatgatttccactcataataccaaggaataatagtaaatgaaggaaatatttattctctatttctataattaactttagaaaaaatttattaattaaactagctatacctggttatattgttttgaccccctttttt

SEQ ID NO: 4577 - DNA, 382 bp, Glycine max
  unsure at all n locations
tgtgcggtgaactaacctcctttaacatggaattgttgtgcaattgtgatttgatacatattgatttaactaggaagggcaggaaaaataagggaaagatcatatttgatgtggacatccncacagatagtgttttcagattatagcttacacagaatgttagcataaatatagttcaaatggctgaaatattttacttcttagaattcattcattatattattactaatttaaggatcctggtgacaaatatgattgttttaaatgacatcaaaagtggatgaatttgaggtgtaaatctatattgtatgtttgacttgaaattggtgagaacgacaagaggggtcatgtgataaatattggcttttcactattgatagat

SEQ ID NO: 4578 - DNA, 345 bp, Glycine max
agcttttatgtgaaaggatgtgactcttcatatttgaatttgaatttcaacgttcaaaggcactagtaatcgattaccaaaactttgtaatcgattacaactttttgaaattaattggaacgttgtaaattcaatttgaaaactttttcaaaacaattttgctactggtaatcgattacaacaatctgataatcgattaccagagagtaaaaactctttggtaaacatgttttgagaaaaatcatgtgcaactcaatttttgagaaaatttttttcatacttatcttgattaagccttctcttgattcatgaatcttgagtcttgaatcttgatgttgattctct

SEQ ID NO: 4579 - DNA, 355 bp, Glycine max
  unsure at all n locations
tttcgattcattctatgtacccgtagtggtccacattgtgtttcgtgcatttttattctcgttttgtttactttttatacccnctgttgacgtgcttaagccattttacttaagtcatttctcgcttaacttaaaaataaaataaatttccaccgaacgtttgaattgtattatccattaacttcggttaaaataaattccgaccgttcggtcgtgccgtaaccacgttggaaatcaaaaagaggtaaaaaataatataataatcaaaaagacatcttttagtaaaataaagcggaaaatcaatcgggacgtttctctttgggaattctcattcttaatcgaatngattaataac

SEQ ID NO: 4580 - DNA, 335 bp, Glycine max
  unsure at all n locations
agcttttaagtgcgggtttaagacgcgtatgccaagtcatcgcgatatgcggngatgactccccgaagagatcggatttggtacggccatgtcctcccggtttctgactaggaaattggcgagtggaggaacgcccagacgtttacgcgaaaagcataatgtaaccttttgtagctntaaaactctacggttgggcctaggctttagagtttcctttttgttaaagcattatgtcttttgtttttgaagttataatataaagatctttcttcatttgntcctgngcctctatccattctcattcattttcatggttatttctttactcttaaagc

SEQ ID NO: 4581 - DNA, 334 bp, Glycine max
  unsure at all n locations
tcataatgaatcaagaatgattcanagagttntgatgataacaaagatgatgacaaaaagttcaaaagtcaagaacacttatgataacaaagattatgatctcaagaatcaaagaatgagtttcagattgaatcaagtacacttcaaggatcaagaggaaagttgaattcaagttccaagaatcaagatcaagattcaagaatcaagagaagactcaattaagataagtattaaaaagttttttcaaaaactgagtagcacatgaatttcaaaaccttttacccaaagagttntactctctggtatcgattaccagtagcaaaatggtttcaaa

SEQ ID NO: 4582 - DNA, 358 bp, Glycine max
agcttgcttctacaatctccccctttctgatgataacagccctgttatcaagaagcacatacacacagcttgtgctagacgatcactcacttaactttgcatattctccccctttgtttttgagtttatgcttgacttgaaaataaggtaaatacttatgtgagctcttgacgtaatccctatctctatccccctttggcataaaaaaaagcagacaaagggtgtaacagatattacacatatataaattactaattattcacaagacgttcattgagaaatctaaaccaatcatgaagctagaaacatgaataaatcagatatattaaaactacataggcgtataacataatgcata

SEQ ID NO: 4583 - DNA, 414 bp, Glycine max
  unsure at all n locations
nttggacncccctagctattttgagaccttgaatactcagcttgtncattgtagaccttgccctggataatagccaaaaaatgttataatatgacccttttccgaagtactggcttttaacctttggagggtattaataagggtagaagttgggggttctaatttatggggtgagcttaatgagtcttaagcccacttttgcttttggactgatttaatacaatcatgagaaccatggatgtatccgtcttcaaaaaacacataaaacagaaatttgaccattaatcattacccaccaaaaactgatagtagaatcattcnattaatttgaaaagtggcgatattgcagtctgcaaaacaatagcatgacttacagacaaagttgacagatgatggttgacagacagcatagtt

SEQ ID NO: 4584 - DNA, 206 bp, Glycine max
  unsure at all n locations
agctntgatgatgtggtcttcaccgatgaaaggatcaaagtaggtctaaaaagaggcaaatctgatcatcatgctttgatacatgccaaaaaaaactagggcaaatgaagagggtgagaatgagggagaagcccatgctgtggctgccattcctatacagccatgtttcccaccaacccaacaatgtcattacttagccaataaca

SEQ ID NO: 4585 - DNA, 82 bp, Glycine max
cgggttcgggagacaaaggtcaagcgttctcgatatgcgaagatgatattccgagtactttggatttggtacgaccatgctc

SEQ ID NO: 4586 - DNA, 285 bp, Glycine max
agcttgtactccattgaatgccccattgtgcttttcgatctgcctcctacttccacaatcctgctcccctcctatcttcctccaaatcaaagtccatagagtgctttaacatggagaagcctatttcaagctacatttcacttccttcacttgaaacacgatctttgtcagatctataactacccctgttacaaccacaatggtttaccactagaatggtatcctccacaattcttactaaatgaatcgtgacattgatcattacccttaacgatgaaaatatca

SEQ ID NO: 4587 - DNA, 381 bp, Glycine max
  unsure at all n locations
tataatcgactcttctctttcactttctaattgcgaataaaaatgtaaaataaattctctcataattttcactcttcatatccacaggtttccaaacaagataatgttaaatgcattcataatcttcaattctttgaacacatttctgaatatttttgttctaacaaagactcttaagtctgaagaaaaaaaaataagaatgacaaaaaaaaagactctattttccttctttagacgtcatcaaacgaaatcaatttttctttttttatcctggaagagccgaatcanattgtanaatattacataatgacccanaggtcanaatcaggttntgctgggaacatannttacgaatctactacaataaagactatctaacgc

SEQ ID NO: 4588 - DNA, 307 bp, Glycine max
agcttgaggagggtaaatgagaaaaaatacatttataattggtgcctgcttttagtagataatgctaccaaggcttgtggttaaactaatataatttttgtgtgctttttcttttctttaagcttctcgtgtgtagttactgcatatttattttaatttatgaaaaatcttcatgttaaaacaagactaacttagttcatgcaagaaaagatttttcatagagtattcagctccagaagcagagcctacgttttttataatattaattaaagaaaaaaaaattgaacttttgaaaaagcagttctta

SEQ ID NO: 4589 - DNA, 387 bp, Glycine max
  unsure at all n locations
taagccaccagctcgcttngcgtgctgagcatgccgtggtgagctgggtggcaagctcctcctccatttttcctataaaatggcattggaggctgaggggaaggggtccaacacctttggcaattagatttcacttaaaattagtgaggagaagaagaaagaaggagaaaatcaaggtcgaggcactttcataatgcttccatgacgttttcgtgatcaattccgtgaacatttttcggtcttcttcgttcattattcggccgtcggcgatcttcaaccgattagttttcgatttcggagctttgaattcattcttgcttttgattgtntcattttcatctcgtctacttttagtattctttttcttcgttttaagtgagtttcaat

SEQ ID NO: 4590 - DNA, 304 bp, Glycine max
agcttcctcggtgccattcctgcaaaggcaaacatttggaaagttagttctaccagtgggacattactcttaaagcaaaaatggcatataacctccttccataaatacaaacatcaatgtaaatttagagcaagcttatgcgcatatttccttacaaacgttctcttgcacaagacattctattaaccgaaaaaaatgcacccatatacaatcaaggcagcttcgttacctagattatttacacgtacttccaaggtgtatttgttacttacatcacacacatcttcttggctaaattcacata

SEQ ID NO: 4591 - DNA, 246 bp, Glycine max
  unsure at all n locations
attcagaagattagagtttatctcttttatcttagcgagagtgattctcctaaattcttgagtgattcaagaacaccttggctgtatcaaaggactttcacaacctttgtgtgttgccctcgctggaaagagngattctttccttcctttcatcatcacccttgttctttcataccaccattccagaaaatccacctctgcccagaattatctcgtgggcataactccaatntaagcactcaaata

SEQ ID NO: 4592 - DNA, 302 bp, Glycine max
agcttaagcctttcatttcatcaaatagtgataacgctttcttcacctcaccaatcttgtgaagagaatccataaaaatattatatatttcaacactaacatgacccttttctttcaattggccaaatgtctctaatgccattatcggtcccttcttctccaccaaaacagagaagaatttggagagatcagcaataacaggaaaacccaacttctgcatctgctcaagcaacttgcaaaattcttccattctattcgcttcagcatatgcaaccaacaacggtttcacccgtaagaagtct

SEQ ID NO: 4593 - DNA, 340 bp, Glycine max
tggagggaggtccctcactcgtatctgtcaggtgatagtggcacccataagaaagtattcatgtgaagcacctgatgacaagtctcttttatatgaaattacatatacaatccactatcttatcaaaatatggcaatcctgtagtcattaattctccaatccttcagttaggttataatatctgaaatgctagctatgaccagattcttcaactcaggggaatatgataatgtggaattcattttaagaatgcttcgtgcattcggcactggcatcacataattggaatgccgttgatgatgcccgacagtagcataaataaactaacgctagcagaatt

SEQ ID NO: 4594 - DNA, 344 bp, Glycine max
agctttatgaagttttctggttttctaaaccttgaaaacttgtgctattcatcctcttcattctcttctccctttgccaaaaagaattcgccaaggattaaccgcctgaattctttttgtgtctctcttctcccttttccaaaagaacaaaagactaaccgcctgaattcttttgtgtctcccttctcccttgtccaagaattcaaaacgacacagtctgagaattcttttgattcttcccattcccttatacaaaagtgttcaaaggactaacccgctgagaattttttgtatcccagtcacaaagataaaggtttaacagccgagattttgtttaacacatg

SEQ ID NO: 4595 - DNA, 303 bp, Glycine max
tcttcctcgatagccctctccttgcacctccacccctctgacgcacttcgggtgcacctcctgaactcttcttcgtcacctggttcgtccattatcaaacaccaaaatcaaaaatgtcaacggcaaattgttgaaagttgaaactctctctaactctgaatcataaacacggaaatcgggatgatggtgctaaggaacacagccatggactgaagaacaagacagaaacaaattaattaaggtgatggtagtagcattagaagagtgtgggatgaaaggggaaaacgcagtgtgtcagtggag

SEQ ID NO: 4596 - DNA, 295 bp, Glycine max
agcttttacaaaaaggttcatcaagtcaagttgaaatatggaagtaaccatcctgcaaaattggggcaaaagatgaatcgagtcacatcactgcttcgtctactgccaaacatatttaggattattgatgtccttggtacttccagtttcaccttgacaaagatgtcatggaccatgttgaaaatctaaattgattcaaccccatatcctgcgtaaaaattcgcaatacttcgactgtacatcattcgcatgcatccatgcttttcattggttgcattgctcattgcattctttc

SEQ ID NO: 4597 - DNA, 298 bp, Glycine max
  unsure at all n locations
tgtgcttgtttttttaaattcctaggatcatgagcaacctggtgtgtcctgctatgacttgagaaacaaaagggatcaaataacaggccgaaattaaaaagtactanggttgcctcctagtagtgctttctttacgtcttgagctggacgcgtgatggcatgtccgtcacggacctagtactttgcttacctttggctttggacttggtcgcctattggtcggncatgggtcgtaagcaatgctctaacctttntttggatgatctgaggtgaactctaaaggtgatggcggtgcgtc

SEQ ID NO: 4598 - DNA, 315 bp, Glycine max
  unsure at all n locations
agcttctaaagtctaacctaataaaagcatacctgccagcatcttcaggttcatctaactcaaaagcatcaaactcaaatctttctgggttagtaacaggcatacacaacgtttccacacatactaagccttccttgttgatgaaaaatttgttgattttgacgagaacctcaatacaatcttcaagcacatattcaacctttttatagaatgttctgatagtgccaaaaagaagttagccaagcactctgtaggatacagcatcaatttcttgcaaaatcttgtctgcngaaggtaaaaatgaaatgaaaataa

SEQ ID NO: 4599 - DNA, 360 bp, Glycine max
agcttagctaagccaaagtcagagatcttggcattcagatccttgtcaagtaagacattggttgccttaatgtccctgtgtactattttcaaccttgactcctcatgaagataagccaatccccttgctatccccacacagatcttcattcttgtgggccaatacaagtgcagcttctgttcatgttcacctacgggaaatgcggggggaaaggaaataagctttttctgttatatattgattttgaagcagaaacatacacacacaaacacaaggtatatgttgcccgtaaagcatttaccgaaaagtgcacgagcaagactggtggtctccatgtattcatatataagtagcaactgg

SEQ ID NO: 4600 - DNA, 342 bp, Glycine max
  unsure at all n locations
gtattgctggtataatttgcctgttccattattctcttaatgnctttagaggttacttcctcattgacatcttttgtcttgaatggaattgccatgacaggcttattgttactgtctttgatgttcggcagttgatattgtgttgcgggaggtaattccgattggattaactcaccatccttcacttgccaatttgttatgacaatttgtgttggatcacctatgatgtcttgtttccaaaggtaatctatatccattctgatggcataagcatgaaaccaatcaaaaaaaaggacattaattttgactctttcgacgaattcgtagaacttgtcttggatt

SEQ ID NO: 4601 - DNA, 304 bp, Glycine max
agcttgcccagagaaggagtccacagaggaaatgcttaccaccttataagactggaaagcggtttctaatgactcctctgcggcctccacataaggcatagaggatgggcagctcaccaagatgtcttcctcgcctgacacgatgaccaaatgcccctccactacgaatttcaacttttggtggagtgtagagggcacaactcccattgagtggatccacggacgccccaacagacagctgtagggggggttaatatccattatttggaaggtgacttgacaggtgtgagggcctatttgtact

SEQ ID NO: 4602 - DNA, 407 bp, Glycine max
  unsure at all n locations
tttggtacaaagaagaagaagaagttcaaagagattcattgcttgtaaaggattgtaagagatttttcaaaatgcaaaacaaagccttgcttttatagactcttcatgtctggtcaagaagaccattcagaagagttatgacttttagaaaaacttaaaacccatttgaaaaagtcaaaacctttttgaagagttacatctttagatttttcagagacaaacactggtaatcgattaccaaataagtgtaatcgattacaccaaagctttgagtgaaaggatgtgactcttcacnattaaatttgaatttcaacgttcaaggcactggnntatcgataccanaacattgtaatcgattacagccttttgaaatatttggaacgttgtaaatccagtttgaaatcttt

SEQ ID NO: 4603 - DNA, 377 bp, Glycine max
agcttgctggttagtttgggagcacatatgtagtttgtttatgtgtaatttgcagtcttacttgttgttgatttacccatggtttgattgctataaattgaagagaaaatttcactatttagtgtggattctacactttttttttttactttaatccaaatatttcttcttgattttatttcattttcttctcttcttctcaatcaaaacataactgacattcatatctaattgactcaactagtataggctagtttgacttttttttccttcttggataaaagaaatcaaattcatatataatagaatttaaatatcattacaagatcaattattaagtttctaactaagaaatggtattattgattctatcattt

SEQ ID NO: 4604 - DNA, 281 bp, Glycine max
  unsure at all n locations
atttgattttttatcataaattatgtttataaaatatataatatttctcttgagtaaagatataatatattattttcttatcgntgataaaaaaaaattattttcttaatctcactggatatattttcccgaactggctctatcaactctttaaaaaagtgacactgttaaagtctcaccttaagttgaataagaaatttaatgtgacactcaatcacttggacattgattcttgattcttaaatggagaatgaacaccatgtttgctataaattctattt

SEQ ID NO: 4605 - DNA, 317 bp, Glycine max
  unsure at all n locations
agctagcccaggaactaattatatctatgcctttaagcaggccatttttatatcaaccttatctgcggaatcacttcttactaatgaagaggctagcatagctgctgccgcatccgaaactcttgctcttgctaaagcagctgtgcaggttgcaaaggatgcagttatactaagtaaaaggaagcctccagcagatgcagangttaaatcccatgtttcttccaaatctgatgatttacttctcaaatggtttcatcaaatggaagcggaagatggtgtacacaaaagtcatgggtgctggagcaaaataatggaag

SEQ ID NO: 4606 - DNA, 222 bp, Glycine max
agcttgaccaggaattatttgtatgggttggatgttgaattccggttgttcctggtgcggagatgatggtacagcgggtgaaccaaaagcggaagtttcttttggtgaggtagccatggaaaagcagagcgtttggaatgatttcgtaaatctcagaaggctattgggaaatgctggtaaaaacacgaatgccaagcagatataaatttgaatgaaaaatgt

SEQ ID NO: 4607 - DNA, 195 bp, Glycine max
agcttgctatgcaaatgacatctgcccttttctttttaagatttagctgcgacgacgaagccatgagttgaatagaccaccatactgtcttacctttccccattgtctagcacatactttcagcccatatgcaaataacactcgattattccatccagattaaaggatagtttgctacgatttgcataatttgag

SEQ ID NO: 4608 - DNA, 358 bp, Glycine max
agcttgtccaagaggttcttcacctcagtataacctgcatcaaccaatttcagatcatgtagtaaacacatcgatctgctatatcattaaatcgagagtaaaccatcaacttcatccctaaactaatactctctctgttaaatagtccctaaagtaaaacaaactatgaaagtgtttgaaatcatattaagtagtcaccaaactactaaaaaatccttcagttggtccgtaaacttcactaaaatacgttaacagagggactaaactaaagtgatggatattcaattctttaaagattacttaaacaacttcattactttaaggatcatttgagagatcaacagtttaacgacaaaat

SEQ ID NO: 4609 - DNA, 386 bp, Glycine max
  unsure at all n locations
agaatactaagctttctccctttcttttagaaatccaggcttcgaactgtttcttacactcataacaaatggcaattttattcccttttccgtttgggtgtaccaaagcttttaagaataaggtgggggcaccaagtcttttttgaatcatttggtaaattggctgaattcattttaaaaattttatggaaagacagatatttgtttgataacattttttaccctgngtgcttgactgatagcttatgcatatagctgaatatatattattacatctgaactccagatgccatacacaacaatttagagtaagcaaccatcatttaacaacaatttagagtaaggaaccatctttaagttttaatatcaacaacgaaatttattct

SEQ ID NO: 4610 - DNA, 296 bp, Glycine max
  unsure at all n locations
agcttctatgatccgtcaaaatttcaatgtggtgccccaataggtattgcctccacttcttaacagcagtggtaatggcagctagttcacgaacataggtgaaggagctgagtaacttatggcaaaactgtttgctaaagaaagctattaagtgtcttcctttgtgacaacactgtgcccattcctgagtcggaggcgcctgtttccaccacgaagggtttggtgaaatcaggaagtgctaatactggngaattattcacgacattcttcaagttttggaaggcaactgtagcttc

SEQ ID NO: 4611 - DNA, 290 bp, Glycine max
  unsure at all n locations
atttccaaatatgcatgtgaattangaagcatcaacaagaatcaagccaaggctattgtgcaagcaatcaatggggcaaaacacaccanaagattatgatgatggatggctcaaattctcaaaaaggtaaacttatcactttcaaattgagctttcaaaactatcatgacatgtagaggaaaaacaaggatttcaaatcacaaaatgtcaagagacttttaatttcagaacaattttctcatttcttgaacatatcctgtaatttcaaagaaaatatgcaaaagtgtaca

SEQ ID NO: 4612 - DNA, 382 bp, Glycine max
  unsure at all n locations
tccatcaacatgtagaggagaatcaaggatttcaagtttcaaaatgtcaagaactttttttttcaaaacattaaccctttcttgaacatatcttttatttaaagaaaaacatgccaagtcgtacatgcacacggaattgacccaaaatattaaactgaaaatccgacgaaactaacaacatttgcaaattaacacanctaacanattaacaaaaccaacaaaactagcaaaaccaaagaacactccacccatacttaaacaacacattgtcctcaatgtagcacaattaanagattaaaaacaattaaatcatcaaatagaatccgacaagtgtaataaaagcaaagaaggagataggaanagaanaaactcctaagtcatg

SEQ ID NO: 4613 - DNA, 127 bp, Glycine max
agctttacagcagtatttagtaatgacttcttaacctagaattaaaataacttaatgccattaacctagggaaataaaacaaactaaatgactgagtgtaactgaaattgttggcaaccaaaagtca

SEQ ID NO: 4614 - DNA, 279 bp, Glycine max
  unsure at all n locations
agcttcagagtgatgctntgcgtgaagccatttcangaatcatggcttattcccaggagaagaatcgcaaatttgtggagaccatcgaactccaaatcgggttgaaaaactacgatccacagaaagacaagcgtttcaagggctctgtcaagctgccccacattcctcgccccaagatgaaaatttgcatgcttggtgatgctcancatgttgaagaggtctctatttgccatattcatcaagactcttaatggatcataactatttcatgataattag

SEQ ID NO: 4615 - DNA, 328 bp, Glycine max
tccggtcttgcgttcacttcattggtctgtaacattgtctcaaaatcagtttcttgttggtagggaaaaagttctggccatccaaggcctagaaactgaatgatcaattagggttgtcaactttttaatttacctttctttggccaggatgaactaattttatatataccaataaactatgagagtttaaatcatttattttaactctatacatttataaactaaaaaatgtacatcaagtttaagggaaggatgcccgataaaaaataaaaaaaaaggttaagtatgaaaatatgacagggaaaccggttatgggaattctcacaat

SEQ ID NO: 4616 - DNA, 333 bp, Glycine max
agcttgccacccagctcgcccaggtgagctaggttgcttcctctataagcaaccgccttctagaggaatattctggaaggcccaagtgggcctggttgctatttgaacccccatttttactaaatacacctcttgctcttttttggtgattcttttaccgtaacgttatgaaattttacaaatttcgtaacgatgcttgttttctttccgtaatgttacgaaaccttacggattacgtaatcatccctttttttccttccggaacgttacgaaactttacggattgcgcactaacacttccttttcaatttccggcatgtcacggaacttcac

SEQ ID NO: 4617 - DNA, 397 bp, Glycine max
  unsure at all n locations
tgtggaatagggttgcttagcctgctgctgaagttggcataaatttgtattttacagagcagtaccacacactggatttcctataagactgaaaagcatgagggacacatcaaaaaatcaggcattataaatgaaacagcatacagagaatcagattgaagtctagaatttttctcacatcaatatatttttgtattgtgaacggagtgtcactgaggaaatctcattgtcttgcaaatctacaagctgcaatttgggacaaatgttgtcacccatgtccaatgtattgntcaatgcatttgttcgtagtttcctgtgaaaatatgaaaattatgatgactatcattctattgttggataactacctatgatcaacataaaagttagggacttacac

SEQ ID NO: 4618 - DNA, 329 bp, Glycine max
agcttttgtctaatatctcttccgaaacctcacttagacttaattattatatagatcactaaacaccgcgaaatcctcactaatttggggttgacgcctagctcacatattaattctctggttgaacgtatagcccaactccaccatgataaaggattagcaaataaaaattgaattcaaaaattgtaaatggagattttagattcttagtcgattgctaagataacttatatgtgtgtatcagtgatataagaaataaagcgaaacgaaaatatagactctatagagattttgatttaataacaaagcaaccgatcgactaattactc

SEQ ID NO: 4619 - DNA, 173 bp, Glycine max
agcttttatcttgcgaaaaatcataaattttctaaaaaagtgggactttcttagaaggctgaggttcacaaaaaaatttaagcttttgtattgcgagaaataatgaaccaaacataatgtcgtccgagaatcacttaaaacaaacttgtttgacataaaaatcgaagcttttt

SEQ ID NO: 4620 - DNA, 188 bp, Glycine max
  unsure at all n locations
gtttttaaaaatggaattgttttgcaaaaaaaaattataggccaatgttaatttgtagttttttttggtagccaccaggattgaatcgccaagcgggacctttcccttcttccctttcttcttaaacacnccaccaaccttatatctcctggnnttgtaggttggtaggttttttaaaaaaatggaat

SEQ ID NO: 4621 - DNA, 347 bp, Glycine max
  unsure at all n locations
agcttcacttgcaatttcaatatactaaataaacaattacctgcatcagaactataactagaaggtacctcctgctgatgaactgatggatttgtcggcaagttcccttgttcaaatgaaacagtcaaatctcctatgtcggtcccatctctagcactgtaagaatgcccatcttgagtatatgatgtctccaaactgacagatgcaggctcctgggaatgtcctgaaatccgctgcacagatgcatccaagtaagaaaattgttgatagcttgctgatggatgggattggttntgaacatcaatataatgtgagtcaacagattgctgatactgatcatgataatg

SEQ ID NO: 4622 - DNA, 340 bp, Glycine max
  unsure at all n locations
gctgaaacatgccccacaagtgtcccttttgccctctctttgaatattttgcacatttccttccgaaatgtcacataaccttacggattgcacagtaattagtgttaagcagctcaattcggctggcgagattccaaatgttggcagacgatcattcacggacaaaattagggtatgagaataccctacccatattgcagcgatggtcatccctagacattagtcactcatagcacacaaagctaatagaaaactacgaaatggtctacaccacaaaattgatgtaacaaatgtactgcataacattcttcttttangttagaaatagaaagcaatgcct

SEQ ID NO: 4623 - DNA, 208 bp, Glycine max
agcttacatgtctaagaagataactgtattgttctgaatctgaaaattccttggttttcttcccagctacaatctcctgtactatcacaccatgactacagacatatgatttcattgagactagcttactatgaatcatatcacatagagactagcttactatgttccagccacccctattgtatttgccttcacttgatctcccaaa

SEQ ID NO: 4624 - DNA, 374 bp, Glycine max
tcatgcaacgaacttcaataaatttgggaatatttcatatgtgagattatagaggactcagaagcatgccttcatgtaatttggtactggtccaatgcttgaaatatcttcatcttgcattataaaaaaaaactagtaatcattgtttttaattctttttatctttccatataaaaaaatattttatctaagaaaactcttaactaataattagtgattggccctgcaaacagcttttgtgataagacattaatggtcacctgaattagaagagatacactctgctcaatattcttggacctgtggcagcaggttcaacactgctcaatattcttggagaggtctattttgatagcatcttcatacccttatac

SEQ ID NO: 4625 - DNA, 326 bp, Glycine max
  unsure at all n locations
agctntataatttatatgaagttagacactttctcatgtatagtaatcgtattnttatcattaattcaaaatatttcatttttggaatatgaaaaactaatattcacttacatttaagaaatatcatataaatatgctgatagaaaaattagcaaactccttcataaatatttttctatctttataactctactataattgatagatttaatatcacatggctaacatcggtatttcaaaaaatcaatgttaacacgagcacggtggcattttcgtaaataaactgagttaattcacatcgattgtgaaaaaatcaatgttaacta

SEQ ID NO: 4626 - DNA, 386 bp, Glycine max
  unsure at all n locations
tcaaacttgcaacaaaggagttgagcaggtaaaaaagattcgtcttcaaactcttagaggtgactntgagcgtttgtttatggaggaatccgagtcaatttctgaatatttttctcgagtattggccgtagtcaatcaacttaaaaaaaatggtgaaaatgttgatgaggtgaaggtcatggaaaaatacttcgaactttaaatccaagttttgacttcattgtaccaacattgaaaaaacaaggattaaagaccatgactattgagcaactcatgggttccttacaagcatacgaagagnaataaaagagaaaaattaaacaaaatgaggctactgagcaactactacaactcaacgtaagggagcaaactatgcaaattacaag

SEQ ID NO: 4627 - DNA, 209 bp, Glycine max
agcttgaatctctatcaacttcttcttcttcttctttgaaccaaaagttttctgaagttctctggttttccaaaccttgaaaacttgtgccattcatcttttcattctcttctccctttgccaaaaagaattcgccaaggactaaccgcctgaattcttgttgggggtctcttctccttttttcaaaagaacaaaggactaaccgcctg

SEQ ID NO: 4628 - DNA, 276 bp, Glycine max
  unsure at all n locations
tcttctgtaatgtgtttcacttcatgttcggcctcaatcagaaaaagataacgttcgaggttcacataaatacaataaaatacgtcaccaacgcctatatatagccagccaaaccaacaaatatntttgaggcaaggagaaccgtgtaatatccaatttcatataccatttatttcatccaccctttgttgaaataaataaactaataattcgtataacacattttttaacatgatagttgaataatattgtgttaaaaaataatatttgataaat

SEQ ID NO: 4629 - DNA, 291 bp, Glycine max
agcttgtagggaaacccgctgagttctttgttagcaccgatactctaggaggaggccaagaaactactgtgtaagattttctttttttccttgttagtgttcttgatttgtgaatctcacttaaattttgagcttaatatgtggcatgcattgtgaatcacatttttaatctttatcagctaagttgagttgtttatgtattgtgtaaggcctttcaaggagaaacgaagcaatgagcttaaattctaatagctcaaaatcacatataattttcacatttgtcattgagtc

SEQ ID NO: 4630 - DNA, 266 bp, Glycine max
  unsure at all n locations
tgtggtggtcattctctacgccattttcatcgctgccgcatgtaaaatgacggtcaaggctcttaagacagcaatgtaaagatgtanggtatgataatagcaaggcaaattgaaatagaatatgtatattggtatttcattgatcctttgcatgatatatataatacatgtacaagaatgttctataccaaattctaaggcatgacagacgtgatccataatcagtggcatctgatttattctatgcatttataggtaaataaata

SEQ ID NO: 4631 - DNA, 350 bp, Glycine max
  unsure at all n locations
agcttctcgatggccaaggtcactaagtgtgattatggcggaaacccacaacacaacagcctcggaaccaccaacgccggtggtggagaatgacgnccgtcgttctgcctcccgcaagaacggcgataggctcatcaccaaatcgcgaagcgtcatgcgttcgtagatatgcggaaaaggaaagatatagaggagaatgtagagcgatttgaaagaaaaaaaataatactttttcgtattggaaatgaagggtccaatttcatcanagaaaaattccatgattaanaggagtaagganactggcccacgaacctttatttgcactgaatgtgattttggatccctgaatg

SEQ ID NO: 4632 - DNA, 198 bp, Glycine max
tatcaaactttggtctaacctatttaacttctatatttttacggccttcttctagctagctcaaatacccaatggcaattgttttaattagctacatcttatgatgatacaatgcagcttatcatctttactatttatttatgaaccacaatactatcctagacaaaaataatcctcaccgactcttgtaaattatta

SEQ ID NO: 4633 - DNA, 314 bp, Glycine max
  unsure at all n locations
agcttgcatgcattntagtcctataaaatgattatgttttgattntagntcttacaaaanaattctttttttttattcttttaaacnttaaaattattgattttaattctatagaatcaacataatttgttttgggttccataaaatatttttggttgcgtttatgggctcaaaatttaaaattactaattttnttcccctaatctaaagtttttttttttatcanaacctaaacctttaattgtaaggtagataaataacattttaagaatctagattttttttacggtattacataatggcattataccata

SEQ ID NO: 4634 - DNA, 364 bp, Glycine max
  unsure at all n locations
tacctgaaatattagtgggcccgttttcttgcttccgtgagaaaattaatagcggaaaagtgaacgaaaggattacaataataagatgaccacccttatgtttgcttggataattctaaccgcaaatccgcgttaataaaggaaacaaatagcttcaaaaaaaaaaaaaagaaattagagcttttgataaaaatgcataggaagtgtgcttttgcacaattaaaaatatctaatgcaattaatacgagtgatgatattacaccacatagaggagcacttttgtctttctctgnttttacaccacatgtnagtccaatatgaatatatgattagaagcgtgtatatgggtttctatttggggatc

SEQ ID NO: 4635 - DNA, 210 bp, Glycine max
agcttgttctgtgtgttaaaaaactgttatttgataaagtattggcccatttcctgtgaactagagagcacaaccgcgcgcccgaacattggtgcttggatcacacgggagatgtccatactttactgtaaagtgtttttttactgcctacaaagttatttaaaatgatttaacaacttatgatagtatgtacctacttcttataaagta

SEQ ID NO: 4636 - DNA, 330 bp, Glycine max
  unsure at all n locations
actcagctgttctgcggaaatttttaggtactttcaagtatgaaaggagtttccgacatttatatactttcacttcaatccacattaatggaccagaataaaactttttactgaaagaaaaaaaaaacttttacaccacacacactcatgaanttatttctcataaatatttataatgacacaggttaattaattatgaggactggtaagttcactctaaaatgaaacccattgaagtagaaaaggagaagatactcaaagaaaagagatatatggtgatgtatgaaaaagacaccgattttagaaaatgaaaatgaaatcagatgagtg

SEQ ID NO: 4637 - DNA, 310 bp, Glycine max
  unsure at all n locations
acaaacattttgggatgttaggtttacaagataatgcttatcataacacaaaaatgacatgctaatcccttctatttagaatgaactcatgcccacttttaatataaaatatttatgcccatgcgtatgtgtagaatattccactatttatgtcaacgtaccaagacattcaacacattctaaatgccatacatatatatgcattntgaaaagaacacacattctcatgctcaaggcattgcgtcaaattcacacctaatcacattctaaacacttgctatcacgaactacctacacatatttgaaacat

SEQ ID NO: 4638 - DNA, 335 bp, Glycine max
  unsure at all n locations
agcttatatatagcaaacaatgtactcttatggaaggaagcaatattataaaaaagttcctcttcttaatctccccttttttggaggcctcctaatccctcaattctaggatcataattgttacctgctgcgcttgttgctgaactttgagggtcagcacctcccgaacacaaagaggaagaaagagaagataagttggtttcgaggttacagtgccttcagaggaagaagacagccgaaagaagagtaattcgctaatttcattcatgattgattcttgtattacataggcatatatatactgnattctaattttggcattctgtgatttctaa

SEQ ID NO: 4639 - DNA, 459 bp, Glycine max
  unsure at all n locations
nttgatacccttgcatnatggacccttagaatactcaagcttgtgtttagcaagtttgaggtatctaagttgctgagtgatgacaatgtgatatgtaaatggagcatcanggaaaggtctacaagggtgggtgcctcaagccaatggtgaaggtgggtggcaagtaaaagaaaattgtgttggagcaccctatgaattgtagaatgggaaatggttggtgctaggaaaagatgaattntgatgctgaagttgagacccaaggggaagatcatgcacaagaaatattatgaaggtgtgttgtgggtgtttgttgcaacaagtgaggatcacgaggctctttggtttatgaatatatgccaaatgggagtttgcttatttgttaaaggtacaacaaaagtcttttgatttccccctacgtaaaaaatgctgtgatgctgctgagggctttctattttctct

SEQ ID NO: 4640 - DNA, 239 bp, Glycine max
cagctatgcggatttgtgcctcgctggcgaaatagatcgaagtgggttttaaaagaagcttttctgatcatcgtgctctgataaacgcaaagattggcgcatatgaagagggtgagaatgatggagaaacccatgctacgactgccattcctatacgggtgagattcccaccaacccaacaatgtctttacttaatcaataacaacccttgttcttacctaccacccaattattcacaa

SEQ ID NO: 4641 - DNA, 274 bp, Glycine max
  unsure at all n locations
tactcaagcttctttcgaattcaaactgccataactttctgctcggatgtttgattgcagaccataatatttcaagatgctcaaaattggagatggaagtcccagataaattcaaactgccacaacttttgactaggatgtctgactgcggcccatcatataacgagaccctcngaaatgattatggaagctccgagcanattcaaattgtcataacttttgaatcggatgtctgactacagaccatactatatcgagaaactcgaaatgaaca

SEQ ID NO: 4642 - DNA, 300 bp, Glycine max
gccgccagcatgaatggcggattgtacgtaaatatcacattctctccgttatttcttttgaaacagaccccatcccgtaaattgtgtttaaaaggaaccctctttcgtaaattagccttcatagatgtctttctgaatttcacaatattttaatgcatttgaagctatataaattatgaaatgaaaataaaaaatgaatagcccatttaattatttcagtggatataacattttagaaataaataaggattaatagtgatctttatctctaatactgacaaattcgtccgcaaaagatga

SEQ ID NO: 4643 - DNA, 371 bp, Glycine max
  unsure at all n locations
cgggatccttaagcacctgagctgcagcttatgcttattatgtatggcaaaacttcattattggtggtcaagacatacaagtgagcttgtaaaaaatcttctacacttgaagtgatcacatgcaatcctcttgaacccttaccacccactctgtcatcatgccgagacttangaaggccaacaggtttagccttctcaatttattctgaacaaaattcaatggcttctttagcaatgtacctctcaacaatagatgcttctggatgataaagattctttgtataccctttcaagatcatcatgtatcgctcaaccgggtacatccaccatatgataacaggaccacaacatttgatttctctgactagatg

SEQ ID NO: 4644 - DNA, 374 bp, Glycine max
  unsure at all n locations
ctgacttgagacattttatgaccatanatgtttgtgcattgcgaggcatcaacaagaatcaagccatggctattgtgcacgctgtcaatgcggcataccacacctttcgactctttctacggagaggtcaaattttcttacttgcatctttctaaaagatttgttcaaaccttctcttcaaaaaaaagtcttgntcaaaacctgtggaaccaaatttcaatacctgctcctttgcaaaaaacaaagactaccccctgattcttttgggcacctttccctacaaagagcaaaggctaccgcctaaattcttgggtcttccttccttaacaaagaattcaaggactaccgcctgaattttttgtctttacacaacn

SEQ ID NO: 4645 - DNA, 311 bp, Glycine max
  unsure at all n locations
agcttgagggatgagagttcagctattcttattcttcttccttgcagggtctttgcgttcttgatcccttgagtcaccaagtttaggtaaatgagattcattcttcatcctaaacttgatttgccttcattctcttgctctagtttctccaataacttgtaactgccattntgtattacccatgaaggataactttgaaaaacctaaatattcttcattcttccttctaaatttcgtggagtctacaagaggtaaggggagtctctccaactcttgaaccatgtgctttgtgctgaacttacttgaacatg

SEQ ID NO: 4646 - DNA, 348 bp, Glycine max
  unsure at all n locations
ggactagtcttaagcatagatgaatttatgcttaagcatgactaagcttaagcatatgtggatctagcttagcatagttgctgtcaatttccttggtgcatttaaacttgattcatgaaccaaatgagctaaagttgcattaaaaattgagctcattatataaatgagttgaacttcagctgcatataattcgacctcgttagattcatgaatagactngacttatatatatatatatatatatatatatatatatatatacatccaatttcgcgttggttttgactttgatgacatgtcgaagtggaagattacttcacacaaggttagtgactttttgtgttgtgg

SEQ ID NO: 4647 - DNA, 185 bp, Glycine max
  unsure at all n locations
aagatgctggctatctcgtcaccaatgaatcaccttgctcgcggtgtcaccctccatgcttacagatcccgctatacgccgccattntagttagattgctggagatcaaagtcacagcgggtcataatcactcgctcgtctcagacattgcggttatagaagaacgagtgattgatcacagagag

SEQ ID NO: 4648 - DNA, 378 bp, Glycine max
  unsure at all n locations
tctccccctttctcaagcaaattcttaattcttcttgacatcatcaaaatcttcatgatttacatatatatatatatatatatatatatatatatatatatatatatatatatatatatattgggaggcatgactaactcttgagtttgtgctttgtttatttaaattcctaagatcatgagcaactacgtgtgttctactatgacttgaaaaacatcatgatgtaaactccattttagctctgatgcctaagatcttcctcattaatggataactttgctccttggaacatgaatggcagccgaatgtgaaaaagacatcaaaaagaaactcctctttctcgggaagatgagtcttacataatctcccccccatacn

SEQ ID NO: 4649 - DNA, 267 bp, Glycine max
agcttgcttgagaagtttctatggaggtcgaatctttgagcttcaataaggtccttcaatggtgatttttagccatggagttggggcggaagataaaggagaataggtgaaaggaggcaccatccattatagaatgccatggaaggagaagcttcaccaccaagagagtgccttggataaaaaacttataaaggaagtttcaatggaggaagagaatgggagaaagagagaaagagtggcgttgaaattgaaggagaatatggagag

SEQ ID NO: 4650 - DNA, 355 bp, Glycine max
  unsure at all n locations
ntgacacgtgctttactggctgtgacntcgggacctatgatactagctcaacccaacaccaaattagttccaaccttcattatggattcagtttgagagtgaatgggaatggataattggagcaactctacctacacagttatacataattaactgttaactggttaccctanattcactgatcaaattgactctcaacccaatttacctagaatggtcttgtcagttgccatttgtatttcttagccagccaacttctatagtctaatgacttcactagataatcacttactcaatccctaatcgattggctccactttaaatactcttttcctatacacataattactttacg

SEQ ID NO: 4651 - DNA, 72 bp, Glycine max
agcttgtgaaagagaagggcatttcacatctatggattgagactgattctacttcagcagtggattaatatt

SEQ ID NO: 4652 - DNA, 149 bp, Glycine max
  unsure at all n locations
nttataactaaatttagtgatcttacaaagatcaagaataatcattntaaatttcagatggataaaaataaaagaataatttaaaggcaaaaatcaaaattacctcatttaacanaaactaaaacccatattaattatattaattaata

SEQ ID NO: 4653 - DNA, 377 bp, Glycine max
  unsure at all n locations
agcttgggggagccttgatgctctcatatggaggcttanggctgcttatgaggaaaatggtgggtccccagagactaacccttttgcaaggggcttcatcaaggtgtatctcaaagaggttagggagtgccaagccaaggcaaagaggtatcccttacaagaagaaaaagaaggcctcaaatcanagcaagggaaatgatgaatcatcctccaccatgcacttctcttgaacaacatcttcagtatcgatccctttggacctttcaagtcatggtaattaattaattaactaatcttgcttgccatcacactcatgatcataaactatgcttaactaggatgattaactcaatgcggtgctaggatctagttttttt

SEQ ID NO: 4654 - DNA, 381 bp, Glycine max
  unsure at all n locations
ttaaggcacaaatagtgatttattgtgttatgtacagaggatgaagaacccattggaagagggtatggcatatataaagaaaatggtagccagttgcatcaaacacagcaaggtaatgatggagaaatatattggaaaggaaagaaatgcgagagaaaaaaaattgtaccaaccnttcaaacatgctgctccgatccatacgtgcnttttactttttaaagtttttgggagctactntggaagaaacctttgagataaaagatgagatgggtcaccgagaagttgacacttatcactaaatatatggattaactcacctaaaatattttaacttgagtttgaatcttanacatantaatatattaaatatttaaataaaaa

SEQ ID NO: 4655 - DNA, 256 bp, Glycine max
  unsure at all n locations
agcttcatcaaagctccaacctttgcacaccttttctgctccaaatcgcgaaaggaagccattttcggagtcgtgaagcgcacctctacgtgtgggacttcaaaatttcacgtttgggtagacttcttctcacataaattttcgtgggtattgggttntgggagttatgatgggtagttttactaagttcatgcctcatgatagttatttgtgaagaaatttgatgaaagcatgttaaacttgtcatgttttgtat

SEQ ID NO: 4656 - DNA, 273 bp, Glycine max
tgtcgaaattgccatgtttgggtgagttagacatacccattctgttttagggtttttgtgatgatgtttgtgatgtttatatgctgaaattgctaatggaaatctgttaaagacgaagggtagaactaacccaaggttagaaagtgagaatgtgatgttatgagtggaaaaagagtgagactttgagagttggaaggctaagtcggaattctgtggtaaatggaggttagagtgagtcaatactagcttgaaatgtcatttagaacatgtgag

SEQ ID NO: 4657 - DNA, 389 bp, Glycine max
  unsure at all n locations
agcttagccgctttgcanaagcctcgtgaatgtgtcccaattgatttactttgaanaacaaaagccttgttctagtttttcagatttgggtccatctctcaagttttctacaaattttacaactgcacatacgtactcttgtgctcataaaaagtataaaaatatttaacagttacaattcaggaacttcagaatatttgtaaaatggataccacataacaaatccttccttcaaaaacaaagttattatgataacaaatgcactattgcttcgatgtctatagtctgaaacgattttggaataatctatctaaattttatgattgacttcctccagcttattctctcaacaacctaatataccttctaaaagaaattacttgattttc

SEQ ID NO: 4658 - DNA, 364 bp, Glycine max
  unsure at all n locations
acactataaaactaagcttcnacacaatcatnctcatcccaattagttacagacttgtttatactgccacccaacatctttttcttccgctaaattgcatgtctcattatctttattgtcctcgtcactgttaacttatcggtgtaccatactattatatacataattataattatgcacgttatcgatgcgcctaaacattttaaaatgttttaatcaagagtaattttgtcatctacatacatgcgtactgtatcaaaaattatttttcaatgactattctaaaacaattgttatattttntaataacatggtcatgaaatgctgaatattattataagaataagcgtaaaaacaccaaaat

SEQ ID NO: 4659 - DNA, 325 bp, Glycine max
ctgcaagctttcatcggtgggatttcatgggatacgacggaggacaagctcaaggagcatttcggtaactacggcgacgctttgagcacttccatcatgcgggagaagaacactgggaagccaaggggcttcggtttcgtcgtttttgcagatcctaacattctagatagggttttggaagacaaacatgtcatagatggcagaaccggaacgcttctatcattttttttgtcatttctttacttcatgttccgattgaaaatattgtattgtactttttagcgtgattggtgctggttctgaattggggataatcttgaaaccc

SEQ ID NO: 4660 - DNA, 449 bp, Glycine max
  unsure at all n locations
cgtagaatggttggacatggtatatgttaggggttggccatctgttcggggataaaggagacatcccacattatttccatgatacacatgcaacaataatgattaggaaattttatgcaaaactggtcatgcatgcacctatgtggacactcaagcatcaaacttttatggtcaagtgatgctagggatcatgattcattttctctactttagtcaacccggtgtttccaaaatatgttcttttatcaatttgtgcattcatccgagtctattttgggtgttcgaaaaaactttcacagcatttacccttcaaatgtatacacatttnttttcaaaaactggttatgatcagtgaattctttcaaagaaaagctggaaattatctcttttcacaagcatgtcgttttaagctagacaactttttatctttattattttcctttntttct

SEQ ID NO: 4661 - DNA, 452 bp, Glycine max
agcttggagaggatgcttcaatggaggaaaagatagagggagagaaagagagaggggggagcacgaaattgaaggaagaaaaagggagagaagttgaactttgagttgtgtctcacaagactctcattcatcaaagttaccacaagtgttacatatgcttctatttatagactaggtagcttccttgagaagctttcttgagaaaacttccttgagaagcttctttgagaaaacttccttgagaagctagagcttagctacacacacccctctcataattaagctcacctccttgagaagcttccttaagaagattcctaaagaagctagagcttagctacacatacctctctaatagctaagctcgcctccttgagatgagaagctagaacttaactacacaccccctataatagctaagctcacccccatgacaaaaaaacatgaaaata

SEQ ID NO: 4662 - DNA, 392 bp, Glycine max
  unsure at all n locations
aattccttcatctgacttatcatcaaattttcctaattnttcttttccattgtttaatacaaagcatttgcaaccaaaaacatgaaggtgtgaaatgttaggttttttttatcattaaacagttcatatagagttttctttaaaatgggtcttattaaagccctattcatgatatagcatgcagtattaacggcttcagcccaaaaatatnttggaagaggagtgtcatttaataaggttctagcaatatcttccaaagatctattnnttcctttcaacaactccatttgttgaggggttctaggtgcaaaaaagttatgttcaatgccatgcttatcacanaataattcaaattttttattttcaaattcacccccatgatcgctcctaat

SEQ ID NO: 4663 - DNA, 393 bp, Glycine max
  unsure at all n locations
ttacatggggacttagagcagctgacgtaattgcattaatctgttcattcttttctaatcagattgccgaattttcaaatttgataaaatattcaggatttcttgaaatgcatttgccatggaggtgaatcagatagtgagttttctcatagaatatactttgcttaaatgaactgtcgagagagaaacaatcatgaggcatttaccgaactgtatgtacattgtacaatcacaatatatattaacctaataataaatacatggatcattacttncctaattatatgaacttactaacttatataccatgaatttggacctacataattatatgtagntatgtacaaagaacctggacacaaatgtaaattataaggtcaattacatatccaa

SEQ ID NO: 4664 - DNA, 296 bp, Glycine max
tgagatgtcttctatctggtcattcgagtagacacaagtcttgacaatgtcatgtatatggatcttcgttccttatagaacgttaataagatttcaatatgtgtggttttgtcgagcatgattgtgttcaaggtactatgtagggcaactatattatcacacaggtcaattcagcatctgcacaatgtgaatctttgaacaactatcttaaccagactagcttatatgtaggtagtgagctgtccaagtgagccaatttggctcatccaggttagctaaaatgtgagttgaagcca

SEQ ID NO: 4665 - DNA, 480 bp, Glycine max
  unsure at all n locations
tggctgactcggatcttgagctaagagccgcggctgcagctatccaatggtcggattttactttttcccncgcgccgaccatgtaggattctaccgcgacgctattatcgatgggctcctgccaccttaatgactactgaggccgcccaagagccttgggaacgagatacctgctctatgctccctgttacatctggagatggcggaccaccatgtctaccctggccgaacagagaccgccatatcaccggtctcacccacacccgtaatagaagctgtgacctgtgaggaagatatggagatgtatgaggcgctcgaagagaggtccagagcagccaaaggccttgacaacttctcattctcagatttggtgcgattatgtcttgcgcccacatcggattcctctcaaggcaagcaccaacctcgtaagtacagggacgacaagtccaaaggcattacggacagctgcgtatattcacg

SEQ ID NO: 4666 - DNA, 398 bp, Glycine max
caatcaatgaaacttccatctttaatggagaggagtaccaccaccggcaacctgaatgcaaatttatattgaagcgatacacttaaacatttgggaagccatataaacatggacttatatagccaccacagtcgaaagaaccacaatagatgggagcacaacaagtgaacgcatagcaatagagaaacctagagatagatggtctgaagaggatagaagactagtacaatacattttaaaagccaaaaacataattacatctgccctgtgaatggatgaatatttcagggcttcaaattgtcagagtgctaacgaaatgtgggacactctacaattaacacatgaatgtacaacagatgttaaaagatccacgataaacacattaacctatgaatatg

SEQ ID NO: 4667 - DNA, 255 bp, Glycine max
gactacggcgacgctatgagcactctgatatgccgaagataaaaactgtgatgcctaggggcttctgtatagaagcttgtgcatatcctatcattctatatagggacttggagcatagttatgtggtaaagggtacactggagacgcttggctagattacctagacacctcttttccagatgccacgcttgccacaatgagacttctattgtccttagctgttgtcactagatgtgatctcaggcaattatatat

SEQ ID NO: 4668 - DNA, 323 bp, Glycine max
  unsure at all n locations
gtattattggtataattggcctgttccattatgcttttaatgtctatagaggctacttcctcgttgacatcttttgtcttgaatggaattgccatgacaggtttattgttactgtctttgatattcggcagttgatattgtgttgcgggaggcaattccgattggattaactcaccatccttcacttgccaatntgttatgacatattgtcgttgaatcacctatgatgtcttgattccaagggtaatctatatcctttctgatggcataagcatgaaaccaatcaaagaaaaggacattcattttgactcttttgacaaatt

SEQ ID NO: 4669 - DNA, 484 bp, Glycine max
  unsure at all n locations
ngtagcctagacgcggccaagataccagcttgcatgaaccctggaatggccccccattttctgctatgaacagatatacaatgacatccttactaaccccacatgagcgacgaagccggctactgggtgagacgctgagtgaacattatggagcaccattgcttatcacagatgacttataactgggaccccatcatgaacaagatcctgcagagcatgtgccatataaagggcgatgtaccatcaatcaatggggacatgtaggtctatctcttatgatgtatcgcaaaccaagtgggatatatatgcgcctctcgacatcgaccacgcgtaattgattgactgagctgcctggttacaggaacatccagacaccggaaccagttgcttcgatagggtgatatccatttgcctccgatgatgctgcagaaagcactatttcttctacattaacagttatagtaccctgtgagttgaccgagcg

SEQ ID NO: 4670 - DNA, 404 bp, Glycine max
  unsure at all n locations
agcttgtaggaggaagaaaccagcaatgattttcaaggtggactntgagaaggcttatgacacagtctcatggtctttcctggactatatgctgtatagattgggcttttgtcataaatggagaaagtggatctcagcttgtcttcactcagcaaccatctctatccttattaatggcagccctacaaaggagtttaccccatctagaggcttgaggcaaggggatcccctagcccctctactctttaacatagttggggaaggcatctcaggcctaatgagggaagcagttaggaagaatctatatagcagctacagggttggtatgaattatgagcccacaaatattctgcagtatgcagatgatactgtttttgtgggtgaggcttcttgngaaaatgtct

SEQ ID NO: 4671 - DNA, 437 bp, Glycine max
  unsure at all n locations
tgtacttaactntgcttgcatattctgtgtaactctggcctatagtctcaaccatcaaatcctcttccttctctgccttctgcttataatacaacaagcatactgccacaataaatagcagactcagaggtgctcgaagcgcaatgcagtatgttacaaacaaaagcattgttgatgaatatattggatgacggacccaacgataaggtccaaattgcactacagaagttggctccaccacattttctgaatacttagcgagatacaatgtagcattatactgcattagcagagttgtaatgattaaagcccagattccaagattgctccacccacccggtatgaggtgaagctcangcccttcaaatgctgcaagccaatggccaaccatgactcctgtgctgaacaataggcgagaccacattggcaagttcacg

SEQ ID NO: 4672 - DNA, 286 bp, Glycine max
  unsure at all n locations
agcttaagctcctttttctgcacttggctcttataanncgaagagcatccctgtggaacctttacccgacgaagacactgacaaaaacttatcttcttctttgtggacaaagtatggtaagctgggggcaacgaaatcttcttcccatcaaaccttggatgcaaatgtgatcgtatgcccatatcagctagaacttgacgggtattcaagccatccttcgtctcgccttgaatgttaaggagccgcccaatcacactgtcgcacactattttcttcacatgcataa

SEQ ID NO: 4673 - DNA, 191 bp, Glycine max
taatgttcatattattacacatatattccctacaacatacacattagtgactctcttgcgtccttaacaaccactggcgtttgaccactagtggtggccattggagaggaatttcgccaggggcatttttgtgatacttcatccgaaaacccagacacccactccccacacgaaaattcatctaagaccat

SEQ ID NO: 4674 - DNA, 524 bp, Glycine max
  unsure at all n locations
ccctgcaccgcacnngaccataangngacacgcgcaccactataccaggggccnnnnnnntagtgactcgagacccannacggaanaagacannagcnangaaagaaaagagaacagaagttctgtcatgacaagagacgaaacacccggacaacgcaaagcaactaccggcgccggcaccgggctctcaacgtccacccaagaacaaaaagagcaagaaccagggaacatcatacgagaacgacaacaaaaacccaaaggcgaaacatttctgcacaccccaccacaagatgtgatctcttacagcccgaacaataatgcaccagctagcacacgccgcaacaccgtgagagctggagaagaaacagaaaaactacaccgcagtcaagcacggtaaaaagcaaccacggggaccaacaaatgcgaaaaacaaaagaccttgaagagggcactgcagaaaagagacaacaagattcctgggggctgaccttggcataacacaacacacgaggcgcacggtcgcc

SEQ ID NO: 4675 - DNA, 446 bp, Glycine max
  unsure at all n locations
ggaagatggtgctntaatggaggaaaagaaagagggagagtattattagatgggggagcacaaaattgaaggaaaaaaagggagagaagttgaactttgagttatgtctcacaagactctcattcatcaaagttacaacaagtgttacacatgcttctatttatagactaggtagcttccttgagaagctttcttgagaaaacttcctagagaaacttctttgagaaaacttccttgaaaagctagagcttagctacacacacccatctaaaaactaagctcacctccttgagaagctagagcttagctacacacccctataatagctaagcttacccccatgacaaaatacatgaaaatacaaaaaaaaatcctgctacaaagactactcaaaatgccctgaaatacaaggctaaaaccctatactactagaatggccaaaatac

SEQ ID NO: 4676 - DNA, 401 bp, Glycine max
agcttataagaacaaaattgcctcaatcatattcaaatatgcatgtgaattaggaagcatcaacaagaatcaagccaaggttattgtgcacgcaatcaatggggcaaaacacaccaaatgattatgatgatggatggctcatattctcacaaaggtaaactcatcactttcaaattgagctttcaaaactatcatgacatgtagaggagaatcaaggatttcaagtcacaaaatgtcaaaaacttttattttccaaaaaattacccatttcttgaacatatcctatgattcatagaataacatgcaaagtcgtacatgcacacagaattgacccataatattatactaagaatccgacaaaactatatcacattaacatattaacacaactatcatattaa

SEQ ID NO: 4677 - DNA, 513 bp, Glycine max
  unsure at all n locations
aggcacncnnnnnnnnatagtagggcttgcacnntcttcgaatnaganaaaanccaagcgaggangaagggtngaattgtgatactacccgcaaaacatgnatacctcnaacgggcaccaccagcggatgctgcggngacaacgactgcatcacgtcgtcaactggattggtctagcccgagggagaacatatacacaatgtagcctgggctctggaacggtgtcaaagtattcctgtaagatgcgatgccatgcctcctgctgctgttcccgctagagattgagcattgataactgcaatgaaagctgtgttccttgacgcaacaaacttgatgtgttgggatcacattgatacgaatatgagagaaaaatgtccaacccttgtgggtcaataaaatgcatgacattatgtcatgggagcctgggagagtctggtggattgccttctgacaagagtcaatgactgcttataagttgaaatgcttgtcacatggcaatgtagtgactatttct

SEQ ID NO: 4678 - DNA, 440 bp, Glycine max
  unsure at all n locations
agcttcatctcagagagactgatccaacaattatcaaatggagtntaatataataacgcaacaacctataataacacaaactaatcaagtggaaaagtgcgttttaatggcataagataacaaactaaccgacaaagcaaaaagcagttaaaaattttaagcaagctttagctctaataatcttctttttagntggactatatgaagtcgatcgcaaactnttctcataatctttgccattagtacggcatacatacaagttatacataagctatatgctgtaaaccccacttgtaatgtcggcatgcaaattatttaactccggaataaaccatttcattagtactaattacttaagcacctaacatttggtatagatcacattgatattctccttagtattggttgaactaagtagaattattataagacacaaaatc

SEQ ID NO: 4679 - DNA, 410 bp, Glycine max
cttcgccgtgagtagtatgagatacttaaatcaagagtgacttgtttacactatgtaacggagtaggaggtaaaacttgcaatgatgtcaactaatgttgctatggcactgacatgccaatttccattttcatcctatagacataaaagcatagaatctgcatgataagggaagataaatgcttgaagtaaaaggagaatcacattattatcaatctattaccaacaagccactgtgtatgatcaagtcacaaaggatgaaacctttgtgtgcctttactatccggataacccttagggtggaaagaaactcttgaccataagttccatctgacaggccttttatccatgtccggatcacttctagactgggatctttcatctctatctcaaccatgcccacaaaccaga

SEQ ID NO: 4680 - DNA, 434 bp, Glycine max
  unsure at all n locations
gctntgaccatttgaattgctcaagcgctttctttgttcaatatcgagcgtctcgatctattatgcgcttgaatcggacctccgagtgaaaagttaagaccatttgaattgctcaagagcttccattaaccaatttcgagggtctcgatattttatgttcctaaatcagacctccgagttaaaagttatgtccatttgaatatctcgagagcttccgttgtttaatttcgagcgtctctatatgtgatgctcctgaatcggacctccgagtgaaaagttatgaccatttgaatatctcgagagcatccgttgttcaatttcgagcgtttctatatgtgatgcgcttgaatcggacctccgagttaaaagtaatgaccatttgattttcttaagagcttccgctgttcacattcgggcgtcttgatattttatgc

SEQ ID NO: 4681 - DNA, 441 bp, Glycine max
  unsure at all n locations
ggtctaaactnttcactcggagctctgattatgcacatcacatatatagacgctcaagattgaacaacggaagctctcgatatattcaaatggtcataactnttaacttggaggtccgattcacgcacataatatatcgagacgcccgatattcaacaacggaagcacttgagaaaatcaaatggtcattacttttaactcggaggtccgattcangcgcatcacatatagagacgctcgaaattgaacaacggaagctctcgagatattcaaatggtcataactcttaactcggaggtccgattcatgagcataatatatcgagacgctccgaattgaaacacggaagctcttgagatattcaaatggtcataacttttcactcggaggtctgattcaagtgcataacacatcgagacgcttgaaattaacaacagaagc

SEQ ID NO: 4682 - DNA, 337 bp, Glycine max
  unsure at all n locations
taatgccataaacctatggaattaaataaaacttaatggctgagtgtaactgaaattgtggcaaccaaaaggcacccacaacaggcaacaagtcagccaccatttggtatcacaccaggctgatgcctaggttgccaattgggcccttaatacaacttgaactagacctaactaaagcccttttagtngagtaacccaaaacatatttatggtcaaccaactttacgaggattgtgccattatttagacaaactaaatactttataattgaaacaaagcggagagatttagacctcctccattgcgccatgatacaactcacacacttggacttttc

SEQ ID NO: 4683 - DNA, 285 bp, Glycine max
agactagatcgtggatattcgcgttctgctctgttctaggatcaaggcttctatatatggagaaccagcttgtcacacctgcatatgtatgagtctcgctagtttcttcatgttttaaaatgagttatgtatatggttatgtatctacaactgaaagtgatggcaaaccttctcttgtttgagattgtcttgtgtctaaaagcaatcaactaacagattatatctaactcacaatgaatagtgttttcttctctaagccttcataccacattgtatcaagtacat

SEQ ID NO: 4684 - DNA, 421 bp, Glycine max
  unsure at all n locations
ctgcaagcattgcaagcatcgnattngtgctctaccatatcttaatatgcatgagaattatgaagcgtcggagacaaactgacattttatatatgactccactttaatcatttttttattatctatctagacacttaacatcaatgtctggtttggaatctcttttgtctatatcaaacaatctcgatcttttttcattcctcatatactttcattcctattcatgcatatcagccaaacacaccttaaggagaaccagctcttcaacgctcctactcagtgagaggtatatcctatcctttctttattctccatcatccggcgattaagtgagaagcaattctacattgggcttttgtcctcaaattgtggcacaaaaagtatgatagttggtatacatgcacttcgatgtctcacactc

SEQ ID NO: 4685 - DNA, 416 bp, Glycine max
  unsure at all n locations
acctctncatttgtatgaataggagnaccataatatcatagcaaacacaacacaccgagaggcactggaactaagaaatttcacagtacatatgcaaaaattgaaaaacaagtggaagaagaacgcaccgagatagatctcctagaaagatccgctactgattttctgaaaaatcagaatgtccttctttacctcctccgcgacgaagtccaattggccaccacaaagacggtgctctcgtcggcggcctcggtggtcaccaccgcaatggtggtccactctggggcgagcaacctccttccttcgaagctccggtcctacatcaccaatggcatccacaacatgttcttgtgcttctcctcggagataaccctaatattgatgagttcgacggtctcgtcaacaactaaatctac

SEQ ID NO: 4686 - DNA, 175 bp, Glycine max
agcttctagccaaatggacttaccttgaattatattcctttgatagcccttttgagccttgtttccctttccttgttttgaagctcactacaagccttaagtgaaaaaccatgatattaccatatccttaaggaattttggagctttggaattgttttgggaataagtgtggggg

SEQ ID NO: 4687 - DNA, 457 bp, Glycine max
  unsure at all n locations
gaatntggatttgtcatagatagtacctacaaattatttagatatagattgtctttacttgacattgttggtgtgacaccaactggataacattttcaactgcatttgcctatttggagggagaacatataagcaatgttgtttgggctctggaacggtttcaaagtatttttctaagatgtgatgcaatccctcaagttactgttaccgatagagattcagcattgataaatgcaatgaaaactgttttccttgaggcaacaaacttgttgtgttggtttcacattgatacgaatatgaaggaaaaatgtaaaacccttgtgggtcaaaaaaatgcatgagattatgtcatggaagcatgggagagtctggtggattgtccttctgagcaagagttcaatgactggcttatgaagtttgaaattgcttgctcaccatggtcaatgtttgttgacta

SEQ ID NO: 4688 - DNA, 183 bp, Glycine max
cgcttgcattcgacagaggagcttattcaatgtagttattaacgctacgaaaattcaggctctaaagaaggagctgaatgctttggaggctggtatctctgacagaattctgaatcaatttgaagcggagctcaagaagtctcttcaggagcaatcgtggcacgctcgctatgcctatgaatg

SEQ ID NO: 4689 - DNA, 415 bp, Glycine max
  unsure at all n locations
agctcgcactaagcacttagacccctgactagttggctgtttatttagctaagtgcacatcactacgttaagcccaacatcttcattggaagtaaacttcaagcagtgggcttagcagacatgatccgctaagcaccacttcttctctggaaaagcttattatagcagtgctaagcgcgttgtcctgagctaagccccagatccattctggaattgaactttcatacttgggcttagtgcggcaggatgcgctaagcgccaatccttcattgtgntttgaattcttggaagtgtgcttagtgcacctgttgcactaagcctaaactactctctgcaagtcgaagcttgattgcgcgtaagcctcacctctatgctaagcgcctattcagaaatttcgcgtcgcataagcgctata

SEQ ID NO: 4690 - DNA, 281 bp, Glycine max
cgcttgcctatcatcctgattgactctatatctttatagctgtacccagcacactcgtttgaccactgtgagaagtaaattctcatgctgagaacagtcaacacatctaagctggaacatctataaaactataagcatttaagcatgttcaggctatagattcccaattcagggatgtcacctaacatgagtgaactgaaattacaggagcgtgctgcttatataattctgaagctgttacagggggaagcatagctcacacgagaatgcttttccctgtt

SEQ ID NO: 4691 - DNA, 448 bp, Glycine max
  unsure at all n locations
agtagggttaaagtctcacgattgtcatgtgttgatgtaacttcttgtcatacaaagtcaggttagccataactcgcctgtgctatntcttccatgccatatatagcanagtcgttgatcctgtcaagtatgatgagctggaaaatgaggccgaaattatactatgccagttggagatgtatttttcccctgctttctttgacatcatgattcacttgattatggatctggtcagagaaatcaaatgttgtgggcctggttatttgtggtggatgtacccggttgagcaatacatgaagatcttaaaagggtatacaaagaatccttatcatctagaagcatctattgttgagaggtacattgcaaaagaagtgattgaatcttgttcagaattcattgagaaggctaaacctattggccttcctgagtctcgcgatgatgacagaac

SEQ ID NO: 4692 - DNA, 300 bp, Glycine max
  unsure at all n locations
agcttgtagggttcaccccanattctcgttgtcatatgctaaacttgatcccatatctacttgataattcaatggtagccataaccctagccaaggttcatcaacctccatttctccgagaatacgactcgaacgcaatgtgtgcttgttacggagaagccccggggcgttccattgagcattgtacggctctgaagtgtagggtgcgaggtctaattgatgctggctgaaatttgaggagaatcgtgtgtaaatcctgacattgacaagagatgccacacatggtgcaattttgaaagc

SEQ ID NO: 4693 - DNA, 468 bp, Glycine max
  unsure at all n locations
gctttaagaaaaaccttatttatcactcactagacgacattcttttgtgttaaactaaaactaattttctatcactagatgatatagtttatcttgttatcttgtgaaaaactcttctttgtgaaaaaagcttatatctttggttaacacacttttcgacccctttctaatatgatctttgatatttcaaaagtgtactagtcttcttcgtatattggcttatgactcacctgctgatagtgtggacatgtatattcagattactaaaagcactgtagtggaatgcttacaaaaaattgtatcaaacatgtgtgcaatatttggggatgagtacccgaggaggccaaataataaagacacatgaagactacaaattgaagcagtacatggttntctaggtatgttagggttcattgattgtatgcaatgggaatagaaaaaaaatgtccagttgcgtggaaaggtcta

SEQ ID NO: 4694 - DNA, 433 bp, Glycine max
agcttagtaagcttatcttgatatgagttgttgaaaatcataatataatattctaattctattaacaatagcagctcataacacacactattttttgtttacaggacaaaacatcttctatttatgcataattaatgtaattaacctatataaacacacatctattgtatattcaaacacacatttgtgaatcatgcaggttttgatgatgtcgaaaagaattcacttgataacgattgtcatcatcaaaaagggagagaatgtgaacacctagagtgcgaatgtatgaatacatgattttgatgatgccaaagaataatcaaacaaggttactttcaagattacttcaacaaacattcaaaggttaagcattgcttcaagattaatacaaggttgcttcaacaaacaagcattgctttaagattaattcaag

SEQ ID NO: 4695 - DNA, 440 bp, Glycine max
tagtagaaattagaattcctttagaacatgttttatgcaccttgtaaaactagactgtacaagattagacaatgtaaattcacactgtgtggatttacactaagtataattaatgtggatcactctaatatctatgtaattagcaccattgtctacgttaattagctagttttacttcttttggtgaaaaaagttgccttttatgcctaatcctatcttaataatttataacaatatttacaaaaaggaaactaccaaaaaatggctagggctcctcaccaactgcaccttctctctctctccatcaacttttttctttaatcaagtgtttggtgacatgaggtagcttaagacccaatgtgcattgggaacccttgaacctatagctatcctagacttcataaacactccaagttcactccactttgtgccttgctatt

SEQ ID NO: 4696 - DNA, 239 bp, Glycine max
  unsure at all n locations
agctcgtaacttgtttatgtanaaaagaagttattaatcttgtgtcttgtaagacagtatctcaaagatgagagatgtatgcaggtatgacaaccgacgagtgtataaattaaatcagctcgagtattgatgttggagtcctcagcaacaaaatggatcaattataatacacccacatggttaatgaaataaatcatttgtgatattattaattcggattaattatgtacctgtctctt

SEQ ID NO: 4697 - DNA, 567 bp, Glycine max
  unsure at all n locations
taacgtcctcacntgtcaacttacgatctntnnnatccaataaccannnnnccnnaaggggnnnnnnnnnnnnttctggcatgagaacgtccacanccaaacnnnagcnnagnnnaagnnannaacagggagaagaaaaccggccacatgtattacgcatctatnaccgcaaaagaaggaggctaaagaacgtcctatgctcgcacggacaagttagacgacgatgagcaagcaaatcttacatgctcgctgaggaaactggaagacgatactgatccgcaacaaacgttactgctcaactcgaataaaaatgtgcaagtcaaaagaaccccgagtcgcgaagagcactggatggccaacttgaaccaattacacaaatgacatcggaagtggttgtcactaagactcaatcagagattccactagtcaccgctggaagaacaggatggtcctcacaaaaaggcgaaacatcgacgagcatatatactcataaaacaaatgtatgccaagccacctacaaaaagactcacccatcagctaaacacctgaatgacccgtcgaaagccg

SEQ ID NO: 4698 - DNA, 434 bp, Glycine max
  unsure at all n locations
agctntgatgatatggtcttcaccgatgaaaggatcaatttgagtctaanaagaggcaaatctgatcatcatactttgataaatgccaaaaaaaactagggcaaatgaagagggtgagaatgagggacaagcccatgctgtgactgccattcctatacagccaagtttcccaccaacccaacaatgtcattactcagccaataaccgaccttctccttacccaccgcccagttatccacaaaggccatccctaaaacaaccacaaagtctggttaccgcactttcaatgacgaacatcacctttagcacaatccaaaaacaccaaccaagatatgaattttgcagcgagaaagccttagaattcaccccaattccagtgtcctatgctgacttgctccatatctacttgataattcaatggtagccataaccct

SEQ ID NO: 4699 - DNA, 469 bp, Glycine max
  unsure at all n locations
tgaagatggtgctntaatggaggaaaagaaagagggagagtttgttataggggggagcacaaaattgaaggaaaaaaagggagagaagttgaactttgagttatgtctcacaagactctcattcatcaaagttacaacaagtgttacacatgcttctatttatagactaggtagcttccttgagaagctttcttgagaaaacttcctagagaaacttctttgagaaaacttccttgaaaagctagagcttagctacacacacccatctaaaaactaagctcacctccttgagaagctagagcttagctacacacccctataatagctaagcttacccccatgacaaaatacatgaaaatacaaaaaaaaatcctgctacaaagactactcaaaatgccctgaaatacaaggctaaaaccctatactactagaatggccaaaatacaaggcccaaaagaaggaaaagaac

SEQ ID NO: 4700 - DNA, 519 bp, Glycine max
  unsure at all n locations
nattgagcgcttggacttcgnngcnctctagagtcgagctgcnaggcatgcaagcttggaaggtagtcataacctcacaaaagatatatatacttatacatatatatatatatatatagatatacatatacatatatatatatatatatatatacatatatatgtctggggagaacgatcccttggatatgcgtgtatgttgcacaaaaaatttgacaacatatgtatatgtgtgattaggcagcaccataccttggatctgcctgtgattagataaatatttctcagaacatatatacacatgcttaggttgaagaactctctgtggcacacatgtatatagcacaatacctcacaaaaattcacgtgtgctcatgtagcatacaccctcttgtatcacccgagagcgctctagactagattactacgcaatacactttcgaacgagactatctcctcaatccatagccgtactcatgcgccgctcatctcatcatccattttcccagatcgcactcc

SEQ ID NO: 4701 - DNA, 438 bp, Glycine max
cttcctttagtgcgtcacgtttaaaaccgagctcgatggtgtttgttatccttgatggtactcggcgggaagagatgggagatatcgacattcccattcagataggcccccacacttgcaatgaggtgtttgacgtaatggatataaatgccgcctatagctgactcttgggaagaccttggattcatgccctgcgagtgggcccttcaacgcttcaccagaaagtgaagttcgcagagggtagacttttagtgatagtgtctggtgaagaggatatgatagtgagtagcccctcctccgcaccgtacatagaagcggcggaagaatcattggaaacggctttccaatcctataaagtggagagctgcgcctcggtggaaccaagtacgtcgctactttctctctccaacgtggacataatggtggcgcgtgttatgc

SEQ ID NO: 4702 - DNA, 224 bp, Glycine max
agcttgccgccacggagttttccgactatgctcttgtgttgtggaacaagctacaaaaggagagagcaagaaatgaagagccaatggttgatacatggacggagatgaaaaagatcatgaggaagcggtatgtgccggctagttactcaagggacttgaaattcaagctccaaaaactaacccaaggcaacaagggggttgaggagtatttcaaggaaatggat

SEQ ID NO: 4703 - DNA, 459 bp, Glycine max
  unsure at all n locations
tataatatattattacactcgaaattaaacatcagaagctctcgtgatattcaaatggtcataacttttcacccggatgtccgattatggcgaatcacatatcgagacgctcaaaattggacaacggaagctcttgagaaattctaatggtcataacttttaactcggatgtccgattcacgcgcatcacatatagaggcgctcgaaaaggaacaacggaagctctcgagaaattcaaatggtcataactttncacactgaggtccgattcacgattataatatatcaagacgctcgaaattgaacatcgaaagctctcaagaaattcaattggtcatcacttttcacacggatgtccgattcggcgcatatatgtcgaacgcttgaaatgaacaacggaagctcttggaaattaaatggtttaactttcacacggatgtcaattcaacgcatacatat

SEQ ID NO: 4704 - DNA, 399 bp, Glycine max
  unsure at all n locations
agcttacgtcatggttcaatgtatggttttcttgagccttatgtttatacacaatgcanaggatagatgtcaaaaatttcaacattacattaaaacatgggtgaaggaatcacaacgagaagcatacttaggagcttacttgaatcaatatgtaaaatataactagtacgttcaaaaaaatatttgcattatacgtacctaattatagttctggactttagggcacaatggaagcttgttgttgtgtgtccatgggacaatactattgtttggttttgttctttgcgtaagaagcctgatgttaacatcaaagctacaattaacaggttatgtttaaaattataattcatttattgtataacaatcgtaggatatgtaaacacgaatttgatgctatat

SEQ ID NO: 4705 - DNA, 473 bp, Glycine max
  unsure at all n locations
tagggatgaagcaagcaactcgcttgggtgagctgctgtgttatctccaccccttatttcctataactaggcatgatcggctgcaggaaaagtccagaacctgaaatcaacaagatttgagagaaattagtgagaagaaggagaaagacgaagaacaatcaaggttgagacgcttccgtaacacttccgtaacgttgtcgtgatcgttcttcgtccattcttcatcgttcatcattcatcgatcggttagttnttatttttgaagctttgaatttattctatgcgcccttaggtgatggaagcttgcttgtggcgcttctatggaggctagatctttgagcttcaatggggtcctttaatggtgattntccaccatggagatgtagcgtaagacaaaggagaagaggtgagaggaggcgccattcactatggaataagccatggaagaaggagcttcaccaccaagatgagcc

SEQ ID NO: 4706 - DNA, 280 bp, Glycine max
agcttcatgacgaagaaacaagttgtttcaattattttctgacgacgacaaggatgatgactcatagcccaaagaatgatttcaagattaagtccacaagatcaagatcaagattaatttccagtctcatacgacgacatccatacgaatccagactcatgagacgcttgatttccagattcatgagacgatgaattcccgatttatgagatgaaaccacgacgacttcacacggggagtattgcaaagatttttcaaacaacatacatagcacactttt

SEQ ID NO: 4707 - DNA, 430 bp, Glycine max
  unsure at all n locations
gtcaccccataattcgcccatattagggcaaccaaaatttttatttatgaatgacgctctcctacaagctaagaccaggtagaatgagatcaactgtataggctcanggtacaatcaaacgatcatacttccacctcagaatggcagccagggatatatcaatcatgcacaatgtaagctattagctaagtggctatcttcaatacaaacatggccttcatcatctccaatttcacacattcattccatactcagatattcatgcataaatcattactcaatgttaggcattctctcacaattaaagatcacactttcaccgggttgcggctaatgcgttccttcacaatcaactcgacaaaccaactaacattcttagtcatgatcctaagtcaatgtgctttctcttctaacgactgcatgctcattc

SEQ ID NO: 4708 - DNA, 217 bp, Glycine max
agcttgaaggcgctaccaacgaatatgatcactcatgttctaacacgaagcacagcggataagtgatactctgatacatgccatcaaaaaatatggtaggatgattacgtcgataatgatggacaagacgaagatgtgactgccattcctatgcagacaagattgccaccaacctccccatgtcattactgagccaaatacccaccctttccttaac

SEQ ID NO: 4709 - DNA, 338 bp, Glycine max
gtgatctaccaccaccgccaccaccatcatcttagttttctattatttaatattactagtactttgctttctagacgtgtatttggctatattatgacatttggatatactaaaatctgcaatccctcactccttggtttttctattttcccaccattcttcaattcttcaaatgcagtatgtccctcagaattttctcatgcaccatccaactctgtaatacaagtctgcacttcatgttcctcctctttagttcttctaggtgcgacggtgactccgaacgactggcagaatcctgtgatcaaagcgggaaataccagggccctattggacttatc

SEQ ID NO: 4710 - DNA, 396 bp, Glycine max
  unsure at all n locations
agcttctacattgtagttgagacctattatttatattaagcttctttcaattaattgactatganaacttactanattagattaggtgctccggctagattactggtggattcactttatacaaagaatgattaactcgcttaggtaacttgtaaccaattgcaagtacggaaaatgaaatacacctaataacgaacctgtaaatgactagcaacattctcttttgtcaaacctgngacattcatctcttcaagaattctctttggcacaacctctaaaaaataatttaggcagaaaattgtaagtgatagatcataacttacatatatgtatgcgtccatatattcttgaattgatgctcatgcaaaggttcaattcaaanatcacaccgcccaa

SEQ ID NO: 4711 - DNA, 451 bp, Glycine max
  unsure at all n locations
ggacactatgaaactcagctttgcattgatcaccctttgtaatgtgtcacccccaatactctgactatgaaacagtatatagaatgatttccttactaatcccanaaggaaagaggaagttggctacttggtggttcactgaatgaacttcatggagcacaatgtttttcaaagatgatttatatcttgagttccatctttaatagatctgttgtgcatgtgtcatataaggtttgatgtagtatctttcaatgtagtcttttagttntatctcttctaatgttntgcaaaagaagtggtctattatgtgtatctgttatttgagcacgttcaattcattgactgagttgcctgtttacaggaacatccagaaaccggaaccagttgcttcgatagggggaaatccttttgcataggattatgctgtagaatgtactattccttttcacat

SEQ ID NO: 4712 - DNA, 214 bp, Glycine max
  unsure at all n locations
agctntntattttcagtagatgaatatgaatttgtggccatcctcacggacacctctaagagcaatagcatcatttcttgcactgagttgttgcgaatcggaaaccatcttctcaatcaaattcctagcttcagcacgggtcatagtaccaagagctccaccatcggcagcatcaatcatactcctctgcatgttgctaagtccctcatagaaa

SEQ ID NO: 4713 - DNA, 576 bp, Glycine max
  unsure at all n locations
accacacntccccacgctccgcacacgcncgcgtncatgatntnnatcttcnctaccctnnnannaaccgcgcngcanannnnnnnnnnnnttggatgacctgagacctccggnaccaanacaacgcacgacagagacgaggacgcgnccaagggagaaacacacagcccttattcaatgtttacagacnggcacctgcagacagggcgcggaggacacgagaccacggacacgacacgcggagcgctacagaccaaaaccaagcgagaccaaccccgacccaacccgggcctaggcggacagagagaaccggagacgcacccaaacaggcgagcaccgggcagcaacagatcaaaggaacaaagaccgcaaagcacggaggcacggagggcagaccagcggcgaaacctgtggacacacgcgacaccgacacccggaagccccaacacaggcacgcgatcgacaccccgcccagaggccaaccggcgcacaacggcccgcgccgaaccgacaccggggcgccccgaagaccaacggcagaccctaccacggcgcaaccccgaccacgccgcgagc

SEQ ID NO: 4714 - DNA, 405 bp, Glycine max
  unsure at all n locations
tttatttgnaccncccgcnagcgagagcatngcatncgagaatataacatctctgtaacacgcactttgcaaatcagaccatatattttgttactagcttacttgaagtacctgtatacttaactcagacctgcaaaaaatactcggttctacgagcttaaacatacatcccggcactaaggcacaatggaagcttgttgatgagagtccatggcacaaggcctacgcactgatctgtgcctagacacacacccatctcacagtctttacactcaacaccccggctaatcctctccgatcccctcgtcaccgctggacgagctaaatcttactggacgctctagtcttacctcacttttgctgttgactagcacttatgccagaccccaatgactaccttccccc

SEQ ID NO: 4715 - DNA, 438 bp, Glycine max
  unsure at all n locations
tacctcgacggtggagcagcctgttcaatgcacgtcctcntttctgacacccaacggaggagaagaaggatcaaaggccaacgaaaatgacacggagggaagaagaatagcagcggcgcaaatggaagcttagcttgcttgtgtacgtataacatgaaatgttgatgggtgcaccaaaatcttttaaattaaggccaggggtatttttgacctttcacattaaatgttgggtgcacctagcatcaccctcatagaaagcctaagtgtgaaaaggagaattgtatgggtcataaacccttccctaaccatcacaattcatatttgcatttgcaaagggactctctcttttctttttcttctccaagagagactcaaatcctataagcttgaggtatggtgttggtaatcaaaggagatcatnttcctcttcctttgatg

SEQ ID NO: 4716 - DNA, 425 bp, Glycine max
  unsure at all n locations
agctttgagccanaattctgacttaccataattcttgacccagggtgagaatgtcaatccttaccctcggaagcgaaaagaatagaagggaaatttccaatcaaagaaaaggaaagaaggaagatttccaatcaaaaagatagcaaaaaagaatagaaggaaaattccccaatcaaagagtgggagaaagcanaaagaaaagaaagataattcccaatcaaagaatgggagaaagtaaaaaaggaagaagaagaaggaaagatagctcctgatcaaggatcgaaggacaacagaagaaatgtgcagaaaggtctttggaccggacaatatctgaacaatacagaattgtcaccaaatgaaanaaaagaaggaaagggaaaccacgacctaaatggtcttcttcctttgataccaaccaaaatccc

SEQ ID NO: 4717 - DNA, 453 bp, Glycine max
  unsure at all n locations
gagcccgggtagtcgaagagaagtttattttcatattcatcaaagtctgaanagagtatgatgaactaatgttacgtaatatggccacagctgaagctttggaacgagaaaccaagaaggcccgaaaggaagaacacgaccaaagcaaagttttgaggggctttatagggcagcaatagtgagctcaagctccgaagaggtgaaaggaatcatcacgggtcaaaggcatgatcttgaaggacgagctaaaggtttgccttaggtcgaaaagaaatttgtcccaacagttaagcgagactgaagggaatatgtgggccatcatcgataagtgcaaagagaagctaaatctagcggcgactcacgagcaaaggctagaggatgagtatgccaagatatcagcagaaagggaagccagggaaagggtaattgattcattgaccaagaggcaacaat

SEQ ID NO: 4718 - DNA, 151 bp, Glycine max
agcttagacaacaatatctacattgtgagaaattaatgcacacgaatattttcgttttaagaagaagaaatatacacttcagtcttctccttgaaaattactaacccttcccttccaaggattaactcgtggaccctatttacaaccacca

SEQ ID NO: 4719 - DNA, 328 bp, Glycine max
  unsure at all n locations
tanagataaactaagaataatgactagaaatcttatcttagttcttgataananaggctatcaaatacaaactgattagctaggctaagaataccgatagaatatctcatcatatattctgagaatatattctatcaaatattaactgactagcttggctaagaaaaccgatagaatatctcatcatatagtctgataatatattctatgaaacacagactggattagtaagctaacaatactaataagatatctaatcatatattttatcattaggtaggcttagaatacagatagaatatcttatcatatattgtgatagtatatt

SEQ ID NO: 4720 - DNA, 76 bp, Glycine max
  unsure at all n locations
agctntataagcgcgggttcgagagacaaaggtcatagcgttcgcgatatgcgaagatgatgttccgagtactttg

SEQ ID NO: 4721 - DNA, 439 bp, Glycine max
  unsure at all n locations
ntaggatatgtaannttatatttatagttcaagacaagcatattgaaacaataactcaactactgtgaccactccaacataactattgccactgaacaagttacttcatgtntagaattctgcattntatataatcaacatatgaaagatggagaaaatattgtaatttcatgacattaaccccacttgtggtgattgatgtacgtggtgattgagttatttattggattcttgcttccatttgggaccgtgttgctcatcatcacaggtacaaatgtttgttaccgattaatttttttattacttgttcactgccattaaagacaactaatatttgatatacaaattttgttcatgatgagagaaccttagattcccgtttgagactgaatgcaatgattcttgcagacagtttgcattaatcaatgtattcaatctt

SEQ ID NO: 4722 - DNA, 262 bp, Glycine max
agcttcctagttatagagagctaaatcctatgttggttcttccttgtaggtacttgatgtaaatacatgtatatctatttaatgatgttttatgtgttctctgtgctatcagtacatcatttcagtgtgtttctaccttgatcacgtagatgcatgctttgttaggatcattcaatggtggaaactggtctgattcttagaacttgataggatagggctagtttatcgtattatcacgagggatcggggtacgataacctag

SEQ ID NO: 4723 - DNA, 473 bp, Glycine max
  unsure at all n locations
tcctcactttgcagtttaatattgatcacttgtttntcttatttatttntgactttcaatctagagggaagctcaaaaactcccaacacacatttcattgtcaatatgttcttttcaaaattgttcccaaacaaaattgcatcatgcatattatagatgagatgctttaatttgataatctccaaccttatagcccgaaaattttggactacactcttcatcattccaccaagaccttctctagcaattgggaaaagaagatgagagagggaatctccttgtcttaatcctcaagagagtgtgaattttgttgttgggttgtcagattacaagaactacaactattgtagttaagaggcattcacaaatccaactccttcacttatatttgaaaaaccaaatctacccatcatatagtccaagagactccaattcatcatatagccctattaacaatattcagctgttggatg

SEQ ID NO: 4724 - DNA, 425 bp, Glycine max
atatatatatacttatatatatatatatatatatatatatacatatatatatatatatatatatatatatatatgtttaggcagaaagataccttgcatatgcatgtatgtagcacaaacaacttcacaaaatatatatatgtatgtataggtagcaagataccctgcatatgcatgtatatagcaaaaatatctcacaaaacatatatacgtatgtttatgtagcaagatacctgggacacacatgtatactacaaaatacctcacaaaaatatacgtatcgttaggtagaaaaatacctcactgtacacaacgagagcgagtctgatcagaattctaaccattgcctcctaccgaactctatctaacatacccaactacaacggtcgcctagctacaacctcctccctctaatacacacaccg

SEQ ID NO: 4725 - DNA, 420 bp, Glycine max
  unsure at all n locations
tccttntagtgcgtcacgtntaanaccgagctcgatggngttgttagcctttgatgtgactcggcgggaagtgatggtagaaatcgacattcccattcagataggcccccacacttgcaatgtggtgtttcaagtaatggatataaatcccgcctatagctgcctcttgtgaagaccttggattcatgccctgggaagtggcccttcaacgcttcaccagaaattgaagttcgcagtgggtagactcttagtgatagtgtcgggtgaagaggatatgttagtgagttgcccctcctccgcaccgtacatagaagcggcggaagaatcattggaaacggctctccaatcctttaaggtggcgagctgcgcctcggtggaaccaagtccgtcgctactttctctctccaacgtggccataat

SEQ ID NO: 4726 - DNA, 401 bp, Glycine max
  unsure at all n locations
gcccactccatcattaggattatttcctgacatctcanacaaacaaatcaaacgtaacaagacaattatagttgctgtttgaatacctcacccactcaagtgtatcacacaattatggcttttctctaatgaaacactcttgccttttaccactctaattccccttgagttcttaggcaattcaagagattatggccacaacaaagaacaattcaccaatatgtgtaagggaaggctagacaaggaaaaggttaaccaagaaaaaggctaacaatgtttttaggcacaaatgaaggaaacaaaattcagaatttatgaattcaagtaacaatccttcatgcaaccaatatattaccttaaagagtntttttttntaagttcttcaagcatgaaccattcag

SEQ ID NO: 4727 - DNA, 409 bp, Glycine max
  unsure at all n locations
agcttgtcataactttatctcgagcccagtgtttttaatataccatttattgcnaaaagaactagnggatcatgtgtgtaatcttgatactaatttgcttctattggaagaaaaagatattgagttatacgttgtatccaaagttcatatctagaaaataaaaatgaagtataaaatgttaagcattttgtagtatgtgttctttaggtgcttagtacattgctggccgccatactnttctgagctttcataattgacattctatatttacatcaatacaggaataaacagatctttaaacaatggtgaaatcaacaaggaaattatgcttcagctttctaatgtgccaaaagctgtacctatctgcaaaatttctgatgttgactcttctgaggtatgtatgactact

SEQ ID NO: 4728 - DNA, 473 bp, Glycine max
  unsure at all n locations
ngtaaaaccaattttctagaaagttagctaattccaatattaattagaatttttgttcgttaatgtgcataaaatttacatgtaagattgacatagattttatagaggtcaatctgtattttgcggcctttaagaaaaaatttcattatgaataaaaaattttaagattttaattntttagcatcatgtcaaaattaaaaatcaaatttaattagataaaataaaatattcaatacattagttaagtaaaaaaatagtaagttaaggaaaaataaattaatcttaaaatttaaaatattataaaaataaattaagaaattcaatttcactcttacaataaataattgatcctgtagctaggtcaagtgtaaatttcctacttgattntttaaaaaaatataaatttcaatgagatttaatttatatattatttctatattcaatacatttggcattcgatttcaacgtataaa

SEQ ID NO: 4729 - DNA, 216 bp, Glycine max
  unsure at all n locations
ggcagtanacgctaacgacagtaacattgcactcggtagtccttctgagctcccgaacatatcgagaggctcgatattagaaccgaagctcgcaggtaattctaacgactttaacatttnactcggaagtctgagcgagtcccgtagtatatcgtgacgctcgaattttgaaaccgaagctcgtaacatacgctaacgacagataacatttcactc

SEQ ID NO: 4730 - DNA, 341 bp, Glycine max
  unsure at all n locations
agcttcttatccaggcactctcttggnggtctagctcctccttccatggcttattctttagtggatggcgcctcctctcacctcttctcctttatcttccactacacctccatggttgaaaatcaccattgaaagacctcattgaagctcaaagatccatcctccatagaagcttctcaagcaagcttccatcaattattgcttaccttgatatgaccattgtttcacagctggaggcattgccacgcattgcattcttgtggagagagaaggaataanagtacaaacaatgtttgcgttcaggtgtaatgaggaattcacacctacgtagttctttaagt

SEQ ID NO: 4731 - DNA, 465 bp, Glycine max
tcaggttgttcaattgcttcagattgctgcacaaaatgtatattgtttgtgtggtggtcggcagaggagcataaaccacaaactcttgtgacaagtacaaatttctgattcaaggtcagcggtgttaccaagttaaccaaggcatctagtttaccttcaagcttcttagtttcagctgatgaagatgaattcgtggctacttcatgcactcctctaatgactatagcatcatttatggcactaaactgttgggagttggaagccatcttctcaattaaatttctggcttcagcaggggtcatgtctccaagggctccaccactggcagcatctatcatacttctctccatgttactgagtccttcataaaaatattggagaagaagctgctcagaaatctggtggtgagggcaactggcacatagtatttaaatctctcccatattcatataagctctctcactg

SEQ ID NO: 4732 - DNA, 353 bp, Glycine max
  unsure at all n locations
agctttccattctttcggaagtttatcatctttattggcttcttgaggaggagcttcattgcttccttttccttttcctttacaatctngtccatgaatatgcatttgttctaaagattctgcaacatcatctaaaatatcctttcttgaagaaatagcattagactcatcaaaggaaacatgaatagattattcaatagtcatagttcttttattatatattctataagctttactatgcaaggaataaccaaggaaaattccttcatctgacttagcatcaaattttcctaagttttcttttccattgtttaatacaaagcatttgccaccaaacacatgttgatgagaga

SEQ ID NO: 4733 - DNA, 482 bp, Glycine max
gaatactcaagctttacggatttggtcttcaccgacgaatggatcaaagtgttgttctgaatattgcaaatctgatcatcctgcattgatgaatactataattgcggcaaatgaaaaggatgacaatgagggatatacctctgctatgactgccattcctacacggccaaatttcctgtcagcccaacaatgtcattactcagtcaataacagttgctctcacccaataatacacaaaggccatccccaatcatccacaaagcctgcccgctgcacatccagtgccacaacaccaaccataaaggaattttgtagcacaaagcctgtaggattcaccccacattctagtgtcatatgccaacttgctcttatatctacttgataatgcaatggaagccataacccctgccacggttcctcaacctccattcttcagaggatacgactcgaacgcaacatgtgcatatcatggaagagttctg

SEQ ID NO: 4734 - DNA, 269 bp, Glycine max
  unsure at all n locations
gcatgcaagcttaaagtatgctcgagtcattcatccctatgagatgttgttgaagaaangaggatcagaattgccattccttggattatatggtttagccaagctcatgcttggacagaaaggctcattatatcaggttgaagaaacgaagattccgtattgcaaaattagagcaaaagaggaatccagtctcatcactgcaaaggctactgccaaacatatttacgattggtgatgtactttgtacttccaatttgaccttgacaaag

SEQ ID NO: 4735 - DNA, 444 bp, Glycine max
ctctgcagattggtcttcgacagtgaaggataatgttgatctaaatatgcaaagttgatcatcctacgaggacgactgagaaaactgtggcagatcaagacggtgaggatgagggagagacctatgctgttactgacattcctgtacggtcaagttgcctactctacccatcactatttttactcagccaattacaaactatgtacttacccaccacccaggtatccacaaaggccagacctaaatctaacacacagtctgtggaccgcactttcaatgacaaacaccacctttagcacatatcatatacaccaaccgagaagtgaatctctgagcgagaaagcctgtacaattcaccccatttccactgtcctatgctgacttgattccatatctacttgataattccatggtagccatgaccctagccaaggttcatcaacc

SEQ ID NO: 4736 - DNA, 119 bp, Glycine max
agcgtgtacgatgcatctctatagtactcactggtgtgtccacattgcgagtcgtgcattgttattctcgttctgttacttattatacccactgttgacgagctcatgccgtttgactt

SEQ ID NO: 4737 - DNA, 208 bp, Glycine max
  unsure at all n locations
tgagatgaggaagtgttgaagggtgaaactttctttcttattgttgaccacagagtggtacctggagatatgtcgcggnggtcaggagaccttggggacgtcaggtgtggtgctattgcccaaaaccaagcttgaccaatcccgacccaacccggtcatagtttgtcagtgagaacctgtgatgtacctaagcaggcgatctcctggc

SEQ ID NO: 4738 - DNA, 265 bp, Glycine max
atgtgtctagcatcacgattatcgtctcccttcttgcacatgttctgtacttgcctcctatccagaaccatattccaataggactgatactgcctaacaaacgcaaccattaagtccttccacgtatggactcgggaaggttccaagtcagtgtaccaggtaacagctaccccagttagactttcttggaaggaatgcatcaacaatccctcatcttttgcgtatgctgccatcttccgaccatacatctttaaatggttcttgg

SEQ ID NO: 4739 - DNA, 434 bp, Glycine max
  unsure at all n locations
ccttgtagaatggccagacatgatacatgncattgtttgtttttttttaagggaaaagggaagccccacattatgtccatgacacaaatgcataaatgatgatttggaaatcttatgcacaactggtcatgcatgcacctatgtggacactcaagtgtcaaatttttatggtcatgtgatgctagggctcacgattcatttcctctattcttagtcaacccaatgttcccaaaatatgttcttttaccaatgtgtgcattcatcctagaccattttggagactcgtgaaaatttcacagcattcacccttcacgtgtatacacatctttttaaaaactacgtatgatcagagatttatttaaagaaaagctggaagtaatctcttttcaaaagcatgttagatttctagatagacaactcatattctttttctc

SEQ ID NO: 4740 - DNA, 405 bp, Glycine max
  unsure at all n locations
agcttgaaccataaccggtgagagtgtgaccttaaactgcgagtgaatgactagctttgagtaatggtcttttcatcaatctctgaaatctagaatgaaatgtatgaatgaggacatggtgaaggccataattgtatatacaagccaattgaccaaagagcttaccttgaattataattgtatcctttgctccctttgtgagctaaattacattttcaaaattgaaccttgaacttgaatgagtacctccagataccttgtttagattctaggagagcatatggttcaaggcaaacttaccccaaattcggnggagtggagctgagtgggatttaaagaanaaggtaaagcatcaacacacacataacaaataagttgtgttaaaaaaaaagcaataaaagaaaa

SEQ ID NO: 4741 - DNA, 465 bp, Glycine max
  unsure at all n locations
ngcctcanagagatctaggaaggataaagcggttgaaggaaccatttccgctcccgaatatgacagcctccattntaggagcgctgagcaccagcagcgcttcgaggccatcaagggatggtcatttctccgggagcgacgcgtccagctcagggacgacgagtatacccactttcaggaggagatagttcgccggcgttgggcatcactggttacccccatggccaagttcgacccagacatagtcctcgaattttatgctaatgcttggcctacagaggagggcgtgcgagatatgcgatcctgggtgaggggtcagtggatcccgttcgatgcagatgctctcagccagttcctgggataccctttagtgctggaggagggccaggaatgtgagtatggccagaggaggaaccggtccgatgggttcgatgaggaggccatcacccagttgctatgtatacc

SEQ ID NO: 4742 - DNA, 366 bp, Glycine max
  unsure at all n locations
agcttgacagcgagaataatgagtacaaatatatgatttattccttggaacagcagtcccaactgaacaatagtatggatatgcattctccttgcactttgngtattagcttacatctgatttagcttgttcgaccctataaagagcgcattcattctgtcaagaggccattgcgccccattatgccttggcttaatggtccccaactttcagggaaaggtttaattgttaatgctacgctgagctttcaatcttctgcttcaggaaatgggcatatcaatgggtctactccttaacacatcggtcaattgcattggttgatacatgagcatgtacaacttcttattcaggcattctttatatcga

SEQ ID NO: 4743 - DNA, 494 bp, Glycine max
  unsure at all n locations
tatatcttgacaccgatataactagctgcggaacagccatgcaatagaagaagaggacccttttattcaacataagcgagattccaatattacctattgaccacaagagcttacaacattaacctgctcgagggtccatattgttacaccgactatattaagtgactcttggaacacatatgagatccctaaccaattaacaaatgggcggactttgggttcttgataacattaaatgtaataacatactggtactaccaaatacacacaaaggttgtatgtctgtactcggacaacagaatatagttattcctgcgacactagacatggacaacattggaatatgttgatactgagactcgtgcacagaggcgccaccataggtctctaactctccaggtggcacgctaacttgtatgagttgatgaaccacttggactgcttgagttgactcatgagtatagtgttctttcattagactgtgtgctaactcn

SEQ ID NO: 4744 - DNA, 316 bp, Glycine max
  unsure at all n locations
taccaggcaatttttcaatcttngcaatttaaaaaaaatgacaccttagctaatttggttgctttaattctgcatatcctttggaaattgacttatagttgaactaactgcactactgctataatagctcataattggctttaaactagtggaaaatataacagaacattggacaacatcaacacacaaaataacatgaacccaaaaaaatgaattttcccattccacctcaggaatgcataacatatgacaatgttgggaataaaatgtcacaaagacacattagcaaacctagataattgttcggtcaattcca

SEQ ID NO: 4745 - DNA, 420 bp, Glycine max
  unsure at all n locations
actaagctcgtgtaatcattacactgatttggtattcgantaccagttactgtttnttattaaagcaaaagacgtaactcttcaaaaggtatttgactctttcacattggcttaagttgttctaaaagttataactctcctaaacggctttcttgaccagacatgaagagtctataataacaatgctttgctttgcattccaataatcttgaacacttattcatacaatcctttaccagccttgaatctctgtgaactacttctttttctttgaccaaaagttttcagagcttctggattccaaacctcgaaacttggctatcatcttttattctttctcctttgcaaaagaattgccaggactaccgctgaatcttttgtgctctcttctcctcttcacagaacaaagactaacgctga

SEQ ID NO: 4746 - DNA, 373 bp, Glycine max
  unsure at all n locations
agctntgatgcaacattnggagaggttaatgtatcaactatatgatgcgctccatgagaggttggatcaaatggagaatagagatcataatgaagaagaaaggaggagaagagggaatgatggtgttcctagacaaaaccgaattgatggtattaaactcaacattcctccatttaaaggaaagaatgatccggaggcctacttggagtgggagatgaaaatagagcatgttttctcatgcaacaactatgaggaggaccaaaaggtgaagcttgccgccacggagttttccgactatgctcttgtgtggtggaagtgattatgcaagttgaagtggacgtttccattgggaaatacaatgataagggacttt

SEQ ID NO: 4747 - DNA, 349 bp, Glycine max
  unsure at all n locations
cggaagctctcgagaaaatcgaatnntcatatcttttcacacggatgtccgattcggngacataactgatctagacgctcgaaattgaacaacggaagctctcgacaaattcgaatggtcataacttttcacacggatgttcggttctgggacataacacatctagacgctcgaaatgaaccaccaaagctctagagaaattcgaatggtcataacttattacacgaatagtcgattgggaaaataatatatcgagatgctaaaaattaacaaccgaagctctagagaaattccaatgggcataactcttcacacagatgtccgattcggggatagaatatgttgagac

SEQ ID NO: 4748 - DNA, 384 bp, Glycine max
agcttcttttggacctcgaacaatctatatttgctctatcagaaccatgctatgtgctcgcgactggtctctctcttcccttcgcaactggagtgtcactattgctaccccatagagctccgcgaaatttgatacggccatactgctccttgagagcccttttggtctcttgagcaaggcctgttgcgttagtggcattctcttcccgtaacccggcacactctttccgaacgtgtgtagcggccaacttgaacttctgattgtcacgatatgcctttcctaactcgcttttgagagctaggacttcttcgtgctctgtcggggctttaaaactctctgtgctgacgactttaacttggcgagcaatctaagcccagatatgaa

SEQ ID NO: 4749 - DNA, 453 bp, Glycine max
  unsure at all n locations
tcttatccaaggctcatcttggtggcgaagctccttcttctttggcttattccctagnggatggcgccgcctcttaccttttctcctttgccttgcgctgcatctccatggtggaaaaacaccattaaaggacctcattgaagctcaaagatccagtctccatacaagctccacaagcaagcttccatcaagtggtatcagagcacaagagcttcaagtaggtgctccttaaacctacattaatttttttttctttaccttctcttccattgctgattcttcattattctccatgtcatctcctcactggtctggatctaaatgctgttaacatgattctctacagctcccaccgagtaaacttgctatagaaactaattngatattctatggatcacatgtcttgctcttgctcttgaaccatgaattgtgatgacgttaggatcctttgag

SEQ ID NO: 4750 - DNA, 440 bp, Glycine max
  unsure at all n locations
agcttcagagccaggcctatgactgtcaattttattctgtcactaaaataaagaacccccattcttcagtatcctcggccacaacggtagtaagagatccaactacaatttaggctaacagtagttctcattcctaaagcagtggaacactttttcatttataagagtccaggatgataacctgagatcacttaattattaaataattaaaatataggaatttagaaatatatacatatagagataaggcgttgttgttgttgttgtatacatatagagatacaatagaaaatcacataaaagagtatgtgattgcaaaacaaaaaaaatatcattcattataccacanaagatacacaagttaatatgcaacgataaattattattcttctttctttgtcactattaaattcaattttctctaacataaacggaaccct

SEQ ID NO: 4751 - DNA, 470 bp, Glycine max
  unsure at all n locations
ntanatagcaacattccaataagagagaatgaaaacatatttatccaacagaagtatcctttcattatcctccagtgcaaacaagtacttataacattaacctgtttgttggtccatattgtaacaccgactaattaattgactcttggaacctatatcacatcccgtccaaatcaacaaattggcttaatttgggttcttcataataataataataataaaagattggaaagaaaaaagaaaaagaaaggttgaagggctcttcacggacaacagaagagagttaatcctgcgacacgagacatggacaatagtggaataggttgatagtgtgactcgtgcaaagtggtgcaaccatagttatcaaactctcaagttaactcactaacttttatgagtttatgagttcacttgttctctttgagttgactcttgagtaaattctttttttagtagactctgggtaaact

SEQ ID NO: 4752 - DNA, 507 bp, Glycine max
  unsure at all n locations
atttgacctagacatcgagcaccgagatccttagagacgaactgcggcatgcaagctttgaagngaagaggctataagtattgactattatgacgctataacagacacagaagaccgcacgataaattctcctccattggatttagccatgctacgaatataggangatgctgtggctatactaaatcgcactgcgtgttaagactcatcattctcgctttaatgggaaagaaagaacctccagactacttggagtgcgagaagaaataatagcatgtgctgtcatgcaacaacctatgacgaggaccaaatggtgaatcttgccgccacggagctctccgacatatgctttcgtgtggtggaagtgattatgctacttcgaccgtacctttccattgggaacctcatgctcagcgacttctgaagttctctcaccgtcctcacaatctcctcccgacctaacttgtcaactatcttcctcccctcccccatgataccctctgcccc

SEQ ID NO: 4753 - DNA, 434 bp, Glycine max
  unsure at all n locations
gcgagtgtttagcctagttaactttttttttatccaattcgattaagaatgagagatcccaaagagaaaacgttcgattgattgttcgctntattttactaanagacgttgatgttttattattatattactactttacctctttttgatttccaacgtggttacggtacgaccgaacgggcggaattcattgtaaccgaagataatggataatacaactcaaacgatcggtggaaatttattttatttttagggtaagcgagatatgacttacataaaatggcttaagcacgtcaaaagggggtataaaaagtaaataaaacgagaatgaaaatacacgatacacaatgtggaccaccatgggtacatagaatgaatcgataagcttggttcgaggtacttactcgttgaagatcgaagaacgatgaagaacg

SEQ ID NO: 4754 - DNA, 276 bp, Glycine max
gtcattcctaattgctctacaaccgcatattctctattgagctggcgaagaagaatgcggcatttacctgtggtgaaaaacaagagcaagcctctgctttgctcaaagataagcgtactaaggctcctcgtctagctctcgatgcctctggagtgggagtcgcagctgttttgatacacgcgggcaccctatcgcttattatcgcgaaatacctcatagcgagacagagcgttatgcctaaataatagcccttcaaacttaagaacattaccctgt

SEQ ID NO: 4755 - DNA, 155 bp, Glycine max
  unsure at all n locations
gatgccangagaaacgcgcctgattgtcaacttctatgtgactctcacactgtgacacttcactcactatacgggtgggtcaaaactctgcatcggatagaaccctacgcagataggccgtctcgagacctcgacagccaactctgacactgctc

SEQ ID NO: 4756 - DNA, 501 bp, Glycine max
  unsure at all n locations
ttgggctgtgccatgaaagtctngagatcccgagagtccgctcgagagaccgcgaggtatgcaggctggctcgaggctgttaatgtttaggctgtgctcttggaaagaaaactcgactatcgtgaggatactcggacaccgnaaacggcgtataatccactaccatatacacaaacatgagcgctcattaatagaggcggaggcgactatttccttataacagtcgctggcgacagactgtgaataatccgttatcaaagcacccattacaggaattgagcttcgtacctaaataatacgcgtcgttgcaggtggtgttgtctctaacagtgacacacatatacttggcaaaagcgactagatgcgtactcaaaggcagttagcggtaccaaaaactgcacatgtgcacatgttgggatgtctaaaaccatacatacacaactctctgaagaatctcgctatctcacataaggtgcacattcctgcacttctaacgttccg

SEQ ID NO: 4757 - DNA, 499 bp, Glycine max
  unsure at all n locations
ttagtctcgagaacctgcannacgcgacacatngaaactcagctggaggatatggcgacccatacatggttattattgtgttcggccaggacggaaccaagttgtcacataaccatgcgcgctaaacccatcgtgcgctattgaccacatgcacatgaactcacgtacatgcacgaaccccatatactactatctcgtaacagcggggcgccatcaattcgttcgagcttgcgacacatgcaagcacaacaactttcaaaacggacaagctataatagtcgagcgcaacatagagacgcagaanacgtctgctaacatatgaaccaaacacggagctnttctgatttagagaccagagtaacctattgcttcgatgcagttcgttaaccgttggatcgactccataatgttactagatggctagagtgcataactccacattgcgatcgtagggatctactcgcaaacatcctgaaataattcatggctacaatttccg

SEQ ID NO: 4758 - DNA, 508 bp, Glycine max
  unsure at all n locations
tttgacacttggccttggaccctcgaanccagcgattcttagagngacctgcggtatgcaagcttataagagattatatggttattactttttacgcgaagnacgantgtggtgcattataaatcgagacgctctaacccgcccactggacggactattaaaattcanatgtgtactaacttctacgtcggaggaccgattcaagcccatcaattaacgcgacccccaaaatctatcactggaagctcttgagctattccaatggtcataactttaaactctgatgtccatttcacggacacaataattcgagacggttgaaattgtactaccggtgctctcacgaacattgaatgcactaaacttttcccaacgaggtccaggtcaagcgcataactcatcgtgaccctcggaattgatcaacccaagcttatcagaacacctctggcgctgactattcactcgcatctcccagccgcgccgtcacatatgcagatcttccacctcc

SEQ ID NO: 4759 - DNA, 411 bp, Glycine max
  unsure at all n locations
agcttgagggaaaaattgatgccttggtcattctagtaactcagcttgccatgaattagaaatttgcatctgcacttgttgcaagagtctgtaatctatgttttctgcagatcaccatacagatctatgtccttctttgcagcaatctggagtcaatgagcaacctgaagcttatgctgcaaacattcataatagaccccctcagcagcaaaaccaacaaaataattatgatctttcaagcaatagatacaatccaggttggaggaatcatccaaatctgagatgggcaagccctccacaacaacaacaacagcctgtccctcctttccagaatgttgccggnccaagcaagccatatgttcctcctccaatgtagcaacaacagcaacagtcacaataaaaacaacaagc

SEQ ID NO: 4760 - DNA, 462 bp, Glycine max
  unsure at all n locations
aatgtgacactattatctatgtgtatgtgtagttagtctcttatggcaattntgttattgtaatagacttactgagggaactagttctatttttttaattgttgtgtgttgaattttaggtactttaagtttgttcaagcgtttactaggttcagaaataactgttttttggtatgtataaatatttacttgtatttaggtcacatgaatgttttcttattaattatttagtaagtatatattgtatgattttgattaaatgttacagcagaggtttcagagtttangaagataactntgttctatttttttttttacaagtgttcacttctgaaattcaactgttaattcacacttaaaatngatcaatttgtgttacatattgtggctgcgcttgtttgttagtgaggttaaaaatttgttcttcataagataatgatgaatattcatgttgtaaatatc

SEQ ID NO: 4761 - DNA, 543 bp, Glycine max
  unsure at all n locations
atgatcccttgacnntctgcgcaccntgtagagacganactcagaggcactgcaagctctatcacgagtaatnggatgttagttgctccctactcatttttgaanatgagatggcacgctatcgctatgcgcttggacgaacagccaagagagtatctggcagagccgcagacatgcacgatcactcacattcgaggaccactgtggagctctgcagaccgataccaggagcctaccttagagccatgaagctcatacgaacggtacatgaacatgtacataatgcgcgaatatccaacgctaacgaacatagcaccatgaagactaacgcaactgtgacactgccatgccagaggaacaagcatccactctcagcagaatgatctattctaaggctcacatcacaaataaaagtgaacaggcgagaacacctacttggactgccaacaacattaccccgatgatacccagacattcacagaacacaacgcgatcccaccgcagacgcacgcactagcacgtgacatacgcgtctgtcaccct

SEQ ID NO: 4762 - DNA, 158 bp, Glycine max
acgatccaaacgataggatacacaagaaacggacccgatgtagtgatgccatcctaccccccacgggcattggatcgaacactccaatacgaccgggcctactatgctcgataaagccctacgcctctcatgcgccttagggtacatgtctgagccca

SEQ ID NO: 4763 - DNA, 355 bp, Glycine max
  unsure at all n locations
agcttgaatctttcgggtgaactcgaagggtgttcaatgtccattgttatataattgcagaaacaagacaaccccagaagcaatttaacaagacagcactattaagacagtttttttgtcacaatgatgagaaagtcacaaggaacaaacaaccccttcctcttcaacaaccaagcacaaatttgatgactntttgcagtatattaccatcataccctccctaatattcgtaaaccaaatcatccaccaagtgacgtgtttgatttagtttattgagaaatataataatgcattgcccactgcatctgcatgaatcaattgacgcttaagttgtttaaggctaacaagaaatatc

SEQ ID NO: 4764 - DNA, 415 bp, Glycine max
  unsure at all n locations
tgcttctatagtatttccgcctgccacctgacgcatgggtcttatttaacagatgttgngntngnatggataaccacttgnggtatttncgcctgccacctgacgcatgggtcgggaatagtaaatattgtctttgtacagataatcaattgggtatattcgcttgtcacctgatgcataggtcatgatcagcaaatgttgtgagaccaaaagagtctcagccggaagatgctgacatcttcagaaagggtgcagacaaccacattggtctctgcgtgtcaacgggctcgcttgcctcttgatgacgaaaggtgcggataaccataaagtatgtctgcatgctaccgaacccttgagtcacgatatcaaaggtgagactttctcgcggtctcggtcggaagacactgacatctct

SEQ ID NO: 4765 - DNA, 457 bp, Glycine max
  unsure at all n locations
agtcacctgcggcatgcaagcttataagaacgaaattgcctaaatcattttcaaatatgcatgtgaattaggaagcatcaacaagaatcaagccaaggctattgtgcaagcaatggggcaaaacacaccaaaagattatgatgatggattgctcgaattctcacaaaggtaaacttatcactttcaaattgagatttcaaaactatcatgacatgtaaaggaaaaacaaggatttcaagtcacaaaatgtcaagagacttttattttcagaacaattacccattacttgaacatatcctataattcanagacaaacatgcaaatttaacacaacaaaactaacaaaattaaactagaacccaacaaaactaacaaaattaaactaatttaacacaactaacaaaaccaaaaccaaagaacacactcnccccccatacttaaacaatacattgtcctc

SEQ ID NO: 4766 - DNA, 427 bp, Glycine max
  unsure at all n locations
gagatggtatctggtcttagaaaataatttgctaagagccaattcggtgcgattggccaacctgaggaatggtgtagtcttgctgctgactacttgcattgtggccccctgcagctcccattcatatacctagggatgcctataggtgttaaccctagaaggaaggtggtgtgggagcctataatcagaaaatttgaagccaaattgaacaaatggaaccacagaagcatctctatggctggcagaattaccttaatcaatgctgtcttgacagctntgcccttgttntatatgtctttnttcagggccccttcagcagtcatcaagaggctcactactatccaaagacaatttctttgnggtggaaacttggaaggaaaaaagatagcttggatctcatggcagcaagtgtgtgctcctagagaaa

SEQ ID NO: 4767 - DNA, 231 bp, Glycine max
  unsure at all n locations
tagaggatgcaagcttgagatgaggaagtggtgaagggagattctttctgctcttattgntgaccacacagtggtacctggagatatgtcgngggggtcaagagaccttggggacgtcaagtggggtgctattggccaaaaccaagcttgaccaatcccgaccaacccgggcataatcggtcacggagaacctgtgatgtacctaaccaggcgagcttctggcagtcaaca

SEQ ID NO: 4768 - DNA, 450 bp, Glycine max
cgattgtcacgtgctcatgcattatttgttatccgtggctatacgagacatcttgccaaacaaagacaggttagcaataactcgcctgtgctttatcttccatgctatatgtagcatagacattgatccagtcatgtttgatgaaatggaaaatgaggccgcaattatactgtgccagttggagatgtattttccccctgctttcttagacatcatgattcacttgattgcgcatctggtcagagaaatcaaatgctgtggtcctgtttatctacggtggatgtacccggttgagcgatacatgaagatcttaaaaaggtatacacagaatctatatcgttcacaagcatttatcgttgagaggcacattgcagaagaagccattgaattctgtctgactacttacagaatgctaaacctgttggacttcttgagtctctgcatgatgac

SEQ ID NO: 4769 - DNA, 317 bp, Glycine max
gactaggcggcggtcggacgatggcgcacaacatggttgccacatccacaatgcgcgcataaactgaccatcccctgtcgcccacctgcaactgagctcacgtactcccacgtagcccatatcctcgattctatcaacaccgggtcccaatcaatactcccaagcttccacagcatccaagcaaaacaacattcttacagcacaagctatcgcacccaagcaagactgagcataggaagaaaactgtgctcaacacatcaaccaaaatcacaggtcttctcacttaatgaccacaggaaccattccttcgatccaat

SEQ ID NO: 4770 - DNA, 471 bp, Glycine max
  unsure at all n locations
ntgcggatntggtcttcgccagtgaaaggatcgatgtgtggttctataataggcaaatttgatcatcctactacgacgactgagaacaatggggctaataaagagggtgaggatgagggagaaacccatgctgtgactgccattcctgtaccgccaagtttcccaccaacccaacaatgtcattactcaacccttctccttacccaccgcccagttatccacaaaggtcatccctaaatcgacaacaaaacccacctaccacacaaccaatgctaaacaccacctttggcacaaaccaaaacaccaaccaagaaatgatatttgcagcgaaaagcctgtaggattcaccccaaattccggtgtcatatgctaacttgctcccatatctacttgataacgcaatggtagccataaccnctgctaggttccctcacacccccatttttctgatgatatgactcgaacgcaaca

SEQ ID NO: 4771 - DNA, 461 bp, Glycine max
ccaagcttagcggacagggccgactaaccgagttcatccaaaaaaccagaaaatcaacataaattgatgaactcgcttagcgcacaggcgcgcttagcgagcacatcgaaatttccagaaaacttggggcttttcagccccctaccataggcctctgttaggcctcaaaacctaatcaaaacaacacaaaagcatgtacattatgtgcgaaaataaacccctaacaacatagcatctaaagactaacctaactgtaacattgcaaagcacaaaatcaaagctttaaactagctacagtagtcttctatcctaaggttcaaagcaaaaataaaagtgaagagttgagaacacttacttggattgcagagaagattaagcacgaggaagcacagagaagcagagaatacaatggaagcacaatgcagatgagtgcaagagtaagtgagaaatgtgtatgtaat

SEQ ID NO: 4772 - DNA, 447 bp, Glycine max
  unsure at all n locations
tgctctacattacattgatgtttgtatttattggaggatgttgtatgccattnttgttttaagggtagcatttcttggtaaaactaactttccaaatgtttgcattcgcaggaaacggccccgaggaagtgatgcaatcctaccccccaagggcattggatagaacactccaataagattgggccaaaaatgcaagagaaggccctagggttctcatgagccttagggtagatttctgagcccatgggccaaggttgggtccaattatctttgtacatattagactaggatgtcattatatttggtccttgtatttagggatccatattgtaggtagggtaccctagaaatataggattnttcagcccttgtatttttgggcacctagactagttnttgtattaggggtagttntgtaatttcacatgcactaagtggatatttgat

SEQ ID NO: 4773 - DNA, 518 bp, Glycine max
  unsure at all n locations
ntttganncccttggacntcgcagcacctgagatcctatctagacgacctgcangcttgcaagctctaaacagactttcaaaattaacattttgtgcgactaaggaagcataatctggtacttgaaccgagcggtcgctcaaacgatgatgcctcattaactatatttacatgtatagggactgttttacaacgcactttggaaagattattgcgctcgggtatgcaaggctcaaatatgatttttgtaactggaagagagatatctctacgtccataaagtgcagctacctgtcatcaccattcattaacccaattgctggccaatgtctatcttaacatattcttctagcacattattcataacaggtctgaacattgtaaactcatgaccgccactactaacaatagagctctattgtcattcattngcacaactcttaactaaccatgcgatccgacgcgtactatcacctcttttgtactaatggcggctcatgttaaagatctacacgcacg

SEQ ID NO: 4774 - DNA, 346 bp, Glycine max
  unsure at all n locations
tgtactatnggtcatatgcatatgatacaatcaaagccttctcttcaccaaccaggattccgaatgcttgcagtgcaaacaccgctgatatcaacgctccgcgcgtcttgttgctggcatatttatacatgattgtggctgaaagagggtagtctccaccgatggcaaacgctagacagaatctgaagaagcatagagaggccatgacaccctgtggagctgacccacaggagagttgctgggcaagggaccacactaccatgagaatgagcgttagtgcccatactctatatctccccatttaggcaccaagccaaccaaataataatggtccgtattatgcgcc

SEQ ID NO: 4775 - DNA, 174 bp, Glycine max
agcttcaccggatgatgccgatctatcattttctattcgacatcatacaactgatattcagggaatgaatagaataatcactgcgcggtgtcggtcgttatatggaccagaatgatatctgtcagccgacattgcgcaatttgttttacaaacgctagcgataatggatttttt

SEQ ID NO: 4776 - DNA, 251 bp, Glycine max
  unsure at all n locations
atactcacctgctctanattacattgatgttagtatttatgggacgttgtatatgccattngcgctccaagagtaacgtgccactgtgaaaactaactcttccaatgtttgcctccgcaggaacggttcctatgaatctggactcctataggtgcaggaccgacaaggcgggcgaaggaactacctctcgcccggagtactacagtcaccgctttaagagcgttgtacaccagcagcgctttgaagccatc

SEQ ID NO: 4777 - DNA, 155 bp, Glycine max
gtatcaaagcttatcttatccagattttagtccatccggagtttattttatcgagaatttatgtgcggctagattttattgcggccggaatttattttatgccatcctatcctattgtgcccagattttattttatttcgattatgggcctggac

SEQ ID NO: 4778 - DNA, 415 bp, Glycine max
  unsure at all n locations
tctaccntatcaggatatataggcgactgtaatgacatattatgtatgttacctacgttctgaacggctcgaatgctatcaaaggcttcatcagataagaattccatatcaataaacttacggtcgattatggaacgagctgagaaaagatttgcgtaccgattctactattcttctgaagaaaacaatggggaagatgacaatgagggtggaattggtgctgtggatgcgctagcggctccggaacgatgagctcttgaagccgaagcggacgcggaagaaccctttcgtttctttgacgattctgccattcgaaggagaccctgcagagtccaatcggcgagatcaatataaaaatgaactagatgaagatggcaatttacgggagttgattcgatgaagaaatgagtgagat

SEQ ID NO: 4779 - DNA, 230 bp, Glycine max
  unsure at all n locations
atgcaagcttcacacaagttggttgttggtggtatttgtttgattacatgataacctctcatttgtgtttagcttgtattattggttttgaagaacaccctttgctacaagtcaaacaattatacttggtgatagggccattagggtttttcttcaccctaaacacctatttacaaccaattggatccctacatggaggcagttcagtaagaganaatgaaccatttttc

SEQ ID NO: 4780 - DNA, 449 bp, Glycine max
  unsure at all n locations
tatcgnttagcctaattcagatcaaattgttatgggcttatctcatncttggccagcttagtggaccaaatcagcctgagatgcaagggttaagcgctaagcgccagagactctcggcttagcgcatgaccaaagatgcgcttagcaaaaggactgtgtttcagaagaagaaaaattctaagttatttttcagtccctttcttaagaaattgaaactcttatatctatcatttaaaaacaagctgatataccccaatgtaatgattatgaagcaagttccacatgatatactgcataaaatgcagagataacagaaattaaaactgggttgcctcccaggaagtgcttctttaacgtcattagtttgacacgtttacatccatgggtgatcaaatgcacagagctatgtgctcttgtgaattcttcaccatggtacagtttcaacctct

SEQ ID NO: 4781 - DNA, 372 bp, Glycine max
  unsure at all n locations
caagcttgtaccaaaaacaaaaaattntnctaatttaaattacatgacaatgagatcgctatataagatactacaaagatcacattttacaaaagattcatatttaaatacccatttttggcgttttttttttcaagggtgtggcattgccgagagacaatggagggtgaccatttctcatgtttggacgtcaaagaacccataaacattattcccgttctccggttctgtcaaataacagctaaaaacaaagccagaaaatccaaaaaaaataggaaagtgaccttttttcatgttcaagtacccatgtttgggaattttctccgtaggtgtggcagtgccgtgagacaatggagggcggccatttctcat

SEQ ID NO: 4782 - DNA, 173 bp, Glycine max
catgtagaagagtgataactcttagtaaaacctaacaccatttcgaacactgctaaacctttcgaacagttacatctttaggtctattcataaacaagcactggtactcgattaccaaattacagtgactgattacacactgctttgaaacgaaaggatgtgactcttcacct

SEQ ID NO: 4783 - DNA, 453 bp, Glycine max
agctcgagaggaggttccagcatgacccggattagttgtatatctgtattacggctcagcagcgagtagctgacttgtctggctatcatttcaaagaagggtttgacaccatactaatcttcttactttacagactttgatggattatcttttacttgtctgattatttgacattaaatctaaagggaaaataatatgcttgttgaccttgacaatatacgcataccaggacatggataaatgcaaagcttttagtttaccttgttaaaacttgttttgtttgaaacagacaaggatatgaataccagtttattgagaagattgttgaggaggtctctagggagattaatctttgtcctttacatgttgcggattacccagttggactaaagtcacgagtgttacatgtaaggagagctttcgatgctggatctgatcatggcgccacatgat

SEQ ID NO: 4784 - DNA, 470 bp, Glycine max
  unsure at all n locations
tactgcgacgagtgcgcttcttgaaagaataccggaaccgtactcacggctctgtataacgncaccgggctgcagcgtattctccattccacaatctgcaacagatacaaacacaaaatcacatttcactcttaaaaccctaaaccctaaacacacactgttaacattggcaaataaggtaaacgataaacgcaattaggtcaaaaagagctgcgattagataagaaacctccgcatatgtagctgactggctcaagctgaggatccatcgctggttccagcgaggtgtaaaggaagaaagttctaagctntaacctttagctntctgctcaacgaagaaaatgtaaagtggctcagaatcagaggctctaaaacgaaggattgtgcttcatcttcagctcttatgggcccaaattcgcaacttacatgtccaaaaccgagaagcctctctattctgtatttctttttac

SEQ ID NO: 4785 - DNA, 463 bp, Glycine max
  unsure at all n locations
agcttgttngcattnggtcccacttatgaaatgactatattttaataataagctaattagagttattagatagatatattcggccgtttgtgtagatgggaaggatgagattctgaataaagcttccttctgggcttacaaaggaagggattcatgattattgatcatcatcatcaatattattatttctttttgaagacaaatctagaagccaaatttttcttccagtggaccctaccctctttcttctccaaaatgttgctcacataggaggaatttggttggagggctatacgatgtggggacaaatcacttgcactttggtgatcaatgatcagtgatcacaaacgcaaaaacaaattacaaccgcttatatggtttataaaatcatgcatgtcattcttctttttacagtctatcatgtgtgctcttcattcatacactaactgagtacatactactc

SEQ ID NO: 4786 - DNA, 449 bp, Glycine max
gtaaatgctgtgaaacttattcatatccgttttcttggaaattgtgtcattgaacttcttggcgtggatcttccaactgcatatcaacatgccttcacttacatccggcaactggctacaattttaagggaggcacttaatacaaagactaaggtgctgtttatttgtccagtacatgttattttcttattaggcactgtaagaagtgccttgaacttatagttatcctaacaaactggttatatatggatattaattactggcccttagttcttacaagtttggcatgtttttctatatttgtctgttaaactggttctttaaccttgcatgtaaaaccttcaaagttctgttatttgtctgttacagttactaggcactcttgattattgttgaaaaattagaggcactcataaacctttcatgttgttgttgatagggattgagaa

SEQ ID NO: 4787 - DNA, 462 bp, Glycine max
  unsure at all n locations
agcttgcaggattatggngtacccatcacaattggtactatgtggcgttcgggcgaaggngcaagacaactcttcacatncacaaatcacacataaagccaccatccccagctggccaccttaactgagctcacatactttcacggaccncttaatctcggtcctctcaatgccgggtccccatcaattcttccaagctttcaaaacatncaagtaattcaacatccaaacatcatgaactatcaaagccaagaaaacaaggcagaggcaaaaaactctgcccaaaacacaaaccaatatcacagcttttcacactcaaataccccagtatcattctcttcgttccaattcgttaaccgttggatcgactcaaaacttttactggaagtctctagtacataagtctacattttgaccgttgggatctgcgattaaatgtncagaacccaatatgtactaccc

SEQ ID NO: 4788 - DNA, 409 bp, Glycine max
  unsure at all n locations
atgctttaatcagtgttttctctaactcatcttttctttaaatcaacctcccggtgtcaaaaatcacttgatccatgacatgcactctaaaatactttgtcttatgtttaaggtgtttcatggaaatacattaaactgtacttcatcatcttgtaccttgacagtgagtgttccatcatccacatcaatcacaactttagaaatcttgatgaaagatctactaagaatcaattgaacttcattgccttcatccatatccatcactgcaaagttgactggaaagacagatttgtcaacttttatcaatacatctacaacaatgccataaggaagctgtgttgttctgtcagctaactgcaaacccatccttgntggtctgatttcaacttctcctatctgcttgatcatg

SEQ ID NO: 4789 - DNA, 384 bp, Glycine max
  unsure at all n locations
agcttncatcanaatctaccttattatataacttagagatcttgnttcatctgttcttgcgattccaccttttctcatatcattttgcatgtttttgctttctgtcttgaatggnatagaggtgagggtcgattctttgaggatcctaacgagggtttgataatcgattntgaccgagaagtaagtcaaacaataaacgaagaagaggaagaggacgtcctttcaccaaagttggagaggttgatcgctcaggaagaacacgaaatgaagcctcaccaagaggaaaccgaactgataaacttagagaccggagagggaaagaaagaagtgaaagtaggaaccagtatgatcgcacctatccgccaaggtttgataacccttctt

SEQ ID NO: 4790 - DNA, 357 bp, Glycine max
aatgaaagtagaaagtgttgaatgaattaattgatctaacttgcaaaacaaagccttgcttttatagactcttcgtgtctggtcaagaagatcatttagaagagttattacttttagaaaaacttataaccaattcgaaaaagtccaaaaccttttgaagagttacatcttttgatttattcagaaacagccactggtagtcgattaccaaattagtgtaattgattacacaaagcttttaagtgaaaggatgcgactcttcacctttgaatttgaattgcaacattcaagggcactgataatcgattaccaaaacattgtaatcgattacagctttttgaaaataattggaacttt

SEQ ID NO: 4791 - DNA, 240 bp, Glycine max
  unsure at all n locations
agcttgactntggtttagacatgattgatgcatgatttgggacttgtaggaattgatttgggcaagaatggataaggcgaagtgtgattttcgaaatctgcacttatgcagaattttgctgtcaaaataggtgcagcaggattttggctctgtgcagaaaaatgcttgtgtggttggctgtggaaagagcagtacagaatgagttctggatgtctgctagtaaatcccaacggtcacaat

SEQ ID NO: 4792 - DNA, 438 bp, Glycine max
  unsure at all n locations
ntgaaggtgcgtagcccaccattntccatagtagaatactgttaatgtgtctactatcattgtcatcgttttttcgtcattgaggtgccacttgagctgccaggttctccacctttgggcgtattctttgaaagatcggtgcccccttttttgcacatattntgtagttgcatcctatccgaagccattataccgacactgcctaacgaaggcaaccattaggtcctcccaggaatggactcgggaaggttccaagttagtgtaccaggtaacaactaccccagtaagactttcttggaaggaatgtatcaacaattcctcatcttttgcgtatgcccccatcttctgacaatacatctttagatggttcttggggcaagtaatccccttgtacttgtcaaagtccagcaccttgaacttgggaggggtgatgatatt

SEQ ID NO: 4793 - DNA, 263 bp, Glycine max
  unsure at all n locations
agctnttgacggactataccaagctctaggttctttgacggagaaagatctatatataggcttgctaagggtagagagaggaagactagagatttggatcaagtaaagagtgttaaggatgaagaaggcaaagtcttagtgcaggaaagagatatcaaggaaaggtggaaggcgtatttccacaacttatttaatgatggatatggatatgactctagccagctacacccaccagaataggaccggaactataagcactatcg

SEQ ID NO: 4794 - DNA, 423 bp, Glycine max
  unsure at all n locations
tgttgctcatatattgagtgtgtgattaattgnttgtgtatatgggtttgatggaaccaacatttatattagttgagcatggttgctggtccttgtttgtaggggctgttgtagcctatgtagataatttccggcttgtagataatagctgggagcttatagataatgttaaagataaaaatttgcttatagataaaaggtagaagataattgcaccttgtagataatgtgtaggctcatagataattaaatacctgtcaatagataagatattcaaatacatttgaatattagcaggctagagataacctgtatgttggggagtccggctgctaagggccacgcatctgcactcctgttgcaaggctagcgtataggagtgacacgtgtctctgactgtcatgtangtcctagacagtacat

SEQ ID NO: 4795 - DNA, 441 bp, Glycine max
  unsure at all n locations
ggattcttttattattgcaaccgcgagggcgcaacanacacagacacgcccacacgctcagtcgcacaggtgcacacactcactcacactcacttatacacatacacacgactgcatacacagacatttgcacacataaacacattcactcacttatttccggacacacacatagaaacacatattctcactcagagacacactcacactctctctcgtgaatacggacgcacacactagatagaaactcgaccgcaggctgtcagataggcgcacacacacactcgcacttctgtgattgaaagacacacgctcagaaactcatcacacactcatagagactcatacccacatacagacacatgctcgcagactcacattcacacgaccacatagagatcctctcacgcctacacatagagacacacacacactctctcg

SEQ ID NO: 4796 - DNA, 474 bp, Glycine max
  unsure at all n locations
ctcagcttataaggcacctgttctagctctttctgactcttctatatcttttgatctagaatgtgatgcctctggagtgggagttggagctgtattgttacaaggtgggcaccctattgcttattttagtgaaaaaattcatagttcccccctcaactaccccacctatgataaagagcgttatgccttaataagagccctccaaacttgggaacattaccttgtttccaaggaatttgccattcatagtgatcatcaatcacttaagtacattagagggcaaaacaagctaaacaaaaggcatgcagaatgggtagagtacctatagcaattttcatatgttatcaaataccaaaagggaacaacaaatgtggtagctgatgccctatctacgagacacacattgtnttgctccctangagctcaaattttaggatttgatcatatcanggacttggatgctttagatgaaca

SEQ ID NO: 4797 - DNA, 341 bp, Glycine max
  unsure at all n locations
agcttgtaatcgattacacatatactgtaatttattaccagaagagagtttcagaanacattctcaacagtcacatctttttgtgtgattcttgaatggctatcataggcctatatatatgtgacttgagacacgaatttgataagagtttttcaaaacaaaaaggtcttatcctcttataaagagaaatcgttttatcctcttacaaattccttggccaaattacttgtgattcaataaggaattatttgagtgctcacattgttcaatctatctctttcaagagagatttcttcttctcttcttcttcattntgaanagggattaagagaccgagggtc

SEQ ID NO: 4798 - DNA, 451 bp, Glycine max
  unsure at all n locations
tctacaataaanatccatatccttatgcntttataagtaacattcaaaggtaaactataacatgtttttatttatagtttaattcaatgtccaacgcgttgttataaaacaagtgtctattttttttttgtgaaaaccaacacccatgtattgtatactcttacacttccgtattgacataactaacttaacataaatgatttatattctgttagtgaacgtccactcgattgacttgcacatgatatccatcttgaggttgattctctcgctagaacattctattatttgaatttttcctcttgatgtatggattgacttgcacatgataacctctggatttcaagttatgtgctcttacagacaaaaaaaaaaaagaattatctacaagagcaacaatagtacaagtagtggaagtagagaacgtgcctatagcaaaaaacactatacc

SEQ ID NO: 4799 - DNA, 293 bp, Glycine max
gcttagagaaaactttcttgagaagcaagatcttattaactctcacccatctaagaactaagctcacctgcatgagaaggtcacttgagaagctagagcttagctacacacagcgatctaaaagctagactgacctcctcgataaatgacatgataatacagaagaagtccctactacaaagactactcaaaacggcctgaaaacagggctaaaacgctatactaatagaatgaccatagtacgaggcccgaaagagggacaaacctattctaatatttacaaagaagagtgg

SEQ ID NO: 4800 - DNA, 248 bp, Glycine max
  unsure at all n locations
agcttgaggctcaactatgnatgttcataacttattactgncgcncaagacatacaagtgagcttgtaaaaaatcttctggacttggagtgatcacatgcaggcctcttgaacccttgccacccaatctgtcatcatgccgagactcaagaagaccaacaggtttagccttctaatatattctgaacaaaattcaacggcttcttatgcaatgcactcttcaacaatagatgcttctagacgatatag

SEQ ID NO: 4801 - DNA, 352 bp, Glycine max
  unsure at all n locations
ngagttntgattggcagaagaagaacagatgattatccagttattggataagncataggaaaatattgctgattatcagcataactgacattgctctatgcacatntgatcatcatgctggagctttctcatctattggctttgtcatctaacctattattaatatttattttgcggagattatccacttatatatcttctaacttctaaatagtcatgagggattctacatatttgtaaacgtatgttgccatgaacgttttcacaacgtcaaacaaatctctcttgctctgaggtaataganatcgccattcttctctccctcaactctaagctttcactttcttcttac

SEQ ID NO: 4802 - DNA, 470 bp, Glycine max
  unsure at all n locations
catgcaagcttcctcggtgccatttcctgcgaaggcatatantttttaaagttagttctaccagtgngacactactcttaaaacaaaaatggcatacaacctccccccataaatacaaacatcaatgtaaaattagagcaagcttatgcgcatatttccttacgaacgttcacttgcacaagacattctattaactaagaaaaaatgcacccatatacaatcaaggcagcttcgttatctagattatttacatgtacttccaaggtgtattngttacttacatcacacacatctccttggctaaatttacatacatgcatactcaaagcattttggggtaccaaaaattgcacatgtgcacatcttggtatttctaatacctatacaaacttcatgttgaatcttgactatctacacaataaggtgctacatttcatgctctttttaaagttttgctacctaaagtcgca

SEQ ID NO: 4803 - DNA, 502 bp, Glycine max
  unsure at all n locations
ntttggactgagcagcgaacttcgataataagcttcgaggtgtgtagcccaccttatttatagtcgaatactgttattgtgtctactatcattgncgtcggtgtgtcatcattgaggtgccacgtttgagctgccaggtatctcacacctattggggtgtattctctcgaaagatactgtgcgccccccgtattgcccatgttatgcagctgcatcctatacgaagacatcatactgacactgcctaacgaatgccaccactatgtccttccattaatgtactctggaagagtccagctagcgtaccatgcaacgagatcccaggaagacattctcggaatgaatggatcaagtatcccgtatattgtgcgcatgctcccatcttccgataatacatcattagatggttcttgggcaagtagtcccctcgacgtacgcaagacgctaccggaacttcgtcgtggatgatatcggctctagaacaactctttgggttgaaacg

SEQ ID NO: 4804 - DNA, 370 bp, Glycine max
tagtttacacgaacaaacaacatgaacaaatagattaacatggggaatgattctagaacaataaccgtatcatgattatttattttgttagagatggtatacattacttgtcagtatacaattaactagtattgcattggaagattaaaatacaaattatcttgagatatatttttttttctgacacagttgttttttttatactacattattaatgtcgaatatccatagactttgtcaaagattagctcttattagaatatttgaatagccaagttttctcagttacaggactcaaacctcacatcttatttaagaagatcgaatttagcattacggagttattaattcttaaacaactattcatatt

SEQ ID NO: 4805 - DNA, 462 bp, Glycine max
ggctcaatctttacatatgagtatgctaacctatgaaatcttaatgtttccttattacgataaaccaaagagaaggaatacgggtatcatatattcgctccaaaaaaatgtcaaaagataggaaacttaccacattttgatgagtgggatcatcttctacgatagtttcatatgaagattgaatcgaaacaaagggacaaatctcaaatatggattgtgcatctgctacggagtataactccatatatagccaggtgtgctgaacagaacagtcccatccagctcccactgtctacatgaatccacttcattgcgaaccattactagacattaatcacaagtcatccaacattgagattgctagtgatacataggatgaagcacggaaaacactcagaagttcttacactaatcccgcaactagaatctcgctttctttacgaactccacaacatctcttct

SEQ ID NO: 4806 - DNA, 230 bp, Glycine max
agctggcatcattctgtacatagccaaaagagattaatcttctctaagcaaaaacgggaagttattaagttgtcttcaaaatgatagacaagagtaagacatactttgagtacaagacaagggcacctttacttttcatatttaagacgtgtttgagtaaatagcttagtatttgttgaataagttcttatcacatgaaacttatgtataagtttacagtgaaggttatt

SEQ ID NO: 4807 - DNA, 307 bp, Glycine max
aaaagcttgagcttgaccttcttaataaacaaatcaagtcgagtcgaatcttagataggtcgagtcataggtccttaacaaacaactcaattcatttccatctctaatggggagagggcaacctagtagagattctctcccttccttattttttttttagaagtaaaattcactatactaaaatattacttatcatatacaacaatcatgatttttatgtaaattataatatttctctattgaaaattaatgattaattcctgaaacattgagattactcaagaaattaattcctctcccatatcta

SEQ ID NO: 4808 - DNA, 374 bp, Glycine max
agcttatgcagcatatatatactatataccttctctgcgcagcagcagactcatacgctggctgacaattatgacgtttccagcagccgatacaaccctggatggatgaatgcccctaacctcatatgtgacaggacctcacaacaaccacagtagtctggtgcttccttacaaaaagctggtgggccaagctgaccatacattcatccaccaatccaacaacaacgaaccccccggacacagccaacagttgaggcgcctccacaagctttcctcgaagaactagtgaggcaaacgactatgcacaacatgcagttttagcaagagaccagagcctccatttagagcttaaccgatcagatgggacaattagc

SEQ ID NO: 4809 - DNA, 64 bp, Glycine max
tgtgctggacctggatcacgcgtctaacttctctttcaattctatgcgagggacgcgcgactgg

SEQ ID NO: 4810 - DNA, 388 bp, Glycine max
agcttaatcatgaatgccccgacttgtctatttatttccgccaacatactttaggtatttgcactaccacaacatctgcgggactcgctgtctgacctctatccatggactcacccttcaggaagactttcggaccagggatctcgatgtccatggatccactaccaacttcattaatacttgtttgagctggtcaccaagtcaaaccattggttatgatactaactgatgtgaaactgagggacgagtccatgcatggaggggaaaacaatgcgtcccctgtatcacaagtctacttgacgagtgagtccatgcacgacaggctgagcgacgtgtctcgtagccatgaatcagtggagagtggcgatcaaggcactatgacatgttg

SEQ ID NO: 4811 - DNA, 453 bp, Glycine max
  unsure at all n locations
ngatgtcattcanaacacactatgtagacctaaatgattattttacatgcattggttatgtaattgtattcattatgcgatataatttgttgtaacccgttactaaccaattaatattatcaagtactcgtttggttaagcaaggaaattgttggtccaacaaaaatcatttatgcgtgcaacatacatcattgtcataattgacaacacataatgacatgcatgcgtcttacagtttgagtgcgacaacacattggctgacttcagtacacattntgaaactagcagtcgttcgacaacacattggctgacttgactacacattagtgacaacacattggctgacttgactacacatttacgcgtgtctattnttttgtaaacaaaattaaacaaaggctcggtcacaaccatctatatatatggcagactaggctactaaatcacacatta

SEQ ID NO: 4812 - DNA, 465 bp, Glycine max
  unsure at all n locations
ctgaggcatgcaagcttgcctgtccgatgcagcagtattgatgttccgagttatgttggggaacggttacgaacccggaatgggtttaggcaaagacaacggcggcataactagcttgataaatgccaaaggaaatcgtgggaagtatggtttatgctataaacccactcaggcagatataaagagaagcatcgcgggaagaaagagtggtggtcaaagctcgcagttgagacaagatagtgaaggaagtccgccctgccacataagtagaagctttataagcgcgggtctgggagacgaaggtcaagtggtcgcgatatacgaagatgatgttccgagtacattggatttagtacgaccatgccctcctgatttccagctaggaaactggctagtggaggaacgccctggcatttacgcaacgagcataatgtaaacctttacgggtttaanagctctatagtt

SEQ ID NO: 4813 - DNA, 387 bp, Glycine max
  unsure at all n locations
acactatgaaactcagcttctaaggaagttntcttaagaaagcttctcaaggaagttttcttataaaagcttctcaaggaaganttcttaagaaagcttctcaaggaagctacctagtctataaatagaagcatgtgtaacacttgttgtaactttgatgaatgaaagtcttatgagatacacttcaaagttccacttctttccctcttttattccttcaatttcgggctccccccttctctcttntcttttcttcattaaagcatcctcttcaagcttcttatccaaggaaattcttggtggtgaagctccttcttccttggcttattccctagtggatggggccgtccctctcctcttctcctttgccttccgctgcatctccat

SEQ ID NO: 4814 - DNA, 423 bp, Glycine max
  unsure at all n locations
atcttagagcacctgcagctgcagcttggtagggagggatgttcattgttctttgcctgaattntggaagcaacgggtgcaactccgtgacccgaaaccacatgacccaagtactcaacttgtggttgggcaaatgaccatttagagaacttgagcacgaattggttgtgaaggagggtctcgaatgcttgctcaagatgaatgagatgctcaggcaatgtacgactataaattaaaatgtcgtcaaagaaaacgatgatgaatcgccggaggtaaggccggaaaatgtcattcatggtggcttggaacgacgaatgtgcgttacacaaaccanacggcatcactttgaattcatagtggccgtggtgagtgcaaaacgcagtcttggccacatcggattcatgcatncttatctgataatat

SEQ ID NO: 4815 - DNA, 461 bp, Glycine max
  unsure at all n locations
ntagtggcccttaatttgaagcaatatttgacattcctattatgtattccctgacattncttttgccttgatagttcatggaaatcaagttctgaaggagagtacttgtttccgccttatcgctntttgcaaagcacttttttaatttcagtaagaaattcttaggcactagttatatcatctaaaacaatgctcctaaagatcttaggaatgcgacgcttaatgatcataagactcatgcgatttgagtgatcccacttctcatgaagtttcctctgttaagagattgtggaattcgtaggagaagggggtttctcaatccttaatgcaaggtctagatccatgcagccaagaacaatttgaatgttctatttccagtccttataatttgcaccattaagaactggaaccgaattcaaattagcagatatagaagcaacaacggttaagatcaaaataat

SEQ ID NO: 4816 - DNA, 521 bp, Glycine max
  unsure at all n locations
atacgagcctgagacgtcgagacacctagaatactccagctctgagccataatcctaactcaccatatacctagaccctttgtgatattgtcaatccttaccctcggacgtcttaataaacgaatgaatatgtcccctctcttaaataagtgaaggcatatgtccattcacagacaaagcaattcatatacatctcgaatgtttccagtccaacgctaaaagagaagaaatgactttcctaattattgagtgggagaaagcctcactatactaaagaatttttcctatctaagaatgggagacagttctacgcacactgaagaagacgatgatgagtgaatgatagctcctgatcaaggatcgaaagataaatagaagaaatgtgcagaaatgtctttggaccggacaatatctgtacaatacagaattgtcaccaaatgaacaaaatagagggaaaggaaaccaccacctgacagtggtcttcttcctttgtnaccaaccaaaatcctgtgcgttggtct

SEQ ID NO: 4817 - DNA, 378 bp, Glycine max
  unsure at all n locations
gctntgatgtaacatttggagtggttaatgaaacaacgagatgatgcgctccatgagaggttggatcaaatggagaataaagaccatatgaattgctcaagagcttccattgtttaattncgagcgtctagatatataatgcgcctcaatcggacctncgagttaaaagctatgaccatttgatatgctcacgagctttcattgttcaatttcgagcgtcacgatatagtatgcacctgaatcggacctgcgagtgacaacttatgaccatttgaatcgctcaagagcttccattgcccaatcttgacgcgcacgatatattatgcacctgaatcggacctgcgagtgacaacttatgaccattcgaattgctcaaga

SEQ ID NO: 4818 - DNA, 372 bp, Glycine max
  unsure at all n locations
ctcactcggaggcccgattcaggcgcataatatatcgagactctcgaaantgaacaacggaagctatcgagaaattcaaatggtcaatacttcgaactcggaggtcctattaaggtgcataatatatctagacgctcaaaattttacaatggaagctctatggctatacaaatggtcataacttttcactcgaaggtccgattaaggcgcataatatatcgagacgctcaaaattgaacaatggaagctcttgagcaattcanatggtcataacttgtcactcggaggtacgactcagctgcataatatatcgtgacgctcgaaattgaaaatggaagctcttgagcaatgcaaatggtcataacttgtcac

SEQ ID NO: 4819 - DNA, 507 bp, Glycine max
  unsure at all n locations
ntgtgctctgatacactagcagannaccgancactatcgaaactcaagcttagatttacaaagctatggaaggaaaggaattattgtattgttctctacaacnaggcatcttaggatacttgtgcttaaaggaaccatctgcacttggagtgtataggtaagggaaaccagtggtcactgactatcttatcagacacattggagctacctacccataccgattgatctttgatcataggccttctgaaacgaacgtctatccctctggtgtctctatctataataacagggaatcagaaacttttgagatgctttgtttcactccaagggaactctaacacatcctattgttgatgcactatgaaaagatagttctttcttgtggcagaaccgagattgaaatagaatttcatgtgtcagacatcaacttagaggatcctgaatatagtccaaggttctagaatggagaaaatgactatgacttgactgatatggatttgtgactct

SEQ ID NO: 4820 - DNA, 412 bp, Glycine max
  unsure at all n locations
agccttggaaggatgcttcactgtgttgaatatttttagagagaganagagagaggggggaagcatgaaattgaacgaagaacaagggagagaagttgaattgtgagttgcgtctcacaagactctcattcatcaaagttacaacatgtgttacacatgcttctatttatagactaggtagcttccttgagaagctctcttgagaaaacttccttgagaaacttctttgagaaaacttccttgagaagctagagcttagctacacacacccctctcataactaagctcacctccttgagaagcttccctgagaaaattcctcaagaagctagagcttaactacacacacctctttaatagctaagctcaccttcctgagatgagaagctagagcttaccttcacacccctat

SEQ ID NO: 4821 - DNA, 434 bp, Glycine max
  unsure at all n locations
ccttcaaactaagcttggcaataaatactcctacatttatttcttcatgctttgtatgnnggcctcgacctttgtcacgggaagccggaaggtccatatcaccttcttaattgtacacatggggcactacgcccccaaatgcgcaagtaagaagagataattctccgggctctcgtgtccgtaaaatgcattcatatcatgcatcgcataagcatctcttcataacatcataatggacatatcctgcatttggtcgttatcatattccagcctcacattttgcatgagtcatggcatcatcatgcatatgcgttcaacaaactttttgatctgcgaaatcgcataccatatgttttcatgtttgctcatccttgcgttntcctctacacaacaaacacaaaaaagggggaagcgtgaaacttcacactacattc

SEQ ID NO: 4822 - DNA, 407 bp, Glycine max
tgcttcgtggccaaatctcgtatttgtttaatcctatttgtcttcatcccagatttagcaaatgcaatcactatatatatatatatatatgagagttgctaatgcacttacatttaatttaaaatttagtataaatgcattaacaactaacatcataaatttttgataaaaaaaccaataatctcttcacttataataagaatatatcggtaatttaatatcaatttttttaaaacaattaaaagagtcataatagtgctcataaggcacttctttcttctttttcctttctcctcacatggtaataatcatggttcataattcacactctaaaaatttaagtcttctccgagctaacccacttcatccatatgaaaaaatcttaaactcaaagtgaatagcaactg

SEQ ID NO: 4823 - DNA, 1034 bp, Glycine max
  unsure at all n locations
cgccgcgcgcgnnnnnaatgaatagccgtaagtacnctngcnngacaccgtgagaaatacttncaaanctctctgaggccaatgttccaaaaccgtgacaatatacttttagtacctacaagaangngctcttattatgaagttccccgacaancntaatgacaagaactncggccgcacatatgtaacacaccataaagcatcccctgcctacatctcactaatgggcanataaactttgtgtataacaaacgtatcagacctgagtcctcgggcaaatactatatatgagacgtctcgggatagttgacaaaacactatatatttagcagccaatctttcaaaacacgacactttacagaactgcgggcgaaatgatccaacaaccatatcgacgttaaaattatgaattaaacactaccccnacccgataaataggaaattgctttggcgaggttgacgaacacacgtttcaatagtgaacagaccccagttattggtttctgccttgaaccataaaattctcatcgtccaaaagaaaaccacgcccccccaatatgacttccatgtcaccaccgcaatcttgagttcctttcaaagccttttatatatcacaaataacccgcaaatggggacaaacgccnccgaaccaaaaaagtaatccctgggcgctgcatattcacgtattgaatcgcgaaacatttctggtaaaatttttgagaaggggtgccccaaaaatggcgcctataactttgtaaagggaaggtgaaacttttactaaacgaggccactgtgttctaaagggagacgcaataatcgatntgggtcccttcgccatacgcccaaataatttaaaacggtggtgtttcttgggctctctgtcctaacacaaaaaaagacggtttctcttccacacaagtgcttgcntgatacaccaaatctcttttctctttagacttttgcggctcttcccgccatctccttaccctgttttctagcaaattcgactgcgaaaatagggcgtcccttcttcc

SEQ ID NO: 4824 - DNA, 549 bp, Glycine max
tgcttgtggggcttctatggaggctggatctttgagcttcaatgaggtcctttaatggtgattttccaccatggagatgcaacggaagacaaaggagaagaggtgagaggaggcgccatccattaaggaataagccatggaagaaggagcttcaccaccaagatgagcattgaataagaagcttggagatgatgcttcaatggaggaaaagaaagagggagagaaagagagaggggggagcacgaaattgaaggaagaaaaagggagagaagttgaactttgagttgtgtctcacaagactctcattcatccaagttataacaagtgttacacatgcttctatttatagactaggtagcttccttgagaagctttcttaagaaaacttccttgagaagcttctttgagaaaacttccttgagaagctagagcttagctacacacacccatctaaaaactaagctcacctccttgagaagcttccttgagaagctagagcttagctacacacacccatctaaaaactaagctcacctcctttgacaaata

SEQ ID NO: 4825 - DNA, 678 bp, Glycine max
tcccaagtttttaagttcttcctcaaaactgtcctaagcaaagttcccaaagtcctattaacaacttccgtttgcccatcggtttgtgggtgacaagtggttgaaaataacaatttagtgcccaacttgctccacaaagtcctccaaaaatggcttaggaacttagagtccctatcactaacaatgctccttggcaaaccatggagtctcacaatctccttgaaaaacaaatcagccacatgggaagcatcatcaatttttttacatggaataaaatgagccattttagaaaacctatcaacaaccacaaaaatggaatctctaccattgcttgtttttggcagccccaaaacaaaatccatggataaatcaatccaaggatactccggaattggcaatggagtatacaatacatgaggctttaccttagactttgcctttttacatacaatgcaatgttcacaaaatttctgcacatcctttttcatatgaggccaataaaaatgttcttgtaatgtttctagagtcttttggaccccaaaatgccccatttaacctccttcatgtgcttcacaaacaagcaaatttctagtagaacattaggcacacacaattgttttcttgaaaagaaagcttcatgtctaaaaaacatttctgaaaaatttcacaattttaaaa

SEQ ID NO: 4826 - DNA, 552 bp, Glycine max
atatgttatatttaatcattttaatatataatactatatatggagaaaaatacttattttaatacataaatattaaattaataacattaaatgcaaccttaatatttttgtttaaatctcgtttaaaattttaaatttaattacttaaaaaatatgtattaaaaatattttttttacatatatagttaaatataaattaaaatatttttttggttaccatgcaatttatataaaatattcacctgctttaactttaccgaaaccttaaagtttttattttttaaatccgcaaacaaattatatatattagaagtaagtatcagagataccttaagaacaaaatataagcccaacattcagcaactcggttaatcaatattaatatctgatcaaaagatataagattaatttgataaataaaaattaaaatttaagagtgaaaagagaaattgtgagtttaaatttctgtcattaatatttctaacaaaactaataaaataactcatttactgaaaaaagaacacctcatccgattaaatataaactaaccca

SEQ ID NO: 4827 - DNA, 461 bp, Glycine max
aaactttctacttttattcgttgaccacagagcggtacctggagatatgtctcgggggtcaagaaaccttggggacgtcaggtggggtactattgcccaaaaccaagcttgaccaatcccgacccaacccgggcgtagtcagtccgtgagaacctgtgacgtacctaaacaagtgagctcctggcagtcaaccgattaaagaacaaagaccacaaagcatggaggcttgtgtggtggctggccagctatggatcttgagtgatatctggaatatggcctttggtaatcgattaccaagggtgggtaatcgattacaaggcttaaaaatgaagacaggaagttaagatggcctctggtaatcgattaccaaggatgtgtaatcgattaccaggcctagaaatgggatcatgaacgcgagacagcttctggtgatccactaccactgctgtgtgatcgattac

SEQ ID NO: 4828 - DNA, 464 bp, Glycine max
  unsure at all n locations
tgtactaactttaatcttataaaaaaaagtaagatttgtagcaacttaatcctatgtatctttggccagtagtcccagattaaaaccccctccttcataatggcaaatatttggtagacaactatagacttccccggccacccaaattgacgcaagttttgtccatcaattttatttacaccatcaaaactagactttaaagacagtggtagatatcaaaacatatgagttaaatatgattaacaaacctaccgataatagtttttgtttggcggctgaggaacaacgtcagaaagtgaaataccccacttgttggcttctgccttgaaccatgaaatctcatcctccagagaagccacgccccccaatatgacttccatgtcaccacggcaatctgattccttccaagcttttatcagcacactagccgcanatgggacaaacgcccgaacgaacaagtaatc

SEQ ID NO: 4829 - DNA, 596 bp, Glycine max
tgcaatgaaagatattgtgtatgtaagagtctggtgtcaatctagacacacaaaccaaggccataattcaaaataggtaagatagaaatgatgatagtcattggcacaaacattgacttctgcaactgctactaagcttgcaatcaaagatattgtatatatagtaattaactttccattcagcaacacaaatttgttttatttgtacgcttaaatttgttagattgcctattcaatttgaaatgtcaaatttctatcttacatcttttatttggacaatatgtaacaaaagatgcaacaaagaagtttactaaaccttatattagagatggacatcagttctttatatattgcttgtctggcgcaccacaaattattttttgatttcttttgtccaaagattagacttgttttatatagttctcgtttgctcaagttaaaatcggtattatacttgcgtaagccatcaatgaacttaaaaatgacaattgaaatacaacacatgaatttaggcaagcagtgatagctgaaaaaatggagtatgtgagaatgaatgcacttatatctagagggattttttactgatacagatgata

SEQ ID NO: 4830 - DNA, 515 bp, Glycine max
tgagatgaggaagtgttgaagggtgaaacttcctgcttttattgttgaccacagagtggtacctggagatatgtcgcgggggtcaggagaccttggggacgtcaggtggggtgctattgcccaaaaccaagcttgaccaatcccgacccaacccgggcatagtcggtcagtgagaacctgtgatgtacctaagcaggcgagctcctggcagtcaacagataaaaggaaaaaacaagaccacaaagcaaggaggcttgtggtggctggccagctgtgaaacttgattgatatgtgagatatggtctctggtaatcgattaccaagggtgggtaatcgattacaaggcttaaaaatgaagacagggggctaagatggtctctggtaatcgattaccaggggatgtaatcgattaccaggcttgaaaacggagtcaggaagctaagggagcctctggtaatcgattaccagcctgtgtaatcgattacacagagggatgggtcacttgtaatcgatta

SEQ ID NO: 4831 - DNA, 420 bp, Glycine max
tgcaagcaaactggatgcgttggtcaacttggtaacccagctggccttgaatcagaaatctttacctgtcgcaagggtttgtggtttgtgctcctctgctgaccaccatacagacctttgcccttccatgcagcaacctggagcaattgagcagcctgaagcttatgctgcaaatatctacaatagacctcctcaacctcagcagcaaaatcaaccacagcagagcaattatgacctttccagcaacagatacaaccctggatggaggaatcaccctaacctcagatggtccagccctcagcaactacaacaccagcctgctccttcctttcaaaatattgttggcgcaaccaaaccatacattcctccaccaatccaacaacataaccaccccataaacagccaacagttgaggcccct

SEQ ID NO: 4832 - DNA, 247 bp, Glycine max
ttgtccatcaattttatttacaccatcaaaactagactttaaagacagtgggagatatcaaaacatatgagttaaatattattaacaaacctaccgataatagtttttgtttggcggctgatgaacaacgtcagaaagggaaataccccacttgttggcttctgccttgaacatgaaatctcatcctcaaagaagccagccccccaatatgacttcatgtaacaccggaatctgatttcctttcaag

SEQ ID NO: 4833 - DNA, 1127 bp, Glycine max
  unsure at all n locations
ccctgctacgcgcggncaccaanacacgtagtatgcgatcgacttactangcatctcgcccntgagngacatcctccttttcctccgcgngtctacacttctctctgacagtcatctcgtactctccantcccaacnttattactactaccccatanatcgccccctcgacancnncnnctttggaaaacccgctaggagcntttgngcataagcactcgcggacaantactgcagaaacaactnntagagacgttccgtactatagcatgggacanaatgctctcggccaacgggctgganaacacngcttaacatgggctgtctctctatttggttcctactccagcatgcagatcgtgtcacccctcggctaataatgataggtccggcagtggcgcggacaaccggaactacagccctcgagcggtactccatcataagcagtgcgtgtggactcagtgtgacaccacacgtagcaccggctctgcaaacacatatactccaccctcggctcccggcgacatcaccgcaagatccaccagactaagcctgtgtatgcaaactaaggccggcggaacaccctggcttttcaaccgattgaacgaaaaaatggacaacggcgccctgaaggcgtcgtggcgtgcttgcccccgtgaaactatattgacacgcgagatattgccctctgaaaacaattaccactggtggcgaatcgattaccaaggcctaaaaatcaacacacggggcctaaaacgaacctggagattcaacaccacagagatgcataaaaaaccaggcttgaaaaacgaaacaagaaaccaagggagcctctgggaatccattaccaccctgggtaatttaataacaaaaacaaagggaacccctcaccaaataaccaccttgtggtatccaaacactgccgcggcaccccacatcgaactcctaggcgaacaccaacacgaaaaaccctgaaaccattgcaaaggcggaccacaatacgcctccactcaaccccatatatctccaatatcctcctcctagcctcctaaacccaactgacactcattttataactctcgccgaggctacaaccgcacactttcaaaaggaaatccaccccccccg

SEQ ID NO: 4834 - DNA, 1013 bp, Glycine max
  unsure at all n locations
gaagaacgaagataagngtgaaatagagagaaagaataatanntgtannncggggaaaacatacgaaggagtnataggttntaatacaaatacnnctncnnncnnncnaanancaacaaggggtnnnaatgatggntgatggnacnntgcnnaannnnggnggaanagaanaaaaaannagagggnnaaggaaaaanaanangaaaaagaaagagggaaaatttgttgatttattttagggganaanagagaagaggaaaagtgtgattataatatagaaatatttnttatatgtaaaaaatttgggatggtagagaaaaaaaaaaagggttttaaaagtaaaaataggaaaaataaaaattaaaagggaaattgagaggggtgtaaaaataaaagaaaagactaaataatggggtttaaaagaatagactgaataaaagggaaataaaaaaaaagatctgaaatttaaaaaaaaaagatggtgtaaaaaagaaagaatagtggaaatggaaaaaaaggaataatagaatattaaaaataaaataaaaggaaaaaaggggggggagtagaagggaaaaaaagaatagtgtatgaaaaaaattgggaaaaaaggaagaagggaagaaaaaaganaaatgtaggggaaaaaagaaaaaaatatattaaaagatatgaaagagatggaaaggtaatagaaaaaagtatgggaaataagaggatggagggagaaagaagaagggtgaaaaattaaaagaaaaatggggtagaaaaggggaaagaggaaaaaaaggagaaaaggggtaatttaaggataaaagaaaaaaaggaaagaattgaaaagaaaaaggaattattgaaagagggatgtaaatttaaaaaaagtagaaaaaggaaaaaaaagaggcgaggaaggaaaagaagaaaagaatagaatgtaaggaaatggtaaaaaaagtaagaagaaaagaaagaaaaggaggaaaaaggttaagagaaaaaagaagaaaagggan

SEQ ID NO: 4835 - DNA, 541 bp, Glycine max
atatcattctctctaaatggatgctattaattacactcttggttggtaattgggataaactgtcactttaattgctcaacttttaataaatgttaaatttacttgcttcaatttataattttataaaagttttaatttgatctataatatttaaaaaaaaatattatttatttaaatcattgatgtcacctaaaatataataaaacaataaagtaaataatattttttttattaaactacgggttaaaataaaaaagagggcgttacttgagacatccaacaattttgttggggcaccagcaacattggtgaaagggctaaaatgtccttcattattttgttataaaaggttaaagtgacttgtccatacgagtcattattcatttttctctcgcaccgctttcttcttcttttaccttggttcttcgtcttcctctcttttccggcactcctttgtcatcttcgtcttttctccagtgctgcttgatcttcctctttcctccatatcttctcttgtgctactgcattgttcgggtaattg

SEQ ID NO: 4836 - DNA, 584 bp, Glycine max
  unsure at all n locations
tctcatggctatgagaggctaaacccccattgttgggagcttggcatgccaactcttggtattcgtttagcctatttcatacatttctgatcttaatgcaatttattatttttatctttgcaaagaaatttgggagaaaagaataaataaattaggctcttcatgcgggaaatcaaatataaagtgtcttagtagatgtgggtggaaacaaagatttcattagatagaaaaaaaatcattaacattgcatcacaagtagttttggcatgctaggctccaacataatcacattctgaattcatctttcggcatttaaattattgctcatttttcttgttatttcttccttttccttttatccccaattttcacacttacaattccttatctcttctacttcttctaattgcttaataattgtgtttgcatcactttaagtacaatcaaagtctctgtggaatcgactctcgaacttncgagtcttttactatttaaaacgaattggtacacttgccanagagttaatatatgtgtgatcaatcccttccggnggcatcctttatgtattctattttgaatacata

SEQ ID NO: 4837 - DNA, 553 bp, Glycine max
  unsure at all n locations
tcaagtccatgcttgtctgatttttcccttacatttgctataaagcaaccaccttcaaattcatgagacagtttggcaaagaaagcagtagcaagggcagtcttgcctatgccacctatgcccaatattccaagggttctaacttcatttgacccaatttttagtgatgattcaatctgttcataattgtcctcaattccaaccagtccttccagtttgtttgggtatcttggagtcagtttttgcaaaacatccccaacaatgttcttaaggaattcagattcaatcgtaccatatgaaaaggggaaaaaatgaaataaatgatgtattgtaagtctaacaaattcaaaagaaaaagaaaatagaagtacacaaatgattgattatacataatctagaaacaatatggtattgtagtagataaaacaaagggaaaaaaggactangaaaggaaaatccaatgtcttagagcaaataatctatgtctctttttctactcaacgaaatgcattgcanactacatgaaagttgtatactacaaaaaaaaaaaaaa

SEQ ID NO: 4838 - DNA, 520 bp, Glycine max
cttgcttcagggtgacttaaaatatatctaaatatccaaaatatctattcatatgaatatgtgaatattgtaaatattctatcttcatccctctatatctgaaaccccataatttcaacacgaagtgatatacatgtgttgcaccttaatttggttgtttcctttggtgtcggctgaagataacactgtaatgtcttgtctatgttttatttcacccaaagcacatggttggttttcttttgttactcaatcaacttatctgcaaattcaatactttggtgcgtgacattttggaggaaatatttccatctatcgccgagcggatattcactgttattcctagaaatggattaccttcttctggttctgatgcaatcactgaggtatgaaaatgttgatgcagttacctaataaatagctgggttttttttggtccttttcttttaatttacttgctttaagttacgtttgtatatatttgctatatgaatgctctttatgacttgattattgttcatta

SEQ ID NO: 4839 - DNA, 565 bp, Glycine max
  unsure at all n locations
taggttaaattagtctaaacttacgagggatcgatgtttagtattttaggctacaacatagaacacaaaagcatgattgattagagaaatatcttcatatgcatcagcttgtttgttagaaagacccaatgctttttacctattattgtcaattttacttatttgcatttactgtttttaccatacaagtagtttatttttgtttttaaccatcgtttatcaatgttattccaacaatgcctgatttctaaataaaactctgtctaataagcaagttccctgagttcgatactcggatcactccattttaattttaaatacttgacaacccggtgcgctttccggcaaatcagatttcccttgaacatatttgcataaaggaaaatggaccaaaaagtaactgcaggggaaatccaacacctttctcaatacatttgaagcacttgatgttactagttatatcttgtgaactagcctttggagggatttcctctatgtttntacccttatcatcctttggcttcgaaggtggtactcctaacacacttggagcttgtcctttttt

SEQ ID NO: 4840 - DNA, 320 bp, Glycine max
tttcgtcttacagaatgcaaaaagtttatacggataaccactccggtgttttcgcccgtcagcgtgactgataagtcagtatgacagatcttgtgagcgcggaagataacgtaaatctccacgtgtcaacaggcttgtctgccgcgattgacgaagggcgcagaagacgacgttagtctctgcgtgctatcaggcttttcgtcatacagacagcaaaaagtttatacggataaccactcgggtatttacgcccgtcagcgtgactcaaaagtcagtatgacagatcttgtgagcgcggaacatgacgtaaatgtccacat

SEQ ID NO: 4841 - DNA, 591 bp, Glycine max
  unsure at all n locations
ttgatcttncaccaccgccgccttcatcatcttaaaattacattttaatattattactactttgattttcaaccttgtattttggctatattactatggtatttgaacaatttagtatttccttattttcatggtttggttgaacaagtatgttatttgactatgtggattttataagttaatctatttatgattgctacttcatgggttttttttcttcatgttgaggttactattttttatgaatgttgtacgaatgtttaagatatatgtgcatactttaagtttgatacgcactttggctttttgttgatgccaaagggggagagaaatagggatgaatcaagaactcacatgagtaaataatttaattttaaaataagcataaattcaaaaacaaagggggagcatttataagagtgatcgactaggaaaaagtgtgtgtgtgtttcttgatttcagaagttgtcatcatcaaaaaggtggagattgtggaagcaaagcttcatgatgaatcanaaatgattcaaaggggtttgatgatacaatgatgacaacaaaaatgatgacaaggcgatgaacaaaagctca

SEQ ID NO: 4842 - DNA, 496 bp, Glycine max
tgccttccaagaatgatattgcggttatcatgtacacaagtggtagtacaggtctgccaaaggtttgtttcttcgtcaagttttgttaaaggtgtccctttctgtgtgtctgtgaatgtataatctcttattcatatttgtgatttgatgcaaagtgcttttgtccagagtcatgcttgtgaataatgattttgggtgataaaatatcaacaagaaccatatcaagacattgtattaatataatgaaaattttcttgtctgcaacattgagaaccaataggatctccctcagctcagttctatgattccctttgatttgacagggtgttatgattactcatggaaacattgtagcaacaacagcagcagttatgacaattattccaaatcttggtagcaaggatgtgtacatggcctacttgccccttgctcatgtttttgaaatggcagcacaggtaatttcttcttagccttctaactgtcaaagtagttgatg

SEQ ID NO: 4843 - DNA, 486 bp, Glycine max
ctaattaacctaaaattgagagaaaatgattttttaacacacaaaccggaagtactaaatatttattaccaaataaattggaataatctcatacaatttacacaagttttatacataaaaggtagtgattttcaccgactaacagaggcctctacaatcacctttcctccttctctattatactgccattgatcttcaagaagcaaatgactctattgatgaacaacatccaaagtctacaagctccacatgaagctacatcatgtgggatcaagaacagcttcatctacgagaagctcttttgcttcctctatcttttgcttgggcaattcaatttaataacgtattcttaacaatttctccatgtatctgcttcattgccttgcggtttggttctgctgaaagtttattccaataaacacaccgatttaatcctacatctacacttgttattggatttctatgggtcaaatttatccatatact

SEQ ID NO: 4844 - DNA, 627 bp, Glycine max
  unsure at all n locations
agtgacctataaaacccagcttccgttaacaaattattgaactggagaacgataaatcaaattccataagtgaagaagacaagggaatgtaacttacatagcttattaaagctactgaggcattcagaaaaaaagaaagaaaaaaagctactaggagccatatagtcgctcctcgcaacttaaatcacgcaggggtagattaaacaaggccaaagcacaaaaggaagaaaataaatcataacataccaaaaactaattatggtattaaatgaatatgttttcatttcatatatgttttgactataagttggcccaattcactatatttttccaaatccagaaattcacaagaattataaaaccaatatatatatatatatatatatatatatatatatttctcgtttcaaccaaccaacaaaactataatgcaataggaatttctacttaaaactcaatatatcaaggattaattaaacaaacataaactgacaatctcaacaaattaataagcatgtngccaggaacataaatgaaaccctatagaaatgagggacccggaaaaagaaagagaatcttttgaggagcacatgcaagctactntaaactttacatctagggttatac

SEQ ID NO: 4845 - DNA, 437 bp, Glycine max
tctacttatgtggcagggcgggcttccttcactttcttgtcttccacgcgagctctgaccactgctctttcttcccgcgatgcttcttttcatgtacgcctgagtgggcttatagcctaaaccatacttcccacgatttccttgggcatttatcaggctagttatgccgccgctgtctttgcctaaacccattccgggttcataaccgttccccaacataactcgggccatcattactgctgcatcagacagacaaggctgcccacagaaggagtccacggaggaaatgctgaccacctccaaagactggaaagtggtttctaacgattcttttgcggcttccacataaagcatagaggatgggcagcttaccaagatgtcttcctcgcctgacacgatgaccaagtgcccctccactacgaatttcaacttttggt

SEQ ID NO: 4846 - DNA, 615 bp, Glycine max
gaaagatagaacagccaaaaagactgacaaactgacatgaataatgtactattgttgtaagcttttcaaggaatcaccgcatcctgatgaaaagcagaggcaacaactcagcaaccaacttggccttgctccaaagcaagttaagttttggttccaaaatcgtcgaacccaaatcaaggtatctaaatttatttacctaaatattactcaagaatatatgcaaacttaatttatttaattagaaattatgtaagcattatgcaatattattgccttttgcaggcaatacaagagcgccatgaaaattcattgttgaagacagaattagacagacttagggaggaaaataaggccatgagagagaccataaacaaatcttgttgccccaattgtggcatggtaacggctaccatagatgcttccatgtccactgaagaaaaacaacttcttattgaaaatgccaaactcaaagccgaggtaataaatttgtataaaactaaatctaaatacaaggaacatgaaactttaaaaaaagaaaatgtattaatgctagaataatggtggatctatgtgtcaaagtacaaactacaatcttaatgaaaagattccctaata

SEQ ID NO: 4847 - DNA, 684 bp, Glycine max
  unsure at all n locations
tatatcgttgctagcaagcagtatatcatcgacatataacaccaagaatgagtatttactcccactaaacttgtggtatacacaatcatcaactgcatttgcctcaaaaccatatgaggtaatgacttgatggaacttgtaataccattgacgggaaccttgcttcaaaccatagatggacttatttagtttgcaaaccatagactttgagtcacctgatacaaagttttctggttgcatcatataaattgtttcttcaatgtcaccatttagaaacatagtcttaacatccatttgatgtagctctaaatcataatgagctaccagtgtcattattgttctaaaagaatcctttgaagatattggagaaaaggtttctttatagtcaatgccttccttttgggtaaatccttaggcgagccttatatctctcaacattgccctttgaatcccttttgattntaaatatccatttgtaaccaataggtttcacacttttaggcaattcgacgagatcccaaacgtcattgtcttgtatagatttcatctcatctttcatggcattgatccaattttgagagttagaactacgcatgacttgtgataactgctaaataattgtgaataaatgtagaaaattagccaaatttttgctttaaaatattatttagcagttatttgtga

SEQ ID NO: 4848 - DNA, 338 bp, Glycine max
gattgatggggaccccagttgatagaacgagattaggctacttgggagtacctgagctcagttgaaagtgggctactggggaatgtggatttatgtgtgattcgtggatgtggatagtccacttgcaccattgctcgatcgcgagctattaccacatgtgaccggtacccgataatcctacaagcttgaagtgaggaagtggggaatggagagacttcctacttttattcgttgaccacaaagaggtacctggagatatgatccgggggtcaggagaccttggggacgtcaggtgtggagacttagatcataaccatacttgacccctgctcacccca

SEQ ID NO: 4849 - DNA, 242 bp, Glycine max
ccttcccgcgaagcttcttttcatgtccgcctgagtgggcctataacctaaaccatacttcccacgaattcgttgggcaattatcaggctacaaatgccgccgccgtctttgcctaaacccattccgggttcataaccgctccccaacataactcgggccatcattaatgctgcatcggacagacaaggctgcccacacaaggagtccacggaggaaaggctgaccacctcaaaagactgga

SEQ ID NO: 4850 - DNA, 958 bp, Glycine max
  unsure at all n locations
cgccccgcaccgctgttatgttacgcccccgtccagataccgaccaaacactttcgccctctctncaccccccccccgcgnnttgaatcttggcntggagacccttagaaacccaagcctctacctatgtcgcccggcggactgccaccactaaaatgactttcactccagcccttagcacaggtcttcgctccgacaagctgatttccatgtccacccgcacgggcttataacctacaccatacctcccacgaattcgacgggcaactatcaggctaaacatacccgcgccgtatttgccgacacccataccggggtcatagaccgctccccaacaaaactagggccataatcactgctgcatcggaaacacaaagctgcccacgacaacgaagtgcccgcgagcgaaaagcctgtcccaccctccacaaggactgcggatcagtgtgtctcctaacacaaatcatcagccggcattccaaagtgaggcattagaggatggggcccggtcccaagaagagctgctgccccacaagaagaccaagcgcccctcccctacgaattccacacttctggagaagtgaacaaagggccaaaattcccattgacgcagaagtcaccgccgcccccaacaaacgccggtaagggggcgggccccatctcaaagcgtcgaaaagcgactccgacagcgagcgaacggaccatacgaacacggcgacaacaaaaccccccacctgggcccaacagacgaagagccgtccacaagccccaaaccaacactcggaaaaacgcgatcagtgtggcaaccaccgccaagcgacgtccgtccacaaaggacaaaacacgcccacaaaccacaccggcacgcccccaagcctctgcacgccacgacccaagcggcaggcaaaactacatcacgcgcgtcaggggaaaggctcgattcgcccgcgatcacccc

SEQ ID NO: 4851 - DNA, 883 bp, Glycine max
  unsure at all n locations
ccccccgcccccccgtgctcatcgcgcggcatcttccttaccccgcttctatctctactcctctctttccngccccccccccttccttccccgcncncccccccntttgacctgatcgctgtttagggggactttaaactcaggtgggagcttgggattcttttaaaaggggactttaaaaatgttgaattttaaaaaatctcttaaacaggctctttgaaaaatgggaacttttggaaaggttttttctaaaacaacccccggtgaacgattaccccttaagggtgattcggtacccattaaccaaaggggctttttcttttggatttttgaaaataaaacagttaaaagctctggtgattgattacaaacattgggggattcaatacaccaatttaaaatacttttaaactggtttaacataaagtataattattggaatttgaaaacttaaccgtcttaaacactggtaattcattcctacttttgggtatcgattacacaaaagaaaaactctttgggatgaattaatggaaaccttcttggggttcctaatattttggaaaacattttttagacttattctgattgagccttctcttgattctgaaacttgacctgataattttgaatcctgaatctggaaatttggattttggttgaccctgaatctttgggtaatcaaaaaacctggaagaaattgttcccacaagattatttgaaaatggtgaaaaaaaaaaaggcgctttttctttcgcggcttgacaccggaaaaaattcttgagaaattattcccaaaataatccagttttaaaaaattgcctttaatagggaagcccctctttaaattccgataagaaaaggacaacaccccatccaatgc

SEQ ID NO: 4852 - DNA, 369 bp, Glycine max
tctattctgaatgtcaagcgtctcgatatactacaggacactatcaaatatccgagtaaaaagttattgtcgcctgaatttgcttagagctttcgttttcaattttgagcttctcgatatattacgagactcaatctgacatccgagttaaaagttatcgtcgttagaaatttctcagagctttcgttatcaattacgagttactcgatatattatgggattcattcggacattcgagtaaaaaattattgccgtctgattttgctcagagattccgttatcaatttcgaggatctcaatatatcacaggattcatttcgacatctgagtaaaagttattggcctttgatttgctaacagcttctattc

SEQ ID NO: 4853 - DNA, 394 bp, Glycine max
tgccacccagctcgcccaggcgagctaggtttcttcctccagaaggcaccgccttctagggaacttcctggaaagaccaagtgggcctgattgctatttgcaccccctgtttactaaatacacccctgcccttttttgctgattcttcttccgtaacgttatggaactttacgaatttcgcgatgatactcgttttctttctgtaatgtcacgaaaccttacggattacgcaatcctcccttctttggcttccggaatgttacggaactttacagattgcgcattaacatttccttttgacttccggcatgtcacgaaacttcacggattgtgcaacaatgctttctttagacttccggcatgtcacggaacttcacaaattgcctaatgatgg

SEQ ID NO: 4854 - DNA, 333 bp, Glycine max
tgagatgaggaagtgttgaagggtgaaacttcctgcttttattgttgaccacaaagtggtacctggagaatatgtcgcgggggtcaagaaaccttggggaccgtaagtggggtgctattgcccaaaaccaaacttgaccaatcccgacccaacccgggcataatcggtcagtgaaaacctgtgatgtacctaagcaggcgagctcctggcagtcaacagataaaaggaaaacaagaccacaaagcaaggaggcttgtggtggctggccaactgtgaattttgtgtaatatgtggatggtggcctctggtaatcgattacaaggcttaaaattg

SEQ ID NO: 4855 - DNA, 511 bp, Glycine max
  unsure at all n locations
ntatgcttgctctcttattcacaccaaaaaaaggagaccaaatctaccaaagccaaaatctcctacaggtccaaactcaaaaagacccattgatctgtgatgattatgcgcattaccccttgatttgatgggaaatgacttgcaaaatcgatttatgacgtgtttgtgatttggaattgagaggagacacttgccagtgtgagattttatacacctttgagtggttttcctccattttattgaatctagtgtttcttctaatgtttctgtagaaaagaaatgcaaaatgtcttaatctcattcttggttatgagaaattctatctttgtgctttcattcctcattcgtggcattatttttgaaaaaaaaagtgtgttctgatcggtttgggagtttgatttctttaccaagtgtgttcgcattttaatggaagttttcacaaactccaatgccttctgtcttttacatttcaaagactgtaatgtcttcagtcttttacaatttcaaagac

SEQ ID NO: 4856 - DNA, 586 bp, Glycine max
  unsure at all n locations
tagaacaatatacttgtccttcatttaattgtctttgggcttgacgaccacgatcaacaaagtactttcgacacctactgtatgttgatttcaccaacgctgttatcggtatgttgcgacaatccttcaaaaccttatttatacattcagagaagttggttgtcatgtgaccatattgacgtccttctctatcataagccatggtctatttttcctttgaaatgcgatcaatccatgttgctatcgctggactcagttggcgaaatttttctaaattttgataaaaaaaatatgcttgcaaggagtgtaacctgcatgaaattagttagcaacaacaattttaagtatatgtcaaacttaaattaaggtgagcatgatcaacgaaatgttacccaatttcttcaacatttctttttgtttggcattattgaatttgtgattgaaattgctcgctatgtgtcngacgcagtaaacatgataaccgtggggagattgtcaaccaagcgcttcattagccacaacgaactttatactcgcgtgacgatcagatatgagacanataccatnnttatctatgacatgttca

SEQ ID NO: 4857 - DNA, 531 bp, Glycine max
  unsure at all n locations
tcctcaatttttttggattgatgctcttaagacggttgcgtatatattaaaccgagttccaaccaaaattgtctcaaagacaccttttgagctattcaagggttggaaaccaagtttgcgacatatacgcatttggggatgtctgtctgaagtaagaatttataatccacaagagaagaaactagaccctaagaatattactgggtatttcattggatatgctgaaaggtctaaagggtataggttctattgtccatcccacaacactangattgtggaatcaaggaatgcaaagtttcttgaaaatgacttgatcagtaggagtgatcaatttcagaacatttcttctgaaagggatcactatgaagcttaaccttctaggacaagtaataggttggtagtcattcccacccctcaagttaaaatgggtgttagacaaccagtgattgaagttccacaagctgttgaaagtgatcatgtagatcaagttgtttgtgaggaacaaaatgatgatattgaaacaactagtga

SEQ ID NO: 4858 - DNA, 361 bp, Glycine max
  unsure at all n locations
tatagagctctgtagtgggttgtaaatggaataacgatttaaacaaatgaattaatatattcttggacttgannagaagattannaaatagtaccatattttaatttaagatgcccgaaacttcgacaaaataccgacaacaatttatttaacgaaaaaaataagtatttctattaaaaaaacttgttttattcaaatattatattttatcaaaaacaagaaatttggaaaagtaagtaattgaatttctttatccaagcataaaattctaaaaatgaagcaatttattttattaatccaagcacacaattttgaaaatgaaataatttcatatgaagcatttaaaattctatagaatttt

SEQ ID NO: 4859 - DNA, 444 bp, Glycine max
ggataatgtgagtgtatgtatacatgattttgatgatgtcaaaagaacaatcagacgaaggtgcttcaaaggataagcatggcttcaagattaatacaagactgattcaacaaacaaagccttgcttcgagattaactcaaagatcaagccttgccttaaaacaaatagctttcaagacatgcaaggctctagtaatcgattaccaggcgttgtaatcgattaccacgcagtgtaatcgattactagcagacagggttgaaaaatagctggtgaaaagagttttacatttgaattttcaacatgtaatcgattaccatatgtgtgtgatcgattaccagcaacgaaactcttgaaattcagattccaaagtcatgacccttcaaattataactgtgtaatccattacaccaacattgtaatcgattactagtggagagttttca

SEQ ID NO: 4860 - DNA, 538 bp, Glycine max
taacggtattgattctgtgatattcctcttgccccaaaaagataagaattctgttagcagaagatagtataaataagtatgtaaataaaatcacaatcataaatgagaatatatttccttgccttattccttctccccttccttctatggaagccctggtcctcgaaaccagctaattagatctccccccctaacagtcaatgtgtttgattgcgagaaggacatcaacgtgccagttaccgttgttttcgtggttgaaaatcgagcccgaggagccagagtggatcgtttccttcatcttgtcacagagtgtgacgacagatttagacaaatccgtgatggtggctgcgatcaaatccaactttgacgagtgggtgtccagtttcctggtctgtgctgccatggtggtcgcgtgagactgaagcgtggacttaatggcctcaagctctactttcaaagcgttaagtctctgagaagccatccttgtacacgtacacgattgaggtgaaactcttaacgaaagcaccaatgatacata

SEQ ID NO: 4861 - DNA, 522 bp, Glycine max
  unsure at all n locations
tctacttatatggcagggcgggcttccttcactttcttgtctccaacgcgagctctgaccactgttcttccttcccgcgatgcttcttttcatgtccgcctgagtgggcttatagcctaaaccatacttcccacgatttccttgggtttttatcaagctagttatgccgccattgtctttgcctaaacccatcccgggttcataaccgttccccaacataactcgggccatcattaccgccgcatcggacagacaaggttgcccaaagagggagtccacggaggaaatgctgaccacctcaaaagactggaaagcggtttctaacgattcttctgcggcttccacataaggcatggaagatgggcagcttaccaagatatcttcctcgcctgacacgatgaccaagtgcccctccactacgaatttcagcttttggtggagtgtagaaggcacaactcccactgagtggatccaagggcgccccaacangcagctgtagggggggttaatatccattatttg

SEQ ID NO: 4862 - DNA, 580 bp, Glycine max
  unsure at all n locations
tataagaacgaaattgcctaaatcatttccaaatatgcatgtgaattacgaagcatcaacaagaatcaagccaaggctattgtgcaagctatcaatggggcaaaacacaccaaaagattatgatgatggatggctcgaattctcacaatggtaaacttatcactttcaaattgagctttcaaaactatcatgacatgtagaggaaaaacaaggatttcaaataacaaaatgtcaagagacttttattttcagaacaattacccattacttgaacatatcctataattcaaagaaaaatatgcaaagttgtacatgcaaacagaattgacctaaaatattaaactagaaacccaacaaaactaacaaaattaacaaacttaacaaaactagcaaaaccaaaaccaaagaacactccccccatacttaaacaacacattgtcctcaatgtagcacaattaaaagattaaaggcaattaagccatcaaatagaatcggacaaatgtaataaaagtaaacgaggggataggaaaagaaaaactccctacgntatggtagacaagacccaatgtgtaattggatg

SEQ ID NO: 4863 - DNA, 266 bp, Glycine max
tgactgattgggtattcaacaccgaaacgatcatgctgggtatcgtcgaacgctaccctgaacattctggtttgaccactgcccacaatcgtgcgatcgcaaacgattatactcaagtatacacctttgctgaggctgccagtacgacgctggactatttactgccagacgcacccatgtgtatctatcccaatgaccttacctttcacccgagtatacacctatgccatttgctatcctacgccaaggctatggggtgcacatac

SEQ ID NO: 4864 - DNA, 927 bp, Glycine max
  unsure at all n locations
gggagggaaggagtagtgtangttgtgtataaaatttcaataaaaatatgtgtgtaataaaactaggagtatgtaatgatagaantacncccnccncacaccggggatttttttgaaaatgttgaacntgctaannngtgtagaaaaagaacactcnagggttgttttatatgggaaggtgggnataattnagatttttgaatttaaagggagatntggaaaatggtgattttttgggggaaggttatattaatgataaggctggagagggggttatagagctaaacaatatttatggaggaatttgttggggtgtgaaaaaggtaattatgggggtattggatttgtataaaaaaattttgggttaataaaaggtgtttaaaataaattggggtattattaatgggggattggaaagataagggtgtgtaaagagggagttaaggaggaaatggtgagtaaattaaaagaatggaaagggggttttaaagattgttttgggggtttcaaataaagtatggaggatggggaaaatattaagatatgttatttggttgaaatgatgagaaaatgggcgtttagtaagaattagagattttggtggaaggaaaaagggaaaagtttaatgaatgggataaagggggaactaaaaaggagttgttaggggggtgaatattaaatatttggaaaggaaatagaaagggggaggggtatagggaatgagaggaaagaatttggactaaaagataagggataggagtggaagaataaagaataattgaggtaggtgttaatgggaagaattgataggaaatatggtaaagaggtgtaaaggattaagtattaaaggaaaaaatatgtgtgatggagtggtaaataatagaggtgtaatgttgaattgaangtgagtaagggtaataatgtgta

SEQ ID NO: 4865 - DNA, 779 bp, Glycine max
  unsure at all n locations
ctgcatgtctagggtttactcnacagagaaggcgtccgcgtattcttagactgccgacactatgtgctgacgtgacataatattagcttccttcttggaaagcgctcggtgggctacacttagcttaaaatggttacaacagcgtatactactctagacgaatgtgtgtccttatatccctcttgttcgactaaactgtgaccaatcgaaaaatagtgcgtgcacacttaaaaacagaatttactccccatatccctgcgtgaagaataagagaaaagatttgcttcattaaatttatagacgcggggtactttccaccaaggctcagatgcataacgatccttcccacatggtgattacaccgcgagcctatgatgttcttgcaatgacagacgccttgctccccatcataccctgccctttatacgtctcagtccttacgtccagcaattctttagaagtccccacccagggtgttcagccattcgttacataaaaaaccccttcgtttatgagattcccaaaccctgccaatctctataaaagtggtcacgtttgctagctccaaagcgattttgccgaaattcgccctgtggggtgccctccaatgctgggggacttttggtaaaagtctcttcccctttctcatggcaccatgcggggttttagagatttagaccccttctatgcggcgtggcacctccctaatctgtacgccttgagggagaaactggcttcccttctcccttcccatacctggcgctacacacccagtgtct

SEQ ID NO: 4866 - DNA, 527 bp, Glycine max
tgccacccagctcgcccaggcgagctaggtttcttcctccagaagcaccgccttctagggaacttcctggaaagaccaagtgggcctgattgctatttgcaccccctgtttactaaatacacccctgcccttttttgctgattcttcttccgtaacgttatggaactttacgaatttcgcgatgatactcgttttctttctgtaatgtcacgaaaccttacggattacgcaatcctcccttctttggcttccggaatgttacggaactttacagattgcgcattaacatttccttttgacttccggcatgtcacgaaacttcacggattgtgcaacaatgctttcttttgacttccggcatgtcacggaacttcacgaattgcctaatgatgggtgccaagtacctcgaagtggtcaaacgagggtcgcatcccaacaaacggatggttcccagacgaaattagggtatgacaattgcatacaatagttatcacacagtctgtatcattaagagcacgttctccccg

SEQ ID NO: 4867 - DNA, 528 bp, Glycine max
ctagctcatttacaagtgcagccattttccccagactttgaattgaaaaattgacagatcatagagcaaccaaagatttttgtttcgaattcgatataatcaagtagtttagatcctattgttgtgcctaggctttaagggttactttctttgttgggcatactcttctttaatgttccagtgaccattaatatacaacctcttattgatatgttccctttttcacctttgtccgtttcatttctctgcatatttatattcattgcaattatatcatttgccgcagatccgataatgagtcctgtgaaagcagcgatattgaggacctggatgttgactttgagcagccagtcaatcaaaccggggaggaaaaagatgaggattggggattcctcttggatttgaggagaatagtggaacgggaagaaagagagataaagtcgcatcaagaggagacagaggttgttaacttgggcacttgtgaagaaaaaaatgaggtcaagattggcacttgtgtgtccgctaaca

SEQ ID NO: 4868 - DNA, 597 bp, Glycine max
tcatgatgatgaatcaagttgattcaagtatttttgataatgacaaagttgatgacaaaaatcccaaagaatgatttcaagattaagtcaacaagaagaaatcaagaagattcaagaatcaagtgaagtttgatttcaagattcaagaaaagatgaattcaagattcaagagaagaaatcaagaagacttcacaagggaagtattgaaaagttttttcaaaaaacaaacatagcacaattttgttttttcaaaagagttttctcaaaattttctaagttaccagagtttttactctctggtaatcgattaccagtttcttgtaatcgattaccaatggcaaagtttgatttcaaaaagctttcaactgaatttgcaacgttccaattgatttcaaaatggtgtaatcaattacaagatattggtaatcgattaccagtgtatctgaacattgaaattcaaaatcaattgtgaagagtcatatcctttcataaaaagctttgtgtaatcgattgcatggttttgggtatcgattaccagtgacaagtttgaataaaaatcaaaggatataactctttccatgggttttagtttttttt

SEQ ID NO: 4869 - DNA, 590 bp, Glycine max
tcataaggctatctatgggctaaggcaggcacttagagcttggcatgatgctctcaaatcatttataacatcatatggtttcacaaccagaagaagcaacccttctctctttatctacatctcgggtaacataactgtctattttttggtgtatgttgatgacctccttctcacaggaaataacactacattcatagacacattcattgagttcttatctaatcggttgtcactcaaaaacatgggggcaccatactactttatgggtattgaacttatacccatgaactcaagcatgttcctctcacaacacaaatacatcaaggatgtacttgagaaatttgagatgcaggatgtgaagtcgtcacccacaccacttgcctcgacgactacactcatgttgcatgatggtacaccaaccaataatgctactcaatatcaaagaattattggtgcattacaataccttaccctaacaagacctggcctctcattctccatcaacaaactctcaatattatgcacaaaccaaccttccttcatcttccacatctcaggcgccttctcgaatacttgaagccactattaac

SEQ ID NO: 4870 - DNA, 524 bp, Glycine max
tcatcctcagatccctcttgatggactatgctaaatttagacagccctcctaggtttagactaacttaaactaagcttcatcctcaaatccctcttgttggactagacttagcttaaatagcttactaaagtttagactaatttagcctaagctttgtcctcagatccctcttgttagactagacttagaccaaacaacattattgtaacagcatacttaaaaccaaaatttaatccgcagatccctcctgtaagaataagtttcaattctgcttcattcaatttctaaggcaacaatacatttcccaatgctaaagtcacctaactatgctcacaaatgggtgattaaaccaagagcatacgaaatttaagcaatgaaagaagcattgaacacaagaaacacaatcaattagatattaaagtaattacatcagctattctttagaaatccccaacaagggtgtttagccagccattacagaagaaaccctaacaataatgagattacaaaacctagctatctc

SEQ ID NO: 4871 - DNA, 436 bp, Glycine max
tctggtgggacatcttgacttgctttccaatctgacattcaccacagattctgccttcttctattttgaaactgggaatgcctctaacaacacctttgtcaatgatattcttcatgcctcttaagtgcagatgtgcaaatctttgatgccatattttgacttcatcttctttggaggatggacatgtggaggagtaactgggttcttgaggcgtccataagtagcagttgtcctttgatctgctgcccttcattagaacgtcattcttctcatttgccaccaaacattctgactatgtgaagcttacattgaatccttcatgacacaactgactgatgctgatcaaatttgcagtcagtcccttcaccagcagaactttgtttagactaggaactacatcctggactagctctaccattgcaggatctttccttta

SEQ ID NO: 4872 - DNA, 400 bp, Glycine max
tcgacgaatatggcacgacggtccctcttgactctgatgtctgctacacgaactctgaacactgagactccttaccgcgatgccccaatctatgagcgcctgaatgcgattataacctaaaacatacatgccacaatgagcttgggtatatatcaagatacttatgccgccattgcctatgtctaaacccatcccggcgacataaccgatccacaacatagctcgagcgatcattatccgacgcatcagacacacaaagttgcccacagaaggagtccacggatgaaatgctgaccacctcaaaagactgaaaagcggttgataaccattctattgcgagacccacataatgcatggacgatgggctgatcaccaagatatgatactcgcctgacactat

SEQ ID NO: 4873 - DNA, 514 bp, Glycine max
  unsure at all n locations
tcattctacacctgaaaaagaggatgagatagttgcacaaaaaaaaaagcttcttaacaaaaattttcatgcaggtggaccttcttctagtaattccgacttacagcagcctcgtatccctcttccattcccacctagagcgattccaaacaaaaaaaatggaagaagtggaaaaggagatcttggagaccttcagaaaagtagaagtgaacatacctctgctagatgccatcaagaagattccaagatatgccaagtttctaaaggagttatgcacccacaaaaagaagctcaagggcaatgaaaggattagcatgggtagaaatgtgtcagcattgataggtaaatctgttcctcacattcctgagaaatataaggacctangtactttctgtataccttgcatcattgggaacattaaatttgagaatgccatgctagatctangagcatcagttagtgtcatgcctctgtccattttcaattctttatctcttggatccttgcaatctac

SEQ ID NO: 4874 - DNA, 437 bp, Glycine max
tttcagcgtgatttgtctttttgtgaggggattttgtgcaaggctcactttgagtgcacatatcccaaggaagattaaaccactcatgcttcaatttatcacactactcttaaaaagttttatatgatttaccaattttagtcaaagtcgaatattcatttttggcgaaactctatgttatcctttttaagtgaaatgtcagaagtgaagcgtaccacattcggtagtgatgtacacatttttccatggctaagtaagggtaattcatgaatctaaattgaatgattaagataagcctacacaataatccaatggaccatgctctaagcttcttttgtccatttaattaaactccacaagtccccaaagctatgggtcattctttcctctcttcatgagctgagccagaggaaaagagacaccattttccacttttc

SEQ ID NO: 4875 - DNA, 504 bp, Glycine max
tcatgatgaatcaagattgattcaaagagttttgatgataacaaagatgatgacaaaaagctcaaaagtcaagaacacttcatgataacaaagatgatgatctcaagaatcaaagaatgagttcaagattgaatcaagtacacttcagggatcaagaggaaagttgaattcaagaatcaagaatcaagtttcaagattcatgttccaagaatcaagatcaagattcaagactcaagattcaagaatcaagagaagactcaatcaagataagtattaaaaaacaatttcaaaaattgagtagcacatgattttttctcaaaaccttttattagagagtgtttactctccggtaatcgattactagattattgtaatcggttaccagtagcaaaatggttttcaaaaaactttcaaactgaatgtacaacgttccaataaatttcaaaatgctgtaatcgattacaagtatttggtaatcgattaccagtgtgtctgaacgttgaa

SEQ ID NO: 4876 - DNA, 405 bp, Glycine max
tttgttgggaatctctgccgagtcttgatgtaaatattatttactatctatttaatgttgctttgatgtgttcattgcttctatctgaatttaattctaacatgtttttggttcgatcacccatttgtgtgtaaagttaggatttttaacattgaaaaatattttgaatccttataactggatataacatggctagataactgtattatcaagacacagagtgcagggactctacttttattatgttgtgaccttaatgttgttccgctaggccaaattcgatgagggatccgagaacgaaatttagttagaattagcccattcatgcgagacatcagtgtttgggacaattgttctcaccattgaacaccgaagccacatttgatagagaaaaactttttattg

SEQ ID NO: 4877 - DNA, 326 bp, Glycine max
aatacctcagcttcttgacatatttgggaaattgattttatatacaaaaggggcttgcttcagaatattccatttttttggctttgacaagtcttcatatcattgagcttatcggattaagatgtattccaaaagaagaacaacgagcattttactgggaccttacccttgatttattataaggggaaaagagggttaaaataagaataaaaaggaaaaagaccccttcctaaatacagctttggtgcaccaaaattgtcctggcttcacattgacataagcccgttaaacaaggatatcctatttcattgggtgctgaatccttc

SEQ ID NO: 4878 - DNA, 562 bp, Glycine max
tgaagctcaagaaaagcttgaagaagttttggcttttacatgcccaacttccttgagtcgcatttgtattggttgttatcttggttggtgcatcttagtacatttgatatttgtgttgcatcatgcatcatcatggttagtgtgaagaaaagtttctaagttagaaaaatttctttagaggcaaaaactgttttaatcgattacagagttgtcgtaatcagttacaacaagttgtttgaaccttaaagagctaagtctcgtatcggtttaattgattatagtagtattttaatcgattacactgttgtttgagataatgattgatttattcaggagtctctgctttgatcgattaccaagtggatgaattgattacttctttcttgttcaagtgttcaaaagtgaacaagaacactctaatcgattacttaggacatctaatcaattacattgttcttgagttgctttccaaatgttggatgaacactttaattgattacttagataatctaatccattactttgttaaaataatcaactatcttatagatttaattgatta

SEQ ID NO: 4879 - DNA, 621 bp, Glycine max
aaatggattttaaacccccaaaattgtaatactaaatatttattacctatacttaatagaaaatacttataacactacaaaataaccattaattggaagaagttgatacaatttacacaagttttatacacaaaagttagtcgtattcaccgactaacaccttttacataacaaaaatatgtttatgctttataatttttttataaaaaaattgcgattaattgcataaataagttttttatctataggaattaaacacaatgccaaaggatttataatactcacatcctgctcaacaaaaatatgtttttgatttataattttttacaaaaaaaaaattgttattaattacataaatatgttgctttatttacaattgatgatataagctaccctttttaatccttcttgaattaattatgatacacgacacaaactatcttaataatgactcattacttttttaatagtaatagaataaaatggtcgataattatttttatttaaatttgtattattaatgacacttagtaccctttatttataatcaattaattgacgtacaaaattaagtaactatgatacaattagttgtattcaataaaaaaattactcttttta

SEQ ID NO: 4880 - DNA, 430 bp, Glycine max
gtaccactatttctttaacattttgggtttggttctccccttgaaagcattctagtgtgctctgcttgagcacttgaaagtgggcccttctcaactccaccccaataatagggtcatggtgaaagcctttgagattgtgtgccctttctttaaactttgaaccaatgtgcctgtgtacccgcacttttttcatatgatatcgacggttacattcagtggggtctacttgaacagcatgttcaaaaagcttttctagttatacacgaatgtatcacactactttaaagattgtcgcttagaggacctacctactgaccttgatgttgatggattaccactaatgttcaagcacatgaggagctctgcttcccattctataggaaatgtaaccccaactggtttcaggttattaatgaggatctatagaacc

SEQ ID NO: 4881 - DNA, 655 bp, Glycine max
tcacaagcaagtttccatcaagtggtaatcagagcacaagagcttcaagtaggtgctccttaaagctccattgttgtttcttcatttttctccatgtatttcctcacatgtattgtggtaaatgttgttaacatgattctttagaatttacaccgattaaacttgctatataagctagatttgattttctatggttcaaatttcttgttcttattcttgaaccatgaattatgttaagtttaggttcctttgagttttgtattgctatttttttgtggctgaaacctaaactataaaattattaaaaaaacattaaagtagaagaaaacctcaaaaatctagagtgacatgttcacctattgtaattttgtcatagaagttatgtctagacatgaaacttgtcacataagtgtgctgaattttatttttttgtttctttgtctaactcatttgttcataagtgtatgaaattcttttagcctcttagttgatttgagtcaactcttgcatgttaattagtccttaacatgttcatgcaaaattcttagagagtctttgattgtgaaccttttttttgaacttttaggtttccttatgattgtgtttattgcgaatttgagtttttgtgattaaaattgctggctgaaattttgat

SEQ ID NO: 4882 - DNA, 347 bp, Glycine max
tctcgatatattatgtccccgaatcagacatctgtgggaagagttatgaccatttgtatttctcgagagctaccgtagttcaatttcgagtatctcgatatactattttcccaaatcggatatccttgtaataacttatgaccaatcgaatttctcgagagcttgtgttgttaaatttcaagcgtgtcgatatattatgtcctataatcagacatccgagtgaaataatatgactagtcgattttctcgagagcttgctttgtccaatttcgagcgtctcgatatattatgttccaaattcggacatgcgtgtgaaaagatatgaccattctaatttatcgaggagc

SEQ ID NO: 4883 - DNA, 412 bp, Glycine max
ggccattaagcctatcatatgctgacaatagccgagaagccccagaatctcttcgggggccggaagtaagatgtcctgcccatcgccttggcgcttggctaataatcggggaagttcttgactcccgctcaaggcaagagcaaaccgatccatccacatgggtgcctcttggtgtaaagagtcgaccacccttcctctagcctctttttccgcatatacttgggcatactcatccgcgaatctatgctcgtggagcggggctagacccaactcttcttggtacttggcgatgatagctagcaagtaggtttctgtctcccataacacgctgaaacaagcttgttttggaacctgaacaagcaatcaattcctcttttagaaccatgcctatgtgctcgcgacaggccccttt

SEQ ID NO: 4884 - DNA, 581 bp, Glycine max
ttgagactaagatgaagaatttcacaaaaattatttaaacctatgcacaacaaacccacaacagttttagaaaaatcgtcattgaccaatgagtctcaatgacgatttttcaaaaattgtcatagactagctaatgttaatgagtcccaacgacactttttccaaaactgtcgtagtttcactaatcttaacaatgattcttccaaaaattatcgttaacaacttcacttaattacaaaaatgtcaccacttttttttaaagacaatttttataaccatcatagatttgccgtcctggaatgcatgttttttaataatgaattggaaattaagcgataatatattcattggtgaatatcattaacaatgacaaaagcaactcactagcggtcaataatactagaggataaattatatgtatatgagatagacaaaataatagaatttacatataatattccgtaatattgtccttatttataggagcaaacactatctttacttgaagactatgtgatatctcaacattgatccagagttttatatgaacaatataccacttataaggatgaataaaaagt

SEQ ID NO: 4885 - DNA, 580 bp, Glycine max
cccatcttggtggtgaagctccttcttccatggcttattccctagtggatggcgcctcctctcacctcttttcctttgtcttccgctacatctccatggggtaaaatcaccattgaaggacctcattgaagctcaaagatccagccaccatagaagccccacaagcaagcttccatcaagtggtaatcagagcacaagagcttcaagtaggtactccttaaacctccattaattttttgctttaccttctcttccattgttgtttcttcatttttctccatgtatctcctcacatgtcttgtgataaatgttgttaacatgattctttagattttccaccgattaaacttgctatagaagctagattttattgtctatggttcaaatttcttgttcttgttcttgaaccatgaattgtgttgagtttaggttcctttgagttttgtcttggtattttttgtggctgaaacctaaaccataaaattcttacaaaatattaaagtagaagaaaacctcaaaaatctagagtgacttgttcacctattgaagtttgtcatagaatcatgtctagtcatgaaac

SEQ ID NO: 4886 - DNA, 564 bp, Glycine max
  unsure at all n locations
atcgttcgtgtgtatgatatctactccacaaggtttgaagtaaaggagaccttcaatcctatcacgcaacgtggcggaaaaaagtggacagtaaacttgaatgaccattattgtcaatgcggaaagtattctgtgcttcactattcatgttcacacattattgcagcttatggttacgtgagcatgaactactaccaatatatagatgttgtttacacgaatgagcacatcttaaaagcttactccgcacaatggtggcctctcangaatgaagcgacaattctccttctaatgacgcatggacacttatccctgacccaactacaattctttcgaaaggtcggccaaaatcaacaatgataaggaatgagatggattggctcaaaccgtctgagcaccggcaaaaatgtagtagatgtggagcagaagggtccaacagcagatgatgtccaatgncatctaaccgtgggagttgntcatttaattgatttatgtatgttagacgagtgacttgtattgggtttaatttctattgaatgtatttaagttggggtcctcaatgaa

SEQ ID NO: 4887 - DNA, 552 bp, Glycine max
tgtcagtaagtacactgaagcgcatagtgcaagggaagtgcgtacaacaccatgcatctgtgaggagtcctcaagttcattatttatgctgtgaactgcaaataaagagtgcacacaatgcaaccatcagaccatatatccatgaggcaatcaggaaaatccaaatatctaactgcaatcatgtcatgctcctttgtaactgaaacttttgcaatggttgtccgtttttaatagtacttggccatggggaatcagtttgaaaattctatatcagacttcaagcaaccgagcatatgaagcaaaagatatactgacattcatcatgtggttaacaaagaatgaactataaaatgaataagtgatttgaactcatggtgtacagcaagaaacaaacaaaaataacaaggatattttattttcaaatatgtagctgtcagattgacctcacaaatttttcatgcaaattattaaatagcttatagttatataagtatgatgtgaataaaaactaaaacaaaggaaatggaaattatacaaaggcctaaaaattta

SEQ ID NO: 4888 - DNA, 301 bp, Glycine max
atggcttagtccctaacgcgaggcgcctccacacacctcttctgcatagtctaacgctacatccccatggagtaaaatcaccattgaaagacctcatcgaagctcaaagatccagccaccatataaaccccacaaacaagctaacatcaagtggtaatcagagcacaaaagcttctaatacgtactccctaaacctccactaattttatgctttaccttctcttccaatgacgaaacttcatttttctccatggatctactcacatgtcttgcgaaaaacgactgtaacacgataatttat

SEQ ID NO: 4889 - DNA, 535 bp, Glycine max
taataaatctatatatggtttaaaacaagcctcctgtcagtggtaccttaagtttcatgggataatttcttcatttgattttgatgaaaaccccatggattaatgcatataccacaaggtaagtgggagtaaaatatgttttcttgttttatatgttgatgatattttacttgacaccaatgatcgaggtttgctacatgaagtgaaacaatttcaatctaagaattttgacatgaaagatatggatgatgcatcttatgtcatcgacattaagattaatagagataaacctcgaggtattttgggtctatcacaggaaacctatattaacaaaactctagagagatttcggatgaaagattgttcacgaagggttgctcccattgtgaagggtgataggtttagtttgaaccagtgcccaaagaatgactttgagagggaacaaatgaaaaacatttcttatgcttcagttgttggaagccttatgtatgctcaagtgttcacaaggcctgacattgcttttgcaattggaatg

SEQ ID NO: 4890 - DNA, 463 bp, Glycine max
  unsure at all n locations
tgtataagcgagtgcaagaatgcaggatagttttgaaaccagtgtctgtgacacgacaaaagccaccaaggcatatgctctccatgtttgcacacttgtcagccattagaagtaatcccagatcattcactcttcggaagtaagtaatttggaactcttggcttcgaaccaatgaaagatgtttcaatctcccaagttgattaatttgttgaagaccagcattggttaggtcaaatgtaattcttggttcaatcagtggtgcatcttgaagatccaaatgggtcaaaagcatgagacctttggatattgtaccaaccatagcatcagttatatagtctacattaagacacagtttctgaatgcttggaagtatggatggttgagcangatttgagggcagctgggatcccaaatttgggctaagcagttcagtcactgtcactgaagaaatgtagccaatctc

SEQ ID NO: 4891 - DNA, 598 bp, Glycine max
  unsure at all n locations
ttcataagtgaaatcaagtgcaaccatctcccttagagtcctctcacgaggtggaggttgagccatgttctcagtatgaaaattagtaattgaatattcagaatcaccaacaacagaatactcacaatgctcaaaatgctcacaatgcatagaatgatcaggatgcacactatgcctaactaatctatgaaaggttctatctatttcaggatcaaagggttgtaaatcacctggattgcccctagtcatgcaccatatgcagcaaataatgtgttctcaaacaagcacctaacaagggggtaaaactacaactatagtcaaaagatatccaagtaagttgaaattttgtgagcaacaccctaaaataatgaaaagatagcacaaaaaatttcaaacaaaaattaaaagtaaaactatgaaaactacctaagcaaagtttagaaaaataagacaataatacttaaaaaataaaaaaagaacttagtaaatgactgatttttcgagtttgggagaccccaaccagctaaagcgggttgccccaatatgggcaacttnttttctacctcaaatgcatatataataatagtcattctgatac

SEQ ID NO: 4892 - DNA, 543 bp, Glycine max
  unsure at all n locations
taggctaaactttcataagctatttaagctaagtctagtccaacaagaatgatttgaggatgaagcttagtttaagttagtctaaacctaggagggctgtctatattgagcctagtccaacaatagggatctgaggaagaagcttggattgattcattccaattggggatcgaggtttagtaatttaggctacaacatagaacacaaaagcatgattgattagagaaacatccttatatgcatcagctggtctgctagaaagacccaacacttctacctattgctatcaattttacttacttacatttttactgtttttatcctagacatagtttaattctactttaaaccatcaattatcaatgtttctttcaacaatgccttatttctgaatttaacccagtcttagactagtttcattgagttcgatactcagattcatccattttaatttttaaatacttgacgatccggtgcgctttctggaaaatcgggttttccttgaatatanttgtacgaagaaaaagtggaacaaaaagtaac

SEQ ID NO: 4893 - DNA, 251 bp, Glycine max
aaccgaattcaaaaatgccaaaatgatgaacctaaggctggcaactcctaaattcccctaatattgcttttgaaatggggggggggaaaaatggacactaaactttaatgaccattattgtcaatgcggaaagtattctgtgctttactattcatgttcacacattattgccgcttatggttacgtgagcctgaactactaccaatatataaatgttgtttaccccaatgagcacatcttaaaagcttact

SEQ ID NO: 4894 - DNA, 439 bp, Glycine max
tggaatgatctgcaaaagctaaacccttcttgctggacaatgtctgcttttaaagtaaacacaaagtgtgatttgcaagtaaataacatgtataaagcattcaataatgtaataatgtagtacagacataagccaattattacactattggagggaattcaattttacataagttctagaattgtgaagttgaggactaccttgatgaagtatgaggggtcaatctgtcctaaaattaagcaaatcatggaaaagaataaaaaagcatgtgaaccatggcgggcacattggtgtggtgatgataatctgtttttgtttgaagtgtcaaaaggcatggaaaaatatgttgtcaatcttaaacaataaacatgttcttgtacaaagtgggagtgtactggaattccatgcactcattccataacatgcatgtggatcaatg

SEQ ID NO: 4895 - DNA, 476 bp, Glycine max
tctttgagaaaactgccttgagaagctagagcttatctacatacacctctctaatagctaagcgcacctgcttgagatgagaagctagagcttagctacacaccccctataatagctaagctcacccccattccaaaaatacatgaaaatacagaaaaaagtccctactacaaagacttctcaaaatgccctgaaatacaaggctaaaaccctatactactagaatggccagaatacaaggcccaaaagaaggaagaaccaattctaatatctacaaagaagagaggacccaaccttggtccatgggctcaaaaatctaccctggggttcatgagaacccgaaggccttctttagcagttctagcccaatcctcttggagtcttgtatccaatacccttagggggtaggattgcatcacttaccacctatttaccaaaactaaccgcagactgtaagttctaccaacaagttacat

SEQ ID NO: 4896 - DNA, 238 bp, Glycine max
ttcgagaaattcaaatgggcaaaacttttcacactgtagtcctattcatgcgcataatatatcgaaacgctcgaaattgaacatcggaagctctcgataaattcacatggtcataactcttaactcggatgtctgatcttggcgcataatatatcgagacgctcgacattgaacatcagaagctctcattggtcatatacggtcactcgggggtgataaaaaagcgcattatatacct

SEQ ID NO: 4897 - DNA, 511 bp, Glycine max
tgtaggattatggggtacccatcgcatgtggtactatgtggcggtcgggcgatggtgcacaacaaattttccacatcccataaatcgcgcataaacccaccatcccctgttgcccacctccaactgagctcacgtactcccacgtagcccatatcctcgtttctctcaacatcgggtccccatcaatcctcccaagcttccccaacatccaagtaattcaacattcaaacagcacaaactatcacagccaagaaaacagggcaaaggcagaaaactctgcccaaaacaccaacaaaaatcacagctttttctcacttaaagaccccagtaacatttcctttgttccaattcgttaaccgttggatcgactcgaaacttttactggaagtctctagtacataaaatctacattttgaccgttgggatctactaacaaacatccagaactcattctgaattactctttccacaaccagcaaatacatagaatttttctgcacttatgcaaaat

SEQ ID NO: 4898 - DNA, 505 bp, Glycine max
tgttatgtatttcgtgctggaaaggtctctacgagtgcctagatgaagtttctgtggactcatctggttacatatcccatattgaaaggtgtatggaggttctatttactctattgccagtggttcaatcttctggaagtgtatcatctgcggatgtaagttctgtagaggaatggtctgaagctgtaagatgcttacggaaggctccgcagatttggctattggattttcttaaggtatggtatgcatacacattacactacatgatatattttactgtatctcttcttcatcatcatcaataacaacaacaacaacaatcatcttttactatacgtgatcatttctgttgtttggtaccttcattatgttgattttttgttgtttactttaagctaatcctccttggcgttgattcaaattgattgaggtcaagcttgtttattagatacaaattgtctgtttaaaccctgtgcgtgaccaaagcttgccgttgtaatcacac

SEQ ID NO: 4899 - DNA, 335 bp, Glycine max
  unsure at all n locations
tgccgcccagctcgcccaggcgagctccgctcgtcccggcgagctaaggttgcttcctccanaaacaataaccttctggaagaatcttcttggaggcccaagagggcctggttgctatttgcacccccatttttgctaagtacacccccctgcctttttttggtgatacttttttcgtaaagctacgaaaacttacgaatttcgcaacgatacttgaattctttccgtaaagttaccgaaacttggggattacataattatcccctttttgacttacaggatcgtacagaacctcactaattgggcaacgacgcttccgtttaatatacaccgtg

SEQ ID NO: 4900 - DNA, 541 bp, Glycine max
tcttgaacgtgatcaatatattcattggtacagaataaaggatgaagacgtggttcatgatagacaacacctagaaaataaaccggtacagacttccactgctcgattttgtttgggtgacaccgactgggatgacattctctaccggttttgcatatgtggagggtgaacacgttaataatttggtttgggctttacaacgcttctgaggcctttttttaaagcgtgatgccctccctggagttatttccactaacagagaccaaacattgatgaatgcagtgaagactgtattccctgtctgtacaaatttgttgtgcagctttcacataaacaagaatgtgaaggccaaacgtaaatcattaatttcgcaaaaaaatgcttgggattatgtcatggattgttggggatgtctgactgattgtccttcaaaacaacagtttgatgaatgcctgaagaagtcaaaatggcttgcgcaccttggccaatgttggtgactatggtaagaaacatggatatatcacacaagaaaatttttttt

SEQ ID NO: 4901 - DNA, 621 bp, Glycine max
  unsure at all n locations
tgcctcgaagaggtccaggaaggacaaggcagccgaaggaactaattccgctccggagtatgatagtcaccgctttaagagtgctgtacaccaacagcgcttcgaggccatcaaaggatggtcgtttctccgggagcgacgcgtccagctcagggacgacgagtatactgatttccaggaggaaatagggcgccggcggtgggcatcactggttactcccatggccaagtttgatccagaaatagtccttgagttttatgccaatgcttggccaacagaggagggcgtgcgtgacatgagatcctgggtaaggggtcagtggatcccgtttgatgccgacgctatcggccaactcctangatatccgttggtgttggaagagggccccgaatgtgagtatggccagaagaagaacccgtctgaccggttccatgaggaagccatcgccccacttctatgtttaccgagacaagattttcccggactgctgcagggaggcgagtgcaaatcattcccaccaacataaccaccctgacccaatattgatgaccttgcttcttagctaactcctgcccaccaatcataatttccaccttcccctgccgaattgccacatttttt

SEQ ID NO: 4902 - DNA, 333 bp, Glycine max
cttttgagctcattcctttacttgcacataagaaagcaagtgtccttaagtgcccaaactcttctaacatctgctccaattcctcctgaaaaagagatgtatttcacaccgtcatttttcatgcaacccccaggtaattaccattatgtcatgcaaccaaaattttctttaaagagcaccatggatttaaaaaagggaatttttttcattttcctgtatatgcttgtgcttgacattcaaagaaagttacgttttggtttttcatgtttattttgctgctgaagctattctttttctcagaacttcaaatattatcatttcacgaaaaagaaa

SEQ ID NO: 4903 - DNA, 503 bp, Glycine max
ttactatgcaaggaataaccaaggaaaattccttcatttgacttagcatcaaactttcctaagttttcttttccattgtttaatacaaaacatttgcaaccaaaaacatgaagatgcgagatgtttggtttcctgccattgaacagttcatatggagttttctttaaaatgggtcttattaaatccctattcatgatatagcatgcagtattaacggcttcagtccaaaaatattttggaagaagagtgtcatttaataaggttctaacaatttcttccaaagacctatttctcctttcaacaactccattttgttgaggagttctacgtgcagaaaagttatgttcaatgccatgcttaccacaaaataattcaaattctttttttcaaattcacccccataatcactcctaatagatataattttgagatttttattgtcttgaatgatttatgctagtttcctaaatacttgaaatgcatcattcttatgagtgataaat

SEQ ID NO: 4904 - DNA, 169 bp, Glycine max
tatccgtgacgaaattgaatttctttttcttaattgtctagggtctactcacatgctccatttggggttctgtggggtcctataaaccatgcgccagaacgataagtctaatgaacaccaatgccaaaaataggccattgttgtttattaatctcaaacatttgtctat

SEQ ID NO: 4905 - DNA, 511 bp, Glycine max
tgagggaaaacttgatgccttggtcaacctaataactcagcttggcatgaatcataaatttgcacctgttacaagagtctgtggtatatgttcttctgcagatcaccatacagatctttgtgcttctttgcagtgatctggagtcaatgaacaacctgaagcttatgctgcctacatttataatagaccccctcacagcaaaaccaacattagcgaactaattatgatcttccaagctacagatacaatccacgttggagaaatcattcaaatatgagatgggcaagtgcttcacaacaacaacagtctgtccctcctttccagaatgttgctggtccaagcaaaccatatgttcctcctccaatacagcagcaacaacgacaacagtcacaacgaagacgacaagcaactgagacttctccttaaccttccttagaagagttagtgaggcatatgaccatccagaatatgcaatttcagcatgagacaagagccttcattcagagtctga

SEQ ID NO: 4906 - DNA, 570 bp, Glycine max
tcagctgcagcaattaccctgccagaaataaggtttcccccactattctgtgtattattctccaaagaaaggtctttccagaagccggatgaataatttctagctaggatgcgccaaatatgcacagcttttgagctcattcctttacttgcacataagaaggcaagtgtccttaggtgcccagactcttctaacatctgctccaattcctcctgaaaaagagatgtatttcacacggtcatttttcaggcaacccccaggtaattaccattatgtcatgcaaccaaagttttctttaaggagcagcatggatttaaaaaagggaatttttttcattttcctgtatatgcttgtgcttgacattcaaagaaggttaggttttgggttttcatgtttattttgctgctgaggctattctctttctgcagagcttcaatatgatcatatcaggaaaaggaaaaaagtatttctcaaatctacatagaaataatgggtataattcaattcacgacatatttattttacagtattaattatgaaaaatgtattgaaattacttcattcaataac

SEQ ID NO: 4907 - DNA, 546 bp, Glycine max
ttttcctcttgacttcatctccttatttcatttttttaaaacaaatttagccaaaataaccactacagacacattaccaaaaagctggcagcaaaatcaatgacgaaaaaagaagctgagacacagtgccagttgctgcttatcaatcccaaatttttttcaatttaacttataaaataattattataaaaattaatagatttttttatatatgataatttttttattaaataacaataacaatataattggtataaatattattcatttattaaattttagttggagagaataaaagtatcataagtttgtaagtcattcacattcattataaaaatatatataaatataaaaaataatataatttactaataaatccaaagatttccttttaatccaaacccaaagactaaatgtatataaatttatatgcaaactcattcaaaagattgatttttgttaaagtttttatcattaataatcataaaaaaatttagcataacttataaataattttacaattaaaataattttaaaaaatatata

SEQ ID NO: 4908 - DNA, 358 bp, Glycine max
tgcctgtccgatgcagtagtaatgatggcccgagttatgttggggaacggttacgaacccggaatgggtttagggaaagacaacggcggcatgactaacctgataaatgccaaaggaaatcgtgggaagtatggtttaggctataaacccactcaggcggatataaagagaagcatcgtgggaagaaagagcggtggtcaaagctcgcggttgaggcaagaaagtgaaggaagcccgccctgccacataagtagaagctttataagcgcgggtctgggagacgaaggtcaaatggtcgcgatataccaaaatgatgttccgagtacattggatttggtacgaccatgccctcctgatt

SEQ ID NO: 4909 - DNA, 343 bp, Glycine max
tgtcacagttctgccatcattggtggtgacttgaaaagaggggattgtccattgaggtatgagtttttatgatttactggtgtgtttataaattactgcattttgttgtttttatgatttttcacttcctactacttttgggtttgatgttgtgataactatcttaaggattacattacagctaagagtggatttgattgctgatcaaacacaaaaggtatttgataggatcctaacaaagttaggttgtactgtcccaccagttcctagattttgcatgcaaaaaggaggtaagaagctgcattttttataccatgcactttcataccttacgtgtgtatgg

SEQ ID NO: 4910 - DNA, 792 bp, Glycine max
  unsure at all n locations
tggctgacccaatgaaccctggacaccgcggnnaattnagaggcgcgttattgttccgccccaattgaagttctccaggagtaatttggcactattcaacccccaaagggctctctggggccttttgaaccatttgtaaattagtatgccccaaatttacccccctggtgaaacctattacccatttgaacatttgtaagcattccgtgcttaagtgccaaaatctctttatatgtggtcccttatttgagcttccagagagaatttttaaccgttttttttcgcaaaccctccgtagttcaccattttggcatgccaccaaaattttccttcaagagcagcatggatttgaaaagaggaaaatcttttaatttcctgaaaggcttgtgcgtgaaattcaagaacgctaagttttggtttccacgtttattttgccgcggaaggttttatgtctctgcagagctttcaaaagatcctatcaagaaaaagcaaaagccttttctcaaattctcataaaaataatgggtgtaatttaatttacgacatatttattttccggagtaattttagaaatgtattggaataccttaattccataacccaatacatcactggttgaaatatttggcagtcactgttcatttggttaaagactttctcttatcagaataaacattccgtattttgcttggacaaataatctccacttcagctacaaggaacctatacattatcatgttagcactatcttgaaagcgtttaaaccgaccatctaatcgataatttcactcg

SEQ ID NO: 4911 - DNA, 433 bp, Glycine max
tgcacaaaaagtaactaaatatttttttttacaaaatgaagtaactaactaactaaattccactaataatatagagtgaatactctaaaggaagggataggccttgattaagcccatctaatcttcctaattaaactaattacacaaaacaaagcccaaactcacaacccaattattcaagtgactgaattggccaagcttaatttgaccctggaaattgctgaattggccaaagcttatttgtaaaaaaattgaatatatttttgttagacttccaaggacaactcacatgctccatttggagatctgtagtatcctctagaccctgcactacgcagataggtcaagtaagaacaaaatccaaaaattagctacaattcttaattaagctcaatcatttgcctaagaccaaaactgagttaaggtgaaaaat

SEQ ID NO: 4912 - DNA, 435 bp, Glycine max
agctttttcggagccatctcctgcaagagataaatattcacgaagtcagtttacccagaattttcatcttataaccaagaccaaacaacaggggggtaccactttttctgaaatgcaaatgtcaatgtgaatttgggcaaacccccatacattcaaagcattagctacctaaatcacacacacacatttataaagtattttggctaccttaagatcacatacatgcattccacagtatgtcggctactttgaaagattgcatatcttgaaaggcacttaaactaaattaacaacgtatttttgtcacccgtgttaatacaataaaaaagtatattggcttgctaccacgcaatatatacacctatgatgccttcttgctacctaacaagcaattcatatttaatcgaaagaaatattttgctacccacacgattg

SEQ ID NO: 4913 - DNA, 350 bp, Glycine max
tcatgatgaatcaacaatgattcaaaagtgttttgatgatatcaatgatgacaacaaaaagatgatgacaaaggtgatgaacaaaaagcacaaaagatcagagaacaactcaaatgaatcaaagaacatctcaagtgaatcaagaacaagtcaagagttcaagaatcaaggagaattcaagactcaagaagaaagcctagaatcaagaatcaagaatcaagaatcaagaatcaagactcaagatctcaagaatcaagatcaagaatcaagaatgaaggaaagactcaatcaagataagtattaaaaaagttttttccaaactttgaatagcacgtgagtttttgaccaaa

SEQ ID NO: 4914 - DNA, 364 bp, Glycine max
  unsure at all n locations
agcttcggcactgttaagggtaaagactcttcccgtggccttcagatgtccagtntggtcattcaggcccctaccattctgctccttcttgggatatggacaatctctctgaatattgttggatcaagtggcctcagaataattaagaagggggggttgaattaattattcctaaacctttactaattaaaaatttactcttctaaggattttactatgttgttaaataaatgaagaatagaaaagaaacttaaccaaaagtaaaagcggaaattaaagtgcacagcggaaattaaaagagtagagaagaaggagacaaacacacaagagttttatactagttcagcaacaacctgtgcctaca

SEQ ID NO: 4915 - DNA, 227 bp, Glycine max
  unsure at all n locations
ntntggagtagaaacatgggaccaaatcattntatttcagatagtcgtatctagtcaaggtctgagagaccatacaagttttctagcgatttctaattatatgggccattaagtctatcatatgctgacaatagccgagaagcccatgaatttcttcgggggcggagtaagtgtccgccattgccttggccttggctaacaatcggggaagttcttgactcccgttc

SEQ ID NO: 4916 - DNA, 390 bp, Glycine max
agcttattactgcttcttggatggatactctggatacaattagattactgtggaccccaaggatcatgagaagacgaccttcacatgcccttttggtgtctttgcctacagacagatgttgtttggattatgtaatgcacctgccatatttcagatgtgcatgttggccattattgcagatatggtggagttggagcataaagcctaatgggccctcaaactgcttaactttgattaagctacatctagagagaagatgaagttacagttgctagagttagaagaaataaggatgaacgcatatgaatcatccaagatttataagcaaaagatgaaggcgtatcatgacaagaagttactaagacaaaacttccagccaggacaacaagt

SEQ ID NO: 4917 - DNA, 378 bp, Glycine max
ctaagctttagaaaacatgagcctaaccttttaattaaataggtcagttcaagtcagactttatgtatgttaagtcgtaggcccctgtaggccggcctgacctattcccacccctaacaattacacgcactcaaaacttaaatcctaaaacattgcctcaaatcctttaatttgaaaacaaccctcgtatttttttatgagacatatcggaataccacttcatcaaccacgccaataacgtataaagcaaccacaagataaacgcatgttatttgaaaagccataagtacctcaatcaaaatcaatgcacaaattggcaatgatcttaccaaccaagagtccagtttcaaaatgaccagcaatgacagcggaaaaatc

SEQ ID NO: 4918 - DNA, 314 bp, Glycine max
  unsure at all n locations
agctttgagccaatttttacgacaataactttttactccgatgtctgattgagtcccttcatatatcgagacgctcgaaattgaatgttgaagctctgagccaattcaaacgacaataactttntactcggatgtctgattgagtcccgtaatatatcgagacgctctaaattgaatgttgaacctctgagctaattcaaacgacaataactttatactcggatgtctgattgagtgcccgaacatatcgagacgctctgaaatgaatggtgaacctctgagccaattcaaacgacaataactttttactcgga

SEQ ID NO: 4919 - DNA, 244 bp, Glycine max
tcaacattcaatttcgagcgtctcgatatatgacgggactcaatcagacatccgagtaaaaagttattgtcgtttgcattggctcagagcttcaccattcaatttcgagcgtctcgatatatgacgggactcaatcagacatccgagtaaaaagttattgtcgtttgaattggctcagagcttcaacattcaatttcgagcgtctcgatatattacgggactcaatcagacatccgagtaaaaa

SEQ ID NO: 4920 - DNA, 347 bp, Glycine max
tcgatcattttccaatccacatcattcactaattattcagggattgaataaaataaacaatggccggtgtcggtcgctatatggccccgactgatattcttcaaccgacattgcgcaatttcttttaaaaaagctggccgataatgtatttttaccgtagaggaagatttttgtttttggattccctaaaaaatttacgatgtaggtcggctaggtttttccctgcgagctcaacccaggttgtgtttcggacgacactggcatgttctcatttattaggccaagaaaacgttagcccactccggcaccaaaaaacatcatcaacggaaattgataaaaaaaaatga

SEQ ID NO: 4921 - DNA, 216 bp, Glycine max
  unsure at all n locations
tctatataagctgaaccattntatcaataaacacaagttgagttntattcagaaaattagagtttatctcttttatcttagtgagagtgattctcctaaattcttgagtgattcaagaacaccctggctgtatcaaaggactttcacaacctttgtgtgttgccctcgttggaaagagtgattctttccttcctttcatcttcacccttggtcttt

SEQ ID NO: 4922 - DNA, 406 bp, Glycine max
agcttgtagaagcaaaaggccagctatggtgttcaagggtggatttgaaaaggcctatgactcaatctcatgggtttttttggattatatgctgcaaagaatgggtttttgccacaaatggagacactggatgtctgcctgtctcaagtcagcaagcatttctattcttatcaatggcagtcctacaaagggaatttgctcctactataggtttgaggcaaggggatcctttagcccccttactctttaatatagttggagaaggcatcacaggattgatgagggaagcagttcataagaacttatatagaagctatatggctggaaagaaaaaggaacccattaatattttgcagtatgcggatgacacaatttttgtgggtgaggctgagtgggagaatgttat

SEQ ID NO: 4923 - DNA, 313 bp, Glycine max
  unsure at all n locations
tataagaacaaaattgcctcaatcatttccaaatatgcatgtgaattangaagcatcaacaagaatcaagccaaggctattctgcaagcaatcaatggggcaaaacacaccaaatgattatgatgatggatggctcanattctcacaaaggtaaactcatcactttcaaattgagctttaaaaactatcatgacatgtagaggaaaatcaatgatttcaaatcacaaaatgtcaagaaacttttattntcaaaacaattacccatttcttgaacatatcctatnnattaaagaaaacatgcaaatcgacatgc

SEQ ID NO: 4924 - DNA, 298 bp, Glycine max
agcttacaaatatgttttagatccaagcacatatgtaaaatcagatcaaatctagataaagatgagataagatctagatgaaataatatctagatgatatcaaatctaaataatatctagataagataagatctaattttatagaataaattagtctgccctcttcaagtccaagcccaattctagattcaagcccaatgcttgattcaagcccaatgcttcattaattcctgaaattagataaaaacatcaaattagctgaatggtcccaaataataaaactgcctaataaaattga

SEQ ID NO: 4925 - DNA, 221 bp, Glycine max
  unsure at all n locations
tgtgagtatctacatgagatgaagcatagagggttgcaacctaatgttgtaacttatagtacctaattgattcattttgcaaggcangcatgacactggaagcaaataaatttttttgttgacatgatacatgttggtcttcaacccaatgaatntacgtatacatctctaattgatgcaaatcgtaaaatacgtgatctcaatgaagcattttatctgga

SEQ ID NO: 4926 - DNA, 347 bp, Glycine max
  unsure at all n locations
agctnttaggctgattggctgctttgttcataggagatttctagcctttnttcatatctatagtgtgtaataaaaagggaccaatagttgtacagtttgacatataagaaataccaagaaaaattatattctgattacatgaaaaccctgaatatatcaaaatcatatattacatattatatataacaaccatcaagaccaaaccttgtcctattaggtggtgctagttagctacataaatcaaatatattcagagtaaggtcccttttaattttatatgcaacaataagaaacataagaaagaaatatgtntattgtatcatgtcaaagttaagcctagtactaaa

SEQ ID NO: 4927 - DNA, 408 bp, Glycine max
  unsure at all n locations
tgtaggattatggggtacccatcacatgtggtactaggtggcggtcgggcgatggtgcacaacaagttttccacatccacaaatcgcacataaacccacaatcccctgttgcccacctccaactgagctcacgtactcccacgtagcccatatcctcgtttctctcaacaccgggtccccatcaatcctcccaagcttccccaacatccaagtaattcaacattcaaacagcacanactatcacagccaagaaaacagggcaaaggcagaaaactctgcccaaaacaccaaccaaaatcacagcttttcccacttaaagaccccagtaacatttcccttcgtccaattcgttaaccgttggatcgactcanaaatntactggaagtctctagtacataagcctacatt

SEQ ID NO: 4928 - DNA, 405 bp, Glycine max
  unsure at all n locations
atatatctaatcgaccattggcactactgttcctgtgagagatttggatggacatgcgtgtgtgatacgcttctatatgtgaatcatctgatggcctctaatcaagatgaaatgagtgaccttactgcttctttttgattcngcctcacgcgccattttaagactgtgatgctgatttttcaaccgtataatgacccgtgcatgagaagaaatccctcacccttgtacaccaagaggaggatgaatctaatatattgttttacgtgctgagaaaaaagcttatatgttcccatgtctgagtgtctaagatcccaagtaaagttctaatgaaccataatgtgccttgtcggtgtatatgaccgcatagcttttttttgcccttaacattattattatcctccatct

SEQ ID NO: 4929 - DNA, 248 bp, Glycine max
tctccatctccttactgttatctgaaaaagatcttaagcacattagcatccaaaatagaagcattctactatgaccaaatctaacacatagctcaatttcaacctgctgggattccagtgtcacaaatctgtaacccacaaaaatgaaggaccttgtatgactcttgaagaacaacacgatgctcatctgagcattgttttaaccattcataagtgactattggattcttcatatattcaagcccact

SEQ ID NO: 4930 - DNA, 102 bp, Glycine max
agctatgtatctattacactagtcttgaattcttattacccaagagatattcagaagataactttcaagagtcacatctattccataggtttatgaatggcc

SEQ ID NO: 4931 - DNA, 199 bp, Glycine max
gagaatgtttctctcttcttgattttcatctttttttacagttatactctatcttttatctccatttttttcattctattatctcctttcatgctctttcttttcatcaatattgcttttctctgctattctctctcgatctcttttcactctcaatttaatttgatccttacaaaccttacttggaaacaaatttgtg

SEQ ID NO: 4932 - DNA, 447 bp, Glycine max
  unsure at all n locations
agctnggaatgaggtttgctaaccatgagtagataatggctggagagccagcagctggaaacttggaacaaatggatgaagatgttgaagctgaagctccataagagcatgcacatcaatgagtccttttgagtcactcatgattcagaagatggacgctatgcttcacctccgtcaatagcacttagttgaagttcacaattcgctggagaacataactacccggctggaaaacatagatactaggctgacccttagcaacctcctaaaccccgatgaggatgaagcttagttatgtttttaggtgcttagttcagttgcttatattttttgaatgtttgtgtgtctttgattaagaagttaaggtttctaatgatagtttaatgtttctatgtattggtctttaatgaatgaaatgctatggtattttcccttttcacattatat

SEQ ID NO: 4933 - DNA, 281 bp, Glycine max
gtggtaatcagagcacaagagcttcaagtaggtgctccttaaacctccattaatttttttgctttaccttgtcttccattgttgtttcttcatttttctccatgtatctcctcacatgtcttgttctaaatgttgttaacatgattctttaaaatttccaccgattaaacttgctatagaagttagatttgattttctatggttcaaatttcttggtcttgttcttgaaccatgaattctgttgaagttaaggtcctttgaacttttgcctggtatttttt

SEQ ID NO: 4934 - DNA, 382 bp, Glycine max
  unsure at all n locations
agcttgcctcagagaggtccaagaaggataatgcggccgaagggactagttccgctcctgagtatgacagtcaccgctttaggagcgctgtacaccagtagcgcttcgaggccatcaagggatggtcgtttcgacgggagcgacgcgtccaactcagggacgacgagtatactgatttccaggaggagatagggcaccggcggtggacatcactggttacccccatggccaagttcgatccacaaatagtccttgagttttatgccaatgcttggccaacagaggagggcgtgcgtgacatgaggtcctgngtaaggggtcagtggatcccgtttgatgccgacgctatcggccagctcctangatatccgttggtgttgga

SEQ ID NO: 4935 - DNA, 260 bp, Glycine max
tcaacctagaggagacgaaccattccaagtgttggagaagatcaacgacaatgcctacaagattgacttgcctagtgagtataatgtaagtgccactttcaatgtgtctgatctatctctttttgatgcagatggaagagccttggatttgaagacaaatccttttcaaggagggagtgatgaggacataaccaagggcaaggaccatgaagcacttgaaggtcccatgaccagaggcagacttaaacaagcccaacaca

SEQ ID NO: 4936 - DNA, 436 bp, Glycine max
  unsure at all n locations
agcttataagaacaaaattgcctaaatcatttccaaatatgcatgtgaattaggaagcatgaacaagaattaagccaaggctattgtgcaagcaatcaatggggcaaaacacaccaaaagattatgatgatggatggctcaaattctcacaaaggtaagcttatcactttcaaattgagctttcaaaactatcatgacatgtagaggaaaaacaaggatttcaaatcacacaatgtcaagagacttttattttcagaacaattaccaaagcttgatttgtgagttgattttagccttggtttcactttgattattagtcaattaattcaaggaaactttcaaagaaaaacgtctgattgatttttcttgattattntattatttttttcaagatattntgattattntattattattttgcttttttttgtttaaa

SEQ ID NO: 4937 - DNA, 309 bp, Glycine max
  unsure at all n locations
ntannaattgaattaaaacattcagaaactgctggtaatcaattaccatatatgtgtaatcgattacacagtgcaaattttgaattcaaattttaatagctgttgtaaatcagttttggccactggtaatcgattacatcctctggtaatcgaataccagagagtaaatttgttgaaaaaaactttttaacttaaatttcttggccaaaccttttgctacttcaattggaattcccttcctatttaatataccctttctaagactctaaagactgtcttgatcatccatcttgaatatatttaatttct

SEQ ID NO: 4938 - DNA, 376 bp, Glycine max
  unsure at all n locations
agctnntaacaaattttctttgtgggaaattatccatgtttggttgacatggtcaacaaacattggttatgctgaacaaacaatttcaaacttcttaaggcaatcatcgaaatgatccttaaaaggacaatcaaccaaactcccccagacatccatcacataatcccatgcatttttttgaccaactagagatttacattntaccttgacattcttgtcaatgtgaaacctacacaacaagttggtacacccagggaatacagttttcactacattcatcaacgttaggtctctatcggtaacaataactccaaggaggacatcacatcttagaaaaagacattgaaaccgttctagagatcanaccatattattt

SEQ ID NO: 4939 - DNA, 347 bp, Glycine max
  unsure at all n locations
ntgtggcactctgttacacacgtcagccctccatgtcagtcctggcacaggagcacatatatcatgcccttagcaattggactctcaactgacaggttatctctaaccatttatattatttgaatatattgcaatctccttatcacgtggcaggtattcaattatctctaagctacacattatctataagccataattatttacttgtcattacctacaagtcggtaattatcttgtaaggttgttacaacaccgtaatagcccctacaaacaatatcctgcaacttctactctactctataagtatcaggtttcatctcactcttttcatactcattcattactct

SEQ ID NO: 4940 - DNA, 319 bp, Glycine max
  unsure at all n locations
tcttcctgacactactaacatcatcattttaacgtctattntatcataacctatgttaaaataagtgtggtgatatatttgtaaataaattgagttcgttaatgtcattttttcaaagaaccaatgttttgtgtcgatgttaacatcggtttttttttttataaaaatcaatgttgtttgatgctcgttaacattagcttttatagaaatcgatgttgtgttttttcctaaattaaaaaaacccaatctatttcactttcttgttcttgcgctcactctcaccactctccctcttatctaaaaccctctcattgctcta

SEQ ID NO: 4941 - DNA, 403 bp, Glycine max
  unsure at all n locations
ntgatgtctatataaagctcanagatgtttgtcatgaagttgtcgaatcactagagaatcatctgagtcaaaatgaacaaagtgttgtaatgctgtcagtttagttggacgacaaaaacttgagtgaattgagtgaatcttagctctgctaagcagcaagtttccattgtatccgagcttattgtgtaaacattccttgagtgattagaatacatattctatcaaacatctatttttgtgaaagccaggagtgacttcatgacaaaaaatacttgggtcttaatctcatggggagattaagggtagagtcagaaatgacctagagattacttgtagccagaagtgacatagagaatacttggttgtaatcaaagttttgattagtggaacccttcaagttttg

SEQ ID NO: 4942 - DNA, 372 bp, Glycine max
  unsure at all n locations
agcttaagggttggatattctagtgtaacttatctctctattatgttaaaataagagcgcacgcttattctaatgtaataacgagatgttcggattaagcaaattctggaagttacatggaagttactaaagcttccatcaacggtaatttttaaaaaaaaataacttccatcatccgccaaaaaccaccttttctttgatcataaataattattctggttcacaaagcataacgggtgacaaaacatacaagaccaaaacaaaactcttgaattataatcttctgattntatccgattgaacaattttgattgaaccccgaaatttgattcaatctgaaagtggtatacacgacttcagaattatccagta

SEQ ID NO: 4943 - DNA, 525 bp, Glycine max
  unsure at all n locations
cgagtcacgccnncnatgagacgcctgtcatttagatgacgctagcatatacgtgacactatagactacatcgagactgtgaccttgagccagtcgttgagaagatatatatatcgagacaagcggtactgagatttacttgcactggtgagaatcatgtttgagccaccaatcatgagttatgaactcatctttgaatgatgcatattgcagactcttttatacatcgactctcacacatctttgaaggaatgtttcaagatctatccacagacattgctgatgcatcactctatagctctctgaacagatgctatcaacaccttcttttacacagaatgtactctaggcacggacttgtgttatctagtcttttcaatcactgatgctctggcgaaaaacgacagactaaccggctgaagctttttgacactcttcttctttgccaaaggaccacaaactgtggaagccaagctcataatgaatcaccatggatcaaacgtgtgttgatgataaccaagaagg

SEQ ID NO: 4944 - DNA, 407 bp, Glycine max
  unsure at all n locations
agcttagttcgaggtacttacccattgaagattgaagaacgatgaagaacgaatgaagaacgtcgaaaaaccgtcgaaacctttgcgaaattccttacgggaacgtttcggaagcgcctcggcttagattttcttcacggaaaccatttttccaagccaattcgaaagagagagaagtgcctaaggggctgaacccttttttacttcacttctccccctatttatagaaaattgggggagaagcttgcacccagctcgcccaggcgagcatgggtgcttcctccagaagcaacagccttctggaggaatcttctggagggcccaagtgggcctggtttctatttgcacccccatttttactaagtacacccccctggccttttttggtgattctttnttcgtaaagt

SEQ ID NO: 4945 - DNA, 362 bp, Glycine max
  unsure at all n locations
tctcaggaggtgagcttagttnttagatgggtgtgtgtagctaaactctagcttctcaaggaagttttctcaaagaagcttctcaaggaagttttcttaagaaagcttctcaaggaagttttcttaagaaagcttttcaaggaagctacctagtctataaatagaagcatgtgtaacacttattgtaactntgatgaatgagagtcttgtgagacacaactcaaagttcaacttctctccctttntcttccttcaatttcgtgctcccccctctctctttctctccctttttcttttctttcattgaagccatctctccaacctctttatcagtctcatcttgtggtgaagctccttcttca

SEQ ID NO: 4946 - DNA, 395 bp, Glycine max
  unsure at all n locations
agcttcgtatcanatgacacagaaagcgtgtttctgctttgcgcatgggagatgttcgggtgacaccttgcatgcacgaattttttcactaaaatcgataattttacaaaactatgtatcagtatcgataatttaaaaaattatttacgtgtaagggtgatttttgccactccaaaatcttagttgataaaaaatactctcattataggtaaataattttcaaaatacccatattggtaaataatttacaaaattatccattttagtaaaaaaaaaatagtggtgcatgcacctttgaaatgcaatagaaattatgagagtaaagatttattagaaagcgtgttttatcanactttaatgactaacacagacaatataactctcttcaaacttat

SEQ ID NO: 4947 - DNA, 295 bp, Glycine max
tttgagctagagtgtgatgcctctggtgtaggtgtgggagttgtgttatggtagggtggacaccctattacttaatttagtgagaaacttcatggtgccgctcttaactaccccacatatgataaggagctttatgccttagttagagccctccaaacttgggaacattaccttgtttccaaggagtttgttattcatagtgatcatgaatcacttaagtacattagaggacaatgcaagttaaacaagaggcatgcaaaatgggtagagttccaagagcaatttctatatgtta

SEQ ID NO: 4948 - DNA, 434 bp, Glycine max
agcttaaggtcactttacaatacacggtccttcaagcaagtaagatgtttcatcttctattcatttggtggactttatacttcaaggtattatctttttatttttttgggatagtcattattattatgtggtaagagtttatacaagtctagtttacttaataaggggtcaattgatggattacccaaactagtaagccacctactttgtaaaccattaccattaataaagttatgtgtcttcttaaaagtttcacataatttgttcattttaattttgactatttatgagaaggtgtttttaccatttataatgagacaatagtcaatatttatttatcacattctcatataaaaataaatctttcactaaatacatttcttctttctctttatgtgtgtatgtgtatgtgtaattaacatacatttagtgat

SEQ ID NO: 4949 - DNA, 430 bp, Glycine max
  unsure at all n locations
taacattgttctgtgacctgagttccaaataagattctcattcttaacaggattattttatgctgtgaattactcccaggacttgggtgtcaatgatagtagcatgtataaacactcggatgaaaagctaaaatcacttagaatgtgtttgngttgcattttcattttctgtttttattttcacaagattagaattataaaaatatgtttggtttgacttcttgttttctgctttcaagaaataaaaacactgaaatgcgttttcaaaaagaaatgtatntttatatttgcttaaaattacattccttgtcaccgcgttttcatgttatccaaaatgaggtgtctaagttcaactgaaacactgaaaacgagatttattatttcagtttttgttcggtgagaaaaattttactgaaatgtttcaaaatca

SEQ ID NO: 4950 - DNA, 300 bp, Glycine max
  unsure at all n locations
agcttatggcttctcagtaaaacactacggcgcttgcattctcataagttttaggcagatatgatattttaaaaaaagtttatgagatccattcattgcaaaaaggatgtattatgcatggtgatatcatgattttggatagtaattaattataactcattatttagagtaaattaatgcgacctcctattttttaatatccttaactaaaacaactgtatcaattaaagatataagtggttaattaaggaatgagganggcgnataataaagagagacagagagaaaaattgttgatga

SEQ ID NO: 4951 - DNA, 244 bp, Glycine max
  unsure at all n locations
tgagctgtaaggtgatggcctagaaagagtttagtctctaataaacctttgaggttgaggtaaggcatangatangtccatcatatcttatgcttgaatgcaatttggctcanataatggggcattatattatcaagcatggaactccatgtcagtttgtcaaagagtattcaatatcatgttgagtaaccatcaccaaaaagtttaacactatcaagtacatgaacataacgatcagtcgcaa

SEQ ID NO: 4952 - DNA, 287 bp, Glycine max
  unsure at all n locations
agctngtccaatgaggtgacaatgaaaatacctagtgttactacctgatatacagtttttgctgctcgttttattgtcaattccaactgcatcgatgcatctttaacaagcaggtaccacgaaccagagcagcaaccaagttgaccttctttaaactctaaaataccataaaaaacaaggtatgtaaaatgtgcaactagtcagatattaatcagatccttcttaaaccataaattaagacattttccacagcaagcccaggaaggcatttcaatggctaaaaaatt

SEQ ID NO: 4953 - DNA, 370 bp, Glycine max
  unsure at all n locations
actctagtctcgctctcaacaactgcaaaatcaagtggaatattgttcctactacaatcttgtccgatgggagttaacaaagtaccatggtatttgccagttaagaatgtcccatctaattgcacaagtggcttgcaatatttgaagccttcaatgcatggattaaagttgtgtgttcatggtttggggattaaggcttgaggtttaggatttagagtttactgatacttgaggtaaagttgtgtgttaggatttacgatacaatgagaaagatatttggactattaatgagatatttaatcaaatggacttattagatataaatagggaaagaaggatatganatattctctactatattatgaccttt

SEQ ID NO: 4954 - DNA, 399 bp, Glycine max
  unsure at all n locations
agcttcaatctttgcttggagtttaattcgagatcgattgccgactaagtctaatctgcggagaaggcaaatagatataagtgacagcctctgtcctttctgcagtattaaggaggaaactgcatctcatctcttttttgactgcagcaaaacacagcatctttggtgggaatccctatcatggataggaacttcgggggcataccctataaatcctacgcaccactttttgcagcacaacaatgggatgaatggtgggaagaaatacaatagatggaagtgttgatgggttgctctanattggtccatttggcagcatangaataaggttattattatcaatgctccattcaacggcagtatgttgctggaagatgcactatattnggcatggacatg

SEQ ID NO: 4955 - DNA, 298 bp, Glycine max
gaaagttagttctaccagtgggacactactcttaaaacaaaaatggcatacaacctcctcccataaatacaaacatcaatgtaaatttagagcaagcttatgcgcatatttccttacgaacgttcacttgcacaagacatcctattaactaagaaaaatgcacccatatacaatcaaggtagcttcattacctagattatttacatgtacttccaaggtgtatttgttattacatcacacacgactccttggctgaatttacatacatgcatactcaaagcattttggggtacccaaa

SEQ ID NO: 4956 - DNA, 380 bp, Glycine max
  unsure at all n locations
agcttatgattccatttcctgggaattcttgtattggatgcttaagtccattggctttccagcccagttctgtacttggatcatggaatgtgtttcttccacttcctttagtgtggcagtcaatggatccatttatggtcacttcaaagggcagcggggtcttagacaaggggatcttctctccccttatctgtttgtgctctgtttggagtacttttccagagatatgagcagcctcaaggaagatgccaattntaaatttcatcccaactgtgcaagtattcagctatctcatttggcttttgcagatgatattatgcttttatctagaggagatatcccttctgtgtcaactaatgttgccaagcttcaacacttct

SEQ ID NO: 4957 - DNA, 374 bp, Glycine max
tgtacacatgctaaggtttctccttatcttcaaatctatgtggctgcttcacataaacctcttcatttatgaatccatttataaatgcactcttgacatccatctgatatagtttaatgtctttgtgtgctgcataggctaagagtattctgacagcttcaagtcttgctactggtgcaaaggtttcatcaaagtcaatcccttctttgttgattgtacccatgagcaactagtctagccttattcctaaccacttctcctttttcattgagcttgtttttgaatacctacttagttccaatcaccgactaaatcttatgagggggaacatgattttagaccttgatctaacgaactggctggttcttcttcat

SEQ ID NO: 4958 - DNA, 408 bp, Glycine max
  unsure at all n locations
agctntgatctaccaccaccgccgccaccatcatcatagttntctattatttaatattactagtactttgatttccagccatgtatttggctatattattatgatatttgaacaatttactatttctttatttgcatggtatgtttgaacaaaaattaattatgttatttgaactatgtggttttatatatttgatctattcatggttcttgcttcatgatttggtttatacttttccatgaatgttgtgtggatgcttagttgtatttgaatgcttcaaacttgttacacactttggctttttgttgatgccaaagggggagagaaatagggattaaatcaataactcacatgagtaatcaacttaattttaagagaagcataaatttcaaaacaaagggggagaat

SEQ ID NO: 4959 - DNA, 357 bp, Glycine max
tgtagaatggctagacatgatacatgtcggggcttggtttggtgtaagggtaaaatggatgccccacattatttccatgacacaaatgcagaaatgatgatttggagactatatgcagaactggtcatgcatgcatctatgccgacactcaaatgtcaaatctttatggtcatgtgatgctagggctcgggattcatttcctctatattaatcaacccaacgttaccaaaatatgttcttttatcaatttgtacattcatccgagtccattttgggcgttcgggaaaatcttacagcattcacccttcatgtgtagacacatgttgcaaaaactagttatgatcagtgaattttttc

SEQ ID NO: 4960 - DNA, 329 bp, Glycine max
  unsure at all n locations
tataagcgcgggtctgggagacaaatgtcaagtgttcgcgatatgcgaagatgatgttccgagtactttggatttggtacgaccatgcccttctgaatttcaactgggaaaatggcgagtggaaaaacccccccgcctttacgccaccagcctatatgtaacctttacgggtgtaaaagctctataattgggcctaggctttagaagttttccttttggtaagctttgtgtcttttggttntgaatttataatacaaggatctttcttcatctgttcctacgtctctacccattctcattcatttgcatgtttacttctttttctgaaa

SEQ ID NO: 4961 - DNA, 373 bp, Glycine max
  unsure at all n locations
tggactgtgctannggagaaaacaaatgaccaaagtgaaccatgagccatttctatggcaaaattgggtgttgaagagtcaaatattgattcggcggaattttaggtgtaaatccagtttgagcaagtttagattgatgttatagacttgtgtgaagtgagagtttgctccaaatttacctcattctcaatttcacttttcaaacctaaaaaacccattgaattgaggggttttggacacctacattctgtgttgctgtgctttaaagcttgacttcngcttangcatgattgatacatgatttgggagttgtangaattgatttgggcaagattggatgagaggaagtgtgattttcgaaatatgcacttat

SEQ ID NO: 4962 - DNA, 345 bp, Glycine max
  unsure at all n locations
agctgcatgattatattctcgccctttgtctagcatattccttnttatatcatcaaaacctgcatgaattacattctccccctttttgatgatgacgagcattatccaatgcttgatctttttgacatcatcaaaatcttcatgatttacattctccccctttttgatgatgataaccacctataagttaggagcaacaaccaagaaaaaatatctatttgcatatagtgtactcccccttggttttggaatgtttgcttatatgagacaattgaagattatatacttttcatatataaaaagttgtctcatacagaatagaccattttccttctattttagctt

SEQ ID NO: 4963 - DNA, 232 bp, Glycine max
  unsure at all n locations
tgagatgaggaagtgttgaagggtgaaacttcctgcntttattgttgaccacagagtggtacctggagatatgtcgcgggggtcaggagaccttggggacgtcaggtggggtgctattgcccaaaaccaatcttgaccaatcccgacccaacccgggcatagtcggtcagtgagaacctgtgatgtacctaagcaggcgagctcctggcagtcaacagataaaaggaaaaca

SEQ ID NO: 4964 - DNA, 398 bp, Glycine max
agcttcacccaaacctatggtattgattactcataaacttttgttcctgttgcaaaacttaacaccattagagtcctcttataattggctgcaaatttagattggccattacagcaacttgacgtaaagaatgtctttttaaatggggacttagaggaggaagtctacatggactcaccttctggttttgaatctcagttcaatcaaaagatttgcaagcttcaaaagtctctctatggcttgaaacagtcacctatagcatggtttgagagatttgcccagtttattaagaagctgggatattctcagtgtcagagtgatcacaccttgcttgtgaaacactcttttgaaggaaagatggttgtattaattgtctatgtggatgatattataattac

SEQ ID NO: 4965 - DNA, 248 bp, Glycine max
tggatttggaccttgtcattggacccttcaactcatgaagtgcttttacgttcttgtgctttttggatatccctctatcatcccctccttcttgaaaagaatctgtccttggataatgctcttgggatagccctttatcatccgctccttctttagaagaacctatcctcatatgtgcatgcaagacacctacatcacaagaagaaagatcaataacatttgaagttgaactaaccccgtgcttactt

SEQ ID NO: 4966 - DNA, 68 bp, Glycine max
gcttatttaattttaacttttatttgatggagaatattaatttggcacgaatagtaatgatatttcag

SEQ ID NO: 4967 - DNA, 404 bp, Glycine max
  unsure at all n locations
tgtcaatacattggatcacaaaatcaatggtcgaatttcaaaatcaccgactgaactgatcactcgatattgtagtgttataaataattttttgtatatttatataatatacatattataaacataatatttgtcaatattgttacaagaataacctccatcttagtgtaaggtgtgcttgtgtcagttgctgacgatagatttgagccttgatatgttgctttttgttaatttattccattaaatacgaatatcttattataaatatcacatttgtcaatgctaaaaaataaaaaggctccagggtagtggtaagacttngttatctcccatcactggagatatattgatacctatcattccacaacaaataaaaaaattccttcctaccactntacttgatg

SEQ ID NO: 4968 - DNA, 455 bp, Glycine max
  unsure at all n locations
tggacgtgaccaatgaaccgtgcatttgaggccctgtanatcctcaccttggaataggctccacatgatacatggcagggcctggatnggttcagaggtaacatggatgccccacagtattttcatgactccaaagcacaaatgatcatttggatactatatgcggaactggacattcatgcctttttgcccacactcatatgtcaaagctttatcgccatgtgatgctacggctacggattcatttccgttattttaatcaaccacatggttccaaatatgtcctttcatcatttgacatcactcggtccctttgggcgatgggaaacttcaatcatcacctcacgggtgacacttttacaaactacatcacatgatatttttcaaaaagtggaaacctctttcaaacatgtggtcttctattccacaaattcattttttattatttttctcac

SEQ ID NO: 4969 - DNA, 386 bp, Glycine max
  unsure at all n locations
agcttgaacactgcatccttgttcaataggttgctcaatggtttggtaattntggagaaatccttgatgaacctccgataaaaacctgcatgtccaacaaaactcctgatacccttaacatttactggtggtggtaacttctctatgacatcgatttttgctttgtccacctcaatgccttgggctgaaattttgtggcccaacattatcccttcttgaatcatgaagtgacacttctcccaattcagcaccagattcgcttcaacacatctttgcagctgtcataccctaatttcgtccggggactatcgtttgttgatcttttgatccttgctagtcgacttacgatgttcaaacgccagttacagtgcanaacagatgatcat

SEQ ID NO: 4970 - DNA, 336 bp, Glycine max
tataccaattatgtatatattttttgcttcatcagttggtggatggaaatgccatcaaaatgccaaatgagtggtggcatggaaactaaaagctcattaattatttcttgcattgatggcctggattttggatgggggcacaagcatgttaatgctaatattacaataagcacaatttcttgcatatcctttcgatagaagggtagtggtattcgtgagtccaataaatgaggcagaaatgttagaccagagatgcacatgctatcaagataatagtcatagcaattggcagagataatcaattacaactcacatcacttgctacgactacaacta

SEQ ID NO: 4971 - DNA, 131 bp, Glycine max
  unsure at all n locations
tctgcttatgccagcaacagttatacctaaccatttganttagaccaagcatgcaaaactttttaagttctaattataatatatcaacaaactggttaattccctaatggcaaacgggaagtttcttcatt

SEQ ID NO: 4972 - DNA, 172 bp, Glycine max
cttagttagtgttccgtagtcgaaatgttgtgcttgactcttacattactttagtcagagaaaatttgacattgggtttatgtgttgcagactcatgggcttgcagaatatatagctcaagtgagatttactttacaactagatacttttatatacatttttagactacata

SEQ ID NO: 4973 - DNA, 276 bp, Glycine max
agcttaaccaatgtcatgttaaaaccactttttttaagtcacgtcaagaccctgtcactcttatatattcatgtgaacccagcatatagccatgagcatgctgttatcataaaattaaattacaacagtgcccttgaaggaaagtccagaaaggtacaataagagaaaagtttagaacacaccaataggtaaattagttgcatcagctaaaatgatgatgcaacagtctctaatgatccaataattaactagctagcaacttgtgggtcttatata

SEQ ID NO: 4974 - DNA, 404 bp, Glycine max
  unsure at all n locations
tgtagaggctacaacaagatagtggttctagagaataaaacagttaatatagataaattggccatggtaaacaatgacactatcataagtgtgctgctctattccacaatattggttntggttttcatgagtgtccaacagcatcatcattgtattactttgcttttaacagaggccagacagctgcttctgcaattaagttgacatttgagaataaaatcatgtaatgtaattcatgcccctctattcatgtgaatacttaaatacacgcatgctntgtttgcanatcaccgggtagagggttgattaggtagttgttcanaggctctggataatatttattttgactgttaaaattactacaaatttctagaatattcttacatataatatgtatgaaaatg

SEQ ID NO: 4975 - DNA, 414 bp, Glycine max
agcttcatctaactggtcatacatatgaatcatggccgcagctccccaggcatacccccactttgacccaggtcgcgaaaagcctctagatgtaccacatgaacatttgttgcactcttgttagaaaaaagagtgcaaccgaccaggtgtagtagataagcacgagctgctacaatccatcgtcgtgcctgacatctcatttcatagatctcctgaacccatgagaggtgtacatatgccctgcgcgctcgtattgactcggctctagcctcctcaccagacacctcgagcaactccatcaacaaaaataccgtctcatccacggaaatagcctcgaagctgtggaaagcgccactgatagggagatggaggagtgacgacacatcatctagtgtgatcgtcaactctcctact

SEQ ID NO: 4976 - DNA, 321 bp, Glycine max
ctttgcaagctggaatcatttatcctatctccgacagccaatgggtgagtcccgtccaggtagtcccgaaaaagactggcctcacagtgatcagaaatgagaaggaggagctgattcctactcgggtgcagaacagttggagagtctgcattgactataggaggctgaaccaggttaccaaaaaggaccattttcccctgccattcattgaccagatgcttgaacgcctggcaggtaaatcccactactgtttccttgatggtttttctggttatatgcaaattactattgctcctgaggatcaggaaaagaccacattca

SEQ ID NO: 4977 - DNA, 458 bp, Glycine max
  unsure at all n locations
agctntactgcctcatcattgctgaagaagtttaataaaccatcactccctactataacaaattgatcggaatttgaaattctatggacattcaatgatggttgcgtggatatgtatggtgggcttttaagatcccgaactcgaaggattcccatcaaagcatcattcagatttttctgcaggagaataaaataagaaaattaaatctatgtttggtacttggtaggacaaagatttattctttgcaatcgtccattcacagacacagtcagtagattgaattttaagggtttataattatcacatttacttgctaaaatatcagtacccaaaatcttatagaaacctattggctgaagtgtaagagagaatactaacctttttcaagtagccaactccaaaagctcgagtaaccttcaatttacctttcacttttcctnctataacgatcttgggat

SEQ ID NO: 4978 - DNA, 313 bp, Glycine max
  unsure at all n locations
cttgagaattttaaataactgggaagggacggcacttaagttttctcaatttaacaatatagacttagtaattaggcagcatttgatattgaaagtggtaccattgtttgtcactggacagtggaaaatgtatagatttcttggccagctagcttgtaactacagcatcataactgaatcttacgtttgtttttatgaaattttttatttgctattcattnttcattttgtgctatgttaaatctattcgcttcatttttcagcggcttggaaaccaatggttgctggcatagatggcctaaccttgggtggg

SEQ ID NO: 4979 - DNA, 474 bp, Glycine max
  unsure at all n locations
tcgtacccgggatccttaagttacctgccgcatgcaagcttgtgagagtctnttcactgcaatttgtcttccatctggtagagttccctgataaaagtttgcaataaatataaggcttaaagcatataaaaagatggtaaaagtagagaatcactaatatataccttgtaaacagggccaaatccaccttcccctaacttagatgcttctgaaaagttatcagtactctttagaattgtgattaatgggaatgtaggcaagtctacattaagtgtttcctcagtttgaacattgtgatatgatgattgatcaatggtatcaggtatccttccatctgcaaagaagacaagtttttgagtttgtgaaataaactaaaatttctagtatatatgtattgtttcaggaaattaccttttcctcttcctcttctagatcttttcctgaaccagaagcaataaacactgaaacatagta

SEQ ID NO: 4980 - DNA, 434 bp, Glycine max
  unsure at all n locations
tataagctagttgaaagcttatattaaatcagttaattagtttataagttntttttactaattnttaatttttcaacttttagcttatgacaatatatgtttggtaaggtctttgaagaactaataagcttctttaattagcttataagtttctttgagcaaaataagtttgtttggtatctaacttattttaatagtttattttctataagctactacttcaagtaatttattttgataagttatttgaagtaatttatagaaaataagataacatataaattattattttttttcttcttctccattntacttttactattttatttgacatttcattttacccttatattcaataaaaaatcttctatctttttgttggtgatgaaaaactttgtatctattntatgttttacaatatgatatcacctctc

SEQ ID NO: 4981 - DNA, 361 bp, Glycine max
agctttaacaatatattctttgcgggaaattatccatgtttggttgacatggtcaacaaacattggttatgctgaacaaacaatttcaaacttcttaaagcaatcatcgaaatgatccttaaaaggacaatcaaccaaactcccccagacatacatcacataatcccatgcatttttttgaccaactagagatttacattttaccttgacattcttgtcaatgtgaaacctacacaacaagttggtacacccagggaatacagtattcactacattcatcaacgttaggtctctatcggtaacaataactccaaggaggacatcacatcttagaaaaagacattgaaaccgttctatagat

SEQ ID NO: 4982 - DNA, 375 bp, Glycine max
  unsure at all n locations
ntgtggcactctgttacacacgtcagccctccatgtcagtcctggcacaggagcacatatatcatgcccttagcaattggactctcaactgacaggttatctctaaccatttatattatttgaatatattgcaatctccttatcacgtggcaggtattcaattatctctaagctacacattatctataagccataattatttacttgtcattacctacaagtcggtaattatctgtaagggttgttacaacaccgtaatagcccctacaaacaatatcctgcaacttctactctactctataagtatcaggtttcatctcactcttttcatactcattcatactctcctaattaacatacttacttgagcgtcag

SEQ ID NO: 4983 - DNA, 128 bp, Glycine max
agctttgagcaaattcaaacgacaatcacttttttactcggatgtctgattgagtcccgtaatatgtcgagacgctcgaaattgaagaacgaagctctgagccaaatctaacgacaataactttttac

SEQ ID NO: 4984 - DNA, 306 bp, Glycine max
actcagcttcgtgatcaatttcgagcgtctcgatatattacgggactcagtcagacaaccaagtgaaaagctattgtcgtttgaatttgctcagagcttcgatattccatttcgagcgtctcgatatattacgagactcaatccgaccaccgagtgaaaagttattggcggttgaatttgctcagagcttcggcattcaagttcaagcgtctcgattattacgggactaaatcagacatctgagtaaaaagtattggcgcttgaattgctcagagttcggaatccattttgagcgtctcgatatat

SEQ ID NO: 4985 - DNA, 252 bp, Glycine max
catggagaacatgtactaaattactaattgtaagaaataggcttctaaaaaataaaaataaagaaggacgattatgaaatatacagataccttccataatatgatcatattatggaatagatagacggctattttttctataatcaaatacattaaacttttgaacccctaaaatcagtggtcgggctctagtaggaacactgaagtctgaacccttcagaccttgacagacataatccatatatagaagtc

SEQ ID NO: 4986 - DNA, 200 bp, Glycine max
  unsure at all n locations
ctgctagtgaaagggcttactcgtgcatgtttntgggtgtgttatcangtacattcaatattttataaactcaatgctaaacataaataactaatattataatatgtactaacgacaaaatttagatgcagtttcttatatactttaagaactattctaacattagaattggaattctattttagtaattcatacaatga

SEQ ID NO: 4987 - DNA, 429 bp, Glycine max
agcttgcccagagtatgaatccacggaggatatgcttaccacctcgaaagactggaaagcggtttctaatgactcttctgcggcctccacataaggcatagaggatgggcagctcaccaagatgtcttcctcgcctgatacgatgaccagatgccctttcactacgaagttcaacttttggtggagtgtagagggaataactcccactgagtggatccacggacgccccaacagacagctgtaggggggggttaatatccattatttggaaggtaacttgacaggtgtgagggcctatctgtactgggagatcgatctcttccctaacctctctgcgggtgccgtcgaaagcacgaaccaccattgaactcggctttatgtgggaagtttgaatggtatttttccaagtgttttatgcatacgttaaac

SEQ ID NO: 4988 - DNA, 210 bp, Glycine max
tcttatccaaggctcatcttggtggtggagctccttcttccatggcttattccctagtggatggcccctcctctcacctcttctgctttgtcttccgctgcatctccatggtggaaaatcaccattaaaggacctcattgaagctcacagatccagcctccataaaagccccacaagcaagtttccatcaagtggtaatcagagcacatg

SEQ ID NO: 4989 - DNA, 402 bp, Glycine max
agcttcgtatcaaatgacacagaaagcgtgtttctgctttgcgcatgggagatgttcgggtgacaccttgcatgcacgattcttttcactaaaatcgataatattacaaaactatgtatcagtatcgataatttagaaaattatttacgtgtaagggtgatttttgccactccaaaatcttagttgataaaaaatactctcattataggtaaataattttcaaaattacccatattggtaaataattttacaaaattatccattttagtaaaaaaaaaatagtggtgcatgcacctttgaaatgcaatagaaattatgagagtaaagaatttattagaaagcgtggttttatcaaactttaatgtactaacacagtacaatataactctcttcaaacttatc

SEQ ID NO: 4990 - DNA, 294 bp, Glycine max
  unsure at all n locations
ttgagctagagtgtgatgcctctggtgtaggtgtgggagttgtgttatggtagggtggacaccctattacttaatttagtgagaaacttcatggtgccgctcttaactaccccacatatgataaggagctttatgccttagttagagccctccaaacttgggaacattaccttgtttccaaggagtttgttattcatagcgatcatgaatcacttaagtacattagaggacaatgcaangtatacaagaggcatgcaaaatgggtagagttccaagagccatttctatatgtta

SEQ ID NO: 4991 - DNA, 311 bp, Glycine max
agcttgtccttaaattcagttaagagcaacgcatagctcacattatctgcttcaactcctaaacaatccaaaatttttggcttctggttttatgtcaatacatcaaaatcttatgttttacttgtgtcatcatgtaatgcttcctctactattgattccataaaacagaaaaaaaaacactataaaatgaaacctaatatcatcaacaacataaaccaaaatttttggctgctggttttgtgcccattccccacatttgatcttcgatgatccaatctacaaatctcccccccgccccccataaaaatgaa

SEQ ID NO: 4992 - DNA, 355 bp, Glycine max
  unsure at all n locations
tataaactntatacaagaatgaagctctgataccacttgttagacaagtggcctcagatatcttaagaagggggggttgaattaagatattccaaattatttcccctaattagaaatctatttcactttttaaccaagttatgaattcccttaatgaaaatcttcttaaatattaattcaaatgaaacaatttgaatatgaatataaagcaataataaataaaggagattaagggaagagaaaatgcaaactcagttttatactggttcggccacacccttgtgcctacgtccagtcctcaagcaacccgcttgagagttcactatcttgtaaatccttttacagttctaacaca

SEQ ID NO: 4993 - DNA, 274 bp, Glycine max
agcttctcgttcattgccataggtgtggcaagtggtttgcaatcttgcatgttgaacttctttaataagtcatccgcatatttttcttgcgagaaaaatatttgtccaagtctttgcttgacttgcatcttcacatatagtgacggctcacttggacttttgaggaatctatgctcgacgaaggatttgtctattttgttgtccatgctcggggagcttgtttgagaccataaaatgcatttttcaagcgatatactttggcttcttctccctg

SEQ ID NO: 4994 - DNA, 361 bp, Glycine max
  unsure at all n locations
tgtaatcaattacacacatactgtaatcgattaccagaggagattttcagaaaatattctcaacagtcacatctttttatttggttcttgaatggctatcaaaggcctatatatatgtgacttgagacacgaatttgcgaagactttttgagaacaaaaaggtcttatcctcttaaagagcaaaattgttttatcctcttacaaattccttggccaaaacacttgtgattcaataaggaattatttgagtgctcaaattgttcaatctatctctntaaagagagatttcttcttctcttcttctttattttgaaaagggattaagagaccgagggtctcttngtgtaaagaaatctgaaca

SEQ ID NO: 4995 - DNA, 288 bp, Glycine max
  unsure at all n locations
agcttgtaatagtatnttgagcaataatatccagctatcttttggatctccccctcttcccccttgattttcctgtaaatcgataagtatgatatccactatgtctggctaaattctttgaaggcaccctcaaggggccttatttatcttcatttagaaaatgcgaatatgatttagaacccaaatgtttattttacttttgattttttttttgaaaacctgcggtttgtaagcctgcaaaggtgtgcccttgatatatgttttcaaaaacaatggaagtccttatgg

SEQ ID NO: 4996 - DNA, 220 bp, Glycine max
tggatctgtgtttcagaggaatttgatgttttcaacgtatcaagagcaattcttgacacgattactgattcgactgatcatggtagagagctagaaatagttcagagaagactaaaagaaaaattggcagataaaaaatttctcgtcgttttggatgacgtttggaacgaaagcaggcctaaatgggaagctgtgcagaatgctcttgtttgtggagctc

SEQ ID NO: 4997 - DNA, 266 bp, Glycine max
cgattctcactcaattcttcaccaaatcacgtgccgtaaagcccaatctttctctttttcactcctctttcacttccaccgatcaaaatccagaaaaacttcatcaaatggcagagccatcaaagaagagaaagggatcatcctccaccgctaccgctgctggccatcgccgtcacggcccatccggagcacccacagcacctattcctccttctttgtcatctccaagatcatcaacattgttttcatccgatgatcaacgtcta

SEQ ID NO: 4998 - DNA, 361 bp, Glycine max
tgtagaatggccagacatgatacatgtcaaggtttggtttggttcaaggattaaagggatgccccacattatttccacgacacaaatgcaaaaatgatgatttggaaattttatgcaaaactggtcatgcatgcacctatgtggacgctcaagtgtcaaatttttatggtcatgtgatgctagggctcaggattcatttcctctattttaaatcaacccaatgtttccaaaatatgttcttttatcaatttgtgcattcatccgagtccatttcgggcgtccggggaaatttcacagcattcacccttcaggtgtagacacattttccaaaaattgggtatgatcaatgaatttttttttc

SEQ ID NO: 4999 - DNA, 358 bp, Glycine max
  unsure at all n locations
agctatgagttggtttctggccttagaattaattntgctaagagccaatttggtgcaattggccaatctgaggagtggtgtactcttgcagcagatatcttgaattgtggtcctctgcagttcccatttatatacctagggatgcctataggtgttaaccctanaaggaaggtggtgtgggagcctctaatcacaaaatttgaggccaaactgaacaaatggaaccagagaagtctatctatggctggcagaattactttaattaatgctgccttgacagctttgcctttgttctatatgtccttttttagggcccctacagcaatcattaagaggctcactgctattcaaagacaat

SEQ ID NO: 5000 - DNA, 329 bp, Glycine max
  unsure at all n locations
nntggtatttataagtccccttcaatcaagtatttgttgtctctaaacgggcatatttcctctcttaagtttgcatctgaaaaatttggtccttggttcattaaatgcacgcacttcctcatgctaggaaactactctttgttgctagtgttttgaacaccatagcaggaaaccacttcctttttgtatcaaagcatgtctatgcagcataacttttcttttgatggcaactgaggaattgcatagcttgacttcatttattcttcataagattcgagagatcctaagagaatgtttctgcacaatagatctcagacacaggatttaat

SEQ ID NO: 5001 - DNA, 448 bp, Glycine max
  unsure at all n locations
agcttgtgataaggagacttttccttccttgtttgtccattaaggaggaagcaatacaagttcctgcaacaaaataaaacttcaatcagaaacaatatcttgtttgcggaacatatacaataaccttcttttactgaatgcacaataaacatttttaagaataaaaaataccaaccaaaaacatttgatgcaccaaccaaggcacttgctgcaacatcagaagcaattccagcactacggaacacagaagttgaataataaactacagcatttattccagccaactgctggaacaagaaaagtgctgccccaacactgacaactgaaacaaggcatantttaaggaagtgctatatactatttcataaaagaatacatttaatcaactaaatagtaaactaaaaaaaagttgtcagtgaaattaaaacatgaacaatgataatattat

SEQ ID NO: 5002 - DNA, 336 bp, Glycine max
tgttcgaagatcctcgagacgttataagaggggccaatctttctgaaaagactttcaagaagtttttgaagatttctcttgatgaaaactataacctgcatccttttgagttcaaccattcccacttttgcaccatggggtttgttacctggtgggagaaatattattcgacccgttcagttggagacactactatcatgatctccagacttgagagtggttttacacaaccaacggtcgagaatatccgctcaaaccttcaagctcgaggtattaaattacttttgactttctaaattgatatgtatttttgccttttctaatattcttattttc

SEQ ID NO: 5003 - DNA, 238 bp, Glycine max
tattacggacctataaatctcagcttcctgaactatatcgattgaaataggtgctgacgttcttgacctgcaaatcgcatcatataacatcggaaagcaatggtcgcgcgctgagcactcataacatgtggcttatcgctttctctagacacgcactaggacggaggactgttacaaattacatgaaaccatagatagtctgcagttctttattatatataatgtggacctcccccga

SEQ ID NO: 5004 - DNA, 341 bp, Glycine max
  unsure at all n locations
catgaagcttcgcgctttttattatgaagttgcaatctaacacaaagggtgatgatgtttccttccaccgcaaaaaataacgaccagttattttcaatctactatctttacctctttcctttttcctttggtttttattcactcaacttcggcactgttttcacctcacaatcacaatgcctgcatgcataaatactatgtgtctgaaaatcacaacctatctcggacgcattgatgcggtaattgaatttttttaatacaaatcataaatgtcataattaatntgtgtttagaagtttttttactactactactataantctaattaaaaaaaaagttta

SEQ ID NO: 5005 - DNA, 310 bp, Glycine max
taaggattgtcaacattccaatttctcgaggaatgtgaccgataaggttattttctgcaatacgcagaaatcccaacttgttcaacttcccaatctctggaggaatgtggccagaaaatttggcggtacttaagtctagatatgacaggttggacaagtttgctatggaattaggaattgctccacttagttgaagacattgggaaagatcaagagcatgtaaactccttagtgaccacatttcttgagggatggaaccatggaaagaatctaaagaaaaattcacaacatttactttggacatgttacc

SEQ ID NO: 5006 - DNA, 291 bp, Glycine max
  unsure at all n locations
tgctacaaactgggaaggtggttntagagttactgaatcactcaaaaatggagcctatctactatagtcttatccgacaaggtaattccaagagcctaaaacaagacttacctcaaattctattacagttaaacttgtaagtggtgatgtactatttttcctacgagatttttttgttaaatatgtcttaacgaggcacacccaaattttacattgaataaagtactatttttatgatttttattaactntatagatctgagtagaccaattggtttctctgactaaacac

SEQ ID NO: 5007 - DNA, 307 bp, Glycine max
  unsure at all n locations
agctctgataccacttgttatacaagtggcctctgatatcttaagaaggagtggttgaattaagatattacaaactattttcccaattaaaattctactttgattttaatgcaagttccaagttcccttaatgacgaatttctaaatgatgattcaaattaaacaatttgagtgtaaatttaaaacaacaatagataaaagagtttaagggaagagaaagtgcaaacttagttttatactgattcggccatacccttgtgcttacgtncagtccccaagcagctcgcttgagagttccactaacttg

SEQ ID NO: 5008 - DNA, 307 bp, Glycine max
agcttcgacctatgttcatgaattgtgtgccatcacaactgccgttaagaagtggagacaataccttcttggccatcaattcatgatcttgactgatcacagaagtcttaaggagctcatgactcagattgttcaaactccagagcagcaaatgtattttgccaggcttatggggtatgactactccattcaatatcggtccgggagcactaatttggtagctgatgccttatcgcgcttgaaggagggatcagaaggaaccatgttattactatctgtaccttgcctgacatttctagatgaattg

SEQ ID NO: 5009 - DNA, 311 bp, Glycine max
  unsure at all n locations
tctcaataaatacttatagatgaagattattaanaagcaaattaatgaatcaaatgtgattagaagtgtatatatatgtataccatgttctttgagcccagttgccaagttgttagtctttctcccaagcctgttcatcccggtaagaactgaatttactctacctgaaaaatcaagacattaattcagtatttcagtgttgtgaatataaacatacctttattgaatacctgatgaacaattatcttttctctcgttttctaattaaacaattgatcaaattattttctaataaacgatatatatatctc

SEQ ID NO: 5010 - DNA, 373 bp, Glycine max
  unsure at all n locations
agcttgatattttccatatatctcaatgaattacaattgctttatttatactagtttccttgctaacggtttttgtcattttgtgccaaggaatatttttaggaaatcattggatcatcaattatgactacactgtccccccatgaccaacaattcctcatctggcaatatcagcgcaaatctaggtcaacttcctctccatgacttttctttatacgtagtccctgatgtaagagggccttgtgatggtcctctttgcctttgctgctatttgtacccgtttgttctgtgtttgaacctctntttgatgatctttgttgcctctgctagctatttcttcctttgtatcacctgtacttagatggaatgttac

SEQ ID NO: 5011 - DNA, 282 bp, Glycine max
  unsure at all n locations
nttggtcttaaataaaaagggttctccctttttcccttattttattcaagctctgccacatgtccttatttgagtggagcaagaagggcccactttctctttttgactgtgacccatactcagtcacaaaagtgagaaaaaatctgacctttgaaacgctaaaatcctgcctcggtttgcgtgccatttctctgattccagattctcgcgtttctctgcgtccgccggggccagttttcgaaagcaagcaatatatatatcataacgctcagaatgaaaccc

SEQ ID NO: 5012 - DNA, 326 bp, Glycine max
  unsure at all n locations
gcttgatcaaaacaattatctaatcattccaatccactcaaatcatacaattgctcattcaaatcattctcaaacactcatttcatgcaaaacaatccactacatatcattttcaatcaattcattggtcaaacacgcttttggtacaaacaaacaactcaaagtgctgaaatttatataattgaaatttaaaaaaattgaaatataaaatctgaaattaaaatgactgaacatanatcataaaataattgaaaataaactaaaatgttcgagatgcacaaatttaaatgtcctgctcctgtggntgctcctatgcatgctcatta

SEQ ID NO: 5013 - DNA, 302 bp, Glycine max
  unsure at all n locations
tgctctanattacattgatgtttgtatttatgggaggaggttatatgccatttttgctttaagagtagtgtcccactggtaaaattaactttccaaatgtttgccttcgcaggaatggccccgaggaagcttgcctcaaagaggtccaggaaggacaaggcggccgaaggaactagttccgctctggagtacgacagtcaccgcttcaggagcgttgtacaccagcagcgcttcgaagccatcaagggatggtcgtttctccgggagcgacgcgtccagctcanggacgacgagtatactga

SEQ ID NO: 5014 - DNA, 129 bp, Glycine max
agctttagtgactatatgacgtagctccattggagcttgtaggccttggatcttcttcatcaatggagtcctttgcttcttgaattttaatggcagtggaatggagaaaaagaagagttgagaggagac

SEQ ID NO: 5015 - DNA, 399 bp, Glycine max
  unsure at all n locations
tgngactgcatttgggcatttattttgactttcctatgctgtctctacatacacaaaatagccccaccatcccaattttgcaaaatcatattcattcatcattggggcatttcaccgagcacttggtgagcgcatgtttgaacataaattgcaagaggatggggacaatgtggcatgccccattgcttcagaatacaacctaagcctaaggccttctcatccaaatcctcaacccaagaaaacaaggatcaaagcaaaccaaaactgcctcacaaatataagcatgttctcacaatttagagtaccaaaagatgaagaaaacacatcaatgggaagcgaanaacatcaaggatggaatacttacttgttgagtgaattgaacaccaaaatgaagcaaac

SEQ ID NO: 5016 - DNA, 354 bp, Glycine max
aggctagttttggaccctttatcattgacttccaaactttataaatgaagacattacgattgcagaaaatctatttatgtttcgaagggttacaatggtagtcatttatctttaatgaggctttgatggaaaggtaccttattaaaaagagacttacacatgtgtcaaaaaaaggtttgtgaacacttttgcgttaaaaagacgtctatatggttgcatgtaacattgacctttacatgttaccataaaataattctactatttggataataatatatgtatatataatataattcatacttatcatcattctatttatctatctatatgtcacctgtcatatttaaaccaatc

SEQ ID NO: 5017 - DNA, 408 bp, Glycine max
tctaaagaagatgtaaaaatctcatgtgcgagtaaaatagttggaattatagacaaaccaaaatatatattagaggggtagttgatgggaatatctaagatctatgactatatccaacctcgttaggctacaagaacacgagtttggagtcaaatcaaaatttcttgctgaggatagttatctagaagaaccaacaagggtttttgtgtgtgttgtgtactgttaactgtcaactttatcagttcgagtgatgagtagcattgcacaatgtaatcgaaaattctcataaacaaaagccgtagaagtgaatatttatgataatacctaacaaaagaagcaattgctggcggtaacagcgagattaattatcgagcagttggagcagtgctttgacgcatcacaacaact

SEQ ID NO: 5018 - DNA, 74 bp, Glycine max
  unsure at all n locations
tagcttgtangccttggttcttcttcatcaatgtgagtcctatgcttcttgaattttaatcacaggggaatgga

SEQ ID NO: 5019 - DNA, 229 bp, Glycine max
  unsure at all n locations
tgcttgagaagcttctatggaggctggatctttcagcttcaatgagatccttcaatggagatgcaacaaaagataaaggagaagaggtgagaggaggcgtcatcccctagggaataaaccatggaaggaggatcttcaccaccaagagagtgccttcgataagaagcttgaagaggaagcttcaatggaggaaaagaatgagagagagatagacggngggggggggggg

SEQ ID NO: 5020 - DNA, 391 bp, Glycine max
  unsure at all n locations
tttatattgctaagagccaatttggtgcaattggccaatctgaggagtggtgtactcttgcagcaaatatcttgaattgtggtcctctgcagttcccatttatatacctaaggatgcctatatgtggtaaccctaaaaggaaggtggtgtgggagcctctaatcaaaaaaattgaggccaaactgaacaaatggaaccagagaagtctatctatggctggcagaattactttaattaatgctgccttgacagctttgcctttgttctatatgtccttctttagggcccctacaccatcattaagaggctcactgctattcaaagaccatttctttggggtggaaacttataaagagaaaagaagcttgggtgcttggaataaatgtggctn

SEQ ID NO: 5021 - DNA, 362 bp, Glycine max
  unsure at all n locations
cttggtatttataagtcctcttcaatcaagtatttgttgtctctaaacgggcatatttcctctcttaagtttgcatctgaaaaatttggtccttggttcattaaatgcacgcacttcctcatgctaggaaactactctntgttgctagtgttttgaacaccatagcaggaaaccactatccttttgtatcaaagcatgtctatgcagcataacttttcttttgatggcaactgaagaattgcatagctcgacttcatttattcttcataagattcgagagatcctaagagaatgtttctgaaaatagatctcagacacagtatctaatgaaattttaaatgttatctctaatgttgatcata

SEQ ID NO: 5022 - DNA, 286 bp, Glycine max
  unsure at all n locations
tcttgatttcttccaccattganttttcaaccgctctaattcttgccttcacacttagcaaatctgaaaccccatctggtatcaaagtgcttttgttatctcttgaactttgatagccattttcatggagacaagtttcaattactgcatcctggacaaacaaacattcatgataaacaaggataagtagaattcatatttcctgcatatgctcattgcctcatttaataagacagacttaagaacaaaactgaagtacacgataacaagtcaatggaatattacc

SEQ ID NO: 5023 - DNA, 445 bp, Glycine max
  unsure at all n locations
agctntcacaatatctagacaattcaattccatttgtcatgaaactaccttaaacaaagaaaaataaagtggaggcagaatctttgcacaagattcattcaaattccacagagtttttcctaccctcatacctcagcaaaatcctcttcttttcgatttgttaaccattggatctccttgaaaattttactgggggttcctaatgcagaaatctaaattttgaccgttgggatctgctataaaatgtctagaacacgagatgtactacctttcccgtgactagcactgcccaaccatttttctacataatttggcagttntgctacacaatttaacagctgtctctgcataatctggtagatntcgaattctggcttgcatgtatccaatttcactcanattggatcctacaagtcctaaatcatgtataaatcatgttcaaacc

SEQ ID NO: 5024 - DNA, 381 bp, Glycine max
cttatcatcctttttagtgactcatgatagtcttaagtttacttcaattgttgttctttacagaaattttcatttctgaatacacttaagcaaactcatcagtaggcataaacttagaaggctcatgattcctgctcagaaggtttttcataattaaaacaccaataattttggactcaacagttctttaattttgacacactcataatgatgctcagaaaggtttagagagcaactaccagagttgagaacttggaataattcttgaagcccattaaaatgatggagtgtgcttccctctaagtacttaattctaggaaaaatgatgaacaacaaggccttacatagaagattcattagatgctacatgaagagcatcat

SEQ ID NO: 5025 - DNA, 379 bp, Glycine max
  unsure at all n locations
agctntttaacaaacactggccgataatatttctatactgttaagaaagttttgttgttggtgtcgcctataaaattttcaatgttggttggctaagttttttcgttcgagctcaaatgaatttgtatttcggccgacaccggcatgttttcatttgcttggcaaggaaaacattngcccacctcagaaaaaacatgattcaccgatacgtatcgcaaaagattctagccgacgtcggccaagagagatgaccgatcgagctataaaaaagaagcatcaccggatgacgccgatcgaacatttcctaatagacatcagccaaatattattcagggattgaatagaaaatacaatatctgaaatcggtagttaaaatgct

SEQ ID NO: 5026 - DNA, 371 bp, Glycine max
  unsure at all n locations
ntacaacagattntagtaatgacccactaacctagaattaaaataacttaatgccattaacctagggaattaaaaaaaaacttaatggctgagtgtaactgaaattgtggcaaccaaaagtcaccccaacagccaacaagtcagccaccatttggtctcccaaaaggctgatgcctatgttgccaattgggcccttattacaacttgaactaaacctaactaaagcccttttagtttattaacccaaaacatatttttggtcaaccaactttacaaggattgagccattatttagacaaactaaacactctaaaattgagacaaagtggtgccatttagtcctcctccatttgggccatgatacaactcac

SEQ ID NO: 5027 - DNA, 382 bp, Glycine max
  unsure at all n locations
agctngatgcatacataaatcaacaaaaagaatgttagtgaattcattcaataataatattacattatagaaattaataaataataagttaatataccaatttatcattcaattattattataatatcatattttatataaaattgagcataatatatattaaatatttcaaaaaaaatgaaatagcatgtgaactgcagtgattttttatgatttgactcaaacaaaatagtttttcgtaataataattcaaaaaaatataaatataattcttaaattaattttactatctaataaattatattatcatataaatattaatctggcattaaattttgcatatgaagttagatgcataaattaaatcaacanaaaaagagag

SEQ ID NO: 5028 - DNA, 411 bp, Glycine max
  unsure at all n locations
tggagtcactccaacacttcatgtacttagctcttgtaacgccctttgttacaataacaatccgtaataaaaatatactttataacgttcataaaataaaaatgtttattttaatggtccaaaatacttcaaatattataataaatgagtccttacaaaaataaacaactttattctcaaatatgaacagctacaaagtttaacgaacaatgaactgagtcttcaattctcttttgtcttaaaagcttcttcctcgaactcttaaaacaacacttttaatgagataataatctcaatgaataaaataagttctgaaaggattcacaaatagtgttgttctcagacgacgcggtaatcagaaaaatccaataatgatatccataanattaaaatttaaataatatatacata

SEQ ID NO: 5029 - DNA, 368 bp, Glycine max
tagcttgccacccagctcgtccaggcgagctatgttgcttcctccagaatgttgttctggtggaacttcttggaaggcccaaatgggcctggttgctatttgcacccccatgtttactaaatacaccccctgccttttttgctgattctttttccgtaacgttacggatctttacgaatcacgtaacgatacttgtttcctttccgtaatgtcacgaaacctttttacggattacgtaattatcccttttttggctttcggaatgttacaaaacatcacggatcgtgcaacaatgcttccttttgactttcggcatgtcacggaacttcacagattgtgcaacactgctttcttttgacttctggcat

SEQ ID NO: 5030 - DNA, 285 bp, Glycine max
tggacataaaccccgcctacagttgcctgctatgtcggccttggatccattctgttggggtggtcctgtcaatgttgcaccaaaaattaaagtttatggtggaaggacaactggttatagtgccatgggaagaagatatactaatgagttgtccatcctcttcaccctatgtggaagctgtggaagagtcattggaaacatcttttcaagcactagaaattgtgaacaatgcttatgtggaggctcctctggtgcaaccgcgtctatctggtgatggcacagaat

SEQ ID NO: 5031 - DNA, 397 bp, Glycine max
agcttatggtagtgaactctttcactgtggtctcgacatacaagcttttagaaggactacaacaatctgaacaagagggtcagcagagtgcaaacttgttttccaaattctggtgtgcaaaagttccaacgaaagtacttgttttctcttggaaattactccaagataggcttccaacagcacaagcgctctagaggaggggagttattattcaagactacaatttttcatgcaaactgtgtggccttgaggtggaaaccaacaatcatttgttcttactatgtccggtaattaacagattgtgggaaagagttatggcatgggtgggaatggatttacaaattccaaatcatatcaaccagctgttcgggatgattagagagaatctattgggtgc

SEQ ID NO: 5032 - DNA, 346 bp, Glycine max
  unsure at all n locations
tggatttccttttagtagggaatctatccttcctaagatggagccaaacccagtcacccttattaagaactagctcttttattcctttattgcctttagttgaatacacctttgtttggttctctatttggttcttaaccctctcatgcaacttctttacaaactctgacctagattccccttctttatgtataaaagaagtgtctagtgggaggggaatgtgtctagtgggaggggaatgaggtctaactgtgacatcctggaaatatttacctggaattttgtaagcgatatattntaaataaatatatatatgtattattcagtggatatatatatatatact

SEQ ID NO: 5033 - DNA, 377 bp, Glycine max
  unsure at all n locations
agctntgcatgtctagggtttctagagagagaaaggtccaagttctagagagttttgagagattttgttgtgtgaagatctgcagagaccagagcttgaaacaagagccggtttgagagcttgagatgagtttgtgagtgattgcgagatcctagaggtgaaggagacatcttcaccacttgtatatttgcaatctttcatcttgttcttctctttgttcttaagaaggctttctggtatggaaagctaaatcctttgtggatcttccctgtaggtacctgatgtaaatatatttctatctatttaatgatgttntgtgtgttctctgtgctatctgcttttcattccagtatgcctttaccttgatcacgtagatg

SEQ ID NO: 5034 - DNA, 246 bp, Glycine max
  unsure at all n locations
tgtagaatggctagacatgatacatgtcagggtttggtttggttcaaggataaaagggatgccccacactatttccatgacacaaatgcaaaaatgatgatttggaaacttttatgcaaaactggtcatgcatgcacctatgtggacactcaagtgtcaaacttttatggtcatgtgatgctagggctcaggattcatttcctccattntaaatcaacccaatgtttccaaaatatgttcttttat

SEQ ID NO: 5035 - DNA, 293 bp, Glycine max
taaaacaagcttcccgtcagtggtaccttaagtttcatgggataatttcttcatttggttttgatgaaaaccccatggatcaatgcatataccacaaggttagtgggagtaaaatatgctttcttggtttatatgtagatgatattttacttgcaacccacgattcgggtttgctacatgaggtgaaacaatttctcttctaaaattttgacatgaaagatatgggtgatgcatcttatgtcatcggcattaagattcatagagatagatctcgaggtattttaggtctatca

SEQ ID NO: 5036 - DNA, 345 bp, Glycine max
  unsure at all n locations
tgactaggcgagttgattntagccttagtttcactttagttattagtcaattaaattaagaatgagaaatcccaaagacaaaacgtccgattgattnttcgctttattttactaaaaggtattttttgattattatattattattttacctctttttttatttccaacgtggttacgacacgaccgaacggtcggaattcattttaaccgaaattaacggatgatgcaattcanacgatcggtggaaatttattntattnttagattangcgagaaatgacttatataaatggcttaagcacgtncaaagggggtataaaaagtgaatgnaaacgagaataaaaa

SEQ ID NO: 5037 - DNA, 321 bp, Glycine max
agcttatgaaccatatgcaaaaatgtgattggtaaggtatttggcaaaaagcttagcctgaagttcttgttaaatattttattgaaaaaaaaatatggtaatacaaaataattttgctattgaattctatatttccatggttttgttttaagaatgtatcgatagagaatatttattctccattaagcaaggggaaagtagaattattatgaaggattaaaatattaatagaatttttatgatttcaaatattaatagtttatttatagatgtaatttactacaaaatattatacttttcttttattcacgtaatacaatt

SEQ ID NO: 5038 - DNA, 370 bp, Glycine max
  unsure at all n locations
ctgcaagaaatagtggctaatatgaggacaatccaattgtatgaggggacccaacatctagaggcctacatgcgtgggttgctagtcacatgtattgcttgcttggagtgagaatagaagacaattattggctaaggcatttaataataataataataataataataataataataataataataataataataataataataaagtgcttgtagctagttttgagacttggacctcaagcttaattatgcctcacttaatcactaaggcattntagttatgtttacaatgttgagattttatgtttcttttattttctaccaagtacacaagaagtgatttgtataaatcaattgtgaagtgaatggaa

SEQ ID NO: 5039 - DNA, 357 bp, Glycine max
agcttgattgcctattcatcaaagggagaattctcctgagataatatatgagagatgcagcaacaacctcagatttcattcctttcacttcaatggctataatcagtcgtttatatagggagaggcttaacatagacacatcataaaaccaccaatcatggagttgagatggtttctcagaagaaattccattccacaatgcactgttgtctgcttgattttgcttgcaattgcttccaaccacaggccagtggaataaggttggatctgaacaagcctttatagccaaggaatcaatgcatcttgaaactatatggagatcttttgtcaagggctgcacttccttcacatgtttaa

SEQ ID NO: 5040 - DNA, 355 bp, Glycine max
  unsure at all n locations
tatagatcagctaatccaagagaaaaatgaaaaatcgcaaaattgttaggtgtacctaacaatgccctcacaaggcttggcgtcatgtcccatcctaaaggaatcaacaacacactagctaacctactttaaaatttatcaaaaactactaataagatataatataattagtaaataatntagtcacttaaacatgtgatcataaatagaatctctagttcgtatatttggagaaacattagtttgaaaagatcaatcttttcaataaatctcactaggtaaaaaaaattaatcaataccttttgaccaaaaaatattngattcctacccatttttttaataaaaaaattccaaa

SEQ ID NO: 5041 - DNA, 396 bp, Glycine max
  unsure at all n locations
ttattatagtccttctatgggacctatctcgatgggtcgattcacaaccccacaaacatttaacttggtaagcgtaagtgcttaaatgtattgatagaattgaacctatgaaattatcttggttagatggtacaatttcctaccaagaacttatcatgtaggagtaagtgcttaagtactgtcataagctatgtctcaaagacttacctcggtcaaataatccatagtacaacaagtacttatctagataggcataagtgcttaagctttcttgatcaattgtccttagtaacatgagaattactttgatgagtttgacaccctaccccaacatgcatataaatgaaaaaanaacataaatgcggaatctaattaaagtcaatttcattcaataan

SEQ ID NO: 5042 - DNA, 396 bp, Glycine max
tgttggttacagtgacaacaattgggctggagatgaagatgattggaaaagtaccagtggatttgtgtttttcataggaaacacaaccttcacttggatgtcaaaaaagtagccgatattcactcttttgactcgtgaggcagaatacgtagcagctacttcatgtgtttgtcatgcaatctagcataagaatttattaaaagagttgggcatgtcacaagaagagttgaccaagatctttgtggataataagttagtcattgctctagcaaggaatccagtgttctatgatcgaagcaagcatattgataccccttaccactacataagggagtgcatagcaagaaaggatgtacatgcagaatatgtgaagtctcaagaccaagaagctgacat

SEQ ID NO: 5043 - DNA, 390 bp, Glycine max
agcttgtaaatatttattggtataatttgcctgttccattaggctcttaatgtctttagagattacttccttgttgacatcttttgtcttgaatggaattgccatgataggtttattgttactgtctttgacatttggtagttgatattgtgttgcgggaggtaattccgattagattaactcaccatccttcattcgccaattttttatgacatttgttgttggatcacctatgatatcttgtttccaagggtaatctatatcctttctaatggtataagcatgaaaccaatcaaagaaaaggacattaattttgactctttcgacaaattcgtacaacttgtcttggatttgctatctgtttgtaccctagaaatgtcggaaaaatca

SEQ ID NO: 5044 - DNA, 323 bp, Glycine max
  unsure at all n locations
tcaaccctacgtcctgctcttacatctctatatatagagaatgcttcttccattatcttagcttgngccagcaattctgctctctgtattccagaaggatgagtagagaaataatccccgaaggtagaataaccagcaaattttcctaactcctcatacactttatgtgccacccggggatcataaccggctaatgcaattatgtactaagttatgtcacgcctattttgaacactcagtccatctatttatcacttgctcatttgctaaattcattcgcgtattaactcatgtagatgttaattgtgaagcatcgggataca

SEQ ID NO: 5045 - DNA, 391 bp, Glycine max
  unsure at all n locations
agcttntggcaaaggaagaagaagttcaagaatatgttcaaagagattcaaaggttgtaaaagaatatattaaaaagtacctgaaatgcaagtcaaggtcttgcttttatagactcttcatgtctggtcaagaaaaccattgaagagttataacctttagaaaaacctgaaaaccattggaagagttaaatgttttgatttttatttaaaacttgtcgctggtaatcgattaccaaaaccatgtaatcgattacacaaagctttttatgaaaggatatgactcttcacaattgattttgaatttcaacatttagatacattggtaatcgatttccaatatcttgtaatcgattacaccattttaaaatcaattggaatggtgcaaattcag

SEQ ID NO: 5046 - DNA, 333 bp, Glycine max
tgtaggcctaggatcttcttcatcaatggattcctttgcttcttggaaaatgaatggcaacggaatggagaaggaagagagagagagaggagacgccacttcaaggagaagatgagtctagaagaagctcaccaccataagaggccatggataagagcttgggggaagaaggagatgactgaagggagagagagagaagagcacgaaattttgtgctccaaatgagctttgaaatctgaagtttgatattcaaatgatcaaaagtgaaaaaaaatcacacacatgacctctatttatagcctaagtgtcacacaaaaatggagggaaattcca

SEQ ID NO: 5047 - DNA, 376 bp, Glycine max
  unsure at all n locations
agcttcatggatntccttctacaattatatcttataaggatgcaatttttctcagcagtttttggagggagatgntaaattggctagaactagtcctaagcatagcacttcttatcatccccaaacggatggtcaaaccgaagttgctaatcggtgcttaaagacctatcttaggtgctttgctggccctaagcccaagacttggtttgaatggttgcattgggctgagttctggtttaacagtaactacaatatctttgctggaatgacaccttttaaacctttatatggacgagatcctccattgttgattaagagctgcaccattccatcaaagttggatgatgtaaatcagttggcccaacaacgagatgat

SEQ ID NO: 5048 - DNA, 321 bp, Glycine max
agctcgcttagtagatgtttatcggcaaggaaaatattcactttatttatgaagttgtacaaattcataatatttaatttattgtattatgtaacactgtatattatttcatgattgtacatttttagcttgtggaattttgtttctgtgtcaagttttagatgtttcattcttttgttacgtgttgtgaatggaatgcatttaaagtattctcttttatttggtaaaatctctcaaaagactataaaaattggtcataactaagagagtatttgtgctattacaagattcaagaagggaaaaaaattatttcaaatttca

SEQ ID NO: 5049 - DNA, 286 bp, Glycine max
ctacagttggatgcctcgctaagtggatgcatctcttaaccaatctgcctcgctaagcgagtcattaacaacttttaccttctcttctttggcgtgaaattgagttggattcaacattaaggcacaaaaattgagtttctactctataaaatcacacaataaagaaaatatgtaccatctctacaaaaagaaccataaataggaggcatattgctattttcttgcaaatttccaataccaaactaactcatggatgatgcaatcctaccccccaagggtattggat

SEQ ID NO: 5050 - DNA, 365 bp, Glycine max
tccttgagaagattcctaaagaagctagagtttagctacacacacctctctaatagctaagctcaccttcttgaaatgagaagctagagcatagctacacacacctctctaatagctaagctcacctccttgagataagaagctagagcttagctacacaccccttataatagctaagctcacccccatgccaaaatacatgaaaatataaaaaaaaagtccctactataaagactactcaaaatgccctgaaatacaaggctaaaaccctatactactagaatggccaaaatacaaggcccaaaaaaaaggaaaaacctattctaattgggctcataaatctaccttgaggttcatgagaacgc

SEQ ID NO: 5051 - DNA, 341 bp, Glycine max
  unsure at all n locations
aacatccaagcaaaacaacgttctaacagcacaagctatcacagccaagcaaaacagagcaaaggccgaaaactctgctcaacacatcaaccaaaatcacagcttttctcacgtaaagaccacagtaacaattccttcgatccaattcgttaaccggtggatcgactccaaaattttactggaagtctatagtgtataagcctgcattttgaccgttgggatatactagcaaacatccagaactcattctgcactagacttttcacagccaaccacacacaagcattnttctgcacttgtgcaaaattctgctgcacaatttcacagcaaaaactctgcat

SEQ ID NO: 5052 - DNA, 383 bp, Glycine max
  unsure at all n locations
gaagaagaagaagttcagagagattcaaggcttgtaaaggattgtaagagattgattgaaaagtattcaagattgaatgaatgtaaaagtgtaaaacaaagccttgcttttatagactcctcatgtctggtcaagaataccttttagaagagttataacttttagaaaaacttaaaaccaatttgaaaaagtcaaaaaccttttaaagagttacatcttttgatttattcagaaacagtcactggtaatcgattaccaaatcagtctaattgattacacaaggctttttatgtgaaaggatgtgattcttcacattngaatntgaatttcaacgttcaaaggcactttgaatcaattaccaaaacactgtaatcgattacaac

SEQ ID NO: 5053 - DNA, 325 bp, Glycine max
agcttctatggatgttggatctttgagctttaatggggtccttcaatggtgtattttagccatggagttgtagtggaagataaaaggagaagaagtgagaataggcaccatccactagggaataagccatggaagaagaaacttcaccaccaagagagtgtcttggataagaagcttaaagaggaagcttcaatggaggaagagaatgagagagaaagagaaagagaaaaagtggcatgggaatgaatgaaaaacagggagagaagatgaactttgaagttttctctcaagattctcattcatcaaagttgccacaagtgttaca

SEQ ID NO: 5054 - DNA, 267 bp, Glycine max
  unsure at all n locations
tgaggagaagctctgactccatttgaccctataaataaaaacatatgggtgagtctttntggtttgccaatcaaaatacaaaaaaaaaactaaacataagttaaaacacactagactagcaaccactacgatgtggttatctatcgaatctcatatgcatttctaaggtgtcaccttttcactaattcaacatatatgtttatatatgacattggtaagctaccactggaactcccagaacttagtagtcttacgaaactttagttt

SEQ ID NO: 5055 - DNA, 349 bp, Glycine max
  unsure at all n locations
agcttgcctcanagatgtccaagaaggataatgcggccgaagggactagttccgctcctgagtatgacagtcaccgctttaggagcgctgtacaccagtagcgcttcgaggccatcaagggatggtcgtttcgacgggagcgacgcgtccaactcatggacgacgagtatactgatttccaggaggagatagggcaccggcggtggacatcactggttacccccatggccaagttcgatccagaaatagtccttgagttttatgccaatgcttggccaacagaggagggcgtgcgtgacatgaggtcctgggtaaggggtcagtggatcccgtttgatgccgaccctat

SEQ ID NO: 5056 - DNA, 314 bp, Glycine max
tcaacctagaggagacgaaccattccaagtgttggagaagatcaacgacaatgcctacaagattgacttgcctagtgagtataatgtaagtgccactttcaatgtgtctgatctatctctttttgatgcagatggaggagccttggatttgaggacaaatccttttcaaggagggagtgatgaggacataaccaatggcaaggaccatgaagcacttgaaggtcccatgaccagaggcagacttaaacaagcccaacacattatagagaacaggctggtcatttggatagctgtcattgatgatgattgaaggc

SEQ ID NO: 5057 - DNA, 279 bp, Glycine max
  unsure at all n locations
agcttgaatgtcttctgatgacgaaagtaaatactctgtaaaatttcaaaataatcataatcgaacgaccaacatcatcctgataccatcgaccttcttcgccctggttgacgaaaggtacggataaccataaagtattccccgcatgtcatcgaactcgttgtctctggatgacaaaaggtgcagaagacgacgttagtctctgcgtatcaaccggctcgtttgcctctgngtgacaaaggtgcggataaccataaggtacccccccctgccacttga

SEQ ID NO: 5058 - DNA, 120 bp, Glycine max
tgagatgaggaagtgttgaagggtgatacttcctgcttttattgttgaccacagagtggtacctggagatatgtcgcgggggtcacgagacctctgtgacgtcttgtttggtgcttttgt

SEQ ID NO: 5059 - DNA, 330 bp, Glycine max
  unsure at all n locations
agcttcctgcaaccattagcactccatntnttatgnttattcagtaaaccaattgagtcatcaactgcaactaaactctcacaccaatcatatgaaagtttctttcaatttgggagatcagatacattatgtatctgtgttaaaaaatcgcactggtcaaaattcaaaactcttagatgccagaactttctgcaaggaaaaaaaaaaaagaagatgacatcagaaccatatgaataaactttaagtgaatttaataattcatgggatgaggatatctgtcatgtaactcgccttggatgagcgatggaactcacatgacataatggaact

SEQ ID NO: 5060 - DNA, 290 bp, Glycine max
  unsure at all n locations
tgccttctgatttgagttgatcaagctttttgctnttttatgggtcaatttggattattcttcaatatatttattcttttgctgctacgttgttatgctattttttttccaatgtatttacttacgtaattgtgttcaaaacagaagtagaagtaactatttcattatttttatgatatttgtttgctgagtagagctaaatatttcattctttctgagagtttttttctctcttctggtatagatattcttgtactcaccttagttgatgcagtgaatgatctataatt

SEQ ID NO: 5061 - DNA, 422 bp, Glycine max
  unsure at all n locations
agcttgtaagttacaaaatagagaaattctatagaaataaaatgcatccttttgtatttaatcattttattagattatgtaactactaccaactaactttaattaaaataagttttattctctttatatatattcctcatcctatatcaccacttattttcttagtatttaatggttctaaagaataattgttcttgacaaatattatggaaaacaataagtgcttcaattctttcacaaattaggaaatgaaagttaggaatttttttaggtttcaacagcaacaccaaaggtaggaaccacgatataagggcagttccatttgattntgatctcagattttgtttacaaaaaccaacttgaaaatctaaacataaaatattaaagaacttgcagacatatcccagctagctgggaataca

SEQ ID NO: 5062 - DNA, 347 bp, Glycine max
  unsure at all n locations
tggaggacaaaacanagtagtgtacaagtacttggtgctatggcataccgtgctcctcagcatttgtctcggtgtctccctaagattgttccaaaattggctgaggtataatatgaagcaaacattatttttcacttctaaattccttttaagctatagattgcattaccttaacccatctcagtatttgaagggtttgactgataaagagtccagaaatatctggtcttgtccctactctacttaagtaaattggtgttttcagtatctagagggaggaataanagtaattctttngaaattatggcatanaaaatcatcattcaattccactctacttttatatg

SEQ ID NO: 5063 - DNA, 280 bp, Glycine max
  unsure at all n locations
agctntgtcggattggtcttcgccagtgaaaggatcgatgtgggtctgaaaagtggcaaatttagtcatcctgcttggacgaatgagaaaattgtggcaaatgaagagggtgaggatgaagtataagcccatgctgtgactgccattcctatatggccaagtatcccaccaacccaacaatgtcattactcagccaataacaaaccttctccttacccaccgcccagttatccacaaaggcaatccctaaataaccacaaaatgtattgtctaaagatgg

SEQ ID NO: 5064 - DNA, 306 bp, Glycine max
  unsure at all n locations
tatatactctaatgtacagattataaagcaagttccacttgatatatgcatganaaacaaagataatagaaattaaaactaggttgcctcccaggaagcacttctttaacatcattagcttgacgcatttacctcaatgggtgatatcatgttttggttcttacctccagaacctcttgacccacttccattacctgtaagcaaacattttgttctagagcaggcttgtcttcaacaaacaaatcaaaatcaattttctgatcttcgaaacccatttccagcttctttctacccatatcaactatg

SEQ ID NO: 5065 - DNA, 287 bp, Glycine max
ttgagaaaactcaactttcataactttggactcaaatgtctgattacggaccataatatatcaagacgctaaaaattgaacacggaagctcgggcccaattcaaactggcataacttttgacttagatgtctgattgtggaccatattccaactgccatgattggtgattctgatgtttgactacggcccataatatatcaagactcttgaaattgattacaaaagctcctcacaaattaaactaccataacttttgattggatgtctgattgtggccgataatata

SEQ ID NO: 5066 - DNA, 375 bp, Glycine max
  unsure at all n locations
tgtaggcattagaagagaatgcacatatgattagaagtatgactgaaaatgttagttagttgtaagattgattgtgaaggaatgcattaactgtatcccggtgagagtgtgatccttanattatgagagaaacgactatcatttagtactgatttttgcgtgaatctttgaagtatgaaggccatgtttgattgtgatagccacttagccaaaaagctgaccatgtgcttgaatgaattatccctcatacctangatgagttgaatgaattattgattgattgaacccagagcctatacaattatctcatgctaccttgacttanggtgtangagagcatcatccacaggaagcgcagttcanagcaaatttgtc

SEQ ID NO: 5067 - DNA, 384 bp, Glycine max
  unsure at all n locations
agctattcttcgtgggttgatgggttctgtctcgtaaaatggcatgatcactggatgacatgttctcaattagctcagttgcttcttccggggtcttcagttttatctttccccctgcagaagcatctagcagttgcttggtttgtggtctcagcccatctataaacatattcaattgaattagctcggaaaacccatgggtgggagtttttctcaataaacctttgaacctctccaatgcttcacctagagattcatcagggaactgatgaaatgaagagattgcagctttcccttccacagccttggactttgggaagtatttctttaggaacatttcaacaacttcatcctangttntcagattgttacccttaaatgagt

SEQ ID NO: 5068 - DNA, 305 bp, Glycine max
  unsure at all n locations
ntgaagggccgaaagagactagtcgagagtcaaaggtatgatattagaggacgggttgaaggcttgtcaaaggtcaaagaagagcttgtctgaacaattaagtaggacggaagagaagatgtgggatatcattgacctgtataaagagaagcaaaatctagctgcaacccatgagcaaagactagaggacgagcatgcaaaagtatcggtcctgcaagcggaaagggaagcaagggagagagtgatagattcattatacagagaagctatgatgtggatggataggttcgcgttcactttgaatg

SEQ ID NO: 5069 - DNA, 411 bp, Glycine max
tttttattcttacactgtggtctttacaaacatggctttataaagactacaacaatcttaacaagagggttatcataatgctaacttgtttttctcaattaggggtgcaaaagtctccacgaaagtacttgggttctctttaataatacctccagataggcgtttaaaaatccaagcgtttctttatgaagggaataattattcgatactaacatcttttctttcaactgggtggtcctttggttgcaaccatacaaacattgtttgttcaatgttcggaacaaaaaattgttgaataaataagcgttgggagggatcggtttacatttcacactcttataaccgctgtttcgtatattggtacaaacttttgtggtgttaaggaaaatgtaaacaacaatcttggctgcg

SEQ ID NO: 5070 - DNA, 364 bp, Glycine max
  unsure at all n locations
tgtgggattntgtgatagtgattnttccgaagatgttgatgatagaaaaagtactaccagatttgtattttttatgggtgattgtgtttttacatggagttctaagaagcaaggcattgtgacactttctacttaataggaccttcataactcttcagatgagaagaagagaaactatatgtgatggctggtatattggagatcatagtcttcttatagggtgttaacctaataggattctcattactctctaataggccaacactgacatctgctcgtttaagtccatatcatttgattttgtttttgattgtctaacggaggatcatttatttgatcaataagataaactcataatgataat

SEQ ID NO: 5071 - DNA, 451 bp, Glycine max
ctgcaagcttggatattgtaatgttttcttactaattgtggttatttgattttggtattaatttcttttataataaactcactcctcgcaattttgtaccgtgtggttactgtgaagattgccaacctttgttcgtgggagtagaatgacaatagtagagtacaagaagtgagattcttttgtgaaaccgctgaaccgacgtgatgacgttggattattttggaagagagttgtgttttgttaatcaattcctccatagttggttccatgattctttttattgacttaaagatgtaaatcacaaatttaattatatgtatgaacaaatttactttctattatgtgaatgatatgtactgagttactatacctatatatatatatatatatatatatatatatatatatatatattcacttaagtaatgatgcgttgtttgtgaatgtatat

SEQ ID NO: 5072 - DNA, 239 bp, Glycine max
  unsure at all n locations
ntcccttcatttcnaaatttannaaattgtctcttttgttttcttccatttcatcagaacaacaagctagtgagggaaccctgttccaacaataaaccatgtatttcatgtcagcataaaaaaagaatccaaatccacaaacttctgcataacttgtcatgactcaaagcagcaataaggcagcttaatgagacaatattcaaccattatattatatcaattggaacgcggaggggggg

SEQ ID NO: 5073 - DNA, 512 bp, Glycine max
  unsure at all n locations
cgcgatgtntagtttgaaatcgtctcgtaccttggatccttagagtcacctgcngctgcagcttgtctagcgtttatgcgagacagagaccaacatgttaactatcatcgcccaatacgaagaagaattatgtctagccacggcccaccaacataaaatcgcggatgaatatgctcaagtatatgccgaaaaaaaggctagaagaagggtgatccactctttacaccaagaggcaaccatgtggatggatcggtttgctcttaccttgaatgggagtcaagaacttccccgattgttaacaaaggccaaagcgatggcagacacctactccacccccgaagagattcatgggcttctcggctattgtcagcatatgatagacttaatggcccacataattagaaatcgttaggaaacttgtatggtctctcagaccttgactggatacgacttttttttttttttttttttttttttttttgaaaaaaatgagatggcccattgttctaccn

SEQ ID NO: 5074 - DNA, 464 bp, Glycine max
  unsure at all n locations
nggcttagcacatgaagagatggcgcttagcgcaaggtttgcgctntgcggataagcaatttgaaaattttctaagtcattttctacttatctcttcacacataattttaacaaccctttntgttcattactaaacaagctgaaatcaatcacaatcacaagcaagatgacctaactacatgcaagaaataaaaatgaagatagagaagggaaagaaaagctgggttgcctcccagtaagcgcttctttaacgtcattagcttgatgcatcatcctattatctaggatccaataatgttcccacttcaaggaccttcttcttaggttntctttcctccttcacatgaactntanaatagacattccggtcaggtggctctntatcttcatgaaataaatcanagctgattttctaatcttctatgcccatntgcaacatcttctttcccatatctactacacag

SEQ ID NO: 5075 - DNA, 323 bp, Glycine max
  unsure at all n locations
agcttgccgcccagctcgcccaggcgagcaaggttgcttcctccagaaggaacggcccaagtgggcctggttgctatttacacccccatttttactaaatgcaccccctttctatttttttgtaattctttttccgtaacgttacgaaactttacgaattccgtaacgatacttattttccttctgcaaggttatgaatccttacggattatgtatttactctnttttagctntcgaagaagttacggaaacccccggattgcgcaaaaacacctcttttcgacttccgccacattacggaatttcacggatcgcgcaagcct

SEQ ID NO: 5076 - DNA, 424 bp, Glycine max
  unsure at all n locations
aaagttaactanatgccttgtgttacctggttacccaactggccatgaattaaaaatatgcacctgtcgtcagactctgtagtttatgctcctctaccgaccaccacacagacctttgtccttttgtgcaacaatctgaagcaattgaacagcctaaagcttatgctgcaaacatctacaatagacctcctcaacctcagcagcaaaatcagccaccacagaacaactatgaccttctccgcacacgtacaatccaggggaggaggaatattccaccgtagaagtcgaagccttcctacaaccgccataaaaccacaaccttattttataatgtactgggccagcagacataagatcttcgctatctttnactcacagcggaatcgccctataacgaaatcttgacgctccgcccacctcactg

SEQ ID NO: 5077 - DNA, 352 bp, Glycine max
agcttatggtagttaactctttcactgtggcctcgacatacaagcttttagaaggactacaacaatctgaacaagagggtcagcagagtgcaaacttgttttccaaattctggtgtgcaaaagttccaacgaaagtacttgttttctcttggaaattactccaagataggcttccaacagcacaagcgctctagaggaggggagttattattcaagactacaatttttcatgcaaactgtgtggccttgaggtggaaaccaacaatcatttgttcttactatgtccggtaattaacagattgtgggaaagagttatggcatgggtgggaatggattacaaatcccaatcata

SEQ ID NO: 5078 - DNA, 272 bp, Glycine max
tggatttccttttagtagggaatctatccttcctaagatggagccaaacccagtcacccttattaagaactagctcttttattcctttattgcctttagttgaatacacctttgtttggttctctatttggttcttaaccctctcatgcaacttctttacaaactctgacctagattccccttctttatgtataaaagaagtgtctagtgggaggggaatgtgtctagtgggaggggaatgatggctaactgcgacatcctggacatttcta

SEQ ID NO: 5079 - DNA, 409 bp, Glycine max
  unsure at all n locations
agctntggcacttgtcttcacactaattttgaattgaaatttccaattatagaaataaatttgagccaaaacaacaagcacctttccctttcaccttttttttctggatactgattttcctgccaacatgtgcgatttttcgtattttttccttttatccaaatcacttgtttctttttttataacttttttccagatgtctagaaaattcagtaaaaatttcagctcanaattcgaggtaaccaattctcagtaattnttacaagtttgtatgtccaagctgccagcaccagcgatttgtttctttaaacatggtatatngattgccttgggcttactttcaaccttcctatgtatgttgaactcactagtattgtttaccacagntttagggtgttcaatattcact

SEQ ID NO: 5080 - DNA, 258 bp, Glycine max
  unsure at all n locations
tgccacccagctcgcccaggcgagcaaggttgcttcctccagaagcaacagccttctggaggaaggatctggaaggcccaagtgggccagattgttatttgcacccctcctttntactaaatgcaccccccttctatttttttggtaattctttttccgtaacgttacgaaactttacgaatntcgtaatgatacttattntccttccgcaaggttacgaatccttancggatatgtatttactcttttttagctttt

SEQ ID NO: 5081 - DNA, 263 bp, Glycine max
  unsure at all n locations
tggggccaaacacaccaaatgattataatgatggatggctcaaattctcacaaaggtaaaatcattactttcaaaactatcatgacatgtagagaaaaatcaaggattttcagtcacaaaatgtcaagaacttttatttttcaaacaattacccatttatttcttgaacatattctataattcaaagaanaacatgcaaagtcgtgcgtgcacacgaaattgacccaaaatattaaacttaanatccgacgaaactaacaaca

SEQ ID NO: 5082 - DNA, 356 bp, Glycine max
  unsure at all n locations
tgtgtcacactttcaattgtcgaagctgaatacatagctgcaagaagttgttgtgctcaaagtctttggatgaagcaacaatgatgtaagctccattggagcttgtaggcctaggatcttcttcatcaatggattcctttgcttcttggaagatgaatggcagcggaatggagaaaggaagagagagaggagacgccacttcaaggagaagatgagtctagaagaagctcaccaccataggaggccatggataagagctnggaggaagaaagagatgaatgaagggagagggagagaagaagcacgaaatttgtgctctaaatgagctttgagatccgaagtntaatattcaaatg

SEQ ID NO: 5083 - DNA, 214 bp, Glycine max
atatccctcaatttatctcattttacatggtatcaccagagaaaatatgaggctaagctgaataaatggaaccacagaaacatttcgatggctgggaggatcactctaatcaatgctgtcctaacagcattgcctttggtctatttggtattcttcagggcccctataacagtgattaatagattaattgccatccaaaggcactttctttggg

SEQ ID NO: 5084 - DNA, 329 bp, Glycine max
  unsure at all n locations
taccctagatgacactcattgtacaaccaagttcataacttagtcacttttaaagtcctgctgactgagtacaaagtgacttgcaaccgtttggtgagttattaagcactcacttgtatgtcaaattntaaaatcatatacatatctaatatgaatttcatgttaattacaggatgtgccgagtacctgtactcatttatgaaagctgtaagattcacccatatgaacttgaaagagactacgaagtataggataatttataatcattgtaggaagattgcaaacattggaaatggatggaggaatttcataatcacaaaattttctta

SEQ ID NO: 5085 - DNA, 414 bp, Glycine max
  unsure at all n locations
agcttgttgtcattaaatcttacatgaatggccttttctacagtcaaggttctggagttatgcactctgtatgccttggacaattcaaagtattcaagtaagattctagaatcacactaggagtcaaactttccaagtttatccttggtgtttaagatgaaacgctgacatccaaatgagtggaagtaagagatattgggcttacgtctcttccataattcatagggacttctttaagataggccttatgtaaattttgttctataaataccaggaaacatttacagcttcaacccataaatctttgggagttgagtgatcgttaagcattgttcatgccatttcctgaagagatattnttttcctctcaacaacttcattctgttgtgctgttcttggagtgggaaaaatatg

SEQ ID NO: 5086 - DNA, 311 bp, Glycine max
tgttgtgtcgtccccgtttctgcctaaacccatttctggctcatatccatcccttaacataacccgagccaccatcaaagcgacaccagataagcgtggctgcaccagaagagattccacatatgcaatgctcacaatttccaatgcttggaaggatgtttccaatgactcatctacagcctcaacataaggcgtagaagacagacaacttactagtatgtcttcctctcccgatactatgatcagctgcctttccactacaaactttaatttctggtgcagtgttgacgggaccaccccaaccgaatgga

SEQ ID NO: 5087 - DNA, 337 bp, Glycine max
  unsure at all n locations
agctnttacaatatccaaacaattcaattttctttgtcatgaaaccaccctaaaccaagaaaaatagagtggaggccgaaaactctacacaaaactcatttcaattccacagtttttcctactcacatacctcaataacagtctctttgtttcgaatcgtcaaccattggatcgccttgaaaatttaactgagagttcctaatatagaaatttagttttgaccgttgggatctgctagaaaatatatagaacaccagatgtactacctttcccgtgactagtgttgcacaaccatttttctgcataattggaaaatctgttgacaacttgaagcttt

SEQ ID NO: 5088 - DNA, 347 bp, Glycine max
  unsure at all n locations
ntccaagagttttctggttttctaaaccttgaaaacttgtgctattcattcttttcaactcttctccctttgccaaaaagaattcgccaaggactaaccgcctgaattctttttgtgtctctcttctcccttttccaaaagaacaaaggactaaccgcctgaattcttttgtgtctcccttctcccttgtcaaagaattcaaaatgacacagtctgagaattcttttgattcttccctttcccttatacaaaagatttcanaggactaattgccagagaattcttttgtatccccattcacaaagtttcaaaggtttaaccacttgagatctttgtcttaacacatt

SEQ ID NO: 5089 - DNA, 401 bp, Glycine max
  unsure at all n locations
gaagtgaaataattgattatgaaatgccgaacaaagaaagaattgaatgagttaattgattacccaatttgcttatcgattaaaattggtaaaactattaatacctttgcttattctcactacaagaaaaaatgattttaacgagggttattttttgccttaaggaggggttaaaccccccgaaagtatggtacctattggtggtgttctcattggcaaaacatccacgataaatggtttaccaatggtttttgtgaaccctttaaaacacaagaaatacttgatgtgttgaaacccctggtaaataccaagggttattaacccctattaacaccacaatcattgctggcgatttaaaacccttgttcttatangggtttaaattgccgtatacatttatt

SEQ ID NO: 5090 - DNA, 357 bp, Glycine max
  unsure at all n locations
tcaataataacatagaattcccaagtatatgtagatagtttctgcattctaccagacaatttttttttagaaataagcaataggatgcttgttttggcttaacacaacaccaactcccctccctgaagcatcagtttctaatacaaaaagtttattgaaattaggaatagccaagacaggtgcagaagtcatggctatcttaagtttttggaaagcctgggcagtagcttgaccccatttgaaagagtccttcttcaatagaacagtcagaggtgttgcaatggtagcataggtcttaacaaatcttctataataacctgtaagtcctaggaagccccttaatntctttagattcat

SEQ ID NO: 5091 - DNA, 403 bp, Glycine max
  unsure at all n locations
gatcctcttagtcacctgcggcatgcagcttgctgaatacattctncccctctgtctattctaatctntnttatatcatcaaaacctgcatgatttacattctccccctctgtgatgatgacaagcattatccaaggcttgatctntttgacatcatcaaaatcttcatgatttacattctccccctttgtgatgatgataaccacctataagtgatgagcaacaacaaagaaaaaatatctatttgcatatagtttacatcccctttggttttggaatgcttgcttatatgagaccattgaagatttcatattcttcatatataaaaagtgtctcataaagatagacatctttccttctaatttatcttgatattactctcccccttggcccatcaaaacaa

SEQ ID NO: 5092 - DNA, 433 bp, Glycine max
ggttaatatactataagtgtcatgaatctctgacataagcttcaaccaattaacattgttcgaatgacaactgtagtagttgcaccgcactcacatacgctggccaccatcggttgctgtacgatcctatcggctatagtaacggcatgctctatgcttcttctgttatagctacggtggcagaaagtctaacttttgaatccacaaaaggaggatctccatatggtgctggagtcttgctcgagatggcagaaaacaagcacaggaaatggaactggagcctgcacagtatcatgcaacgattataaaactagcccataaatcattaaccctctaatcaacatcttattgactaaacaaaccttgtgacctcaaatacactcaagacggttgcttaaacactctaattaaaagcggcagtgaatcatggttt

SEQ ID NO: 5093 - DNA, 423 bp, Glycine max
  unsure at all n locations
agctntacgatagtttactgaatcattattttatggaactagttaacgtattggtttaatcatgtttcaataggtattacttaagtactattattctaattttaatataatacgcaatatctagtgaaatatatgcatgtctgaacctatttctggtccaactaaagcttaattaatacttcggtaataaaatgtttaatactattatgacttatctttataaaaaagactgacaataatattattttaaaaaactaattatttggtactgcgtcacccaatattgattaaacttattaaacacaactcacgcactttattatatcgtatgatatgagatgtgctacaagacaaaaatatcaaacaatttcctctgatgcttacatatgtaatgattcttcacatgctgtctatgctattgat

SEQ ID NO: 5094 - DNA, 307 bp, Glycine max
  unsure at all n locations
agcttctatgagaagtttctcaagacagctttcttaggaagctacctaatctataggtagaagcatgtgtaacacttgttgtaactctgatgaatgagagtcttgtgagacatattgcaaagttccactgctctacctcttttattccttcaatntcgtgctcccccctctctccttctctccctctttcttttcctccattgaagcatcctctccaagcttcttatcccaggcccactcttgtagagaatcttcatcttccatggcttattccctaggggatggcgcctcctctcacctcttctcc

SEQ ID NO: 5095 - DNA, 405 bp, Glycine max
  unsure at all n locations
agcttataaatataacaaactaatttatcttttataaanaatacttcaagataaatctgtatttcaacctaacaaaataacttacaaaaaatgtgtgatactacagaaattttgaaaaccacctaacaaaataacttaaaaaaatatgtgatcttccaaaaccacctaacaaaataacttacaaaaataaatgatatcccagaaattatctaacccacgaaagctacaacgaaagcaagtgcagcagccaaaacagctgaaaaatatggtgaaggagggctgtatttaaagatcctaaaacgccaacctcatttgcgccattttctactctaaaacgctaacatgatttgacctccagacccctaagacgccaacattgaaagctgctcctgctttccaaagcta

SEQ ID NO: 5096 - DNA, 347 bp, Glycine max
  unsure at all n locations
agcttgcatgtgcatgctgagcggacatgcatagtacaattggcttaagtgaccacacgctaagcctgcaaatgcgcgcttaacgcacatccacgataaatctgacttccagcttggcttcttgcactaagcatgcactggcgcgctgagtgtgctgctccaattcttcatacatcttccattcttctgttgatgcatctaaaaattctacanaataaaacanaacattgtanangtaccaactntagcattcttaagataagaactcaaagaaaatctaaattcctatcttttttagtcaaaagaagtatcaaaagagaagaaattagataatttctatttgtatt

SEQ ID NO: 5097 - DNA, 389 bp, Glycine max
  unsure at all n locations
agcttaatanatctatatatgatttanagcaagtctcccatcagtggtaccttaagtttcatgggctaaattcctcatttggttntgatgaaaaccccatggatcaatgcatataccacaaggtaagtgggagtaaaatatattctcttattttatatgtagatgatattttacttacagccaatgatcaagttttgctacataaggtgaaacaatttctctccaagaattttgacgtgaaggatatgggtgatgcatcttatgttatcggcattaagattcatagagattgtagaagcangcttcatgatgatgaatcaagtagttttgatgatgacaaaaagcccacaagaatgatgtcaagattgagtcaacaagttcaagatcaa

SEQ ID NO: 5098 - DNA, 403 bp, Glycine max
  unsure at all n locations
ggatcttaagcacctgggctgcagctataaaacaaaatgcctnatcattttcaatatgcatgtgaattangaagcatgaacaagaattaagccaaggctattgtgcaagcaatcaatggggcaaaacacaccaaaagattatgatgatggatggctcacattctcacaaaggtaagcttatcactttcaaattgagctttcaaaactatcatgacatgtagaggaaaaacaaggatttcaaatcacacaatgtcaagagacttttattttcagaacaattaccanagcttgatttgtgagttgatnttagccttggtttcacttttgattattagtcaataattcaaggaaactttcanagaaaacgnctgattggattttcttgataaatttatattttttc

SEQ ID NO: 5099 - DNA, 321 bp, Glycine max
  unsure at all n locations
gcttatgctgcaatattacaatagacctcctctacctcagcagcaaaatcaaccactgtagaacaattatgatctctccagcaacagatacaaccctggatggaagaatcaccctaatctcagatggtctagccctcaaaagcaacaacaacagcctgctccttccttccaaaatgttgttggcccaagcagaccatacattcctccaccaatccaacaacagcaacagcccctgaaacagccaacagttgaggctcctccgcaaccttccctcgaagaacttgtgaggcanatgaccatgcagaacatgcagtttcaaca

SEQ ID NO: 5100 - DNA, 395 bp, Glycine max
  unsure at all n locations
ttgtcagaatatgattattaaacacacaaaatggaagtactaagtatttattacctatacttaacataaagtacttataacactacaaactaaccataaattgtggaagtttgatacaatttacacaggttttacacacaaaagttagtcgtattcctgttgtatggctccgcctcctccaacgaagtgtggaaattcatcatccctcagctgcccttgtctctgtgtgaggaatgaccatcttttgatggcctcgaaacgctattgatgttccacactctgaaatcggtgtttgtcaaagcctgtttcgacttgtggggccacatnggaatcctcttcaatggtgcctgtgacatccctaaataatgactggtgtaatagtaataaattaaata

SEQ ID NO: 5101 - DNA, 445 bp, Glycine max
  unsure at all n locations
ctgcagcttattctttntactcttgtgccaagtctttgatgccacatggttgaattattgacagcctccgtaattgctaccatatcctcatctacaatcatgtaaagagatcctcacttttttccacgagccccaacgagattgccttttgttaccttccaagctccatctccaaaagtggtgtgatgcccctcatcatcctaccatcctatagatattaaatttttttttaaggcaggaatatgtctaacattgtgcaatgtccatagggatccactagaggtcttgatgttgatatcactntttccaacaatgtcaagagattntccatctgcaagggaaactttcccaaatcttccagaaatatagttagacaataaatctatagagggagtagtgtggaatgaggcacctaagtccattaatcatgaatcaacgggactat

SEQ ID NO: 5102 - DNA, 358 bp, Glycine max
  unsure at all n locations
ggacagtggaagagctactttgctaaaatctcttataaagcgcctgtataatcctgcatgagtaagataagatcgcacctctcacacgcaagaggggtaatgcaattgtgaaataacaaaaaattttgcaggatctacttcaatgcccttattggaaataatgtggcctaaaactataccttgctcaaccataaaatgacatttttcataatctagaacaaggttagtttcagtgcatctattcaaaaccttttccagactatccagacaaatatcagaagagtatccatatacagtgaaatcatccataaacacctctatgcaattttctcaaaaatcactatnaatactaatcatg

SEQ ID NO: 5103 - DNA, 305 bp, Glycine max
  unsure at all n locations
agcttgtaccacatttcattacatagagaagacaaatagcaaactacacgttagccacccatgaaaatggagaagcaacataactttcagttaaataccactatttgctagcttggctcacttcctagaatacattgacaaatactttaattataagttgatttattttatatagtaagttagcaaaaatgcttgaaatggtgtaaggttgattaanaggagacaatgtgtcaataaaatttctaaatctagcttatcttccactaaattttggtgtttgccttgttacaatagaaagtcgtaca

SEQ ID NO: 5104 - DNA, 383 bp, Glycine max
  unsure at all n locations
agcttccttntaatgcatcacaccacgtgtgccanattactttccaagtgatggacataaatcctgcctacagctgcttattaggttggccttgaattcattcggttggggtgctcccttcaatgctacaccaaaagttgaaatttatggtggaagggcaattgattattgtctctggggaagaagacattcttgtgagttgtccttcttctacgccctatgtggaggccacgaaggagtccttggaaatgtcctttcaagcattagaagtggtgagcaatgcttacatggagtctctctcggtacaaccatgctcatctggtgccatattgatggtagctcgggtgatgttgggtcatggatatgagcctgaaatgggtttc

SEQ ID NO: 5105 - DNA, 374 bp, Glycine max
  unsure at all n locations
agcttgatgtcattcanaagacactatgtcgacctanatgacgactaaacatgcattntttatgtaattgtattcattatgcgatataatttgttgtaaccaattactaaccaattaatattattaagtactcgtttggttaagcaaaaaaattgttggtccaacaaaaatcatttacgcgtgtagcatacatcattgtcataattgacaacacataatgacatgcatgcgtattaaagtttgagttgaggaccaacaaagaactgctgaaggtgttagtacaatctaactactggaaaaaatatggaccaatagaaattntagctgtctttactaaatatgttgtgaaaatcgaaaacgatgtcattgggaca

SEQ ID NO: 5106 - DNA, 409 bp, Glycine max
  unsure at all n locations
agcttagatttatcaagttntattntgagtgtgggagggggtagaatatcatccacaccactcaatattcaagtgaaaagaccaagagaaaagaanaaggaggcgaaagaacatttgagcctcttaaaattcttcaaattagttagaacatattgattagtgtttgaaggaaaaagttgagaattatgtcagcatcaacataagttgaatgcctnctgatactgcatcaaggatacttgacaacagacttagaaccataccacttaagcttcaactgtttccataacatgagttaataatcaagaaggtaaattaagttgagtggtgaaatgatgaaatagatagatacctctactctatcaaacatgtcatcaagtatcaaagggtctccactgtaatatgcatcacg

SEQ ID NO: 5107 - DNA, 337 bp, Glycine max
  unsure at all n locations
agctatagaagatgttntggcttttacatgcccaactcctttgagtggcatttgtatcggtggttaactctattgttgtatcttagtacattagatatctattntgcattgtgcaccatcataatgcatgtgtgtgtgaagaaaattttctaagttagaaaaatttcttcaaaggaaaaaactntgttttaatcgattatagaggtgttgtaatcgattacaacaagctatttgaagcttaaagagttaagtctcgtatcggtttaattgattacaatagtactttaatcgattaccactattgttgagacaatgactgattntttcangagtctct

SEQ ID NO: 5108 - DNA, 269 bp, Glycine max
  unsure at all n locations
agcttgagatgaggaagtgtagaagggtgaaacttcctgcttttattcgttgaccacagagtggtacctggagatatgtcngcggggtcaggagaccttgnggacgtcaggtggggtgctatagcccaaaaccaagcttgaccaatcccgacccaacccgggcatagtcggtcagtgagaacctgtgatgtacctatacaggcgagctcctggcagtcaacagataanaggaacaaagaccacccagcaaggagacttgtgtggtggct

SEQ ID NO: 5109 - DNA, 362 bp, Glycine max
agcttatcaaggttgcttaatatctccaacatatttactgcaattaatccataatatttataattagctgacagtcggatcatgctgatatatatcaataagttaaatttgatagtgatactgttgtatatattaaactacattgagatttggcaaaagcaaaaagctattaaacattgtcttgtgttgcattctcattcaggaaacaggtttcaacttctgtacaaaacagaaatttcttacaataaaagaagacggcttctgttcaaaattgcctcatctgatctgtctgtgtctccattagcatgatttacaggtcattcaagtgacacgtgacagttaggaactcatccttcttacat

SEQ ID NO: 5110 - DNA, 441 bp, Glycine max
  unsure at all n locations
atctctgagtcacctgcggcatgcaagcttgctcgagataatagctcanacttaggaatccagganagccccatctttaaagttctaattaaggttagattaagaattttaaatgcaaattacattattataagtaatattgaatacctaattaaattatattttttaaggaacctaaataatctaattagatttattctatttaattttaattaatattcattagttaaagttgatcttagttgattggataattaaaattagtttcaagtgagaataaggacttacattntttgtttaagttaaaatcattctanattactatgcttggagaacctgaaataactaattaatacatnttttatgaattaaatanaccacacttatanttctattaaatttgagttaactttttttaagagaaatttgagttactaagta

SEQ ID NO: 5111 - DNA, 423 bp, Glycine max
  unsure at all n locations
cttcggcattacatttaaactcgatccattgtcgataagcacctttgcgacaacatggtccatacactttaccgacacatgaagagccttgttgtgtcctctcccctctacgggaatctcttcttccgcanacgcgatataattgttggtggttatatgattaacgatgccttcaaaaccctccactgagatatcgtgggctacatgggcatcattgaggacttttatcaacagcgtacgatgaggctcgaagtttatgagcagttcaagcaacgagatccttgctggagttntattgagttgctcgactaccttaaactcgctttgttagatgaggcgaangaactcatggngctcttccaaagtcaccgtcttttcttgaagacctttttctttcacccctctaccactggggatctactt

SEQ ID NO: 5112 - DNA, 381 bp, Glycine max
  unsure at all n locations
tctaacacctaattattcatacacacccttagcaactattccaattnttattagttaatgtataattaggctggtttgtccatcggattatataacaaattgacaaacgagggataaacattaagttaaataatattttctcagatttttttccaattaatcttggtagagaaatgttaataaatttctcactttccacctagctcctatcctaccatagttntttttttcttttctggagttggtttgctttttactgatatacttgccctaatattagacattgacactcttgtttttcaaagcgataaagtatgtgcatgttacccaactacaagtgaaaaccaatctcantgcaatatgaatgaactaacatttcct

SEQ ID NO: 5113 - DNA, 285 bp, Glycine max
  unsure at all n locations
tattatgagcctctcttggtatttattttgattgggtaccataatgggatgtttttacacttcctttgaaaaaactttgaaaatgagatgttgtaaaagttattcttttataaaattgatattgttgttgttaccttagttgaaccccaatcacattggtgtgatcagaaatttanaatgacttctctttgatgtagaccccaaaacaccccttattccctttataatgtngaatgggatttgaccccgaatgttgatactaacctttgtcttgaaatgtatacc

SEQ ID NO: 5114 - DNA, 404 bp, Glycine max
  unsure at all n locations
gcttgctaacccatggaagctcctaatatcttccacactntnntgggtgggccattcgtggatggccttgatttcccaaggtccacatggaccccatttctaccaactacaaaacctaagaaaactatattatctacacaaaaggtacacttctctatatttgcatagagggtgtttttcctatggactgaaagaacttacctgagatgtcctaagtgatcatctangctcctattgtacactanaatatcatcaaaataaacaactacaaatctacctatgatatcccttaagacatgatgcataagcctcataaaggtgcttggtgcattagtgagcccaaaaggtggtcttgaaagcgattttcactcatacccttntcatctgatttcggataccacttt

SEQ ID NO: 5115 - DNA, 366 bp, Glycine max
  unsure at all n locations
agcttatgagcgaattctgatcagaaaggattgttgtgcacaacagaggaagctaattaagaaatcctatgatgcaaaggcccaactcttggaggtatggatttatttttaataattgtggtatactcaccctttttgaggtttatataaaaggagattaggagaatgagagattataatgtgattctacaaacatccatgaacaacgctaccgataattgattgtatatggattggattttcaaacatccatgaacaacgctactgataattgttatatacatactattaatttaattacaaccacctgtaacatgccctccaacattccctgatctatatacaanaataattattcaagcttaa

SEQ ID NO: 5116 - DNA, 596 bp, Glycine max
  unsure at all n locations
cacttccaccctcgattcgtgatcggtgatgatatcgactgtacnctccattccaccactgtttgaccctgtgagcaccgtggatcctcatagacgacctggcagcatgccagctcgangaatatggggaccccccatatgttggnactacagcggcgaacgggcagaaggagcaaatcgacgtttcagcatcacaaagcacgcatggactcaccattcacaaacggcccgacccacgtgggctcacgaactaccacaaacacatttcctcagatctttcaacaccgaggcccgatcgagacctgctagcatccacctcacttctgcactagcatacttcatcaccaagctctatcataaactacaggacagggcagacgcacaaatgtcttgcctgacacaaatcaagaccacgacgttcgtgactctcatacccgaagagcatgcgcttcgcaccaaatctgtcactggtggaccgactcactgctttaacggtgagcccccagtccttatgattacactttgagccgggggatcaggtcggaatgtgcccaaaaccaatatgaactaccgttttccgtgcagatgcatgaacg

SEQ ID NO: 5117 - DNA, 434 bp, Glycine max
  unsure at all n locations
gcttcatgacaatgaatcaagttgattcttttatgtttgatgatgacaaanagttcaagagaatgatttcaagattgagtcaacacattcaagatcaagattaatttcaagtttcatgagaagattcaagattcaagaaaagtttgattttaagattcaagagaagatgaattcacaattcaagggaagaaatcaagaagacttcataagggaattattgataagatttttcaaaaaacaaacatagcacagtttcgtttttcaaaagagttgttctcanaattttctaagttaccagagtttttactctcttggtaatcgatatcaattacctataatcgattaccaatggccaagtttaattttcaaaacttttaactggaatttgcacgtctcacatgttncttaaatgatgtaatcgattacaatatatt

SEQ ID NO: 5118 - DNA, 301 bp, Glycine max
gcattatggttcacagccaatgtgtcccacaattgacgaaaggaattgggtggagatgatatgaggtaaacaaaccacagccacaggatattgtataacaaagcaataaataaaaactgctacagaaataaaaatataactttcaagaataagcacagtttatgtgtgttgttgcttaagctacatgtcatatacaagtatggcatatcattagaagatggaaatacataggaaaagggtgatctactgatgaatgctctcctacaacctatggtttgcatcctacgaaaacacatgaatt

SEQ ID NO: 5119 - DNA, 444 bp, Glycine max
  unsure at all n locations
agcttttngaatttnntttttattttactattttanaattcagaataactattattttccgtcttttaattaatttacaagtgaattttcaatactaaagtaatggttcatacttcttaatctaacaactattntgatacattattattttttattttacgaaaattacaaacaacaaagattaattaaaaattagaagacatataaacaagttgcatagaaaaataatacggtagattntacaaaagtttaaactgtttgacacttcttatttactttcacacataaatacaacaaaaatgtgtattatcttgaaaatgattacaagtatgacaacttaacataagttgtctatcacattaatacaaatcggaatacctaagaagtatataagaaatgataaattaattttcacaagagttcctctcagtgtcaccacaagca

SEQ ID NO: 5120 - DNA, 426 bp, Glycine max
  unsure at all n locations
ctggcaagggtttgggcagtgtattttgagctctaccagatgggactcaattagcagtgaagaagttggaaggtattggacaagggaagaaagaattcagggccgaagttagcatcattggaagcattcatcatcttcatttggttaggcttaggggattctgtgctgatggaactcataggctccttgcttatgagtacttgtctaatggctccttggataaatggatattcaagaaaaacaaaggtgagtttctgttggattgcgatactangttcaatatagctctgggaacagcacaaggacttgcttaccttcatgaagattgcgactctaagattgttcattgtgacatcaagcccggaaaacgtgcttctggatgaccacttcatgcgcatggttcggatttcgactggctaactcatg

SEQ ID NO: 5121 - DNA, 433 bp, Glycine max
  unsure at all n locations
agcttggagaggatgcttcaatggaggaaaatattgagggagagaaagagagaggngggagcacgaaattgaaggaagaaaaagggagagaagttgaactctgatttgtgtctcacaagactctcattcatcaaagttacaacaagtgttacacatgcttctatttatagactaggtagcttccttgagaagctttattgagaaaacttccttgagaagcttctttgagaaaacttccttgagaagctagagcttagctacacacacccctctcataactaagctcacctccttgagaagcttccttaagaatattccttaagaagctagagcttagctacacatacctctctaatagctaagctcacctncttgagatgagaagctagagcttagctacacancccctataatagctaagctcacccncatg

SEQ ID NO: 5122 - DNA, 457 bp, Glycine max
  unsure at all n locations
agcttcgggctgctcaattgctccaggttgctgtatggaagggctaaggtctgtatggtggtcagcagaggagcacaaaccgcagacccttgcgacaggtacagatttttggttcaaggccagctgggttaccaagttaaccaatgcgtccagtttgccttcaagcttcttagtttcagatgatgcagctgagtttgtagctacctcatgcactcctctaatgactatcgcatcatttctggcactaaactgctaggagttggaagccatcttctcaattaaatttctggcttcagcaggagtcatgtctccaagggctccaccactggcagcatctatcatacttctctccatattactgagtccttcataaaaatattggagaagacgctgctccgaaatctgatggtgagagcaactggcacatagttntttatatctcttccaatactcatac

SEQ ID NO: 5123 - DNA, 359 bp, Glycine max
  unsure at all n locations
tgaccaaaagttcaaagatcaagaanaacttcatgataaccaagatgatgatctcaagaatgaaagaatgagttcaagatgttcaagattgaatcaagaacactttcaggctcaagaggaaatttgatttccagaatcaagaatcaagattccaggttcaagcttcccagaatcaagatcaagattccagactcaagattcaagaatcaagataagtatgagcaagtttttcacaaactaagtagcacatggatgtttttcaaacttgttaccaaagagttttactctctggaatcgataccagatgatgtatcgattactatagcaaatgttttgaaagattcactgatttacacgtt

SEQ ID NO: 5124 - DNA, 367 bp, Glycine max
  unsure at all n locations
ttgtaatggatatgattctctctatttnatatggntaaacattagactttgaatgtatcattcaacgagtgcaaaaaccaacttatttaaaatcaaatgtggactatcgtccaatgctagtaaaacagagttttcaaaaaggtcttcaagtgcagacttgtgcaacaaagtgtatcaaaatcaacacataagaatactaatcaagtagctttagagagaagtagaaacactgggatttataccaattcactcaaacaaagctatgtctagttttcctttgcacatcagtaaagggttctactaatcaaaacttgaatacaacaagcttatgtaccaaaagcgagtattttacagcctctaggcattg

SEQ ID NO: 5125 - DNA, 399 bp, Glycine max
  unsure at all n locations
agcttctggaggaagcctcttaatgaagcttctatagaaagatacatgaagcttcctcaataaaaacgctgccccgtcttcgttaaccgatggatcttctcgaaatttggtcttcaacttcacaagacacttgtgcatgatctaacggatctttgagaagatgtctggagtgtgctagaagcttccgtttccgagagcatctcttatttaagcatttcagcctttgctttcgtgtagcttaagaaaaacgtcatttcttcttctttctttcttccanagccatttctaaagttccaagaactttctccatcacccacagccaccattagccaccacanatcatcattgttctccattgaanacccacaccgagaggaacccttcaccgaacggaatctt

SEQ ID NO: 5126 - DNA, 350 bp, Glycine max
  unsure at all n locations
agctntgagcaaattcaaacgacaataacttttgaatcggatttccgactttgtctcatagaatatcgagacactcgtaattgaaaacggaagttctgagaaaaatcaaacgacaataagttttaactcggatgtcctattgagccctgtcatatatcgagacgctcgtaattgaagaccgcagctctgacaaaaatcaaacgactataatctgtaactcggatgtgcgatagagacccgtaatatatccggactctcataattgaaaactaaagctcttaacaaatatcaacgactatacaatcttgactcggatgtccgactgtgtcccgcaagatatacagacgctc

SEQ ID NO: 5127 - DNA, 455 bp, Glycine max
  unsure at all n locations
agcttagtaaagctaggcactaacaagaatatgtgaactcttagaatgtttatataagacaattaatccagggttagagggattcggcaagtaccaatntgtctccacaatggtcaattcctcaattgataaaaatccaaattgagaaagatttaatcctttttcttggaaaattaaaatattttttatgagacaaggatacgaacatagaatcatgtaattgattttctataaagcacctatccccaatcaactaaaaatggctaaatcacttanaaggaagaattatatacgcaaaatatttggttaaatatattgaaaacttcaataaattttcaactacatctctttctttaaccacaaccaacataattgagtggaatatcaaacanaggctgcacaactttcaccaactacatcaactctttttacaacttcttttccacttatattac

SEQ ID NO: 5128 - DNA, 320 bp, Glycine max
  unsure at all n locations
agcatgcaagcttatagnaatacagcacccttttatttctggatataacaatcctccccgggggaagaacttcatgtatcatataaacacccctttaatataaccgatatcaaaatgagataggtaaccttttctttggtaaattcctatcttttgggcgttgtaggggaagccaaaactccttcctaccacgtacttctaaacaacggagccaacgcttatattaacaaaaaaatactaatatattaatattaaaaaatatgctttttatcttcttgactctgaaggttactagctagtattattcaatcacttacgaa

SEQ ID NO: 5129 - DNA, 451 bp, Glycine max
  unsure at all n locations
agctntgagccgaaatcctgactcaccataatccttaccctcggaagcaaaaaaaggagaagaaaaatctccaatcacaggaaaaaagactagacagaaaattcccaatcaaagaatgggagaaagaaaaaaagagaaataaaaaagacgatagctcctggtcaaagaaaccagaagaaatgtgtcgggaggtccttggaccagacgatatctgaacaatgcagaattgtcaccaaatgaacaaaagaaagaaaaggaaaccatgacctacaagtggtcttctccctttgattaccaaccaaaatcctgtgcgctagcgactntttcgccccgcactaaacaaaaatagaaaaggaaaaagccaaccataaatcataagccaaaacacacaaaagctcaaaaaacccatcagaagagcgcattctcaagagaagtcctattgatccatgat

SEQ ID NO: 5130 - DNA, 349 bp, Glycine max
agcttcattcttgtatacagattagaagctttttatcaatggtctctgcaaataccttatgtgcagaatgaaattctatcaatacacctccaatctttactggagagggctaccactactggataacccgaatgcatatttttattgatgcaatagacttaagtcttcgcgaagccgtagaaaaatggccatatatacccaccacactaataacaactacatcagatggcagctcatctcgtgaaagcataacaatagaacaacctatacatacatgccccgcacatgatataagatcatgtcactccatctaaatcccacataataatcacatctgccctggaatggt

SEQ ID NO: 5131 - DNA, 604 bp, Glycine max
  unsure at all n locations
cggtacatccatcgtacatgtgtcggtgtgattaatgaatcgaatanaaaaangatcgnnnnncaatggcaaagaganatggaccctgtagnaccangcgacctctnagacgacctgccgcatgcaagcttggatcattattctgacaactaatcttattttattgcgtagaatactaccatacgatatgaatgcatcacagaacttggtcaaaatatgcactatggatgtgactttgcttaaataacaatttgaaaggatatgatatttatttcttaaacaataacgctgaatatccagacgatcttctttttaaaactaaaaaaatagcaaaaatccctccttgacatttcgatgaggcatatntctccatcaaatccataataacaaatcatcaattcaannttgctcatgggcatcatgagtatatntttacaacctgtatattttctgcttgacgatgtgcataacaatattaagactatgacttcgagaatctaattccttaaagacaaccatgtgcgatatctctctaagaatgaccatcacggattacggtgaggaatgattctatatccacaccacccacctaattttcgtaatt

SEQ ID NO: 5132 - DNA, 433 bp, Glycine max
  unsure at all n locations
tcttttacgattaataagacgggagaagaaagacgcctagctgacagaaatcacgttacacgctcccaatgctaacaacattatagacatcggatatcgtactcggctcgccatcatcgccatggtcaaaaacgccagaggcaaatggccagaatactccgactacactgatctgaacacggcgggccctaaacatgaatacactctgctcaacatccaanaactgtggaacgcatgccttccaagatcactttggtgacgcccaagaatcacgcgcaaacaagctccaacatcaagatcacattcaacattcaggaaagttccagactcagagtacgactcaaagacgactaaccacatcacctcggagagcttcacaacatgaacacaaagagtattcgaaacaaaaccttaccacgagggtacctctggg

SEQ ID NO: 5133 - DNA, 559 bp, Glycine max
  unsure at all n locations
acaactcacaacttcagtccttgtatgacgtgcatcgtatanatnccacccanaaggccgagctttggctcgtgacgcaacttaattaccgcggctgcagccttacacggatgaaacatgacctattatgtccccacaccgactttgctctcagacgtcgctgtacgtccacaaccactacatcgatcataacaggacccctcccttgaatgttagaatacaccgctcatgcgtatataacaacagacgggatagataatgtatcgactacgcacatgtcgaacaatctcgccgagatggggtccatatcaacgtcgagttaacgaaaaccacgccgaggcgaggtactattcaacgccaggtacgtccaacacacctngttggtgggtatccttataacgaacgacgcggcgccaccatcaacgttggttgagaactcgtcacccctgaggtagcacaccgcctgtgtgcttgaagttaaccacagcaccatgctcccatgtcgcagtaaaaaactaaaaccgggtctaaatgaccgagatgtacaatccccctcccc

SEQ ID NO: 5134 - DNA, 316 bp, Glycine max
  unsure at all n locations
ggctgcagctttactngttttctattaagttcatttatcacattcacaagtgtttagatatattttgtttttatagaaaattgatttaagcttatttggataatctcgcgctaataccttactttactaaacttagagccaaattaagactgtggtagacgacctttaatttgatcaatttcaagcgctttgccttggctgtttttgaataggatccatatttgacaaaaggtctaaagntgtcactaacaacatctattcactcagtcctcttagtatggtctatatattttaggtgactaactatgatgcaagt

SEQ ID NO: 5135 - DNA, 594 bp, Glycine max
  unsure at all n locations
tgtcttctagccctctcacgctgtcaccttatacacgcttaatangacttatctcactttanancaacnccntacgcccagatgggatgtggacccgattgagcacccggtgatnctctanagacacactgcagggctgcatgcctntatatgagctgaaccatttatctatttacacactctgaagcgctatccacaagactaagattatcccttctatcttactgagagtgattctcctaacttcctgagtgaatcaagaacaccctgcctgatcacatgacttccctacccttgtgtgggccctcgctggaaagaatgatcctttgcttcctatcatctccacccttgttctttcgaaccatcattccagataatccacctccgcccagaattattttgcgaccatactcccactttcacgctcaactaacggattcctgaccgtaatataagtcatcacatgactttcgctcggtcggatcacgtatctggagccctgaacatcggtattgcgtctatattctgccagccacccttacctccccttaccagcccgtcatccatgttnccacaaccacccattagaccacc

SEQ ID NO: 5136 - DNA, 284 bp, Glycine max
agcttgatattaataacctatttggctcagttcgagttctgactatagctgcaaactatctcatgttggtgttcagtgtaccacaccctgtgtataacatctcatattttgcattggattcgattaatgatacacaatttgtttattcgagaaaaaggtcccatccttcaatttcattttgcgatatttgacagcaccgcaatttcgttctgaaacggtaactatcagctccggtaccgtgttgttgcagatgatatttccgttactgaacgatttttataacc

SEQ ID NO: 5137 - DNA, 438 bp, Glycine max
  unsure at all n locations
agctnttcctaatgttcccacttcatacgtattatctggaatgcagagaaggttggccacatcgacattattgaattcatgttgcctagtcattctctagtaggtgtccctaccatcttctgggagagtagtgggctctcctaaatacttgttgatggtatctctgtcatatttcacttgaactcttctcacctaagaaaccttagtgatctcatgttgctttgttggccaggaatttgcataaaatcctctaactatatcttcattgaattttgtttcaagctctgccagaattttccatcttttctttgtgatgctagcctgaaactcttcatattgccatgtcttaaggtctactttttctcacggattangcttctggactctatttctacatatcttttgtggttggattngtacatgaagcatctccaatcc

SEQ ID NO: 5138 - DNA, 178 bp, Glycine max
gttaaacctatctcagaatgaaatctgttacatttgtgcaataccatattgttattacttgagccattctagtttatactcattcttgaatcataatcaaatatgacgatgttagtgaacatcaatcaacttaattatattccttgatcttaagtttgagcattgtgtgagtaagtca

SEQ ID NO: 5139 - DNA, 420 bp, Glycine max
  unsure at all n locations
caagctctgccacatgtccctatttgattggagcaaaagggcccactatctctttntgactgtgacccatactcagtcaccaaagtgagaaaaatctgacctttgaaacgctaaaatcctgcctcggtttgcgtgtcgtttctctgattccagttttctcgcatttctctgcgtccgccggggccagttttcgaaagcaagcaatatatatatcacaacgctcagaatgaaaccccgagcgtggattagagggtggtttcgttaaaatttaagtcgcacgcacaacgatgattttaactaattaattaggaattaacccataacctcccagttatggatttcttctcctaattagcctaacacgcatatcttgcccccgctatcctacttctaccagaacatatangatatacactgata

SEQ ID NO: 5140 - DNA, 346 bp, Glycine max
  unsure at all n locations
tgtagagaggcattngaggagctgaggaggaggcttaccacctttcccatcatgcaaccattagattgngagcttccatttgaatttatgtgtgatgcctccaattatgcacttggggatgttntgtcgtagagagttgatagactatcacatgtcattgcttacgcctcaccactctggatgcaacccaagtcaactacaccaccaccgaanaagagcttttagctattatttttgcattagataaattcagatcttatttgtttgctcctatattactatttgtactgaccatgcagccttgagatacttgttgaagaaacctaatgctaaacccaaattgatc

SEQ ID NO: 5141 - DNA, 392 bp, Glycine max
  unsure at all n locations
aactggatgcattggtttacttggaacccagctggccttgaatcagaaatctgtacctgtcgcaagggtttgtggttggtgctcctctgctgaccaccatacagacctttgcccttccatgcagcaacctggagcaattgagcagcctgaagcttatgctgcaaatatttacaatagacctcctcaacctcagcagcaaaatcaaccacagcagagcaattatgacctctccagcaacagatacaaccctggatggaggaatcaccctaacctcagatggtccagccctcagcaacaacaacagcagcctgcttcttccttcaaaatggtgctgggccagcagaccatacatntctccaccaatcaacaacagcaacaaccccagaaacaac

SEQ ID NO: 5142 - DNA, 387 bp, Glycine max
  unsure at all n locations
agcttcanacagcttgttataataaattacaatgaggttgtaattgattaaaacagagagtgtttgcctctgaagaaanttttctaactntgaaatttttcttcacacatactatgatgatgcataatgcaaaacaaatatcaaatgcactaagatgcaacaaccaagataaaaaccaatacaaatgtcactcaagggagttgggcatgtaaaagccaaaacttcttcaaaacctcttcaagcttttccttgagcttcaagctttacccttaggttgttcactatattgcttatgttgcccccctatctctaacnaacttggcacanagacttggaaaactcatattctttgtgagcatgtcaacaagggaaacaaatcanaacgtc

SEQ ID NO: 5143 - DNA, 523 bp, Glycine max
  unsure at all n locations
gatgtgaccctatctgcccgagatcttaagtcactgcggctgcagcttanagtcctagtgnatgaattgtgtgtgcttgaattctggtgaaaatgccaagtatagcaaaaatgaatggtgcaatcccaattgtgtgattaaagagacaaacacttgattgcactcgtgagtgagtgaaacacttgaataatgaggagtgtggtcttcttgcatcaatgatgaatcgccatgctttgtgctctcctttgattttgagctagtgtatccttgctatggtctcctaaagaggacatccctgtgaataattgaagccttgttccattcattattttttatagaanatacatgtgttggatatcgtaggatggaatcgatctcaactcatgtcaatggtttaatcttagcactaatagctctcatttaacgatgtgtgtacttttgctcgaggacanaacaacgtctaatattgacggagttgatatttgccacaatacttaactgagacatgtgattatgaaattag

SEQ ID NO: 5144 - DNA, 427 bp, Glycine max
agcttgcttgagaagcttctatggaggctggatctttgagcttcaatgaggaccttcaatggtgattttcaaccatggagatgcagcggaagataaaggagaagtggtgagaggaggcgctatccactagggaataagccatgggaggaggaacttcaccaccaagagagtgccttggataagaagcttatagaggaagcttcagtggaggaaaaaaatgagagagagagagaagggggggcacgatattgaaggagataaagagggagagaagttgaactttgaagtatgtctcacgagactctcattcatcaaagttatgacaagtgttacacatgtttctatttatagcctaggtcactatataaatgacagcttccttgagaagctggagcttaactatacacaccccctctaatagctaagc

SEQ ID NO: 5145 - DNA, 301 bp, Glycine max
  unsure at all n locations
gcttcaccggatgatgccgatcgaacattttctaatcgacatcatccaattgttattcagggattgaatagaataaacaatggccagtgtcggtccttatatggccccgactgatatctttcagccgacattgggcaatttcttttacaaatggtggccgataatgttctttntttacgatagaggaagttttttgttttggtgttgcctaaaaaatttacaacttaggtcggctaggtttttccgtgcgagctcanccgagggttcgttccgacggacactgngcatgtgttcttctcat

SEQ ID NO: 5146 - DNA, 361 bp, Glycine max
agctggttagacttaacattgatttgctaatattgaatgatcgagtgataaattattaaatttatatttgttgaacttatgtgcatgatatcaaaggaaaattatttgaacaagaaacctacaacaattcataaaaaataccatggtttaatttacacttaagttctttggaaaattgtttccatgaggatctcccttaatcttgtagaaaataaagctaaatactttctaatgaacgaagcatctgaaacgtcaaggtggcgtaagtgttccacaccctattgaaagaggtaatattttctcattagagatccaggcacaagcttaattacttttgactcatactatttaataactttct

SEQ ID NO: 5147 - DNA, 405 bp, Glycine max
  unsure at all n locations
aagctcctaatatctcccacactntnntgggtgggccattcttggatggccttgattntctcagggtccacttggaccccatttctaccaactacaaaacctaagaaaactatattatctacacaaaaggtacacttctctatatttgcatagagggtggttttcctaaggactgaaagaacttgtctgagatgtcctaagtgatcatctaggctcctactatacactaaaatatcatcaaaataaacaactacaattctacctatgaaatcccttaagacatgatgcataagcctcataaaggtgcttggtgcattagtgagcccaaaaggcatcactagccattcatacaaaccanacttggtcttngaaagcagtttacactcatcnacccttttatcctga

SEQ ID NO: 5148 - DNA, 446 bp, Glycine max
tgcaagctttacatttaaagcccagaattttacagctacttcatcgtgctcttgtaaatggctgatttccatgcagtgattgaaaatcggatgaaagattttttttctaatcttatgtttgtaatgtgtgagacaaatattacatagtactgttaacaagaaattaccactagggcattgatgttctacactgtaacagcatcatccatcattacattggaatattggatagatcataccttgataatttaaatctgctagagtgaaggccgaatagttccttgtgatttgcctggtaacttggtatatatagttgcatgcattgtctaacacatgacttgaattcaacagatgttaactgtcttagcgggaacttttcttggactccatattgcttccatttcatatgtacctacaaggaggtcttcataatctcataattttca

SEQ ID NO: 5149 - DNA, 344 bp, Glycine max
tcattggaggtaaagatataaactttagattagacgcattataaacgaaaaacaaagaaggaaagggttcatgatattaataaacctgaggaaaaagcacctggttagtacggataaaaagagtagttgtagaaatgagatataaaaagtgagggaagatcatggtagagtaattaactaaaccggccatcacaaatttagatgagagtggtttgaagaatgcagactgtaacaaattattgggacttaatttgaaagaaggaagaaggagacaatcgtcgtctctttgtccactactccacctcagatttttggacatgtctattttgaaactacttagtaac

SEQ ID NO: 5150 - DNA, 431 bp, Glycine max
  unsure at all n locations
caggtatctttatcctacctcacgccgcgctctaatgacgatatcattatttctggcgctgaactgctcacatttggaacccatcctttctattatactcctggcttcaccacgattgactgtgtgccaaggctccaccactagtagaatctatcatactaccctacatattactgaatccttcctacatatatgggataaactgctgctataacatctgatggcgactggcaacaggatcttgngtttataatatatgcattattcatacccgctatctccactagttgacattacatatatatctttttgatggttgggtctgaaacccgcaaaatcttctagaatatctatcacgtgtccctatagtatggacctgaacaggtgtacaccgtctttgcgtcttaaagatgagagagcctccaacatcc

SEQ ID NO: 5151 - DNA, 419 bp, Glycine max
  unsure at all n locations
agcttgtgtattgatcgatattgattggttgatgtgatattgtgtttgatccatgagtatgtgaatgatgtgcaaatgtgagacatgtagtgttgagatatgatgtcacgtgataagtggtggaatgacatgagttatgttaatgtaagttgtatttcatttatatgataggtatatctatgttgtctcatttctctctattagttaggaatgtgataactcactccatgtgtgttatttgtgtttggatcatgtgatgatatcgaactttgtgttcatgggagcagatgattcagtggatggctatggagaacctcatgctagaggacgctagaacacaatgctctgataggatgagacatcggaacatanggttctatctanattacatgaagccctagacatattagnttatcatt

SEQ ID NO: 5152 - DNA, 448 bp, Glycine max
  unsure at all n locations
gcttgaggcttanacgtagtgtttgtgatgatatagagagagggtggtagggtaaagttttcaaaagatgaaaggttaaatgaagttcatgtggggggcgtaataaaataggggacaagttggtcgagttgaattgaccaaaatggggttcttgcatttcatgtgaaactacgagtttgtagtacgttctctcgtgaagccctcttgctagtggaacaatggaacctaattcatatttgattaccgattttgcccctctctgtcaatatcaaactttggcacatgagattgatagagaagggcaacttgaactctctcttttggtcgtagagcttatgggatgaacatcgttctttaaagcaaggtcatgacgtgggttcataagcgttaaccttgatttacaatagcatgttaataacaataacttatccacagaggatacacatat

SEQ ID NO: 5153 - DNA, 459 bp, Glycine max
  unsure at all n locations
agctatgattcaattcattcaataacaatccattaatcggaattaataaatttcaccaacattctgttataaactcaagtcaatcagggaggcagccccaagcgcagtccatcagtattcgcacaatagacaaattaagcaaaacagtcaatccccttaacccagacttcctttccctatgtgcaagcttactttccccattttaccccttttttcatcattgaaagttcactaaatcttgccaaacattaactcttatatggaatgaggatgagttaatcttagaacttacaatagatgccccanatcatccaaaccctgaatcaattcttgatgtctcggtatacaaatatgatttgtcattcgcagtacagcattccaatgccccttcctttctgatgcctgaatccacaaccttgctcaccaccattccaattttcattanaacactctacaaca

SEQ ID NO: 5154 - DNA, 348 bp, Glycine max
ctacaagttggatgcctcgctatgtggatgcatctcttagccaatctgcctcgctaagcgagtcattaacaacttttaccttctcttctttggcgtgaaattgagttggattcaacattaggtcacaaaaattgagtttctactctataaaatcacacaatagagaaaatatgtacaatctctacaaaaagaaccataaataggaggcatattgctattttcttgcagatatccaataccaaactaactcatggatgatgcaatcctaccccccaagggtattggatagaagactccaagaggcttatgctagagctactaaagaaggccctatggttctcatgaaca

SEQ ID NO: 5155 - DNA, 398 bp, Glycine max
  unsure at all n locations
atattacatagaaggaanaaaatagagatggatattcaatatatagatagaagagaagaaaacacaatcattttctactttctagtttttctaccaagctagtaaaatggaattgtttcaatccacatctttcatagaaacaaactaaatttgtcactcagtcaatagtaaagaggatacaaagtataatttaattgatgacattgtcatactgttagtccttcaaatgtattattattggtgatcacgcaaacttgttcatcaagtggttccccaacacctcgactatcatcatggagaatacgccttgagtagtaaacattgtgttaatactctggttgcaataaaataatattgaatagcattaataaaagaaagctcgaatacctatgaagcat

SEQ ID NO: 5156 - DNA, 397 bp, Glycine max
  unsure at all n locations
ttatagaataaattttgagccaaaacaacaagcacctttccctttcaccttgtttttctggatactcgatttcctgccaacatgtgcgattattcgtattttttccttttatccaaatcacttgtttctttntttataacttttttccagatgtctagaaaattcagtataaatttcagctcaaaattcgaggtaaccaattctcagtaattcttacaagtttgtatgtccaagctgccagcaccagcgatatgtttctttaaacatggtatattgattgccttgggcttactctcaaccttcctatgtatgttgaactcactagtattgttgaccacaagtnttaggtgttcaatattcacttaggatcaacattttagccagcaattcaatcacc

SEQ ID NO: 5157 - DNA, 293 bp, Glycine max
  unsure at all n locations
aacttgtttggatgatgagttagcaaggcattgtggaatggttcctgtcaacttgttgagagataagttgagaatctgaatcgctcttgcattgcaaattgaggaagagaatccatcagtgattgagttaaaactaagatcatggttaccaagttgcttgttccacgacaattggtccaatgattggttcaatcggttatgagagaggtccaattcagataacgatatttcatgcaaccaatttggcactttacctttaagtttgttgttggacanagagagcgattccaaac

SEQ ID NO: 5158 - DNA, 402 bp, Glycine max
  unsure at all n locations
agctttgcttctgttcaatatataatgactgtagctaactatgcgtggntaatccgatccgatcatcgatggtcggcaagtatgatggtcttaatgatgatcctacacgtattttcgtgtgtatctcacaggcggttttaaaaaacctcgccaattaacttgggttacgggtgtagttatggctgtattgactgcatcttntggtgtaaccggttattccttaccttgtgatcaaattggatatagngcagtcaaaattgtaacaggcgtacccgacgctattcctgtaatangatcagctttggtaagctattacgcggaagtaccagtgcaggacaatctaccttaactcgttgttataggttgcatacttgttgcatacctcttctactgctgtattat

SEQ ID NO: 5159 - DNA, 453 bp, Glycine max
  unsure at all n locations
atccttaagtcacctgcggctgcagcttttatccaggcaattcttggtggtgatgctccttcttctttggcttattccctagtggatggtgccttccctctcctcttctcctttgccttccactgcatctccatgatgtaaaatcaccattggaggacctcattgaagctcaaagatccagcctccatagaagctccacaagcaagctttcatcaaaaggagactgtaatagtctttataacaatgaaagtagaagaccatgaatgtctctgcatgccaacggactcgcttgtctctggaaggcanagaagactgtaatagtcttgataacaatgaaagtggatgaccactgatgtctcctcatgccaacggactcgcttgtctctagaagggcagggaaactgcaatagtcttgaaaacaacaacaacggaagaccatgattatctccgcat

SEQ ID NO: 5160 - DNA, 449 bp, Glycine max
  unsure at all n locations
agcttattntcttatatgtgatgaaattttggtcaatgaatttctctttgttctttgagcacatacttgattatcgnggaattaatctcatcgcttctatgtcatgtactacgaaatcaatgcgaaatattgtgagaagagaatcaaccttgacgtatgaatgtactataaaaatatgtcttcttgaatgggataaggctacacctttaatgaaaaaatgagattttcatgcttcgaaaaactttgtgagtgacacagaatcattagttagatggatcacagttggatacaagttgcatgagccctacgtatgaggaatgcgtggaacactttctgaaatatgccaccgatagaagtcgatcggatgaggatggaacatatttnttgctctgtatacactcgttgaatgggagacaatcactacttgatgacatacgagaacatctact

SEQ ID NO: 5161 - DNA, 348 bp, Glycine max
  unsure at all n locations
agcttagcagaggatanggttatacccttatcttatgaccggcggtagggcttgttcccgaacacgacccaatctcctacttgataatgcatctctgcgatgtttgtgatctggttgtttcttcatgaggacctgggctctgagcagcttcttgtgaatagcttgaaaggatgcatctctgtcaatcaagaggctctcgacagcttcgatatttgatgtgctggagatatactcacggaaattgaatggttctcggcaaatgtcacctcgtagggagttgtacccgttcccgcgttccacgaggtgttgtgtgaccattctatccatcggatgaacttgccccaccta

SEQ ID NO: 5162 - DNA, 339 bp, Glycine max
  unsure at all n locations
agctagcaacaaacataatgtcttgtcttgttgctgacagatacaacaaactaccaattatacttctataaacaaaatcatccgctttatcaataccatcgttcattgataacctttcattcacaacaattggagaggccacacgcttgcattgctccatgcaaaacttcaatatcaccaaagcatatttcttttgtgaaatgaagatcccgtcattacattgagaaatctccattctaagaaaatacttaatttcacccaagtcaaccatttcanattcgttgtccatgtcccttatttcacctaagtcagtcattttcccacttcttcacgtaccag

SEQ ID NO: 5163 - DNA, 449 bp, Glycine max
  unsure at all n locations
agctagttggattatggcgcacccgtcatatgtggtactaggtggcgatcgggcgatggcgcanatcaactctcccacttccacaaatcatacatgaacccaccatccgcagttgcccaccttcaactgagctcacgtactcctacgtagcccttatcctcgttcctctcagcaccgggtccccattaaccactccaagcttccacaatatccaagcaattcaattccaattaccatgaactaccctaaaccaagagaacagggcagaggcagagaactctgcccaaacacattacacattacagtttccttactcatatatcccagaacatttcttcgtttcattcgtaaccatgaatcaactgaaatttactggaggtctagtcataagctacatttgaccgttggatctctagaaatgctagaccaatatgtactaccttccatac

SEQ ID NO: 5164 - DNA, 1352 bp, Glycine max
  unsure at all n locations
tatcagtgaagccgcgaacaacacanaccgcgagaacacagacctaccaacatcagcacccnaagaagcgccaattgtgagattgcggagatccggctagccacgtcgaccctcgcgcgatagatcatctctagggtacaacanatattccccgccncncnccntncatcancaaccaatacacgcctcatgggacgcacaagacgggatatacagctattcaggaggacggaggcgagcccacccacgctacaaagcggcgcggaaataataattataacgncnaccnaacgaccgcaccccgcccaacacaacacaaataatgcgcaaggggacatgcgcgaaggcatagaagaaaacagacgcgacggccgacacagcaaggccagcgacatatcagaatccgcaccaacaacaaaaggacagcggacgcgacagcacaacccacgcgaaaccgaggccaacaacgacacaccctgaacgccaatgctcacaatacaagaaacaccagcgcaacgcaccccacacgagaacagaaacggcacacagaacaggtgtgccaaggcgacccgcacacgaggcgcgggcacacagaaacgcacagagcgagggcacaacacaaacacacccaccagcacacaactggcgcgcccccgacacgactaacacaacatacaagccactaccgcacaccgcgcgagagatatgcacaccgcgacacacaccagagcacgcgaagcggcaacccgtcaacggcccgcgacagagagagagaaccgcgcaacacggacggacacacggacacagcaacactcccccacgaaagatcaaccagccatcgcacacgacgacaacacggcgaaatcatcaaaacgcagaccaagggaacacacaagcggagcgagcagcacccacacacggcgagcggcagaagcaacaacaacccgccactagaacggagagggcccgagcaacgaacgacgacatacactcaccaccgcctccgaagcaagaacaaaacacaagcaacaccgacggcaaccaagaacgacgccacatgcacacccacgagcgcacaaatatacaagcacacgcgacccgagaggaacgccacccctaacaagcaaggcagggcgcaaccgaacgagggacatccacagcacagagaacaccgccatcgcaaaagaaaacacaaagcacaaggctcacccaccaaaacccaaaccacagaaacaaaacaggaaacggacatcaacgcacctacaaacaaatcacgcaacacgtaccagaaacccgccaagcacaacacgccgacgcaagcaacgtagcaacaacagacaaaccacacaacc

SEQ ID NO: 5165 - DNA, 1013 bp, Glycine max
  unsure at all n locations
tcctccactgtacagggcggaaacacaacacnccaccgaggaaggccncttgaattgaagacgttcgcgcacccggggtaccctgaaaacgtccgcagcccccccacccccactcccagaatgaaaaaataggggcggccaagggcgaacaaaaaaggagggccccccgccgccagtttttcctttttttttaacccaacacccccaacacacaacgccatgcgaacgcaaaaaaaacacacagcccgcgggcccgcaccgcagaaaagataacggcaaccacattcccgggagggaaataatccgcgacaagaagataaaccacaggcctcccaaccaaacatctcattccgcgacctccaaccacataactccggaaccatcgaccgcgggatggaacccccaacacccacagccgcccccagaccccccggaagacaccccacggagccgccaccacaaatgcaaaagaaaccccaccagaccccgccccagctcaccttcacgaaaccccccaacgaaacaaccggcaacccacccagcaataagagccaaccccgcgccgccaccggacaggggtaacaacacacgaaaccgccccccccgacccactcacaacacaacccagcactcaccggcgacaacacaaaagagacccacctcagagagcggcgacacccaccgggtaacacaaaacaaaacccccgcgacctacaaacgggggcgacaaccgcacccgaccgctccgccaccagccacaaccacacgacgcacaacgcgcccgacgggacgcccccaacacccaaccgccaacgctgccgcggggaacaaagcctaagacatagcacccctttcacccggcggcgccccaccagtcgccgcacccacaagccgcccaccctcacgccacacagggcgagccaacgcgaccgcccccaccctaggacaaccatcgcaacagaaaccaaaacctacccaacaacagccaccccgcccggacagagtaccaaccc

SEQ ID NO: 5166 - DNA, 240 bp, Glycine max
tgcagcgacatcggaactcgatgtacgaaaagtctccatgtgggtgttggatcaagtggcctcagaataattaagaaagggggttgaattaattattaatgtaccttgactaattaaaaaatatccttcttaatggtactaaaattaattaagcttttactacttaatttaaaaagttaagaatataaaaagaaactttacccaaagttaaaaccaatatttaagtgcctatcggaaatt

SEQ ID NO: 5167 - DNA, 903 bp, Glycine max
acgcacgcattaacattgcgaaacaagcaactcccacaccccgagacgcatgaaatcgactcctacccggggaccccagagtcagcagaagtccgcaagcctgttaaacgaataaaaatgaggccacgcatatgctgcccccaacaactaaaccagtttggaatgagagggtttctatattttaatggggttcacaaacccaataacaatgcggacgatggggaaaaacaaatgggaaaaaaaagagatgttaacagcaattttgttaaccccccaactataaacggatttccgataaccactcttaaaaacaaaacccaaactaatggccgaaaagatgagaaaacacaatcttttttaactaacgagggcgttaccacacgaaatcgggaaccccaacaaatgaaaagaaaaggacaagaggtaaacgggactcccgaggacccaaaaaaaaatactttaaaaaaacccggaatcccttttaaaaaaccaattcccaatgcacagatacccccacaattcttctctgccacagaaccccaataaacaaatcccccttcaaacattaatcaaaaacacggggccggagaaacaaaaaaacaaccatcgggccctccacgatacaagcacgacacaaacaaacccaccagaatactccagggacaaacaaaactctaacttagaacaccaaaaagcggaacggagtcccctaaaaccagagaaatcacaccccccaccaaagaacctcccccaaagacgagggagccaatgttgcacccgacaagccccgacaagcaggcaccccaacaaggggcaaaaagagggcaaacttctggcaaaacgaaacggggcaccaataacgccaactcgaaaacccgacaaacacccccccaccgaaattcc

SEQ ID NO: 5168 - DNA, 287 bp, Glycine max
tgataatttttcccgagctcatggtctcaggcaaaggggattccctttccccttacctgtttgttcttagcatggagaggttggctttaaagatcaatgagctaagggagaatggtgtctagactcctatttccttatccagcacatatgttctttgaaaataatgttcttttgttctgcaaaagctaaagtggtggattctacttctactcttgctcaatatggtattgcttttggtctgagagttaatctcaaggagtccaaattgattaatttgctctaggggt

SEQ ID NO: 5169 - DNA, 395 bp, Glycine max
gctttgagggtgcgtaacccaccatcttttcatagtagagtatcgataatgtgtctaccatcacgatcatcgtttttcctttccatcattgggggtaccacctgggccgccagatccctccaccttttgggcgtgttctttgaaagatccgtccccctttttgcaaatgttctgtagttgcatcctatccggaaccatatcaaaattgtactgatactgcctaacaaaggcaaccattaggtccttccaagaatggactcgggaagattccaagttagtgtaccaggtaacagctaccccagtaagactttcttggaaggaatgtattagcaattcctcatcttttgcgtattcccccatcttctgacaatacatctttaaatggttcttgggac

SEQ ID NO: 5170 - DNA, 287 bp, Glycine max
tctcccccaattttctataaatatggggagaagtgaagtggaaaagggttcagccccttaggcacttctctctctttcgaatttgcttagaaaaattgttttcgtgaagaaaatccaagccgaggcgtttccgtaacgtttccgggagtgatttcgcgaaggttttcgaccgttcttcgacgttcttcattcgttcttcatcgttcttcggtcttcaacgggtaagtacctcgaaccaagctttccgattcattctatgtacccgtggtggttcacattgtgtttcg

SEQ ID NO: 5171 - DNA, 489 bp, Glycine max
agctttataatgggctttctcttcattgctactagtatcaataatagtagtaggtttctcttccaatatagtaagatcaagatccaaaacaccgagatgaaattggatttgctcattccaataagagaagttaaacccattaaaaatttacacagatgatacatgagaattcagtgaattgggaacaggtactgtataataaaattcaaataagcattttgagatataaaacacatgtcatacatataattcatttagataataattaatgtacattgttgttctcctttgggtgatacaccagcataacatacaaatatgacgatgctaataaaactcttaacattatttgacaattaaatatgtaccaattaatggtacctattacctttgagtatataaataaaactaataatacatagaaatcacctaaaattatattcattaattttaagaacaactaatccacctttgggtgatccataaata

SEQ ID NO: 5172 - DNA, 290 bp, Glycine max
taggaaaaattgcaagagatgatcaaaagttgtcctcaccatggcttttctcaacaaaggttggttgatattttctatggtggaatgtcctcacataataggacaagtttagatgttgcttgttatggcaatctcatgttaaagcccttacatatatcatcaaaatcattgaagacatgtgttctaacccctacaataacttaagggataggacgattacgaagagaggtgtcaactaggtgcagaaagatgaatccataactaaattatgaaagcagatgcaagctcta

SEQ ID NO: 5173 - DNA, 429 bp, Glycine max
agcttccactccagttcccattcgagtacctaacgggtgtgattttcaaacgttaaaaaccagaatatataatacccttaagctaaccgacaaacaatttttggatgaaatttactaacgacagcctttcacgtatgcaggtaatcaatttcggtttaaatgtatgcaactgaaagatgatgctgatgttaacacaatgttaatgtgtaatcatgaatttttgtttgttgatccgattgagtttttatgtagcattgctagaaccccagatggcattttaaatttacttgaatctattatgaaccctactcatgatgccctgctttattacaatgggaggtggaacatgtcacgccaaaatgagtttggtggttactcattcgtaggaaaaaatcccaaaaactttgacattcccactggatgtaccat

SEQ ID NO: 5174 - DNA, 280 bp, Glycine max
ttatgttttccctcccgtggatgtagccttgatcaaaggtgaaccatgtaaatctgtgtgttctttctcttttttcttctctttcaccttgctgcacaattatgtgtgtatgacatttctattctgttgcatctcctgctgctgttcttgtttgttcttcatcacttccacaacaaactggtatcaagagctcaagttgcgatcaagggaattcaagattcttgtctgaatacaaagatcaagctatgggagtcttgtttctggttcttccactgcttca

SEQ ID NO: 5175 - DNA, 587 bp, Glycine max
agcttctcccccaattttctataaatagggggagaagtgaagtgaaaaagggttcagccccttaggcacttctctctctttcgaatttgcttggaaaaatcgtttccgtgaagaaaatccaagccgaggcgcttccgaaacatttccgtaacatttccgtgaggaatttcgcgaaggtttcgacagttcttcgacgttcttcattcgttcttcatcattcttcgatcttcaacgggttagtacctcgaaccaagcttttcgattcattctatgtacccgtggtggtccacattgtgtttcgtgtatttttattctcgtttcatttactttttatacccttttttgacgtgcttaagccattttatttaagtcatttctcgcttaaccttaaaataaaataaatttccaccgatcgtttaaattgtattatccggtaacttcgtttaaaacaaaatctaaccggtcaatcgtgccgtaaccacgttggaaattcaaaaaagaaggtaaataataatataataatcaaaaaaatattttttatttaaataaagcgaaaaatcaatccggccttttctctttgggaattc

SEQ ID NO: 5176 - DNA, 475 bp, Glycine max
  unsure at all n locations
atcctctaagacacccgcggcatgcaagcttcggctaaattagtctaaacttttgtaagctatttaagctaagtctagtccaacaagagggattcttatagactaagcttagtttaagttagtctaaacctaagagggttgtctaaattaagcctagtccaacaagaaggatatgaggatgaagcttggattgattcattctaactagggatcgaggtttaataatttaggctagaacctagaaaacaaaagcatgattgattagagaaacatctttatatacatcagctggtttgttagaaagacccaacatctttacgtactgttgtcaatcttacttacttgcatttttactgtttttagcgtagacttagtttaattctattctaaatcatcaattatcaatgtttctttcaacaatgccttatttatgaatntaaccctgtctaagactaattccctgagttccatactc

SEQ ID NO: 5177 - DNA, 284 bp, Glycine max
tcttatccaaggctcatcttggtggtgaagttccttcttccatggcttattccctagtggatggcgcctcctctcacctcttctcctttgtcttccactgcatctccatggtggaaaatcaccattaaaggacctcattgaagctcaaagatccagcctccatagaagcttcacaagcaagcttccatcaagtggtaatcagagcacaagagctttaagtaggtgctccttaaacctccattaatcttttactttaccttctcttccattgttgtttcttcatt

SEQ ID NO: 5178 - DNA, 408 bp, Glycine max
agcttgctctaaatttacattgatgtttgtatttatgggaggaggttgtatgccattttttttaattgtgtcccactggtaaaactaactttccaaatgtttgccttcgcaggaaatggccccgaggaagcttgcctcaaagaagtccaggaaagacaaggcagccgaaggaactaattccgctccggagtatgacagtcaccgctttaagagcgctgtacaccagcagcgcttcgaggccatcaagggatggtcgtttctccgggagcgacgcgttcagctcagggacgacaagtatactgatttccaggaggaaatagggcgccgacgggggacatcactggttacttccatggccaagtttgatccagaaaaaatccctgagttttatgccaatgcttggccaac

SEQ ID NO: 5179 - DNA, 283 bp, Glycine max
tttgcaaggtgaaatcatttatcctatctccgacagccaatgggtgagtcccgtccaggtagtcccgaagaagaccggcctcacagtgatcagaaatgagaaggaggagttgattcctactcgggtgcagaacagttggagagtctgcattgactataggaggctgaaccaggttaccaaaaaggaccattttcccctgccattcattgaccagatgcttgaacgcctggcaggtaaatcccactactatttccttgatggtttttttggttatatgcaaatt

SEQ ID NO: 5180 - DNA, 731 bp, Glycine max
  unsure at all n locations
agctttcttagtacaaaatgcatattctttttgtgattggtatttgaatataattcattgtatacatacctgaattggagtagtatcttagtagttttttgggtgaacattagaagtaaatgtatggataggtcatacacagaggacttaagttctgtttttttttttgtatatgttttgtgttgatgtaattatctctcattgcacaactagtacatgtatatgtatcatttttttctaaatacatatcaatttgctataaaaaggtttgtttttaataagcaaaaatgaaagctatgctctaacccaaatacacaatccacatatttgctactttacaaagtgaaaaatgtattattttggataaattttgtgttttgataaaaacaaattcatggtttagaaaaaaaactattagctcatttatgatccttaaaatatgtattaattattcctttactagagaagggtattcagggcttttgtgcaaatggaaacctcttatcattantttgttgtggaaatggctatgccctcattaatttttgtggaaaaaaaagatatgggaagagttttttattcaagatgaggtttaatggtctatatggttatgcctggactttatgcctaaaaaggtgaaaggaacaattgctttttagtggattcaaaagattgaaaaatttaaaatttattgggcgaatttccccttttgggatttctaaaaatttccc

SEQ ID NO: 5181 - DNA, 287 bp, Glycine max
ttgagccaaaatcctgattcaccataaaccttgacccagggtgagaatgtcaatccttaccctcggaagcaaaaaaagaatagaggggaaatttccaatcaaagaaaaagagaaggaaaatttccaatgaaagcaaaaaaagaaaagaaggaaaattccccaatcaaagagtgggagaaagcaaaaaaagaaaagaaggaaaattccccaatcaaagagtgggagaaagcaaaaagaaaagaaaggaaaattcccaatcaaagaatgggagaaagtaaaaaaggaag

SEQ ID NO: 5182 - DNA, 350 bp, Glycine max
tcaatttcgaccatcacgatatattacccgactcatccggacatccatgtataaagttattgtcaattcaattttctcagagcttcggatcagaattttgagcgtctccatatattacgggactcattcagacattcgaataaaaaggtattgtcgtaagaatttgataccaacttccgttttcaatttggaaaatctctcgataaaatgcaacactctgtcgggcatccgagtaaaaagttattgttgtatgaattttctaagaagtttcgttttcaatttggaacgtctttatatattacgggactcaaccggacatccgtgtataaaggtattggcattacaatttg

SEQ ID NO: 5183 - DNA, 354 bp, Glycine max
tttttaaacagaccaaaagattattatggtgttgtgaatctgcatcccaattggcgtaaatatttatataaccaccttgcctgagtactaaaattctaaaactatcctactacaagggactggatcctaacttgaaaatatcaaataccaatctcttgagtaggaagggaaaaaaggcattttttatttatttgccaaatcaatggtgattggtaatttattagatactgtttgggagaaaatttcagacttataacattttcctctctcggtttttctttcaaccaccatgtaaatcttataattactactaaaaagggcatattataagcccccgccttaaaaaaaaaaaac

SEQ ID NO: 5184 - DNA, 282 bp, Glycine max
tacttaagcttggaacatatttactgaattctagctccttttaaggacctagttagaatatctggcgactggtcattggagttaataaactcatgttaatctccttggacaataatttctcaccaatgaaataacaatcaatctttatgtgtttaaatcctcttatgaaaaaccggatttgaggcaatgtgaacagtataaacttaatttgctcaaattcacaaaattccaatttttggagaaattggttaatccacataagttcacatgtagccatagcca

SEQ ID NO: 5185 - DNA, 1226 bp, Glycine max
  unsure at all n locations
gtcgacggacctcgancagcccactncacgcccccncctccagcccgcggncantttgaanccgttggtcgaaccaaccgacccgcgaaccagaacaacacggaaaaaaacccccgcgccccaaacttcgggaccatccgctggaccggctcaagcaagcccacagaaggggcgcgaccgccaggggggaatttttggatgcaactcaaacccccccaccagccgaggaagccaaaaatggcgaggcgcgccccacaaaaactgcacaggaaccacaacacaaccacacaccccgcagcaacaaaagcgaaacggcgcgcggcggaaacccggcgaccaaacacaacaccgagaaacccagcggccaagaaagccccacgcacagaagaggagcggcgacgccaacgagtaggagaggcaccgtgacagagaccgacacgccgagagcagggaaaccctccgccaagaagggcgacgacggtccaaacgggacgaagcaacaaagacaacaaggggagggagcccgaacaaagcacacgacgcaggggaccaaggacacaaccgggccccccacacacaggcacacaaaggcaaacagcccgcacactgaggcacgcgccttaacgggacacacaaagccagccacgcaaggagcacgccccagctaaccccggcgaccagagacacacgacgagagacccacacaccgacaagagcgccgaccacccaagacaatacacgacacaaggcgtaccaccagccgcagggtgagagcgcgccctccaaggccgcacaagcccgagaagctcgtacaagggagaagacacggcgcaacgggcccgccacaggcnaaatacgcgggcccgccgagacgcaatactcaaccgacgcaccgagcccgcggcaggacgacacgcagtgaggacgccgcacgcgcgccactgccacccgcgcaacgaaaacgcccaacacagagcgcgacgactcagcacatcgcgccgacctacgtgcggataccgccacagcagtaatcccggcgcgcggccgcacgcgnatacacggctcgcgacggacctagaccacgcatgcgacaacacgagaagaccgcgaacgaacacaagcgcgcgncncngccatacgcgatactgtgatagacaggctctcgcacgctgacagtctancacgtcgacagctcgtacgnatcgcacacgcgatcaacacgccgn

SEQ ID NO: 5186 - DNA, 408 bp, Glycine max
agcttggtcataattataaaaagatagatgcttgtccaaaacactgcatgttgtatttgggagatgatgaaaaaagtttggatgcttgtaagcattgtggtacatctaaatggaaaccccacaagaagaagaaaatagctgcaaaggttttacgctactttccattgaaaccaagattgcaaagattgttcacatgtcgtaagactacaaaagatatgagatggcatgttttggaagacaataaagatgggttgttaaagcatccaagagatggagagacatggaagacatttgatttaatccatcctgagttttcttcaaatcctcgaaatgttcgtttaagccttgctactgatggttttaatcctgctaggaccttgagttctacctatagcatctggccagttt

SEQ ID NO: 5187 - DNA, 287 bp, Glycine max
ttgtgctaatatgttctattgacactctttgtttctgaacttcttctttcacggcaaagtacttcaattccatatgcttagcacccgtagagtacttgtcgttcttagaaaagaatattgttgcggagttatcacaatacattttcagcggcctagcaatactgtcgacaattccaagccctgaaataaagtttcgcagccaattagcctgaattgtagcctcaaaacatgctacaaattcatcttccatggtggatgcagcaacaactgattgttttgcactcttc

SEQ ID NO: 5188 - DNA, 360 bp, Glycine max
agcttcagcctgatcgctaagcgacaacttatccttggctaagcgtgacctattgtcgccaagcgcaattccttactgccacaattgaggtccatgaagctaagcgctgtcatgacagctaagcgagattcattacggcaatatgagcgctaagcgagtccctctcaactaagcgcatgctcctttgtacttaggatgcatcattttagctaaactgggcaaagcctggcttaacgagagttgcagcttttctaatctacagacctcgctaagcgaacttactctcgtgctaagccaagtctctgttaaaaaaaaacctgattttgaatttgaaacgtcggctaagtgcacgggtccgct

SEQ ID NO: 5189 - DNA, 256 bp, Glycine max
  unsure at all n locations
ttgcttctacacagtgtacttgatggtgcccatgtttcatatgttggatgttgtgtatgttcgtgggggggggggtgcattgaccttgtcagatgttcctggtgggggaaaatagagtggttaaagagttttaagcatctctagaggggatggcttangatctttaattcatccatggttagtgtacttgatggtgcccacgtttcatacgttgtatgtttatggggggggggtgcattgaccttgtaatatgtcc

SEQ ID NO: 5190 - DNA, 391 bp, Glycine max
agcttctattgaaatgccacaatcatataaggcacttaacttaagcaacaacacacataaactttcttattcttaaaactttttttttttattttagcagtttttactttcttgatacaaaatttatgtggttgttgcatgtcttaccataatcatcattacctaataccttcccccaaatttggaacaaatttgccttgaaccacaatgctctcctacaacctaaagaaaggtagatggagattataattcaacaggtttagggttcaactcaatcaatcagattcaagctcaaaatgggtgcaatggattcatcattcatgaacagggtaagctatttggctaaatggctaattcaatcaatcatggccttcatcatttccaaatcatg

SEQ ID NO: 5191 - DNA, 287 bp, Glycine max
tatcattggctcgttaccccctattaatttggaaaattacccacttggagtcacttattacctttattttcttggcccctagctcctcgactattcacactcctgcaatgcaagcttcatactctgcatggttgttggttgttggaaaggaaaaatttaaggcttgcttgactattaagccatatgaagattccaataagacatagctccacttcttttctcgtgggaagacccgtctacaactatcatccatacttgatctctttttgggtactccaagatcagct

SEQ ID NO: 5192 - DNA, 594 bp, Glycine max
agcttaagccttttatacatgcttagtaaggatcaaagatgttaaaaaaatggattgatctctaagtttctaaaaagcaatgagttcaacacactataattgattacaaagttttgttatcaatcacaaagtgttagaacaaacaacaaatctctcttctacttgaaatttttggcaagttttgacaaattaatcgattacttgtttcaataatcgatcatagaagtcagtttcaaaagaagaaagactttgtagcttaagctaatcgattaccttttattgtaatcgattaaattgtatctagaaataatcaaagttagtttcaaaagaagaaagactttgtagcttaagaagttctctacatgatgaaataatcaattaccacacctgataatcgattattccagaaaatacagaagcatgagaagctctttatttgaaacaagataatagattatcatttcctataatcgaatacaagatttatgaaaatgcataacaaaaaggattttgacgtattaatcgattaccataatctataattagttaaaattggtttacccatcaaaattataaatacccttttatcttatt

SEQ ID NO: 5193 - DNA, 279 bp, Glycine max
taacgcttgtatcatgtattaaaattcagtctgtttatctttctgctttctgggtttaaaaaagccaggggtaggggaaaaaaatgattttgaccccaaaattttgatttataattacctgataatagctgacaagggaaaacatgtggcccgtggctgatcaaaatcaaaattgccaaaggtttggaaacaatcctcccatggtcaagggtgccttttgctgtaaccccccttaattacccccaattggttaaaaaaatttcccattttttttattac

SEQ ID NO: 5194 - DNA, 507 bp, Glycine max
  unsure at all n locations
agctagtaatacattaattgataaaataaaactttggcatttgagattaggtcatgttagtgaacggggattacatgaaattgagaaataaaatctgttaggtggcgataaactagataaacttgaattttgtgatcattgtgtgcttggtaaatcacatagaataagctttggcactggtattcatgttttatctaggccttttgagtatgtgcattttgatttatagggaccatttagagtgaaaattcatggtggaagctcatactttctcaccatcatagatgatttctcaagaagagtatgtctgtatgttttgaaaaataaatcagaagcttttcaaatattcagagagtggaaaactcttattggaaatcaacttggtacaaaactaaaaattttaaggactgacaatggcctgtagtttgtttcaaagcaattcaatgagttttgcaggaaagtaagtatcanaaggcccaaaacaatcccttacacaccacaacaaaa

SEQ ID NO: 5195 - DNA, 282 bp, Glycine max
tagtcattataattaaagtttctcatttcatttcaagaatgtgttttgtggaaaaattttatttattttataattattgtaattaattgttaaaatactaaaaaaaagtgtttaattatttatatttgttattatttgtttaacaattataattataatttgaatactattataatataatttctttattataaatcattttatttgataattattcattctcattccttcttattggtttcatattgttcaataatatataatatactcttatataaaaaa

SEQ ID NO: 5196 - DNA, 395 bp, Glycine max
agcttaatgcaaactatttctataagaagatgggtttggccccttcatcatttgattcacacttaaattcttcgcttaggattgttacgatttttgttaataaatctctgcttttatgaacaaaaatatataaagttggtttacgagataaagacaaagtttttaatggctttgtataaattatagatgtcgcatgggaattttttaggaaaagggaaattggagctgcaaacctcaactaaccacgatgagtaaagtcgccaccataacaagctagaaccaaatatcaagtgaaaaattgtgaaaaatcaccaaagagaaaatgcgccttgctacaatgaatcctcaatttgagaccaagaacatgatcataaactcactatagtgaatgaatc

SEQ ID NO: 5197 - DNA, 284 bp, Glycine max
tctagccaaatggacttaccttgaattaattcctttgatagcccttttgagccttgtttccctttccttgttttgaagctcactacaagccttaagtgaaaaaccatgatattaccatatccttaaggaattttggagctttggaattgttttgggaataagtgtggggggtttttgtttcattggacaacttgttttgttggctatgcttcatgatgtattttgggccatacttgatgtacattgtatattggttaaatgttggacatgctgaatgaaatgtt

SEQ ID NO: 5198 - DNA, 408 bp, Glycine max
agcttcaccttctggtcctcctcatagttgtggcatgagaaaacatgctctattttcatctcccactttatgtggcctccggatcattctttcctttaaatggaggaatgttgagtttaataccatcaattcggttttgtctaggaacaccatcattccctcttctcctcctttcttcttcattatgatctctattctccatttgatccaacctctcgtggagcgcatcatctcgttgtttcattaacctctccatatgttgcatcaaagcttgcatttggaattgcgaaagccccactccatcattaggattagtacctgacatctcaaacaaacaaatcaaacgtaacacgacaattatagttgctgtttgaatacctcacccactcaagtgtatcacacaattat

SEQ ID NO: 5199 - DNA, 284 bp, Glycine max
tctgttatgaatttcgagtgtctcgatatactacgggacacaatcggacatccgagtaaaaagttattgacatttgaatttgctcatagcattcgttgtcaattacgagcgtctagatatattaaaggattcattcggacatccgagtaaaaagttattatctttttattttgctcagagcttctgttttcaatttcgagcatctcgatatattacaggactcaatcggatatccgagtcaaaagttattgtcgtttggatttgctacgagcttccggtttcaa

SEQ ID NO: 5200 - DNA, 427 bp, Glycine max
agcttgaggcacttgccttttaacctagtgtcccaaaagtggccttacccaaggatcttgttttccatacattatgaaaattggcacattgattttttgacatctaaatggaaaattaacttaaatagtattagttatcattttttgaatttactttcagaaaccaaacttcagactgaaaattcactagcatgttatgtcagagaacacttgttgcatctgatccccacatccttataagaaataacttaagattttcacatcccttacgatatattttgctaagtttcagaacctcacacacaaataaatgtagcagtagattcaagattatagcgtgcccccatagtaatacaaagaaaatcaaataacatataacttgtgtacctgatacaaagattgagtcatttgttttattttatagatg

SEQ ID NO: 5201 - DNA, 283 bp, Glycine max
ttaaaatttgaattaaaacgttcagaaactgctggtaatcgattaccatatatgtgtaatcgattacaccgtgcaaattttgaattcaaattttaatagctgttgtaaaacatttttggccactggttatagattaccaaatagttaataacttgggaagataactttttaacttaaatatcttggacaaacctttagctaaatcaattggaaaacgcttcgaatataatatacccttgctaagactctagagactgtcttgatcatccatattgaatatgct

SEQ ID NO: 5202 - DNA, 438 bp, Glycine max
agcttgcagagttatgtctcgtattagtttaatcgattacagccttatcgtaattgattacacagtttttgtgagataatgactaatttattcaggagtctctgctttaatcgattaccatgtgatataatcgattacttctctttctataagtgtttcaaaagtgaacaagaacacattaatctattactttgagtatctaattgattacattgttcttaagccgtttccagtttttgggaagaatactttaatcgattaaaaagataatacaatcaatcacttcattgaattaatcgattaccttgtagatttaatcgattatagacggttataactgttttctctataaataaccagcttgtgttctctttaacatacaacaaaataagcttcagttagagctaagatcacgtgtggttattaggttaagaaaga

SEQ ID NO: 5203 - DNA, 278 bp, Glycine max
tgtaatcgattacagcatttgtgtaatcaattaccactaaggaattttcaaaaaataactcccaagagtcacatctattcaaaagatttttgaatggccatcaaaggtctataaataggtgacttgggacacgaaatttcttagagttttcctgaacaaattgtcttatcctctcaataccaaattgtcttataactctcaaaaagaattccttggccaaaacacttgcaaattcaataaggaatcttaagtgatcttcaattttaatatctttctct

SEQ ID NO: 5204 - DNA, 413 bp, Glycine max
agcttatttatttgattaatgaatcatattgattattaattaatgctttatttgtttttttaattagcaaaagtgatgatatatattatacacaaagggtaagcaacctatttacaagtattgaaaactgaaaatactatctccataccttggttacaaaatattaacataacaacaatataaatattaagtaaccaaggaatccaaaaagagaaagttcacctccctgcaagtcactgtaatactactaatgacaatcctacccaatcaccaaaaaaacataaataatgccttaccctcccacatgttgttcccaaaatattaatgctttatttgttgttgatgtatgcaatgcaaggcaattgtgaatcccaagaatgaaggatttcatgaatgagagcaagctgaatgat

SEQ ID NO: 5205 - DNA, 275 bp, Glycine max
tgaagtcagttggattcatgtattattattcgtgtaatgtataacttctattaggatattgctatttgcactatccactgggatgcactttaaccatatcccaaaattgttccttgaggaattgcacatgattatttgatttcactccgaataacaatgaaatcatattttttttgttttaaaagacattataatagatataccattctattgtgttatcatccgataatgaaatcatagtttaatgtgttatttttcaaaataataataaaaaa

SEQ ID NO: 5206 - DNA, 878 bp, Glycine max
cgaccaccctccgtacgcatgtatacaacaccccgaaggccgatgactcttatggtcccttccggacccgggactcctaaaaaaccccggccgcaacatgcgagaaatgctctgctaacttaatcaacaacgccctcacggaatggataccccagttttgtgccaccagactaatttattcaggagggtctggcttaatcgattaccatgtgagataatccgcatacctctctttccataaggggtgcaaaagggaacaacaacacgtttcatcgattaccttgaagatctaattgattacattgttcctaaaccgctccccatatttggggaagaataccttaatccattaagaagataataccatcatcactctagtgaattaaacgaagaccgtggggagtaaatcgataactgacggctaaactgggttctctataataaacagcccgggttttctgaacatacaacaaacaaacctcagtagagctaaaacccctgggggtatccttgaagaaggaaaaaaaacaagttttaaaaacaatccgtacctacagtcagacctctggtgggaaaaacatccgtgaaagaccggagtttcacgctcagggcactgcggaagcaccatggcatttcaactaagggttattggagaggctgacccaaatatgcatagtatacccctgggtcatcgccggaagggtctcgcccgcacggtctcgcctcaagggacggtacatcacacagcgatggccagcacagggatatgtctgtgaggagcgagtatgctaccaccgttatctctacgcacctacgtgtcctcatgccgctcccgcaactgagcactcaccgtgacgctatctctactccatgcaccg

SEQ ID NO: 5207 - DNA, 1104 bp, Glycine max
  unsure at all n locations
ctcatgcacacccgctaatgaactatgtgcattcattatccaggcggctaacaccgcctagggagttccgaagaccattatattaaaaataacattagttggcatacgaaacacacagttcactgtaattcccaagtgggcatccagcacacttgggcaacaaatgcntacacaataacaatcctgccttccattaaattagaggaagggcccttgctatatataaatcaatatgtgacaacaatacaacgttgactactggaatatacagcatcgtgaggtgaggctgaccatgagtcaccataaatcatacctctataagacgtctcaacccagtgatctgcgattacacgagcggctactaccaacttgagatctgcncgtaaatacaccagaataacactcccctactctgaatcaacatgagcgccccctgtaaatggagaggataaaaaatctctcattatataattaacaccttactataagggaggcttaaccaagacctcgctctataggacaccacaaataaacacaacggtacaactcacaactcatgcgctattctgcccacttctccgcgtctcaatagagattcacgcagaagacgcctctccagaatacctccttcgaatatctctccctgatcaccctcttggtggaatgtcatggcaccggaaccacaacaacatattctgagaccacctcccctcacacagagtaagagtgcgcggtgatcttccatactctaaataccgtaattgaaatacttctggcaaaaatacaattagcatacactgctgcagactctatacanagacatattatcgggcgtcctatcatcacctctcacgagtgtgttctgggtcacatccaagatcattatatagcatgacaaacacatggcggccaccaaactacccttatatgaaccacctctaccgcgagggcgggctattgtcatttatctcacagacatagtactacaattcttatatcgctcagacatacagacaactcacctacgaatcacctccatctaatatcaagcacgctactataccctacgatcatcgcaatgtatactatcatagtacatacacc

SEQ ID NO: 5208 - DNA, 481 bp, Glycine max
agcttctcccccaattttctataaatagggggagaagtgaagtgaaaaagggttcagccccttaggcacttctctctttttcgaatttgcttggaaaaattgtttccgggaagaaaattcaagccgaggcgcttccgaaacgtttccgtgaggaatttcgcaaaagtttcgaccgttcttcgacgttcttcattctttcttcgatcttcaacgggtaagtacctcgaaccaagcttttcgattcattatatgtacccgtggtggtccacattgtgtttcgtgtatttttattctcgttttatttactttttatacccctttttgacgtgcttaagccattttatttaagtcatttatcgcttagactaaaaataaaataaatttccaccgatcgtttgaattattttatccgttaacttccggttaaaaccaattccgaccgtttggtcgtgccctaacccccgttgggaaccaaaaaaga

SEQ ID NO: 5209 - DNA, 287 bp, Glycine max
tctactgatgtggcagggcggggccccttcggcttgttgtcccaatcgcgagccttggcctctgttcttcctttccgagatatttttccttatgtcagcttgcgtaggtttatagcctaacccaaacttcccgcgatttcctctggtgcttaccaggctggttctgccgccgttgttcttgcccaaacccattacgggctcgtagccgtaccccaacatcacccgggccaccatcattgccgtatcatataggcaaggctgcccagagagggaatctacggaggcaa

SEQ ID NO: 5210 - DNA, 376 bp, Glycine max
agctttgagggtgcgtagcccaccatcttttcatagtagagtatcgataatgggtctaccatcacgaacatcgttttcctttccatcattggggggaccacctgggccggcaaaaccctccaccttttgggcgtgttctttgaaaaatccgtccccctttttgcaaatgttctgtagttgcatcctatccggaaccatatcaaaattgtactgatactgcctaacaaaagcaaccattaagtccttccaaaaatggactcgggaagattccaagttagtgtaccaggtaacagctaccccagtaagactttcttggaaggaatgtattagcaattcctcatcttttgcgtattcccccatcttctgacaatacatc

SEQ ID NO: 5211 - DNA, 289 bp, Glycine max
tctcccccaattttctataaatatggggagaagtgaagtggaaaagggttcagccccttaggcacttctctctctttcgaatttgcttagaaaaattgttttcgtgaagaaaatccaagccgaggcgtttccgtaacgtttccgggagtgatttcgcgaaggttttcgaccgttcttcgacgttcttcattcgttcttcatcgttcttcggtcttcaacgggtaagtacctcgaaccaagctttccgattcattctatgtacccgtggtggttcacattgtgtttcgtg

SEQ ID NO: 5212 - DNA, 472 bp, Glycine max
agcttgaaattgcatgtgggtacctattttgaatctcctatgctgtctcataaaatagtcccaccatcccaattttgcaaaaccatattcatatatcgccggggcatttcaccgagcacttggtgggcgcacgtttggacataaattgcaagagaattggggcaatgtggcatgccccattgcttcagaacacaacataggcctaaggccttctcattcaaatcctcaactcaagaaatcaagcataaaaaacaacccaaaactgccccacaaatataagcacgttctcacaatttagagcaccaaaagatgaagaaaatactccaatgggaagcaaaaaactcaaggattgaatacttacttgttggagtgagtagaaacaccaaaaatgaaagcaaaatgccacccaaagtggcttatgggagcaaaaaccgcaagccttcgtgagttttctcttttgaatgaagggggg

SEQ ID NO: 5213 - DNA, 285 bp, Glycine max
ttgattcttttagtgtgagtgaattggtcatttcattactattgttctattctttgttttgacatgcatatccttgaatgaattctaaaatttatgaaaagatgagactctataggctttcttgagacctgtgaattattttgattagtttttcccctagtcgatcactttgaggatgaatgattatttttttttgtccttaaactatattgtgtgatttatagatgcgaggaaaaaagggaagtaatacacattgcaggttgtgtcagtgaataaatcctacat

SEQ ID NO: 5214 - DNA, 232 bp, Glycine max
gccctatagtgagtcgtattacaattcactggccgtcgttttacaacgtcgtgactgggaaaaccctggcgttacccaacttaatcgccttgcagcacatccccctttcgccagctggcgtaatagcgaagaggcccgcaccgatcgcccttcccaacagttgcgcagcctgaatggcgaatggcgcctgatgcggtattttctccttacgcatctgtgcggtatttcacac

SEQ ID NO: 5215 - DNA, 493 bp, Glycine max
agcttggaagccaaggccttgaggtttgtttttatgttgttggattgattttatatccttcattcatatcatggctctgagttggtatcttccttgtcttgtgtgaatcatttttggctgtaaggtttccaagttgggattcgggtgtatgggcctgaccaaagtgtacaatgatcctgttcctaaagaggttggcatctctttgatcaaatacacattcagtaaagggatcactttctttgttactgtagatttttatcgaccccatgccaacaaagttttggtcgaaaaggttaattaccttaacactttgtaacatatttgtttcactttaacaataacaacccataatataatgtaacataacattttaattaactctgaggtggtcaggggcttgcctcaagatcaaattcagattcccccaaagtttggtattgtcaaaatggataatggtaatgtgatagtgaaccggttcccctgaatatgtctg

SEQ ID NO: 5216 - DNA, 285 bp, Glycine max
tataagatatagttaatttaattgaaagaatttgataaaactaattaataagttaactgatagatattaaatagcaggacatatctaatatttcaaatatttaaaatttatttctaataaatttttttacaggaataagcttatggaatttcattaggaattaaatcatataaacaatacaagagaaagtatgataataaattaaattgaagtcaagaatgggatggtgttaccctaaccacgattatgagcaacaacttatcatcttaaaaaaagtaagataat

SEQ ID NO: 5217 - DNA, 341 bp, Glycine max
agcttgagccgtactttctgaagtcgctcgacaatacttgagaaaaagaatcggctaacagttgcatttattgtaacaatgacaatgtcatcaacaacaacagctataacagtaacaataacaacaatagtaatattagcaaaacgaaggccatgtctcctgagccttatcgggaggagagatcaagacccaaaatgaaagagtcagcgggggtgtaaaaaaaaaaaaacactatatgtagagagtggtcgatcgatgcatgcatacatattatacattatagtttaagactatgaacctaattatgggtagctccgcaactctcaagaacttaataaatg

SEQ ID NO: 5218 - DNA, 277 bp, Glycine max
tgacaccaaaaaggtctaacatactttaaatcacaccatgttgtgcttaacggttgagaatagctcttgttctttgttttatgcagcctctcttttttgtaggtagcataatgcttggccttaactcacactttttcttattgctttcattgctaaatactaccctctgggatccgagatcattaatcctttagctatgagcctatggtcgatcatgttcgtaagctacatcttttctggccctttattatttgtagataacattgttgtgggtgta

SEQ ID NO: 5219 - DNA, 370 bp, Glycine max
agcttgcctgtcttatgctctgacgttgtgactcattaacttagtcatgaaagaattcatattccataatttaagataggaccctatatttcagtaaaagagggtcacgtattgtaattcatggcacgaaatgtctactcgacaatataaccgccatgactcatgtgcaatcatatgcctatctgacatatatacaagatttaagttttgcacacgatggccatatttgtgagacacaagaaagattatattagtagtatatgtgggagaatgttagcatatgaccattatgtatcgacccacctcatgtctacacctccacactctgatagttgataatttcaattcctataaaaagaactcccttaat

SEQ ID NO: 5220 - DNA, 283 bp, Glycine max
tgatgtgcgaaagcgtggaatagtcagtcttcctacttttgattgttgaccacagagtggtacctgtagatatgtccctggggtcatgagaccttggggaccttctgtggggtgctattgcccaaaaccaagcttgactaataccgagccaaccctggcattatctgattatgataacctgtgacctacctagatgagctagccctgtcggtctgcctatctgggagctgagcccactaatcaaggaggcttgtgtggcggctggccagctatgtatcttggg

SEQ ID NO: 5221 - DNA, 389 bp, Glycine max
  unsure at all n locations
agcttaggtatggcttccaaacacatcttgaaagagctcaacgatttgcagaatgatccttttacgtcatgcagataagcttctcgatccttttttctgttttttttcgtcttttttgttggggtgtatgtaacaaaaactattatttgtgattatatatttatatatttattgcaatgtgttatctaatatatctaatgtaaaggagtagtgtgtggaaatgtccaaaatggacatcttttatcttaaatctagatttcattttttaaattcagacatgagttttgatttagattatgttgtaacagttaattaattcaaaatatgctcttttatgataatttttatttgatnttcattcattttttagattttgttttttttcttta

SEQ ID NO: 5222 - DNA, 281 bp, Glycine max
tcaacgaatttatcttatatttgatgtggattacagttattaagttgtttgcgtcaagtaaactaaattcgttaactttaatagcaaccacgggatcaatgtaatacgctgttaactaacttcaatatgtagtttaccagaatgagtggtaagaatatcaaactaacgaaaatgatagaaaatgacgagagaacttcatcgatccattggtattattatattgtataatttgataatccgatggagctcacagaatgataatttcatcaaagttatttcgt

SEQ ID NO: 5223 - DNA, 478 bp, Glycine max
agctttgataccagttgatacaagtggttcaaaaagagttgagtttattgaagaaaataaagaattttctttatattagaagaattcaaggggttctggtccctcctaacaatccaaactacacactaaaaaatataattctctaccagctaagtttaataaaactcataactttcctaacaatctataacagattcccacccatgataaaaaccttcaaactgtactaaccaacacttctgtttatttgagcctcatcattagctcgcccatccctcctcctaacatagacccttttaattaaggttctagtatcacaaaaaaatacttgtcaatgccaaaaccaaacttattttaagtaaacacttccacattgctttttttctcaatttccagtcattaacagtctatttggatgagaaatttggaaatttaaaaaatttaaaattttaaatttttaattgctttaattaatatc

SEQ ID NO: 5224 - DNA, 279 bp, Glycine max
tcgcggaaggaatgagcaggaaagtttcttccgaagagggggggctttttataattttttattaaagggcaaaattgcccattccaaaaaattgttgggtgcaccagcaatattgctgagtgcacctagcatctccctctaggatttcatggtacaagagaataaaacagcccaatattgagtaggctttgaagtcaatgaagcccaataccatcttgggcattatatatttccctctttgatatttggaaattctgaattcatcacatcaccctattg

SEQ ID NO: 5225 - DNA, 440 bp, Glycine max
agctttagatattagctgaaagactcatggatgactttatctctaaaatgcaccctcatgaaagagcccctctcacttgaagtgtggaattgtaccttatgttgaaatttgactttttacatagaagaaagtggtgacaaggtcaaacttttgaccactggccgttgaagctttgataccaagattaaagaaaatggtttagagaaattgtttgttaggcagcataaatgttttagtatttacaaatcctatttacaaaatcagagtacttctaacttaacacaaatacaataacttgtatagtaatcagtaggcttaattaattatacttttggctcctttgtgatagtcaatgtgtgatttttgtcctcttataattctttgcagcaatcaaatcctccattgtttcccaataaaaatacttttggctcctttatgat

SEQ ID NO: 5226 - DNA, 276 bp, Glycine max
tgcttctacatatgggttctatcgcacagaatggcatgatcactggctgacatattctcaattagctctgttgcttttttggggtcttcagctttatttttccccctgcagaagcatctagcaatttcttggtttgtggtatcagcccatctataaacatattcaattgaattgtcttggaaaacctatgggtgggagttcttctcaataaacctctgaacctctccaatgcttcactcaaagattcatcagggaactgatgaaatgaagagatta

SEQ ID NO: 5227 - DNA, 969 bp, Glycine max
  unsure at all n locations
attagcacacatcccacctactatacccccccgctcggaccttganttcgtgtgaccccttcccanaccccgaaccgctgacaacaagccgcaaggcgcaagcccaagaaaccagcatgtatacagagggtctttaaggggatgtcgtttagcgcaggaaaaaaagaggatctttttttatacttaaaaccaatccatagggggtcagggtccctactcaacaatcgcacagtgaccacggccgccgatactttccctcccacccaccccgaggttgatgagcaactcaacacctgccctcacaccactctaggcctcttaacacacccgggaacgaaaccgttccgactgaacctaaaaccccgcttcatgcccaacaggagccccaccaaatatacgtccccgatcccccaactgcgagccaacagcccctttccatcagggtacgcgacttcacaaaaaaaatactctgtcgaccgccccacaagccaaacttatttatgagaagacaccatccacaatagcctgccttcgggcctttccaagccaccacaggtctctcacggatgacagcaccccgggacatttaaggaatgcaacactgccctgattaaaagagcgcctctcccgatgccttccctagacacactaccatagctcggagaaacagagacacccgccaaagtgtaaaacaacccacccccaatgggggaaaataccctccgcaccaagactcgtcttaaaacacccccccgctctcatctcatcgggccagcccaccaaggccctctcaacccgcggacacaaactccgttccggtcctcaccaccacaaacgagtacagcccgggcgcatcaagttcaccccaataccctcctcacgaccgctgcccgatgacatgcgatagcatacgcgtagcgaaacacacccctttgttcagcgcaccaagaccaacaacaccgcctcccc

SEQ ID NO: 5228 - DNA, 910 bp, Glycine max
  unsure at all n locations
tgcgcttctagaatcacgacagttacatatactctccaaccgctacggggnantttgaatttgatagaccnatgctccggcacccggggatacctnanaagaaggacctgcagggctgccaacctttatataagcactcggccacttagactatttgcagtaaaaatgggcacaaaaattattcgcacgagatacgtaacccaattatttaggtatcccaagtatagcaaccaagaagccagtttatgggcaaaggacctaccttgggggcgcaggattaacccaaccattgggcccattgaattcaaacaacgttaagcattcatatgacatatgtaaatgcatctaaagccatgtgcaaaactacaagcatagttcatacacttggggtttaatctaacaccctagggttatcatgcacctaaaataatgggtgagcaagtgtaaagatcttgacccattccagcctcaaaaccgcatagaaaagggactgggacatttattaaacagagggtgtgggcaggtaaaacctggctaactgaaggatcaggagcaattggacctgaaaatcataaaagaatctgggatgggctagagccattcctttaacccccaatccaagcatttggaacgtgggtggcccgacactgtcttccaagctgggcagacgaacatcaagggccaaccttcaagggaacgggaaaaataaacggaaaggaccctcatttgcggggaataaggaatgcaccgatgaaccaaaggggctaaaaactggaattgtggaaacaaggagggcaaaggccctggggggctctcgggagttggaaataaagggggagaggggcccttatctcagtgacactgcggagggcaccaagatatcgcgagtgaagcgcacaccaggcaaacc

SEQ ID NO: 5229 - DNA, 450 bp, Glycine max
agcttatttctttatgttcatcgatccctattctataatatgggtctttctaactaaccctgtaaatttaattttacaatggatgtaaaggccattcgaaatctagtaggctaattttttataatgaactaatggacaattgtactatgatactactacttgataaattcataacccttcacaaacaatgtttctgctgacctaagcattaacagttaaagaggtgattgatatatacatcactgatcaattcaaatttttctccaaaacaaaatctgaatcttatagcaacacataacatgtatataaatttatattcattcttggtgataaaacttgaagaacatttaataaatttactccatgcgacaaataaactcaaacttttgtagcttataaactgcaagcatatcatgctcaatttatggtggcaaaagcatgtctttcaca

SEQ ID NO: 5230 - DNA, 287 bp, Glycine max
tatgaacctcgcgtatttgatattaagctaaaatggaattacggactcttttttatattcgaggctttaggttaatttagtcccttgagttgaattctttttttactttagtcccttataattttctattagatcaaattggttcttcttccgtgaatttatcgcattagtttggacaacttaaactgtagcatacatcacttcatgcaaagtcgatacttttagtgccatagtttaacatggatgctaaaaggacaacgcgaaatttttaacacttaagagatcca

SEQ ID NO: 5231 - DNA, 434 bp, Glycine max
agcttcttgcaacattatggtcaatgagctgcataatgaggggaaaaagcaattttcctgttataaaaaatatattagccaattttgatgatgctttctgagaattgagaagcttgcctcctaaaagggattgggatcatgctatcattttgaagaaggctcaaattcctaatatttgcccccacatgtatatgcattatcaaaaaaatgagatagagaagattgtgaaggatatgctttgtgctgtaaggcccaacactaaccctttcagtagccctgttatacttgtcaagaagtattgtgtgtggagattttgtatagactatcaggccatagacaagtaaacaccggataaatttccaattcccataatagatgaactactagatgtattgggtgatgcagtgatttttgtaagatgaactactcttttg

SEQ ID NO: 5232 - DNA, 285 bp, Glycine max
tggagaggatgcttcaatggaggaaaagaaagagggagagaaagagagaggggggagcacgaaattgaaggaagaaaaagggagagaagttgaactttgagttgtgtctcgcaagactctcattcatcaaagttacaacaagtgttacacatgcttctatttatagactaagtatcttccttgagaagctttcttgagaaaacttccttgagaagcttctttgagaaaacttccttgagaagctagagcttagctacacacacccctctaataactaagctcacc

SEQ ID NO: 5233 - DNA, 1099 bp, Glycine max
  unsure at all n locations
gggatacagagccatttgaaacntgtttgataacggtagtaatacagcgagattttggaaagaacctccttttggaacatgtaaaaggcaagaacttattttctaaaacaatgcggtgaagacaagcagacatgtgtagcgcgtgtgtattttcttatatgtgagaaatgggagtttcccctcattagcctatcccccaataagaagagtgtggggtaaaataatggttatgggaggatatactgtttttcttaggggagggaacaaatttgggaataatatggtaagaaaggcgtcgttgcggggaaaattatggaattatatttgtaccgataaagatcgggagagaacaatatcttaattgaaaagaatggttgtgatagtagggatcaaaacaattggatacataatattagctctgggaanaaggagttattgcgactttttctataacaaatcacattttttggagaagaataggcacttatattttggttactattttggtggaagcgagtgaataaaaagtggtgtttttggtgaaagagggttttaaatctttggggaagggcaaaataaaaccctaatgtgatgaaattgtgagccattttgtggggagagcatccaatgggtgaccattttcaaaagggggggaagaaagtttatgatcgtttattttaataaggggggttgccagacgctctattgaaattcttgaataaagatacggagaataagtgggcgcaaaaatcacttgggatgggaaaggaagaaaatgcgttgtttctcgatggtgatgaaactaatgaggggaccactgattggcttataagcgaaacggcgggatggtgatataaaaagaaacgataaatggtaaagaaaggaaaagtaatgggtatggtattaaataaaaaaaaaagaagcaatagttattgttacgttctatcggggggaaaagaacagattgttgttatcctcatattggatggagaagaagagggggaatgaaaatagtattcgtgtggaacnaataaaaacaatgagcatagagacgaggtacgctatgatggtagtggtgtaagtgaaagtgtatactaat

SEQ ID NO: 5234 - DNA, 168 bp, Glycine max
tataatatatcgaggcgctcgaaattgaacaacggaagctcttgagaaattcaaatggtcataacttttaactcggagttcaattcatgcgcatcacatatagagacgcttaaaaatgaacaacggaagctctccaaaagttaaaatggtcataagttttcacactga

SEQ ID NO: 5235 - DNA, 461 bp, Glycine max
agcttatgcgcatacttctttacgaacgttcacttgcacaagacattcttataactaagaaaaatgcacccatatacaatcaaggcaccttcgttacctagattatttatatgtacttccaaggtgtatttgttacctacatcacacgcatttcctttgctaaatttacatacatgcttactcaaagcactttggctatcaaaattgcatacgtgcacattctggtatttctaatacctgtacatacacaaacttcatgatgaatcttgactatctacacaataaggtgctacatttcatgctttttttgaagtgctttcactacctaaagccgcatgcaaattcaagtatattttcttttgccgattaaaattgtattcaaattaaaaggtatttttgtaaggtattttctttacataacatgcaacatatatattttttttgtgaaacattttgactat

SEQ ID NO: 5236 - DNA, 282 bp, Glycine max
tgaaattgaacatcagaagctctcgacaaattccaatggtcataacttgtcacaaggaagtccgattctggcgcatcacatatcgagacgctctaaattgaaaaccggaagctctcgagaaagtcaaaaggtcataacttgtctcacggaagtcagattcgggcgcataatatatcgagacgctcgaaattgaacaacgtatggtctcgagaaattcaaatgttcataacttgtcacacgaaagtccgattcaggcgcataatttattgagaagctggaaat

SEQ ID NO: 5237 - DNA, 468 bp, Glycine max
agcttctttaaagccatcgcctacaaagacacatccaactaaaatttagcataaaaattatttcgcatgagatacataaccatattattttagttatcccaagtatagcaaccaagaagtcaatttatgcgcaatgtacctaccttggtgcaacaagattaaccaaacaattaggccaattcaattcaaacaactttaagcattcatatgacttatgtaattgcatctaaagcaatgtccaaaacttcaagcttagttcatacccttggcatttaatttaacaacctaagtttatcatgcacctaaaataatggttgaacatgtgtaaagatcattacccattcaagcttcaaaatcacatagaatagtcattgtgacatttcattaaacagttggtgtgtgcatgttaaaacatgtataaatgaggggataggagcaatatgacatgaaaattcataaaagaatcat

SEQ ID NO: 5238 - DNA, 285 bp, Glycine max
tatgaaacaacaccttttctgtctagaaattacagataatgccaagtaattatagaaggagcactttcatttctattataaaacttgtggataaagcataatagtacatgaaatgaataacccaccactagtacaaattcatcccatgaatatattgccaacccaaaactttcaacttcttgcttttgtttagggttaacctttccgaagcttacaattgttgtaacaaagacataaaaatgaatgcttctttctaaagcacaagcattttaggaaagaaaggag

SEQ ID NO: 5239 - DNA, 407 bp, Glycine max
agcttaacaattaccttattaaaaattatgatttatttaaaatgacataaaaaataataaaattatcatctagttaagaaaaataacacgaaaaatgaataaatatattaagaataaaagtgaaagaaaatataaaaaattaaaaattattatttaaaaaaactgttatttaatgttttaaaaaacaatagaagttacttaaaaaaacatatgtttaccgaactgttaaacaaatttttcaaataattaaaaaactaaaaattaattaaaatgttttattaaacataacctaataacactcattaataagacactaaatttaggcttttttttacgttaatggtgtaatttttttcaaaaattaccaaaattaataccttttgaattatttatgaaaggaataaatt

SEQ ID NO: 5240 - DNA, 285 bp, Glycine max
tggaccgttggacgtgcattgcatgaaaataattagtataaaaaactaactgatcgctataaacatagtttggaaaaacaaaaaggaagcatcattacggcatgtgcaatgcattatattaaaaataggacaaaaatatatttttgattactatattttcatcaaatcttatttttattctttaaacttttatattctctaatttgatccctaattttttttttaaacaatgtttttagctatttttcacagattttcattaacaatgttaacttgagttgtgtc

SEQ ID NO: 5241 - DNA, 438 bp, Glycine max
agcttttttgtaatggatatgattttcactaacaaatatggttaaacattagactttgaatgtatcatccaacgagtgcaaaaaccaacttatttaaaatcaaatgtggactatcgtccaatgctagtaaaacagagttttcaaaaaagttttcaagtgcagacttgtgcaacaaagtgtatcaaaatcaacacaaaagaatactaatcaagtagctttagagagaagtagaaacacttggatttataccaattcactcaaacaaagctatgtctagttttcctttgcaaatcaataaagggttctactaatcaaaacttgattacaacaagtctatgtaccaaaagcgagtatttttcagcctctatgcattggcgaatatttttccaccaatactcagcttctttcaccaaaatatatgtaccaaaagcaactttt

SEQ ID NO: 5242 - DNA, 195 bp, Glycine max
  unsure at all n locations
tgaaggtaggagaagatgagtggagggagagggagtgaagaggcacgaaattttatgcctcaaatgaggtctgaactttgaagtgtaattctcaaatgatcaaagttacaacaagtgttacacatgcttccatttatagcctangtagcttccttgagaagcttccttgagaaacttccttgagaagcttttttg

SEQ ID NO: 5243 - DNA, 418 bp, Glycine max
agcttcaaaaggacattagcaacttcactcaaaatgaacaagagaactcttcagaagcctgggaaagattccaagagttactcaggagttgcccacatcatgggtttaaccagtaaaggatagtgtacatttctatagtggagtgtcctctcacaacatgactggccttgatgtatgtcaaggcaatttgatcatgaagccaaccgttaatgccattataatcattgaagatatgtgctcaaatccctatcacaattatggggttaggagaatcatgaagacgctcgatcaaccaggtggaaactgaagcagctacttttggccttggacgatagatttaagcattgtccaagaaattcagagttgaatgaaagctaagtctcaagtgcctatctctacacctcccaatcacacttgt

SEQ ID NO: 5244 - DNA, 281 bp, Glycine max
tcaagttttttttttctgtcagcaaaaattaaagcttcaagttgattaattctccatcgtggcttgtcttttaaattgtttatagctagcgtgctgattatatatcttctttaatcaagaaaaactctggttacttgagatgtactctatagggaaatataacgcgattctggggaaaaataatattaacaatgaatatattatggatctatttcttagtgaccgacatgtctacaaattctataaactcttctcagtaataattaatatgcccctgatcg

SEQ ID NO: 5245 - DNA, 439 bp, Glycine max
agcttctatatgaccaacccatactttcccatgcccttacaaaactctctagtgataaactactttgcatgtgtcatccctgaaaacaaaaagaaaggcatattgataaaggcatcaaagtatgaatgcacaaaccaaccttttcaacatagcaacgagtgagaaggatcacaaaacaaaggcatccgtcgtccaaactatttgagttacacgaaaaggcaaattattgattcaaagggtgtacacaacaatatagagtatttgacgaacatggattctttttaaagtgatagatgcgagtaggttttgaaaggggaaacagttcttttgaaagtatgataaagcgattgaatagctttattactaacaaaagccaaatgcaaccgtagaaggatttgaaaaaaaattaacaatgaaaagaaagtcatttattgttaaa

SEQ ID NO: 5246 - DNA, 276 bp, Glycine max
tacatcgactgccagaaggtgcataacaaactcgttgaaattagttgcaacttgtaactgtttctcggaggaagaaagaaagaaaaaacggttataacaaacttttttttctgctacggctgctgctgttgcaagttggggcgcctccggaaatagcgcgtttgttggaggaaatccggcgagaaaacgacctatgcaagagcgacgtcgtttcttcttccacgtgctttggagccgatcccgagcttgacgagttcatggtccccccttctttct

SEQ ID NO: 5247 - DNA, 419 bp, Glycine max
agctttactagtgttccaagacatgatgtctgctggagaatgtccaaactatgtaaccttcattggggtactttctgcttgtgttcatttagctcttgtacaagaaggattctactattttgatcagataatgaagaaatttgacgttgagcctggactggagcactacacatgtatggttgcacttttgggtagggctggtttacttgatgaggctgaaaactttatgaagacaacaacacaggtcaaatgggatgttgttgcgtggcgtactttgcttaacgcgtgccacattcatcgaaattacaatttagggaaacaaattacagaaactgtgatacagatggaccctcatgatgtgggaacatatacattgctatcaaacatgcatgccaaggcaaagaaatgggatggagtgg

SEQ ID NO: 5248 - DNA, 275 bp, Glycine max
tgtaagttagttgtgtacctattatcactctgcatatgtgaaaattattctttgaaattctgaatgtggtttcaaaaaggtttcaaggccttggtgggtatccaaaatgttgtatctctgatcgattaggaatcagaatcaagaagcaccaaactacaaaggaagcatgggaattgcttcaattggagtttcatgatactgatagaactaggctcaaggcttaaattcaaggaactgagttcgaagatgaaagagagataattttcagagttttc

SEQ ID NO: 5249 - DNA, 950 bp, Glycine max
  unsure at all n locations
gaacgaggctatcgaaaacacgctattgaatatcctctccctcaacgccaacggccaccattgacaccgtggnaggcaacacactacncgcngacaccggaatagaacagcaagcaaacaccacgcacatcgaactgttaagtaaaccaactttctattcacccatgcgccgaccaaaacacgcgaagggagaataacagccttgttttggtgtcggccgcctgcccaccacaccgcaaagggcccataagataaagggcagaaaccggttaagtacacaaaccaaaccctttaacaaagcaaccatcgagaaagatcactaaacctcggggtacgccgccccaacccatcgtgtgcggaaaaagccaacggctgattcaaaaggcggacacagcaatatacagatgtagaaaaaaacggggtcctgtttaaagggaacaaatgcgagtaggccgggaatggggaaacatcccttttaaaacatgataacagcaagcgcaaagcattataactaagcaagaaacaaaagcaagcgtgacaaggagctgacaaaacaccttacaccggaaacaaagacatcttagggccgcacacgaaccgaaaacggaacaggggttcgtcagtaaaacgagacccaccccacgtctcaatcgcccagacagaccgcacaagacaaacgaaacgtacagagggcgggtacttaaaaaacccacctctgagccgacaagaatcccacccaagcacagaaactccaccacgcgacagttggaatcagaaaagaggccttgaaaacgccaaatgcaacaggcgcattgcaccccgcgctcgcaaaccccagcctacaggagctatcgcaccgtaagacacccattcatatcctttacatcgaacaccgcacggacaccaaagccatccaacacccaagctaccgtgtagccccacgaacgccg

SEQ ID NO: 5250 - DNA, 429 bp, Glycine max
agcttgcttctacatggagatgtacatcaagtccacttagtacaaaatttggcttatcatcacaaatgatgatattcccatcctaaattaaaagcacaatgggcagatgctgatctggccactatggaactaaacacaagagctagatatacactagtatgtgctctatataaaaatgagtacaaaaagatctgttggcttaaaacaagcaaagagatttgagactcattaagcacaaactacaaaggtacaaaatatgtcagacttagaaaggctgcaactctaactagacattacgagaagttctccataaaagaaggagaatttgtggatgacatgtttgagagactgcaagttatcctaaacaatctataagctttgggacaagcctataccaaggctcaaataaacttgaaagttctagacaac

SEQ ID NO: 5251 - DNA, 285 bp, Glycine max
tgccacccagctcgcccaggcaagccaggttgcatcttccaaaagcaactgccttctggaggaacatcctggaaagcctattgggcctggtttctatttttacccttttttagtaaatacacccccatttgctttttttggtgattatttttctgtaatgttacaaaactttacgaatttcgtaacgatacttgttttattttcgtaaagttacggaacctttcgggtcatgtaattactccttttttagctttcggaatgttacggaaactcacggattgcgta

SEQ ID NO: 5252 - DNA, 440 bp, Glycine max
agcttgcagtgattcactctgatgtgtgtggcccatttgaaatcaaatctcatggaggtaacttgtattttgtctcttttatagatgactttacaaagaaaatgtgagtttacctattacaaagaaagagtgaagtatttgtaacatttaaatcattcaagttactagttgaaaaagcaatctggttgttcaatcaagatgcttagaactgatggtggaggagagtacacttcacttgaatttgagaatttctacaaggaagaaggaataattcatgaagtaatggctccatacactcctcaacacaatggaactgctgagagaaagaatagaatagtgcaaaatatggttagatgcatgctgagaaagaagcatcttccatatgatttttgggcaaaggcagtatccacaacttctcacatcttgaatagatgtcctac

SEQ ID NO: 5253 - DNA, 288 bp, Glycine max
tgtcgaaaaggcaaagccgttttacaaactgctcaagaaaactgagcccttcctgtgggacgagacatgtgaacgagccttcctggctttcaagaaaaccataactacaccaccgatcctgagtcggcctaggctaggagtacccatactcctatacctttcaataactaacaaagctgttaactcgacccttctgcaagaggaagggaagcattaactccctatctatttcaccaaccgcatacttcatgaggccgagaagtgctaccaaatgatagaaaatatggt

SEQ ID NO: 5254 - DNA, 441 bp, Glycine max
  unsure at all n locations
agcttgaatntgagaataaaaatcataagacattaagtttctcttggcctagaagtcagatgcaaattcagtagaacagataaatatatgatgctctaatttacaaaacgaaataaaaaaaataaattggctttcatgttgattgtaaaccttttgagtttggacacttacacattctggtgaagctgacaaatgcagtatatgtagccgaagacaaggcaggcaaaagaaacattggcaaaactcggattgccctcattttccaattcatatccattgatcttgttgtcataatagcataacctacagcaatgacctgaaagttgaaaccattttaagcaaaatccatttataaaaacaccctcaataatcaataagaatatattaatttgtcagagaaaaaatttaaaatttcagttaaccctccattgtcactcaata

SEQ ID NO: 5255 - DNA, 289 bp, Glycine max
tcatttgtagctaactgtagaactcacttttcctaacaaatcggaagttttcattaatattacctatattgttagtgctagcaaacaaaataataatatttcacttaaaaaatgaattaattatttgaacaaattaaattttttaatttaattaatcattaaatattaaataatttctttaacaaaaattaaaatatttatttgtgtatgatctcataagttcaatttaagccgataatatattaattaaattaatatattaatcgagatagacatctagtaacatttt

SEQ ID NO: 5256 - DNA, 479 bp, Glycine max
agcttgccctgtcctatcaggttctaaggatcaaaccatttcccaatgttgagtgatcctaactaagcatgcaagtgcttgatcaaggcaaaggcacactagaattaagtactgatagcacagtgaacacataaaacatcattagatagatatgaaagtatttaaatcaagtaccccataggaagaaccaactgaggctttagctctccatagcagggaagcttcctttacaacaatgagaagagaagatgaaagatagaagaaatacaagtagtggggatgtctcctccacctctagaaacctcacaatctcatccaaagctcccttagatggcttcctcttcaagctcagctctctcttagtctctccacaaccaaaaactctaaaaaaactcaactccaccaccgatttcagcttaaataggcaatcctatcgggggatgcgcgcttagcaaaaaattagcttgcttaccgcatgt

SEQ ID NO: 5257 - DNA, 289 bp, Glycine max
tatcagaacaacattttttttcaaaatgcaacaatgagaaaagaaagcacaaagaggaaattcacagaaccaaatgagattaacatcaattcacattttgtttctaaagaatataagagaaaacacccgattcactcaggcagaggaaaacctctcaaaggtgcataattctcatgcaggcaattgttccatcacaattccaatcactgatatgtcataaatcaatttttgcaagtcatttcccatcaaatcaaagataaattgcataatcatcatggatcattagggc

SEQ ID NO: 5258 - DNA, 1207 bp, Glycine max
  unsure at all n locations
cgtctgactacctaatactcctaaacactatcttctctacnctctccactagcncccgagcgcnntttgagnactgttggaaccacgcggaacccgcggacactctacagtcaagcctgcccggcatgccaaaccatcaatgtgtgacattaacacacatttttctctaatggcactaacatcgaagcctatggctctcgcgtggtggaaatacattttgctcgtatagcaacgcccattatcgcaagggagaagatgacccccctcgcgtctcgtctcatgaaggctagaatacgatattcttaggggctgaagtaatagggtgattgcctacagcaaaaccaacacaggttcgcgtcttgcaaaaggagtacacatacacttcatttacatctttgggctcgcacaactatatcttggagaagtcctgcggcaacccacctccccactgggaagataatcttgttaaagagcgtcctcatagacaaaacgcctcagtatagaatagaaatttcacctgtggtacttaagagtaactttaatggcgacccagcacttatttacaaaaaatgtttacgcactcaataatcgcgggaatttagaaccgcacattatttctctcccaacagaaatactatatagaaatgaaaggggtacaaatactaaacgttgggcgacgccgtaatatagattcctttttacaaagagacacgtgaaattaatgagtcctcttgacttttaaacaaaaaaacaagattctacaccctcacaaatctttctccagcacaaatagaatagaacggttgtatacactcataaaaaaaacaaaatcgccggtgtgtgggtcacccaaaacaacgacattctcgcaactctaagatatcgataaggcgtggggagctctagaaatacgactgccccgccaacaaaaagctaggcaccactttaaatccattaaggggctgtattttactccgatctacggaatcagtggcaaaaccaccttntagcaggcgccagcgcagaaaaaacttaaacgtcatgggacccacaatggcaatagaccacgctcccgctaacgcctcgactacaagaaaacccactgtggacgcgcaacttggccctcgttaaaaaagatacagacgcctagttctaggctaccagatacctcgccgcgtttattatatgccaaccctgacagaaaccg

SEQ ID NO: 5259 - DNA, 282 bp, Glycine max
ttcttgtgaagtgttaatgcttagattaatttagtttccactaatcaggggaagggcattatggtgggtcaaggggacagttctctagactcttatcaattggcataagcaagaggtagaaaatgggttatgaaagtagaaattcatgccagcattctccatgttagtgtatttgatcttctacattgtttggttttgtatgctttcaatttgttttgaacttttaaacaagttagtagtggcatgaatttgtgcgcacaaaatcagggtgtattgcgaatc

SEQ ID NO: 5260 - DNA, 440 bp, Glycine max
agctttacgctttccaagaatcccagcgccaacttcgcgaccagcacctcttcctcctttcgaaattgaaggagaaagacgatctcatcgaacgcgctaaaatttgtattccttttcttttgcttccatgacaattattcatttggtccttatacctctacaattacgttgaaactactcatgttttagtccctagacatataatttttaactcgttttagttcttacaccaacgcgctagtttccaagtgtgtgaactattagtaagaattgtgtatgtacaaggatcaaatgattaattaaaccgtgattaattggtggatttctttttatgttatgtttattatgggggatgggttttgagtagtgtgaggcgaacatgaacccccaagccgtgaaaaagttcgttgaggagaatcaaaagttggcagcggagtgtg

SEQ ID NO: 5261 - DNA, 283 bp, Glycine max
ctgtttttggtccaataaatttaaaattgatctttttagtctatttaatttgaaaagtgtatgttttaatccttctgtctaaaagttttctattcaaatgttgtcaaaacgaatcctttaaaagaaaaacactcttgtcataggttgtttgataataagaatgcaagaacagagtgacttaccatctaagctaatttgttagtcagacaaccaaatatttaaggacatttaaacaaaggtaccaaacacaaaagcttttttcatattacaagaacaagaacta

SEQ ID NO: 5262 - DNA, 345 bp, Glycine max
agcttgttccatgagcaaaaaccagtgttattatatttgatatctaggagggaatggcactagcagatattgccatataagcacaccaacatttcaccttttttataacagacacaatgtcaagcttgtactaagagcctaccctttcttctagggtggaattaaaaaaaggaatttctatatgtgtgtgtgcatacttatttatttgattgcatacctacaaccatccattcccttattcatgttccctttcatggttgctgcataaattcttgattctgtgtggtcctttttttacggaatgcaagatagattcctccactacttatgtcacctaatcttttt

SEQ ID NO: 5263 - DNA, 282 bp, Glycine max
tgatcaaaacaattatctaataattccaatccactcaaatcatacaattgctcattcaaatcattctcaaacactcatttcatacaaaataatccactacatatcattttcaatcaattcactgctcaaacaagctttttggtacaagcaaacaactcaaagtgttgaaatttaaataactaaaatttaaagaactaaaacgtaaaaactgaaattaaaatgactgaacataaatcataaaatagctgaaaataaactaaaatgttcaaaatgcacaaattt

SEQ ID NO: 5264 - DNA, 407 bp, Glycine max
agctttctccactaagttgcctaatgcctgaaatgtcttttctgatggtagtggtcctagatgcaagaaagaatttctccaagaacaccctcttaaggtcatccctgctgaaaatggacttgggagcaaggtagtgtagccaatcttttgccactccctccaaagaatgaggaaaagcctttagaaagatatgaccttcttggacattagggggtttcatggtggaacaaacaatatggaactccttaagatgcttataaggatcttcacctgcaagaccatgaaacttgggcagcaaatgtattagtccagtcttgagaacatatggaacaccctcatcaggatattgaatgcacaagctctcataagtgaaatcaggtgcaaccatctccctaagagtcctctca

SEQ ID NO: 5265 - DNA, 284 bp, Glycine max
tcttatccaaggcaattcttggtggtgaagctccttcttccttggcttattccctagtggatggtgcctcccctatcctcttctcctttgccttccgctgcatctccatggtgaaaaatcaccattgaaggacctcattgaagctcaaagatccagcctccatagaagctccacaagcaagcttccatcaagtggtaatcagagcacaagagcttcaagtaggtgctccttaaacctccattaattttttttctttaccttctcttccattgttgtttcttcat

SEQ ID NO: 5266 - DNA, 375 bp, Glycine max
agctttgcatgtctagtgattctagagagagaaaggtccaagttctagagagttttgagaaattttgctatgtgaagatctgcagagaccagagcttgaagcgaaagccgttatgagagcttgagatgagtttgtgagtggttgtgagatcctagaggtgaaggagacatcctcaccacttgtatttttgcaatctttcatcttgttcttttctttgttgtaaaggaggcttcctagttatggaaagttaaaatcctctgttggatcttccttgtaggtacttgatgtaaatatctttctatctatttaatgatgttttgtgtgttctttgtgctctcagtttttcattctagtatgcctttaccttgatcacat

SEQ ID NO: 5267 - DNA, 281 bp, Glycine max
ttgtgaggtaactatggtgtcagtcaggagatgcagtcagcatgtaatagtgctgaaactactatgcatttggaataaggaagcatttaaagtagagaagaagctgaggggaagtggtgtcatttacctggaagggacaagggcaacaaatggtgcaaaagtgataattaaaacatttactcgccttgtgatacagttctgaaaagaaatctgtgggaacaaatcagacaactgaaaactgcaaatagggggtgggggtggctatggctatggtgtgtatt

SEQ ID NO: 5268 - DNA, 442 bp, Glycine max
agcttttagaaaaaaggttatagtttagagaataggatatagcaaaacctctgcaacccaatgtcttgtcctttacgtagtgaattaggcttttgaaccgtcatccccctaacctaggtccaacgagggttaaaaaacattaaaattccatggaaccgtatttttccgtctaaaccaagaaaagcttaaaacagattagcagttcttaaactcatttgtagaatttaagacaattaagaaaatattgtagacaacttttatcgtgcttcgtgcattaaaaaaaaaacgagttactgtatattttcttgattttctcgacttcccccttttattttattaagttgattccacactttatagtactttcaattttattttatccatctgtaattaatatctatacatctgcagaattatgttttcattttgcttttatctttat

SEQ ID NO: 5269 - DNA, 303 bp, Glycine max
ttagtgaactatagacactcaagcttgtaatatccttgattgtcagcaatagaccttacatgaccatcaactatgattttgaccccctccactcccatgccatttccatcaactacacggcctccaacagaaaatccagttacctgtaagaattgacaatgatagcagataattgagaaaaataacatacacataaccacaataatagacaggtatcagtaatattacaatatcttagaatgtgggtttgggcctaactcaaccccaaaagctagcttgtaaggtgagggttgcctcccactt

SEQ ID NO: 5270 - DNA, 439 bp, Glycine max
  unsure at all n locations
agcttctggtgggacatcttgacttgctttccaatctgacattcaccacagattctgccttcttctattttcagattgggaatgcctctaacagcaccttggtcaatgattttcttcatgcctcttaagtgcagatgtccaaatctttgatgccatattttgacttcatcttctttggaggatagacatgtggaggagtaactggtttcttgaggtgtccataggtaacagttgtcctttgatctgctgcccttcattagaacttcactcttctcatttgttaccaagcattctgactttgtgaagtttacattgaatccttcatcacaacaactgactgatgctgatcaagtttgcagtcagtcccttcaccagcaatactttgttcagactangaagtccatcatggactagccttcccatccaataatcttttctt

SEQ ID NO: 5271 - DNA, 246 bp, Glycine max
tgaactgccacatcactctctgattcataccgtgttttattgtttacttctagaccctttattaagccaccggacaccgcgcaaatagatgaactggcaccaagggcagatgataatcaaccatctcccatacccttggctattatgtgccacaaaagactgtacaccgaccatgggccacagcaactggggataaagcaatggcacggactacatcttgacaaaacgtcacgggaagagtgaaca

SEQ ID NO: 5272 - DNA, 995 bp, Glycine max
aggacacgtataaacggacgataataacagccagggccttgaacctgtgaacccttccatacccgaaccatggaagcaaacccccgcatgctagaatcaaagaaaaacagtttttaccatacaaaatgggaagcaccctcaccgcgagcgacccaaagaaaatggccctcacacgagcgaacaacaggcgaaggacgcggctgccccctaacccaaggtgcaaacaaggaggaaaaaaatagcaacaaactctataggaaagcgtatcttcgccgcccaaaccaagaaacaagcttacgaacccattaaccagaccatcaaacccgatatggcctaaccggagaaaactccaaaaaaaaattgcatgacaagctttgatacgggactctcgccgcaataaaagaagaaagcgaagtgactggcgtaaagaaaccggaggttacccgacccccccacccgaccattcgaataaaaggaaggagccccacttgtagcagtacgaaaggaatcgtaggtacacaccaacaaggaacgaaacaacccaaccttacgcccaacatcaggaacaccatacccagcgcggaccattaagaccacacccccagtggcggagagcataaagaaaaacatactgctgggagaaaccacaagaaacggttaaacaccaaacgcaagagaataaaaccccgctgcgagtgtaaaaacgcgcgacctcttaacgaagaaaaaccgcgctaactcttatctcccccaaagacaaacgcaccggggcgctgaaccaaaaccctgcaaacaaaaatgagcgaaatcacaaagggcacaagcacaacacgccgcgacccaagcgcagaaacacaatgcgcagaaacggatacccttaagaccactatacaacgatggacggcgacgactaatagcacaagtcaacacgagggaaaagaaaggcttccacacctaacacatacataacacaagcgcgaagaagcgtctcaccc

SEQ ID NO: 5273 - DNA, 436 bp, Glycine max
  unsure at all n locations
agcttgaagtgagaaagtgtnggaagagtcagtcttcctacttttattcgttgaccacagagtggtacctggagatatgtcgcgggagttaagagaccttggggacgtcaagtggggtgctattgcccaaaaccaagcttgacaaatcccgacccaacccgggcatagtcagtcagtgagaacctgtgatgtacctaaacaggcgagctcctggtagtcaaccgataaaagaacaaagaccacaaagcaaggaggcttgtgtggtggctggccagctattgattctgagtgatatctggaatatggcctctggtaatcgattaccaagggtgtgtaatcgattacaaggcttaaaaatgaagacaagaaattaagatggtctctggtaattaatttccaagagtgtgtaatctattaccaggccttaaaatggggt

SEQ ID NO: 5274 - DNA, 288 bp, Glycine max
tcggaagaaagtgatgaggtacaagccctaaaggcagagcttgaaagagcctgggtagtcgaaaaaaagttcaagtccatagccatcaaagtctgaaaaaagtatgatgaactaagggatgtcaatatggccaccgatgaaaccttggaatgaaaaaccaaaaaggcccgaaaggaagaacacgaccaaagcaaagttttgaggggctttatatggcagcaatagtgagcttaagctccgaagaggtgaaaggaatcatcacgggtcaaatgcatgatcttgaaggac

SEQ ID NO: 5275 - DNA, 362 bp, Glycine max
agcttgacttaagaagctaaaagtagcattgattaatacttgtaacttgttgaagttagtgaaactttgtggtttatccaaaactagacgtagtctcgatggttgaaatgaaccaatataaattctttgggtcttattttgattattttctcttctatttttgaactaacctaaggtttgaatttgatctttgatttttaaaaactatgtttgtttttcaacaatatgaaactatcttctgatttctcctgtaaaaacctattgtttgttttttttttaagtctcattagacaataacttcgttgttttaaaaaaaggttttaaatttagtaaaaatcacaacttactcccccccccccccc

SEQ ID NO: 5276 - DNA, 120 bp, Glycine max
tttcttaacaactttataggactacccatttttaacttgatacgaagatttggtagaccagatgtgtttagtgaattgagaaattcagttgtgattgattggaaatgccaactgtcaatg

SEQ ID NO: 5277 - DNA, 459 bp, Glycine max
agcttgaaggtgtgtaacccaccattttccatagtaaaatactggtaatgtgtctactatcattgtcatcatttttttcgtcattgaggtgccacttgagctgccaggttctccacctttgggtgtattctttgaaagatccgtgccccctttttgcacatgttttgtagttgcatcctatcagaagccattataccgacactgcctaacgaaggcaaccattaggtcctccctggaatggactcgggaaggttccaagttagtgtaccagggaacaactaccccaataagactttcttggaaagaatgtatcaacaattcctcatcttttgcgtatgcccccatcttccgacaatacatctttagatggttcttggggcaagtagtccccttgtacttgtcaaagtccagcaccttgaacttgggaggggtgatgatattggggactaagaacaactc

SEQ ID NO: 5278 - DNA, 289 bp, Glycine max
ttgatggtgtcaagaagaaatcacatgtttgtcatcatcaaaaagggggagaatgtgaatgtatgtatacatgattttgatgatgtcaaagaagaatctaacaaggctgcttcaaatgataagcatttgcttcaagaataattcaagattgcttcaacaaacaaagccttgtttcaagattcactaaagaccaagccttgccttaaaacaatgtgctttcaagacatgcaaggctctggtaatcgattaccaggaagtgtaatcgattaccagaagacagggttgagaa

SEQ ID NO: 5279 - DNA, 402 bp, Glycine max
agctttcaatatattgagacgctcgaaattaaacatcggaagctgtcgagaaattcaaatggtcataacttttttcacggatgtccgattcaagcgtatcacatatacagacactcgaaattgaacaacggaacctctcgagaaattcaaatggttataacttttcacacagatgtctaattaaggtgcatcacatatagagacactcgaaaatgaacaacggaagctttcgagaaattcaaatggtcataacttttcacactgaggtccgattcacgcttataacatatcggggcgcctaaaattgaacaacagaagctcttgtgaaattcaaatggtcataacttttaactcggatgtccgattcaggcgccttacatatagagacgctcaaaaatgaac

SEQ ID NO: 5280 - DNA, 304 bp, Glycine max
attacgagtgcctgtatattgatgcgcctgagtcagacattcgagtgaaaagttatgaccatttgaatttctcgagagcttcctatggttaattttgagcgtgtcgatatattatacgcctgaatcgaacctcatggtgaaaagttatgaccatttgaatttcttgagagcatccgttgctcattatcgagcgtctctatatgtgatgcacctgaatcggacctccgagtgaaaagttatgaccatttgaatttctcgagagcttccgttgttcaatttcgagcgtctcgacatattatgcgcc

SEQ ID NO: 5281 - DNA, 418 bp, Glycine max
agcttaaacattcaacttcgagcgtcttgatatattacgagtctcaatcaaacatccgagaaaaaagttattgtcgtttgaatttgctcacaagttcaacattcaattttgagcgtctcgatatatgacgggactcaatcagacatccgagtaaaaagttattgtcgtttgaattaactcagagcttcaacattcaatttcgagcgtctcgatatgtgacgggactgaatcaaacatcccagtacaaagttattgtccgttgaatttgctcaaaggtttcacattcaatttcgaacgtctcgttttattacgggactcaatcagaccatccgagtataaagatattgccgtttgaatttgctcagaacctcaacattcaattttgagcgtctcgatatatgacggggactcaatccta

SEQ ID NO: 5282 - DNA, 276 bp, Glycine max
tagagccaattcaaacgacaataactttttactcggatgtctgattgagtcccgtcatatatcgagacgctcgaaattgaatgttgaagctcttagccaattcaaacgacaataactttttactcgaatgtctgattgagtcctgtaatataacgagacgctcgaaattgaatgttgaagctctgagccaattcaaacgacaataactttttactcggatgtctgattgagtcccgtcatatatcgagacgctcgaaattgaatggggaatctctg

SEQ ID NO: 5283 - DNA, 268 bp, Glycine max
agcttgagatgaggaagtgttgaagggtgaaacttcctgcttttattgttgaccacagagtggtacctgtagatatgtcgcgggggtcaagaaaccttggggacgtcaggtggggtgctattgcccaaaaccaagcttgaccaatcccgacccaacccgggcatattcggtcagtgagaacctgtgatgtacctaaccaggcgagctcctggccgtctacagataaaaggaaatcaagaccacaaagctaggaggctcgtggtggctg

SEQ ID NO: 5284 - DNA, 280 bp, Glycine max
tgttgaaattgccatgtttggatgagttaaacatacccattctgttttagggtttttatgaggatgcttgtgatgttcatgtactgaaattgcttatggaaaactgttagagatgaaaggtagagttaacctagggttagaaagtgagaatgtggtgttatgagtggaaaaaaagtgaggctttgagagttgaaaggctaaatctggattctgtagtaaatggaggttaaaatgagttaatcctagcttgaaatgccatttaggacttatgagaaaggtt

SEQ ID NO: 5285 - DNA, 563 bp, Glycine max
  unsure at all n locations
agcttctaaaagaacaagtgcagctcctactaacttgcatgcgcacgtgaatgattatgcaactaatacttaatccttcaaatgactaggagtgtggctttgcctcttgggccttgctgtttgcaactccttgctgttactcacattgggctttgctgcttgtaactctttgttgttactcatcagttggttaattgttttcgttctgatcaagagagtcatgcacatattttgtttacacaaaatgcacttgagatagagtcatcacaagtttgatattagagcaatcgaaactcgagttcaattcaaattacccttgtgttgtaagatccgcaaaacccacacttgtggtatagccaatgaaatggtgcagtacccttctcatggcagtcattgcanaatatatcctgtgatataaaaaatcaggtttcacaattaaagtttaaatcttcaaattgtcccaagaaaaatgaatcttttcatttggttctcctcatctttctgaattgaataaatccaacattctgaaatgaaaatgcactaaaactttttttttttttaaa

SEQ ID NO: 5286 - DNA, 284 bp, Glycine max
tcttgagcgatcacgtgtcccttctgaagtatgcctcgcatcctaatttaagccagataacttcctagcttttatttattttaatgatgttttgttgggtgtagtatgccacaaatttgactggaggttcatttgatgaagctcgaatgcttcaaaatgtagaagcatgtgaatggttgaccagtgccttgcatggtcttggttttgcctaatctagatcctagttatgcaaacatgagagctttatgttcctttctttacttttctcttaaaaatcatctggt

SEQ ID NO: 5287 - DNA, 464 bp, Glycine max
agcttgaccagtgggtaaggggagagactgtctgacttcatgtccgacttcggtctcggcgacgatgccgtgatgggcgatgtgcaaatccgagaccggcagatgttgcggttgctgctccccattgtgatctgcgccgtcgacggccattgtgctaggacgaccgttgcatgattccgtttccggcacaaatgactcgttatcccctataccctagttggtgaaagatgagctgtcgaggaagctgtcatcggagttaagctcctccgatgacccacgcgcgtttctccctctccgacaacgatcttggcatccaccgcagcactcctcagcaatctggaccatgaactgctcttctccaatctgcaccttcaccgtatgttgaattaaaggcctccttgtagtcttaacgaggacccttgctctgtccaatctcctctttttctccactgagtcattccaat

SEQ ID NO: 5288 - DNA, 284 bp, Glycine max
tgaacttgttattgtcaaattcaaaacaaatatcatttatagaagttgtagacataatcttcttgagaatatactaattatcagtctatgcatgactaagatgctatctcaatacagcctatttcaacatgtgattataatttgctaatgcagctggcatttctgatgaacattgctgcataatctgatgtgtatttattttatgctttgcagttcaaagtgtttttgagactaaagtacaaattttcttgttcttttgtgccggtgctgctgaagcatctttt

SEQ ID NO: 5289 - DNA, 378 bp, Glycine max
agcttctggtgggacatcttgacttgctttccaatctgacattcaccacagattctgccttcttctattttcagattgggaatgcctctaatagcacctttgtcaatgatattcttcatgcctcttaagtgcagatatccaaatctttgatgccatattctgacttcatcttctttggaggatagacatgtggaggagtaactggtttcttgaggtgtccataggtagcagttgtcctttgatctgctgcccttcattagaacttcacacttctcatttgtcactaagcattctgactttgtgaaagttacattgaatccttcatcacacagctgactgatgctgatcaagtttgcagtcagtcccttcaccagcagt

SEQ ID NO: 5290 - DNA, 283 bp, Glycine max
tttcgattcattctatgtacccgtggtggtccacattgtgtttcgcgtatttttattctcgtttcatttactttttatacccccttttgacgtgcttaagccatcttatttaagtcatttctcgcttaaactaaaaataaaataaatttccaccgatcgtttgaattgtattatccgttaacttcggttaaaatgaattccgaccgttcggttgtgccgtaaccacgttggaaattaaaaaaaaaaaagaggtaaaaaataatataataataaaaaaacatct

SEQ ID NO: 5291 - DNA, 442 bp, Glycine max
agctttacagcagattttagtaatgacccactaacctagaattaaaataacttaatgccattaacctatggaattaaaaaaaaaaaaacttaatggctgagtgtaactgaaattgtggcaaccaaaagtcacccccaacagccaacaagtcagccaccatttggtctcccaaaaggctgatgcctaggttgccaattgggcccttattacaacttgaactaaacctaactaaagcccttttagttgattcacccaaaacatatttttggtcagccaactttacaaggattgggccattatttagacaaactaaacactctaaaattgagacaaagtggtgtcatttagtcctcctccatttaggccatgatacaactcacaacctttgacttttctccttgaaacttgggcttgtattcaaatagtattgacaacacttgtt

SEQ ID NO: 5292 - DNA, 276 bp, Glycine max
ttgagcaaattcaaacgacaataacttattagtcggatgtctgattgagacccgtcatatatcgagacgctcgaaattgaatgttgatgctccgagcaaattcaaacgacaataacttttaactcggatgtttgattgagtcccgtaatatatcgagacgctcggaattgaataccgaagctctaagcaaattcaaacaacaataactatttactcggatgtccgattgagttccagaatatatcgaaacactcgaaattgaatgttgaagctctc

SEQ ID NO: 5293 - DNA, 478 bp, Glycine max
  unsure at all n locations
agcttaacaaaaggcatgcgaagtgggtggaattcctagagcaattcccttatgttatcaaacataaaaagggaaaaggtaatattgtagccgatgctctttctcggcgtcatgcattactttctatgcttgaaacaaaattgattggtcttgaatgtttgaaaagcatgtatgaaaatgatgaaacttttggagaaatttttaaaaattgtgaaaatttttcagaaaatggtttctttagacatgaaggctttcttttcaaagaaaacaaattgtgtgtgcctaaatgttctactaaaaaattgcttgtttgtgaagcacatgaaggaggtttaatggggcattttggggtccaaaagactctagaaacattacaagaacatttttattggcctcatatgaaaaaagatgtgcagaaatnttgtgaacattgcattgtatgtaaaaaagcaaagtctaatgtaaagcctcatggatt

SEQ ID NO: 5294 - DNA, 278 bp, Glycine max
  unsure at all n locations
tctatataagctgaaccattttatcaataaacacaagttgagttttattcagaaaattagagtttatctcttttatcttagtgagagtgattctcctaaattcttgagtgattcaagaacaccctggctgtatcaaaggactttcacaacctttgtgtgttgccctcgctgganagagtgattctttccttcctatcatctccacccttgttctttcaaaccacaattccagaaaatccacctctgcccaaaattatctcgtgaccataactcccatt

SEQ ID NO: 5295 - DNA, 927 bp, Glycine max
  unsure at all n locations
ctatccaacctataacgtatatctcctagaatgactccatctcgcgcacccacggcnnaattgaaaccgtcgtttatgcggcgatcctnaaaagacgaccagccagcaagcaagccccccaaaaaaacctcgaagaagcatcttgaggaaaccccttaacgaagccatataaagaggccacgcgaattctgtttttggtaaaaaagctacccaacgttttggcacacgtngagaccaactcgaattccggcgctggggctccacaaaacaccactagtaagaactgaccgtggggacccaatgagaagacagcctggggtgggaaccaagccctctttcccgggaacacagcccacacgagcacgcccagccttgaaccacccaaaacctttgagaagtgcccacaactttcctgtttgggccccaaaccataggcaacagacacagctcaatccccacgacccatagcccacaagcacccccacaaacaggcttgatctacctcaaaaccctacacacctaggacacagacaagggcgggccccaataaaataacacgaaactgccctaacaaagaagtgaacctaggtcggtttccacccagccatgacaagcccaatggccatcaaaagcatccccaacccacaaacgtaaccaaggggggggggggaaaccactattggaaaatgaaacgacgaacttttcggaattaaaacaatcggaacaaaccaagggctttcccgcgaagcaaaacaagcccacgactcgaccggaaggaattgaacatattcgcgcctatcaccaacggaagccaaaggtaattactcgccgaattcaaaacgccggtattggacagatagcaaagtaagccaatgcgaggtaaaccaacgcacacggcagcgactgaacgcggacactcacccaccc

SEQ ID NO: 5296 - DNA, 488 bp, Glycine max
  unsure at all n locations
agatctgtatatactcgattgtatcataaanttctcctcttaatctataattgtatatgatgtcatggtattgaaaatactgttatttacatccggagggganatttgaatccattctattgaggagcctctatagaatactcnagcttgtgcttgttttatttaatatgccttacgatcatgtagaaacttatgtgtgttcctactatgaacttgagaatacaaaagttgatgcaaataacaaagctgagatttaaaagggaactaagtatgccttacctaatatcgccttttttaactggctttgagttggaacacgtcgatgactttgtctgttcacctgaacctattaactaatgcttcacaatttgtgcttatgagaccttggaccgatcttattggttcaatccatggtgttcattatgctaacgtctcttaacactttttgtgtgatgatactgatagtgatacttcttataatgttgtgg

SEQ ID NO: 5297 - DNA, 834 bp, Glycine max
cgcaaatgaatcgacccacccggaccccaagtcaccgacagccgcagcttcgagccatcaaagggcacacggaacccccgagccccagaaagcgcataaggacacggggccctctggaagaacaaaggccccaacccaccccaggccaagcggggaacaagtaaaaacgaaaggcccagggaggcacaaatcaatccgaaaggcaccacatggccccacagaacccggagagaaattcaaaagggcataacgcataacacagaaggcagggcccggcgcacaaacagtctgcacgaccgggaaagaacaacggaagctgcacagacagtccaaaggaaacaacgcgacacagggggaaaagggcaagaccacaggatagcaagacgctcagaaagcaacaaacgcagtctccaaaacccccaaagggcagaacgggcccacggagggccaaccaaggccccccccaaaccagaggcccggaaggaacaaccaagacagccccaaaaacaaaagccatggccgggaccccgagggcacaaccaaaccccccaagaaccggacccccccgaagggcccaacggaaccccgggacaatcaaaaggccaaacactccacccgaaggcggcaccgggcccaaaaagaacgaacccaccaaaagaacacaaggaaacccgagccgcgaaagcgcgcaacgcaccccgcggagcccaaaagagcccacacccgcaagcggcgccgaaaacgaccgacagccccgcgaacacaacgcgccacaggaacccacggggacgacaagcgcaccccaacacgcacgaacgcacagcgaacgcaccg

SEQ ID NO: 5298 - DNA, 240 bp, Glycine max
tctatgaggaggtcaacttggagaacgatgctatctgaagaggcttttcacgacgaagtatcttgtagaaaacatctttcaagtcctgtgataaggggtgaacgctatgagaaccttatcatggttgctgatgaaaatgatcactctgtctctttatcgtattacttttttccacaggtggctcattgttatttttcatataccggagtggagcctcactattttcttttccttgggctt

SEQ ID NO: 5299 - DNA, 912 bp, Glycine max
  unsure at all n locations
gctgatagagtagataatcatctacaaatacagcacaggacattgatgattcttcaggcccnnccttggtaaaatccgccccccgaaatataaattggacgaaaaaaacagggtttaaaatagcccaaagcggtacccgcggggagaggttgtttattaacaaaaccccacaacccacccaagtcgaaggataataaggtaaaaccggggtggccgcatagatgcgccttgcatcaactaattgggcttgggccgaccggccggataataaaggaggaaaaccggaagggccccagcaacaaaagaaatcggcaaagcacatggcacacgggataagccaaacatataatgtcaaataaaagaagacgagcatcaaaaacaacacccacatagaacaggcccacgattaggcagaaaaatagaggaacgttcatcagacgcgctattgacgacaataaggactgccgaaaaaatagtgaggaacattcattgatagttttccacaaggaagcccaggaaagaaggtgggacagaacggtattaacaaaggacagtgtcaaggtgacgacaaaagaacggacgcagcaaatcaaagaaaggaaacaacgacggctgagcaatgcaggacaccatcgaaagcacggaacaaaaaaaaagagacgcaaccaagaaaaagaaaggaagcacacgaatcaaaactaaggataattagaataaggaaagaaactcacgccacgcccacaaatgtaacgcagagtcacaagacttggaaaaacctatagaatggaaagagactggatagtagagagagcgcccgcgtacgcacaccaaaggtaagaagaatgagtaaactgagcgtatcgtaaacgcacagtgaagaaaaagaatgaagctagagcaacgcaaacagcg

SEQ ID NO: 5300 - DNA, 235 bp, Glycine max
gccctatagtgagtcgtattacaattcactggccgtcgttttacaacgtcgtgactgggaaaaccctggcgttacccaacttaatcgccttgcagcacatccccctttcgccagctggcgtaatagcgaagaagcccgcaccgatcgccctttccaacagttgcccagcctgaatggcgaatggcgcctgatgcggtatttttgcttacacatctgtgcggttttaacccccgtc

SEQ ID NO: 5301 - DNA, 292 bp, Glycine max
ctataccgcctcatttctctccccctttggtaacatcaaaaagccaaagttcgtggcaatcaacacaagatgatataactaaagttcacataatcaattagaagtcaaaaccaaatataatccaatcatccataagtcaaaaaccaaatataattgatcgaagccgtacccgaatcaaataaacatgaaaatgccgtaactaggaagtgatcctaggtcgtttcccaacgagcagtgacaagccaaatgttcataatatacttgcagtaacagtaacgatgggggggggggg

SEQ ID NO: 5302 - DNA, 290 bp, Glycine max
tctcggctcctgctgggaacgcctctagctcaacacccgtgcagcctaaggcacccacccagagggaagctccccaagttccaactccgaacgcgactcgaccggccggtaattccaacacgacaaggaacttccctcagagaccgttgccggaattcaccccgctcccaatgacgtacgaagatcttctaccatccctcatcgccaatcatttggccgtggtaactcccggaagggtcttcgaaccccctttcccgaagtggtatgaccctaatgcaacttgcaaatac

SEQ ID NO: 5303 - DNA, 290 bp, Glycine max
agcttatgagaattccaagctttataagcaaaaagtaaaaatctatcatgacaaaaagctatcaaaaaggaatttttagtctggtcaataggtattgttatttaattgtcaattaagattgtttctaggtaagcataaatccaagtggtctggaccattcatcatcaaagaagttatgccacatggagcaatgatattggaagacccaaccaccaaaaggacatggaccgtgaatggtagcaagaggataatcactgttgtccagctgcaagaggcttgaaccataaaaa

SEQ ID NO: 5304 - DNA, 289 bp, Glycine max
tctcggctcatactgggaacgcctctagttcaacacccgtgcagcctaaggcacccacccagagggaagctccccaagttccaactccgaacacgactcgaccggccagtaattccaacacgacaaggaacttccctccgaggccatttccggagttcaccccactcccaatgacgtacgaagatcttttgccatccctcatcgccaatcatttggccgtggtaactcccggaagggtcctcgaaccccctttcccgaagtggtatgaccctaacgcgacctgcaagta

SEQ ID NO: 5305 - DNA, 450 bp, Glycine max
agctttacatcagattttagtaatgacccactaacctagaattaaaataacttaatgccattaacctattgaattaaaagaacttaatggttgagtgtaactgaaattgtggcaaccaaaagtctgatgcctgggttgccaattgggcccttattacaacttgaactaaacctaactaaagcctttttagttgattaacccaaaacatatttttggtcagccaactttacaaggattaggccattatttagacaaactgaacactctaaaattgagacaaagtggtgccatttagtcctcctccatttgggccatgatacaactcacaaccttggacttttctccttgaaacttgggcttgtattcaaatagtatggtcaacacttgttgagacgctcgaaattgaacaacggatgcccctcaaaaattaaaatggtcataacctttcac

SEQ ID NO: 5306 - DNA, 283 bp, Glycine max
tgtaggattatggggtacccatcacatgtggtactaggtggcggtcgggcgatggtgcacaacaagttttccacatccacaatgcgcgcataagcccaccatcccctgttgcccacctccatctgagctcacgtactcccacgtagcccatatcctcgtttctctcaacaccgggtccccatcaatcctcccaagcttccacaacatccaagcaaaacagcattcaaaccgcacaagctatcacagccaagcaaaacagagcaaaggcagaaaactctgccaa

SEQ ID NO: 5307 - DNA, 434 bp, Glycine max
gcaagcttctttgtggggaagcataagatcccagtgaacatcctccaatttgctgatgaaactagcgttatggagaagcttctatggataatgtcaaagctgtgaaggccattcttagaagctacgagatggttttaggcttgaaaattaactttgccaaaagccactttggagcaattggacaatctgaagaatggtgttgttctgctgctggctatcttaattgtgccatgctccaattccccttttgctaccttgggttgcctataggcattaatccgagaagaaagatggtatgggagcctatcataaaaaagtttgaggctaggttgaacaagtggaatcaaaggagcatctctatggctggaagaatcacccttatcaatgctgttttaacagcattacccttgttttacttggccttttacagggct

SEQ ID NO: 5308 - DNA, 237 bp, Glycine max
gcctcaccattgtcacgtgtggatgcatcaatcgtctgctgaggctataccagacatcttgcgccacgacttcaagcttaccataacttgcctgcgctccttcttgcctgccgtatgtaacggagtcgttcatacttgcatgttcgacgacttgcatgctatgtcatactatactgtgccactgtgagatagattttacccctgctctctttcacatgatcactcacttgattgcgc

SEQ ID NO: 5309 - DNA, 427 bp, Glycine max
agcttcatcaaatgaaacaaagaaagacttattaagtcacataattctactaaccaccatgatgtggttgtttatcaattctcactcacatcctactcatttccatttctaattttgtaatcagttatcattggtcagctgtcattggaacttccaaaattcagtggtcatacaacattttagtcaggatgacttttgggagtacccctcaccatagtacaatggcaggctctcaccaacatggttatgcctcacatttgtcgggattttcaagttagcattatggaaaacacaaccacaaatgcaccaccacattcccaagaaagaacaagtcagccagcaaacctcagtaccaatctgtgtggtcacccaaaaactctgaggactaattcctcaatgactttccccatggggattcgtcttttat

SEQ ID NO: 5310 - DNA, 284 bp, Glycine max
ttgcaaaagccttgttgattaagggcaagaggtcaaaacaccttccaaaccatgtcaaggacaaggtctctgatccaggtttcaaatccaatgctaattggtcaattgatttggacacataggatttaaacgcaagaagtgaagatgataactcctctggttgaggatgtgtaatggcatggtggcgattctccagcttgaagttgaagtaacgttttgcaagtttctctgtcaaaagtaccattagttattggaagctaactagaacacagcgatgatgatgc

SEQ ID NO: 5311 - DNA, 439 bp, Glycine max
agcttccacaatatccaagcaactcaattccaactatcatgaactaccctaaaccaagaaaatagggcatagcagaaaactctgcccaaaacacattcacatattacagctttccttactcaaatacccttgtaacgttcccttcgttccgattcgttaaccgttggatcgacttgaaaattttactggaggttcctagtacataagtctacattttgaccgttgggattcgctagaaaatgtccagaacccaatatgtactacctttcccataaccagcaatgcacaagcatttttctgcacatttagaaaattctgctgcacaaatttgacagctttttgctgcacaatttggcagatttcgaaatccatcttacccacatccaatttttctcaaattggatcctacaagtcctaaatcatgtataaatcatattta

SEQ ID NO: 5312 - DNA, 284 bp, Glycine max
tgaactccttccatatagggacctagatgagctagtccaactttgtataagagtggagcaacaacttaaaagaaagccttcttcaaaatcttatggctttcactcttatccaaggaaagacaaagcccaaggaattttgggggcttcaccttcaaaacccaaggaagataagggtaagaccataaagaaatccacccctaagactagttcccaagaaaggactagcaacattaaatgcttcaaatgtcttgggagaggtcacattgtctcccaatgccccacaa

SEQ ID NO: 5313 - DNA, 551 bp, Glycine max
  unsure at all n locations
agcttattgttaaacaatcaataaatttagggttaatgaacctattacattatanatgaaggttatggttgaaaacttgacaatgtctcctattgtgggaaagtctttttgaccgttagatataatgattttaaaattaacggaagacttaactatgtctcctatcaacttctcaaaaaaaaatgtctcttatcaatttctcaaaaaaaaaaaaaagtttcctatcatgcttataaaaaaatgtctcctattgggagaaaatcgtttttgaccactagatatgttggttttaaagtcaatggttgacattttttttttccttttattttttcatttttcttaatctttcttaatttacccctttttcctttatgtattcctttttctctttttgctagatttctctcaacatactttttagtaggtaacccaatattactctaaattgaatttactcttaaaaatatattttgagggatccatccaaaaattaaattccctcttagaaaaaccaattgaagaatggaagtggcatttttctaaattttttt

SEQ ID NO: 5314 - DNA, 500 bp, Glycine max
agctttttattgtaatcttgaaattcaggacaacactctgatttctgaaatttttgggatatttatggtcattgaccagtcccttttccatgacttaaccaaattacccagtgacggtgtaccatttgaaagcacactaaatgacgactggaaatttgatttctctgcccatgatgcccgccagttggtttgcaccaacaatgcagatatgaccggacgtcttcttgtcgggtcattggcttttgaaagccgcatccttcactatttaattgtgcgtattctgcttccacggtcttccaaccttgcccaggtttctgaggaagatctaattatcatgtgggcccttcatacagggcgtcaacttgactgggcacacttagtcagatatcccatgcataaggcattgcgaataaatgctccactaccatatcccacacttgtcactctctttttccgccatttcaaaatccctcttgatctgaacccttatgttccaatca

SEQ ID NO: 5315 - DNA, 280 bp, Glycine max
tcggaagaaagtgatgaggtacaagccctaaaggcaaagcttgaaagagcccgggtagtcaaagagaagttcaagtccatagccatcaaagtctgaagagagtatgatgaactaagggacgtcaatatggccaccgatgaagccttggaatgagaaaccaagaaggcccgaaaggaagaacacgaccaaaacaagttttgaggggctttatagggcagcaatagtgagctcaagctccaaagaggtgaaaggaatcatcacgggtcaaaggcatgatctt

SEQ ID NO: 5316 - DNA, 353 bp, Glycine max
agcttcaccggatgatgccgatcgaacatttcctaatcgacatcatccaattgttattcagggattgaatagaataaacaatggccagtgtcggtccttatatggccccgactgatatctttcagccgacattgggcaatttcttttacaaatggtggccgataatgttctttttttacgataaaggaagttttttgttttggtgttgcctaaaaaatttacaacttatgtcggctaggtttttccgtgcgagctcagccgagggttcgttccgacggacactggcatgttgttcttctcatttaagagggcaagaaaacgttggcccatcccgaccaaaacaaaaaaaaaaa

SEQ ID NO: 5317 - DNA, 276 bp, Glycine max
tccatcaagttatgaccatttgaatttctcgagatcttccgtggttcaatttcgggcgtctccatatgtcatgtgcctgaatcggacctccgtaagaaaatttatgaccatttgaacttctctagagcttccgttgtttaatttcgagcttctcgatatctgatgtgcctgaatcggacatccgagtgaaaagttgggacaatttcaatttctccagagcttccgttgttcaattttgagcgtctcgatatgtgatgttcctgaatcggacctccg

SEQ ID NO: 5318 - DNA, 894 bp, Glycine max
  unsure at all n locations
naacacggaaaggaactctacataaccaccagacaagaaanatgaatcatgacgaccgcggaccttagagacgacccgcagcatgcaagccgagcgttatcatgcatgctaaggcaacagagaagccgaactcactcacgaatgaacgccaaggggaaatacaagataaatcccccccacccgaacaaaagtgaacactcggtgaagacacctcgcaccgtaaagaagctgggacgagcccaaacgggaaaaagaattgaaccgcaagaaaacacccgatctgggtgggaacaaaaaaaaacggggccaaaccaaccaccgagagcaagcatctggaataaaaagggcatcagcccacccccacatggaacacacaaggcgcccaaacagaaaaaacccaaccgaaaactaatatcaaaccatcaaaaacccaaagcgcccccacaagaacgatccaagccccgcaaaggcacgggtacttcacaaccaccccatgcgaagcaagaggaacccacatgcagacagaaaccccaacatcacccctaaataagaacaatgcaagccaattccggaaaggacaacgaaaccaaaggggggcaacacacacgggtccggcccaacaaccaaaaaaggggggcaaacagacagccagcgtcaggggggggcccagcaaaaaaaaaccgaccgcaaaggagcaaacccgagagggaaaagggaacaccaacagcgacaggtcgaggataaaaaaaatatccctctaacacaaagacaaatcccgtcataggaaccggcgaaaaaaacacacttgcaaacactcggagggcagaagaaagaaaaacacaacacacccacacactcacccctcccctatcaggggggggggacccaaacacc

SEQ ID NO: 5319 - DNA, 926 bp, Glycine max
  unsure at all n locations
taccctccgaattcgtactctaacttgaatacacnctccccacgtcgcccnttganttgattaccttccaagacctctanaattgacctgacagcccgccagcttcaaaaaaagaggccctccccaattccttattttcataacggaattctctcaatagacccgcgatcttttatggagaaggttacccccccccgcaaacccgaatgcaaatttttattggggccatagatctaaatatctgggaagccatagaaattaggccttatttacccaccccaataaaaaaagtttcaataaatggtcattcctccagtgaaagcataactttaaaaaaaccctcacataaatggtctggaaaagatataaaaccagttcaattccacttaaaagccaaaaacattattacctctgccctgggaatggaataatatttcagggtttccaattgtaagagtgctcagaaaatgtgggacacctcttgattaacccatgaaagaactgcacatgtttaaagatctacgataaatgccctaactcatgagtatgaattattttaaatgaatgcacaaggaaattttcaaacccgccaaagaaaattacccctatagtaaatcattttacaggctcttgccaagaatttcaaaatgaagatcccatatacacaggtgtaaaatttttaattgagaatggccaccccaagttaacggccttacttgaccaaaaaattgtctatatatccctccccacctttctttggaacttggaggaccccaaaatggactcttgagattcctctcacctaagcaaatggcccgcacaaaaaagggtatgccctttaagactcatacctcattccaaaagaaaagtatccggaatgtgactcaaacaagaaaatgtacctctacttatctcaaaaaataccg

SEQ ID NO: 5320 - DNA, 279 bp, Glycine max
tgggtgatgttgcgcgtactgatgggtaccatgaggtgtttgctggggtttgacccacgcgggtgttgaaaagacagcatgggcatctcctttcttcctttttgcccctgttgccccgattcttttggcattcgcgtttgtggaggaaacgtaatccaactttcctcttttcaatccaacctcgattcttttcccagcaaacaccagatccgcaaagctggacggcatgtaacccactagcttctcatagtagaacactggcagagtgtctaccatcat

SEQ ID NO: 5321 - DNA, 517 bp, Glycine max
agcttcttcttgtttcttcccccattttaaaacaacatttttcttaattacctcattcaaaggtgcttgcaaggtactaaaattcttcacaaatcgtctatgaaaacttttcacctcagtcacacttctaggtgcaggccactcttggatagccttgaccttttctttatcaacttgaacccctttggaacttactacaaaaccaagaaacacaacatggtctttgcaaaaaaatacatttttcaaggttagcatacaattgttccttcctaagcacacacaacaccgattttaagtgtgcaacatgcaaatcaagggttgtgctataaacaaggatatcatcaaagttcaccaccacaaatttaccaatgaattctctcaagacatggttcattaatctcatgaaaatgcttggagcattagtcaaactgaaaagcataaccaaccattcatataatccatatttagttttgaaagcgggttttcatttctctccttctttaatccttatttgatt

SEQ ID NO: 5322 - DNA, 286 bp, Glycine max
tcccagctatggagagctaaatcctcagttggttcttcctatggggtacttgatgtaaatactttcatatctatttaatgatgtttcatgtgttcactgtgttatcagtacttaattctaatgtgcctttgccttgatcacataactgcaaccgtagttagggtcactcaacattgggaaatggtttgatccttaaaacctgataggacagagctagcttatcgtattttcatgagacatcagggtacgataacctagtgtttgatatgttatgtcttaatgcggt

SEQ ID NO: 5323 - DNA, 461 bp, Glycine max
gcttaaggactatgattattcaacatcacagaggtttgtgactactggtggtgatttcggcaacccctgttcgcaaaccgtggcgaattggtctccccattgagaagtatgaggatgcttacaagttggtctactgtccaagtgtgtgcaacgattgcagttatccatgcggtgatattggaatataccaagatgaatatggcaagcgtcttgctctaagttctgaaccatacaaagtgaagttccagcgggcttaattattgaattgataacaaaactaattaaagaataatgaataagtgtaatgaactactttatgcttttgctgcatatatggtaattctcatgttgagttccttgccacggacttgataataaataaacaagttactttctatttttagtctttccaaaatttcttgtttctgttcgtctttgtcattgtttgcatttgggatgca

SEQ ID NO: 5324 - DNA, 291 bp, Glycine max
tttattggattctacatttcaagagaaaaaaacagctgaaactcttgtgagtaaagggtctccaaagaaaaccaaaaacaactgaacaagcaacaattgcagaaacacaaaggaatatttgcattcattcatcatcatttcatctctaattcctcgttccaacaaatcatgaaacaacgtgtctctgttagcatcttcagaaacttggcaatgttccataaatggataagataactcgaaaataaaagctcaaaactttctgaaacaaatgagaaaaatggtccattgatt

SEQ ID NO: 5325 - DNA, 326 bp, Glycine max
agcttgtttcagaggcgtggagtttactatcagataaggtcaaaagactagcatataaccagaacaggagattggaaggatttcacgataatgctcccaacaagaatggttatataaaacttaacaagaatgcaacttccagcatgagaacaggaaataatgatgctcgggcacatccacatccgcatacaccctccattcctcctccacatacaaatgctggtaccttttggactatctgtaataagtgcaagacacattatgaatatctcaggacatatttgaatcaaacccttttatgtcccaattgtaaacaagcttttgtg

SEQ ID NO: 5326 - DNA, 271 bp, Glycine max
tggacaatggtagggcaatcttgcaaaaatcctagatgaatttcctataaaaacctacatgtccaagaaaagaacgtacttcctgcatggaagcggggtaaggaagagaagtaataacatatatcttggccttattgacctcaatacttctactagagaccaaatgccctaagactataccttcatggatcataaaatgacatttttcaaagttaagaacaagattagtctcaatgcatcggtcaagaactctagagaggctatccaaaca

SEQ ID NO: 5327 - DNA, 387 bp, Glycine max
agcttgagatgaggaagtgtagaagggtgaaacttcctgcttttattcgttgaccacagagtggtacctggagatatgtcgcgggggtcaagagaccttggggacgtcaggtggggtgctattgcccaaaaccaagcttgaccaatcccgacccaacccgggcatagtcagtcagtgagaacctgtgatgtacctaagcaggcgagctcctggcagtcaacagataaaaggaacaaagaccacaaagtaaggaggcttgtgtggtggctggctagctgtgaatattgtgtgatatatgggttatggcctctggtaatcgattaacaagggtgggtaatcgattacaaagcttaaaaatgaaaacaggaggctaagatggtctctggt

SEQ ID NO: 5328 - DNA, 283 bp, Glycine max
tcaggctgctcaattgctccaggttgctgcatggaagggcaaaggtctgtatggtggtcagcagaggagcccaaaccacaaacccttgcgacaggtacagatttctgattcaaggccagctgggttaccaagttgatcaacgcatccagtttgccttcaagcttcttagtttcagatgatgcaaatgggtttgtagctacctgtcgcaacctacccttcagcgggagggcgacgcgtgactcgcgggatgcgtgttccacgaaaggaatactcgcggagtcgc

SEQ ID NO: 5329 - DNA, 716 bp, Glycine max
  unsure at all n locations
agctntgatgcaacatttggagaggttaatgaaacaacgagatgatgcgctccatgagaggttggatcaaatggagaatagagatcatcctgaagaagaaaggaggaaaagaaggaatgatggtgttcctaaacaaaaccgaattgatggtattaaactcaacattcctccatttaaaggaaagaatgatccggaagcctacttggagtgggagatgaaaatagagcatgttttctcatgcaacaactatgaggaggaccaaaaggtgaagcttgccgccacggagttttccgactatgctcttgtgtggtggaagtgattatgcaagttgaagtggacgtttccattgggaaatacaatgataaggtactttgtgatgttgttcctatggaggccagtcacttacttttggggagaccatggcaatttgataaaagagcccatcatgacggttacaccaaccagatctctttcattactttggtgttgcataaaaaatgtacacatgtagtcggctaggttttttgtcccaaccttacccactttttgtttctagccaaattggcttgttccattattttgcccggaaaaatttaccccctttgcaaaaaaatattgctttcaacttatgccttttttttagggatgaactgaacctttttcccgcattgtcggtaaataccccaattaatctttcgcccccttgccaatttttt

SEQ ID NO: 5330 - DNA, 280 bp, Glycine max
tcaaaaaatttgaatggtcataacttttcacacgaatgttccattttgggacataagatatcaagacgcttcaaattgaacaaccgaaactcctgaaaaattccaatggtcataacatttcacacgaatgttccattgggggacataacttatgtatacgctcgaaattgaacaaccttagttctccagaaattcgtaatgtcataacattttactccgatgttccattcgtgggcctattatatggagacgctcgaaattgaacagcgtgatgttaatt

SEQ ID NO: 5331 - DNA, 444 bp, Glycine max
agcttataatatatcgataggctcgaaattaaacatcggaaactctcgcgaaattcaaatgggcataaattttcacacggatgtccgacccgggcgcataatatgtcaagagtctcgaaattgaacaacggaagctcttgagaaattcaaatggttataaaatttcacacggatgaccgattcaggcaaatcacatatcgagacgatcagaattgaacaacggaagctcttgagaaattcaaatggtcataacatttatctcgaatgtccaatttaggcgcatcacatatagtgatattcgaaattgaacaacagaagctctcgagaaattcaaatggtcataacttttcacactgaagtccgattcacggttataatatatcgatacgctcgaaattaaacatcggaaactctcgagaaattcaaatggtcatgaacttttca

SEQ ID NO: 5332 - DNA, 286 bp, Glycine max
tggccgtataggaatggcagtcacagcatgggtatatgcctctatctcaccctcttcatttgccccagttttgtcaatcgtcctactaggatgatcaaatttgcctcttttcggatccacttggatctttttgctagcgaagaccaaatctgtaaaacttgaaggtgcgcagcccaccatcttttcatagtatagtaccgattatgtgtctaccatcacgagtatcgactccctttccattattgggggtaccacctgtgccgccagatccctccaccttttgggg

SEQ ID NO: 5333 - DNA, 608 bp, Glycine max
agcttggttcgaggtacttacccgttgaagatcgaagaacgatgaagaacgactgaagaacgtcgaagaacggttgaaacctttgcgaaattcctcacggaaaacgttacggaaacgtttcggaagcgcctcggcttaaattttcttcacggaaacgatttttccaagcaaattcgaaagagagagaagtgccaaaggggctgaacccttttcttcttcacttcctcccctatttatagcaaaataggggaggtgcttgccgcccagctcgcccaggcgagccaagttgcttcctccagaagcaacagccttctggaggaatattctggagggcccaagtgggcctgggtgctatttgcacccccatttttactaagtacacccccctctgcttttttttggtgattctttttttgtaaagttacggaaacttaccaatttcgtaacgacacttgttttctttccggaatggtaccgaaccctgcggattacataatcattcccctttttgacttacggaaggtacgggaccttccttaattatgccacgaagcttccatttgatttccggggggcaccgaaattaccggttggggcataatattttt

SEQ ID NO: 5334 - DNA, 286 bp, Glycine max
tgacatgaggaagcgtggaagggtgagacttccttcttttattgttgaccacagagtggtacctgaagatatgtctcgggggtcaagaaaccttggggacgtcaagtggggtgctattgcccaaaaccaagcttgaccagtccctacccaacccgggcatattcactcagtgagaacctgtgatgtacctaaacaagcgagctcctggcagtctacagattaaaaaactaagaccacaaagcaagggggcttgtatggtggctggccaactgtgaatcttgtgtga

SEQ ID NO: 5335 - DNA, 376 bp, Glycine max
agcttcaggctgttcaattgcttcagattgttgcacaaaagggcaaaggtctgtgtggtggtcgacagaggagcataaaccacagagtctggcgacaggtgtagattttttattcatggccagttggattaccacgttaaccaaggcatctagtttaccttcaagcttcttagtctcgcctgatgaagatgaatttgtggctacttcatgcactcatctaattgcaataacatcacttctggcactaaattgctgggagttggaagccatcttctcaattaaatttttggcttcagcaggggtcatgtctccaaaggctccaccactggcaacatctatcatacttctctccatgttgctcagtccttcataaaaa

SEQ ID NO: 5336 - DNA, 279 bp, Glycine max
tgtctcagcgtttatgcgagacagagaccaacatgttagctatcgtcgccaagtaccaagaagagttaggtctagccacggcccacgagcatagaatcgcggatgagtatgcccaagtgtatgcggaaaaagaggctagaggaagggtgatcgactctttacaccaagaggcaaccatgtggatggatcggtttgctcttaccttgaacgggaggcaagaacttccccgattgttagccaaggccaaggcgatggcagacacctactccgcccccgaag

SEQ ID NO: 5337 - DNA, 856 bp, Glycine max
tttgaattgatatccatctcgaccccgggatccttatagtcgaccctgcagcattcaagcttcttgtggtaccgctcttggggctcaaaaatacccaaaacaaaatcctcttattactatctattttgaattctttacctcccgaacggacaacctttaaattggtgcttgttcccctctttgagaatgaggaggatcttcataggacttcatccaattgatgtttttcgcccagtttatatatccaccccccctttttttttgtgactaacaatgtacatgttgtctaacgcaacatctatgatgatgacctcaaggtgatggttttctcacaccgtgtatccagtttagtttttttgtggtggacgatgatcctctattattaccgcgacggttccctatgcggtgccccttgaacagttacgcatttatgtctattctatggaggctattatactctattatactgaaactatgtacttatttacaaaagccattcttaccggttcgacccactgatcgatttatagatctgtatggtcacttaaaagttgctaagttcggtttgtatggatctacagtggccaattatagatatgatctaatgccataaagagtggatctatgttttgcaaacattgaaacgtatacttactagactacgattcctaatttccctacatactgcttccatcccactcgccttgtgtatctattgcaactctacagttttcattccattcgatctgttcattttatctgaactgactcggtacggttcgatgccactctacaggttatacctagatactagacactaaacgttcgagctaaaattacttaccatcaatatacc

SEQ ID NO: 5338 - DNA, 280 bp, Glycine max
tgtaggattatggggtacccatcacatgtggtactaagtggcggacgggcgatggtgcacaacaagttttccacatccacaaagcgcgcataaacccaccatcccctgttgcccacctccatctgagctcacgtactcccacgtagcccatatcctcgtttctctcaacaccgggtccccatcaatcctctcaagctttcacaacatccaagcaaaacaacattcaaaccgcacaagctatcacagcccagcaaaacagagcaaaggcagaaaactctgc

SEQ ID NO: 5339 - DNA, 417 bp, Glycine max
agcttggttatctccttcttcactacatcaataatcaccgggttgagtcttctctgttgctggcttactggtttagctccatcctctccatttattcgatgcatacatgtggatgggctaataccacgaatgtccgccagggtccagcctatagccttcttatgcttcttgagaactaacaacaacttctcctcttgctcatcagcaagggaggcagatataatcactggaaaactcttgctatcatccaagtaagcgtattttaaattttatggcagaggcttcaattctggtgtggtcaactggacagtggtagaaagagatggtttcttagcctttacctcataaagaaaagcagatgtatgtgtactttttgaaactggttagtcctatctgactctataaaatcaatctcaa

SEQ ID NO: 5340 - DNA, 280 bp, Glycine max
tgtctcagcgtttatgcgagacggagaccaacatgctagctatcatcgccaagtaccaagtagagttaggtctagccacggcccacgagcataagatcgcggacgagtatgcccaagtatacacggaaaaagaggctataagaaaggtgatcgactctttacaccaagaggcaaccatgtggatggatcggtttgcccttaccttgaacgggagtcaagaacttccccgattgttagccaaggcccaggcgatggcggacacctactccgcccccgaaaa

SEQ ID NO: 5341 - DNA, 490 bp, Glycine max
atatagggggagtaaacgcacatttttatctatatacaattgtttggtgcttgcttgaatcttgatttcaggtattgtattgtcatcatcaaaaagggggagattgtagatgcaattgcttttgatgttttgatgatgatcatgatgatatgatgcaattgatgaaaatgggcttttcaagattaaattcaagacaatacttcaagattacaagtcacaacatcaagatgatcactagtatattaggaagggaattcctaattgaattagcaaaaggtttggccaagtaatttaaattaaaaaatgttttacaaaggttttactctcttgtaatcgattaccagaagatgtaatcgattaccagtggccaaatatattttataacagctactaacatttgaattcggaaatttagactgtgtaatcgattacacaattttggtaatcgattaccagtacgtagtaaacgttttaatttaaattttaaaag

SEQ ID NO: 5342 - DNA, 572 bp, Glycine max
  unsure at all n locations
gtgaaattaaacggatctttgttggtggagtattaatttttaaaagattaaattctaattttgatctctagttttataaatctacaattttggtcttctatattttaattgatacatttgattccctggattcttaaacttgtgattttggttgtttagttatctggcatccattgacggttgaccagaaattgcttgactaaagagtttaaaatatattaaacagatttaggcggttttcaactgccggaaattgcttctcaccctttccccgctaagacaaatcagatcctaatcttcaatggcacagacaaaaccaaatccaccaatgaaccaattttttccgacactagcaacataattaactcaaaatttgtaagcctctgcgctgccgttagtaaatttatatgattttaaatcaattntatttnaaatatcaaattcaaataaagtattaaaataaaaaaatatttaaacttattttaatttatagaaactaatatgtaataataacgcgtcttttaattttttatatattatccaatcacaaacattataaagttattaatttt

SEQ ID NO: 5343 - DNA, 462 bp, Glycine max
agcttgctaacccatggaagcttgataacccattcttctttccttaagacatgatgcataagcctcataaaggtgcttggtgcattaatgagcccaaaaagcatcactagccattcatacaaaccaaacttggtcttgaaagcggttttccactcatcaccctttttcatcctgatttggtgataaccacttttaagatcaatttttgaaaaggtattggcaccatgcaactcatcaagaaaatcatcaagtctaggaatggggtgcctatactttacagtgatgttgttgatggccctgcaatctgtacacattctccatgtaccatcctttttgggcaccaacaacactggcacaacacatgggcttaggctctcttggacccaacccttctccaacaattctttaacctgagactctatctctttagtctcccgagggttagtcctattggctggccta

SEQ ID NO: 5344 - DNA, 373 bp, Glycine max
aatcagagcacaagagcttcaagtaggtgctccttaaacctccattaattttttttctttaccttctcttccattgttggttcttcatttttctccatgtatctcctcacatgtcttgttctaaatgttgttaacatgattctttaaagtttccacctattaaacttgctatagaagctagatttgattttctatggctcaaatttcttgttcttgttcttgaaccatgaattgtgatgagtttaagttcctttgagttttgccttgctattttttttgtggctgaaacctaaaccatataattcttacaaaaatattaaagtagaagaaaacctcaaaaatctatagagacttgttcacctattgtagtttt

SEQ ID NO: 5345 - DNA, 536 bp, Glycine max
  unsure at all n locations
agcttgcctgtccgatgtagcagtaatgatggcccgagttatgttggggaacggttacgaacccggaatgggtttaagcaaagacaacggcggcataactagcctgataaatgccaaaggaaatcgtgggaagtagggtttaggctataagcccactcaggcggatatgaagagaagcaccgcgggaaggaaaagcagtggccaaagctcgcagttgagacaagaaagtgaaggaagcccgccctgccacataagcagaagctttataagcgcaggtttgggagacgaaggtcaagtggtcgcgatatacgaagatgatgttccgagtacattggatttggtacgaccatgccctcctgatttccagctgggaaattggcgagtggangaacgccccancatttacgcaacgagcataatgtaaacctttacggttttaaaagctctatagttgggcctacgctttagaagttttccttttgttaaggctttgtgtcttttgtttttgaattataatacaaggatctttcttcatc

SEQ ID NO: 5346 - DNA, 463 bp, Glycine max
tcagaccaaagcaactcaaaatctaggcatctaaaacccctcaatttagtggattttcaaggtttgagaagtgaaaatgagaatggggtaaatttagagtaaactctcacctcacacaagtctataacatcaatctaaactttctcaaactgattttacgcctcaaattcccccgaatcaaaatttgactcctcaacacccaattttaccctaggaatggctcttgccttcactttggtcatttgtttttctctcttgcacagtccaagctttctcataagtcctaaatgacatttcaaactaggatttactcactttaacctccatttaccactgaatcccgttttagccttccaactctcaaagcctcactctttttctactcataacactacattctcactttctaaccctaggttaactctacccttcatccctagcaatattccatcagcaatttcag

SEQ ID NO: 5347 - DNA, 574 bp, Glycine max
  unsure at all n locations
agcttattactatgccaaggaggaaaagcttcttgtctatgattatctctccaatggaagcttgcatgctcttcttcacggttagttaattaatcactcttcttaattactctcttaggtaccttttgacagaggaaaaagaaatggaattgagaacaaatatttaaattaaaatggtatatgaaagtatgaaactctaccgaattttangaaatttctactcatttctctttctttcctcacaaatcaaacggacccttagtccgtgtttagattcatgttaaatgatttaaaattattatgttaaactaccaacttacgttaaacgtttatttggatatgtatgttgaaacaaacattctgcattctgtgttttgaaacaaaaattgtgcatttggacacaagaataaataagtgacttttgcattgaatagaanaacaaacattggattntgcttaccttttttttttattattaatcgaacctaacatatatttaaaggattttgcgtaccctaaaatcactcttaanacctaaataaagtcattcaaaatcaactctgatgttgaaaca

SEQ ID NO: 5348 - DNA, 464 bp, Glycine max
aaggcgaaaatgcacttgcacgtcaacccaacctgaccggagctatgtagttggaagaaatcaatggtggagtctgcacaaatggagacgaagaggaagacctaatgacagagcatacaccaatgaagtacaagaacgggtgggactccctcgtggagtagcatgctgaggaagagaaaagatataatatgaagtgggtagtttgagaatgtttaaaaattgagaggtgtatgattcacatgttttgcccagggttttattcaggtttctactttatgacatctccccattatattacaagtcattgctttctacacatctcatgttgttttctacagtttgatcttcttgtctaatgtccattatgaaatgtgaagttacattttggaatgcactctcttttttcttccaatttggaaagtaatatacattccgaaaagagtgcacgaagcaaaatgggagtg

SEQ ID NO: 5349 - DNA, 551 bp, Glycine max
  unsure at all n locations
agcttcacaatatgatatttactngttgacgcatatacatcgtatttttctttgattggcaggaagacacttaatgagcttggagctattgtctccacggtgcatccaaagatgaaattccccaccctgagggggagattatgactatcaaggtagatgaaaagcaagcacaatagtgctacgcacaaagcctaaagatggcaccttatcctcccaccagggagcttgctaagcctcaccccacaatggttgaaggtactccaagtcatgagcatgaaggaaagacctctaatctgagccctaaccatataccaagccatcttagatgatgaattcgatatagatccatgcaacaacacttctaacaaaggcccaaagcccattgaagagctcgtcaagctgcagttgggactcaaacccgggcaatgtacatagctcaagccatgagcacagatgcatcgctgataccctacatcagaatgtggacctattcgcttggcagccatttggtatgtcgggaatccacccccacatcatctgccacaagctca

SEQ ID NO: 5350 - DNA, 552 bp, Glycine max
tcatgatgatgattcaagtatgaatcaagtagttttgatgatgaaaaaaagcccaaaagaatgatttcaagattcagtcaacaagttcaagatcaagattaatttcatgtttcatgagaagaaatcaagaagattcaagtttcaagagaagtttgatttcaagattcaagagaaggtgaattcaagattcaagagaagaaatcaagaagacttcacaagggaagtattgaaaagatgtttcaagaaacaaacatagcacaattttgtttttcaaaagagtttttctcaaaattttctaagttaccagagtgtttactctctggtaatcgattaccagtttcctgtaattgattaccagtgacaaagtttgatttgaaaagcttttaactgaatttgcaacgttccaattgatttttaaatggtgtgatcgattacaatatattggtaatcaattaccagtgtatcattgaaattcaaattatattgtgaagagtcacatcttttcataaaatgctttgtgtaatcgattacatggttatggtaatcgattat

SEQ ID NO: 5351 - DNA, 365 bp, Glycine max
gtatgggttggatgttgaattccacgtgatcctggtgccgaaatgatgggacagcgggtgaaccaaacgcggaaggtttttttggtgaggtagccatggaaaagcagagcgtttggaatgatttcgtaaatctcacaatgctattgggaaatgctggtaaaaacacgaatgccaagcagatataaatttgaatgaagaatgtataggggcgtgtgaggcaacggtcgaattcgttttggcttaatattgaacgtgctattaatgttaagtgattcgtttgggcacgttcagattgctgtagctgctataattcctctagcaaacaaatgcccagcttgcccctcagtttttcaaactgatttgca

SEQ ID NO: 5352 - DNA, 447 bp, Glycine max
  unsure at all n locations
ntgcggatatggtcttcgccggcgaaatgatcgaagtgggtctaaaaagaggaaaatctgatcatcttgctttgataaatgcaaaaaaaaaaaaaaaaaaaaactggggcaagtgaagaggatgataaggagggagaaacctatgctgtgactgccattcttatacgaccaagtttcccaccaacccaacaatgtcattactcagccaataacaacccttgtcattacccaccacccagtcatccacaaaggccatccctaaaatcaaccacaaagcctacctaccgcacttccaatgacaaacaccacctttagcataaaccaaaacaccaaccaagaaatgaattttgcagcgagaaagccagtagaattcaccccaattccagtgtcctatgctgacttgctcccatatctacttgataattcaatggtagccataaccctaac

SEQ ID NO: 5353 - DNA, 501 bp, Glycine max
agcttctagtatacgatttatctgaagaaattcattttctatcgcacaacttccaccaccaccaagagcagctaagtactgcaatgcaattttagctgtttctgttttcccagatccactctcgccactgcgaacaaatttctaacaatgattattaacaagcacaccagtgaatgtatcttattactactatgaaaatccaatgatattggtttaggaacatatattaagtgtcatgcacaaaatgtagcccataaatgcagtaaggagctgaccttatgataatggactgatttacttcatctgtaagatacaaaaagaaaaagaaaacctttataaatgtctcattcaagtagaatgcaaagattgcaaagaagggaagagaaagggagaatttcattcacctcttatcaccttgttataaagccgatctgccacagcataaacatgaggactatcaataattctctgcctataagctgagacagaatcatttccata

SEQ ID NO: 5354 - DNA, 496 bp, Glycine max
  unsure at all n locations
tgcataactttgaatggggtattggtagagtttatacgtgtaaagccatttaatgccataactaaggaataaattttttagagtataataatgattacaattactattgtagttgtggttgtaacttatgagtaatcaaccatttcagcatgatgtctctgtttttcaaatgccttgattgggaattggttgaggattgactttggcataattggttgtttgtgtgaggagtgattttaaggaaatagtactttctagcaacaatggaagcatcacctttttattangtgcttgataagttgatttttgaaagttctaattgtgctaaacatttgtgatatctagtaatccctttagacattcatggtggtcagttggtattggacatatcagatgtattcattctacagacttgttttatttgcttgattttgtgaaagtgcccatataggtaaaaaatgctataatgtttcaacaggcactataattgacagta

SEQ ID NO: 5355 - DNA, 406 bp, Glycine max
agcttggagtgagagaaaagagaaagcttggctgagaatgcgtaaaaacagagaaaagaggcgcataatatagcaagggagtaaaaaccttagattttaggtggattctaggtttttgagtgatttttaagatcctagaggtggaggagacatccccactactttgtatctgtcaattgctctcaaatccctcttcctgattgtaaaaagcgcttccttgtgatggaaagctaaacccatatgttgaggaattctgctgagtatttgatgtaaactcttatcctatctatttaaagttgttttatgtgttcattgtttctatttgtgctttattatcgcatgcttgtggcttgatcactcatttgtatgtgctgctaggagctttagcattggaaaatgtactgca

SEQ ID NO: 5356 - DNA, 435 bp, Glycine max
tgcttctacaattgacatatactttgacaatgttgggggagacatacttgaggcagcccttcttaacatgagaaggcatggacgaattgcagtggccagaatgatctcacagtaagatcttgatgagcctcaaggcataaagaacttagtgaatatcatatacaagcagatcaaagtagaagccttcacagtttatgattactatcacctctatcctaaattcttggatactgttttgccttacattagggaagggaagataacatatgttgaagacataactgagggtcttgagaacggtccaattgcactagaagcaatgttccaaggtcgtagtgctggtaaacaagtcattatacttgctcgtgaataatttagtacaaccttactgtttgatctttcaattcattttgggtgtgttgtaactctcatttg

SEQ ID NO: 5357 - DNA, 332 bp, Glycine max
agcttagctacacacacacccctctaataactaagctcacctccttgagaagcttccttgagaagattcctaaagaatcaagagcttagctacacaccccctataatagctaagctcacccccatgaaaaaatacatgaaaatacaaaaaatttcctactacaaagactactcaaaatgcctcgaaatacaaggctaaaaccctataatactataatggccaaaagacaaggcccaaccggaggaaaaaccttttttaatattaacaaagataagcgggctcatacttagcccatgggctcgaaatcgaccctgaggctcatgagaacccta

SEQ ID NO: 5358 - DNA, 369 bp, Glycine max
  unsure at all n locations
tgtttgaaggatagattctcattatacaaagcttgcatgaactagctcagcaaaggccaattatgagcgtagagcagttcattgagaaggttgcctggcctgnggctcgaccttcttttatggggcataatgaaagttttacagcccagacacctcaacagcatgagccacaaccagaaaatgatcactcatctgaagccatcatctctggagctgttgattgtaaaaaaagaagattagagacgagatccaatgaggctgctcatcatgaaccaatgccagcgtcagttgatgcaccatttccaggagtggattcatctccacctcagcatgtagtagactcttccattcctgtcttagagatacatg

SEQ ID NO: 5359 - DNA, 391 bp, Glycine max
agctttcactcggaggtccgattcaggcgcataatatatcgagacgctcgaaattgaacaatggaagctcttgagcaattcaaatggtcataacttttcactctgaggtcggattcaggcgcattgtatattgagaagctcgaaattgaacaatggaacctcttgagcaatttaaatggtcataacttttcactaggaggtccgattcaggcgcataatatatcgagacgctcgaaattgaacaatggaacctcttgagcaatttaaatggtcataacttttcactcggaggtccgatccaggcgcataatatatcgagacactcgaaattgacaatggaagctcttgacaattcaaatgtcataacttttcactctgaggtccgatttag

SEQ ID NO: 5360 - DNA, 470 bp, Glycine max
ctgatggtgtcgagaagaaatcacatgtttggcatcatcaaaaagggggagaatgtgaatgtatgtatacatgattttgatgatgccaaagaaaaatcaaacaaggttgcttcaaatgataagcatttgcttcaagaataattcaagagtgcttcaacaaacaaagccttgtttcaagattcactaaagaccaagccttgccttaaaacaaagtgctttcaagacatgcaaagctctggtaatcaattaccacgaagtgtaatcgattaccacaagacatggttgagaaatagctgttgaaaaaggttttgaatttgaattttcaacatgtaatcgattaccatatgtctgtaatcgattaccagcaacgaaactttggaaattcaaattccaaagtcataacccttcaaattataactgtgtaatcgattacacaaacattgtaattgattaccagtggaaagttttca

SEQ ID NO: 5361 - DNA, 513 bp, Glycine max
agcttgtgctaaaggaagtaagacatgtgtttgagatgcgtttaaaccttacctcaacatgaaagctagatgaagatgggatgataaaccagttcgatacagatagatggaagcttactagaggaagcatggttgttgcttaaggtaagaaggaaggctcattatacatcatgcagggaaagatatgcaaagggaagacaaatgttgctcaagatgcaaccaaagaattgtggcacaagatattgggtcacttgagtgagaaaggtttgaagtttctagcaaatgatcactttccaaacataaagaggcaaccacttgaatccttgaagattgtcttgcaggtaaataatgcagagtgtctttccaaagattgaatgaactagaaggagaaagcaaatccttgatcttgtccacttagatatttgctcaatgtctaaaaagtcccttggtggtgcccaataccttggtaccttctttaatgattactccaacaagctgtgggtggattcgttg

SEQ ID NO: 5362 - DNA, 389 bp, Glycine max
tcaacatcagaccacttccagggtgctggaactacttcacatggatttgatggggcctatgcaagttgaaagccttggaggaaagaggtatgcctatgttgttgtggatgatttctccagatttacctgggtaaactttatcagagagaaatcagaaacctttgaagtattcaaagagttgagtctaagacttcaaagagagaaagactgtgtcatcaagagaatcaggagtgaccatggcagagaatttgaaaacagcaggttcactgaattctgcacatctgaaggcatcactcatgagttctctgcagccattacaccacaacagaatgggatagttgagaggaaaaacaggaccttgcaagaggctgctcgggtcatgcttcatg

SEQ ID NO: 5363 - DNA, 533 bp, Glycine max
aacccgctgagtttttttgtttcacccaaactctatgaggagggccagaaactactgtgtaagattttctttttttccttgttagtgttcttgatttgtgaatctcacttaaattttgagcttaatatgtggcatgcattgtgaatcacatttttaatctttatcagctaagttgagttgtttatgtatgttgtaaggcctttcaaggagaaacgaagcaatgagcttaaattctaatagctcaaaatcacatataattttcacatttgtcattgagtctttgtgtaaggtactgtcaaattttgtaattctacctaacattaccagcagttgtgtatggaaattgttgttttcctaagattcaagccacggttatattttctctgttagttctattgctaaacatgatttttttaaactgatgttgcacggaacccacaaagggtttcaatatctcaaacactagcagaatcacccttattgatcctgctggattggataacgatgaaattgatgatggagagccaatgtct

SEQ ID NO: 5364 - DNA, 525 bp, Glycine max
  unsure at all n locations
tgtggtggtcattctctacgccattttcatcgctgccgcatgtaaaatgacggtcaaggctcttaagacagcaatgtaaagatgtagggtatgataatagcaaggcaaattgaaatagaatatgtatattgttatttcattgatcctttgcatgatatatataatacatgtacaagaatgttctataccaattctaaggcatgacagacgtgatccataatcagtggcatctgatttattctatgcattataaggtaaataaatatagaatcaaggtaacatangaaagtaaatatatacacagcatatttgcaatcatgtagaagatatttcctaatactccccctcaagttggtgagtgaatatcgtgaagtcccaacttgttgcgcaatgtcacaaattgatctttttccaaagcttttgtaaacacatctgctagctagaattttgttggcacataagaaaagattgatcatcccagcttgtagttttttcccgactatatgacaatcatttccatatgtt

SEQ ID NO: 5365 - DNA, 584 bp, Glycine max
agcttgaggggctacaaaatcgtgcctcaccgtgaactccttcattttgaatgaggcgatgaagttttgggtgaagaaaactcaccctccccctcttttaacctatctcgtgcagagggtgctcgcccaggcgagctagctatgcatttcttttttgcaagacttctctgaaaaattttaactattctacgggcttgcgcttgtttattttaaatcccaagattaagaataaactagacatattcaactatgactttagacaaatggacaaacaagcagaaacttaaaagatactaggcagcctcctagtagtgcttctttaacatcttgagccggacgcaggataatgatttattgatcatgggcctagcatctgctcgtacccgtccctaagtcttctaaaaacaggaaatggaaccacgcagtaaaacatgactacgctaccacttaccttggtttatcttttccttgaattccgcgttgtattgaccatcattcgaaacaaatcttctcttgtcgttcgatgcataggatgataaatatgcatatgcatgcatgctcatgatcaggcagttcaagtgtaa

SEQ ID NO: 5366 - DNA, 553 bp, Glycine max
  unsure at all n locations
aaataatttttttaatttccatgatatagggtgttttgccttttcttctttatcttttttattttcatttttgtctccctaaaaaaataatttgattctaatcttgttattagttttgttcgtgaaatctaatagaaaaaattacaaggaccacaatagaaataaaaaaaattataagaacaaaaaattaagtgaagaaccaaaatgaaaaaaccttatatatatatatatatatatatatatatatatatatattaagaataacaacctaaacaactattttgggtaaaaaaaattatgtttaaattgtgaatcttgaggcaaaaaaattaatcaattcattttttttttggaaattttagattntgaatagagaagatataaaaatatatatatttacttaattgttaaataacaagatataattaacttaataaaaagtttgagacttaattgcaattttagtcccttaaatattgagattatacaaattatggctccttaagtttcaattatgcgaattaaancttctaactttatttttatttacaat

SEQ ID NO: 5367 - DNA, 478 bp, Glycine max
agcttcttttggaccttgaacagacaactaactcctctttcaaaaccatgctatgtgctcgcgactggtccctctcttcccttcgcagcttgagttcattgttgctaccccacagagctccgcgaaatttgttccggccatactcttccttgcaagctctcttggcctcttgttcaagggctctcgcggtagttgcattctcttcccgtaatccggcacactccttccggatgtgtgtagcggccaacttgaacttctccttggcaagtttcgcctttcctaactcgcttttgagagcttggacttcttcgtcctcttccggtgcttcaaaactctcttcgctgacgacttttaacttggcgagccaatctaaacctcgtacatgaactttcagccattcatggtaaccaccaatgatgccattacgaatgcccctaagttcttgatctttccttaacggggtttcccatgccttatg

SEQ ID NO: 5368 - DNA, 476 bp, Glycine max
  unsure at all n locations
aagttgatgctaagaccctcaatgcattcttggagaccccggtggttctggagccagggaagcgatactcagcctactctaggttctgccgcatgcacccaaaccttcaagagctcgccgccagaatatgtatcccaaggcacagttttgttctgaatgctgaaagagcgcccttgaagctcctaaggaaggatctcactacattggcgcagacctggagcatcttgtnctactccaacctcgcccccacctctcatacgtctgctcttaatatggacagggcgaggttagtgtatggattggtgatgaagatggacatgaacttgggctccatcatctcaggccagatttctcagatgacccattccaactcctccaggcttgacttccctgcactgattaccgccttatgcatcgacagaggagtagtcccagattcattgactttcgagtccctgagccctactattaatttg

SEQ ID NO: 5369 - DNA, 550 bp, Glycine max
  unsure at all n locations
agcttatatcaaaaaattgaggccaaaaaggttattgaatgaaaaacatcaactaattagacagcaaaggctacattaccaaaactgggagcagcaggacaaacaattgtagaagcaaagcttcatgatgaatcaagattgattcaaagatgttttgataataacaaagatgatgacaaaggtgatgacaaaaagctcaaaggtcaatcaaagaataagttcaagatgttcaagatagaatcaagaacacttcaagattcaagaggaaagttgaagaacacttcaagattcaaggatcaagcttccaagaatcaagactcaagattcaagaatcaagagaagacttaatcaagataagtatgaaaaggttttttcaaaaactgagtagcacatggatatttctcacaacatgtntaccaaagattttttactctctggtaatcgattaccagtagcaaaatggatttgaaaaagttttcaactgaatttaaaacgttccaattgatttcaaaaactgtaatcgattacaatattttggtaatcgattact

SEQ ID NO: 5370 - DNA, 624 bp, Glycine max
  unsure at all n locations
tggtgtagagcttgagttatggagccaaaaaagacaatgatttatacttgtaacttgttagaattagtggaacttagtggttggtcaagaattagacatagtcttggttgttgagacgaaccaatatatatttcttatgtcttattctttcttctattatttgaactgacttanggtttaaatttgatctttgcttttgaaaaactttggttgttttatgaagatttgaaactatcgtttaatgtgtcctacgaaaatttgatatctggtttcttatattttacttcatcagatgatatctttgttgtattcgaaaaaggttttaagtttagtaaaaatcaaaattcaacccccttgtgatatatgcctttacaaattctaagtgggcgatcttgtatatagaatgagaagagaagcaaggaagcatcatgttgatggaaaactttctctgaactagaaagaacccttcataaatactgtaacacaacaaaatggggcttcccaccttgaacaactttattgaatggtatttttaggacttgaatgcaacacatttgaagccctcttcattaaaaataagggggggacccctttttcccttcaaccttttttccaaataaaaaa

SEQ ID NO: 5371 - DNA, 861 bp, Glycine max
  unsure at all n locations
acaaacaaacgcacgcataacgaacgcacctccgcgacaatatgatgtatccannnnncnnncacccccnagggatgatgcatcatgncgcaccgggaacnnanaagccaccgcaggaagcaaccaacccccgacgagagggaagattcttttaccacccccccaaggaggaaaaggcagttttgaaaaggcttccgacccgcctcaacagcagaatatggacaaaaaagagggggaaaccctcaaaaaacatacacccacacagaggggttcacgcggcccaaaggccctcaacccagggtgagaaagagaagaacaccacgatggagagaccaccctgcccccggactactattagaaacaaaatngatataatcaccaacaacctaaccgatcaggtggcagacggggaaaaaaataacntcgcaaatcaaaaacaaaaaataataatcctcccccccccaacacaaactcccaaagaaaaacggcaccaggggccaaaaagaaggagggaaagccccataaccgacagaccaaccacccggggggaacacacggaaaaaacactggggcgcccaacgcgccccaaaaaaccccacctccacaggggagcaggggaaagcccaacgcaaacaacccgccgaccgaaaatgcccccccaaaggaagcactcacaaaccaaacggcaggcgcacccaaaaggggtaacaccaccaaaagaaaagaagcccccccagcagaccccggaaaacaaccactccctccgaaggagaaaaagagctaaccccccacatcgcgccggaacagacggggacaacaatcagagagggcctacgaccaccctaccgcacaacagacacg

SEQ ID NO: 5372 - DNA, 914 bp, Glycine max
  unsure at all n locations
acgcacttccatctgattctactccatgtatccgtacatcaaatcgtactccccccccctcccaccccccggantttgtgcatcctttcggccttatatactaacttggcattcatatcccgatgaggatgatccataagttctcaagactggactaataacattgctggccaaatttcatgggctttgcagctgaaaaaccctcataagccattcttaacggagttcccatattgttcttgttccacccttgaagacccccttgatggtccacggaagaagaataatattttctaacaagcctttatactcaatttctctggaacggagatggcaaaaacaatgggttggtactacccctgtacaatccaagcttccttgatgaactaacgaatgatttcacagatgttttcgatgataacacaacgggattaacaaaaagcctccaaaggcaatttcttgataattcaagaaagagtccccaatgttaaaaaagctcctgattgaattaagaatcaagaatcaaggtccagccttcccgattcatgatccataattctgaactctgaattttagaatcaaagaagaacttttctgatactatcaaaaggatttttccaaattgattaccccatggtttctttctaaactttttttcccaaaaatttttttctcctgctatccatttccccatttatgttttttctttcccaattttcaaaaatgtttctaaaacccttcttaccgctataacaccccttccatatgtattacaaaaagtgttatgtaattaccacatttggtggaaacaatcccctgcgcttgccacctcttaccttatctttacaaggtcaagaacatatccttttcataaaaacctcttcatacgtatcaccgcaatttcactgaatccg

SEQ ID NO: 5373 - DNA, 865 bp, Glycine max
  unsure at all n locations
ntgatttcatgcagtcccgggccncttagagtcgaccccccgcctgccagctttgggtgttgaagcttaatggaggcttgggggccactattggttggactggccccaaagtattgctgaaatcctaatttttttatatttaatttttaaccttaaagactctgggatgaattggagaacttttccgtcttggggtggtgaaattctttgctttggatggcttaaacttggaaaagaaatccacacttttcttaanaattttacacgcgtggaaagaaatcaagaccacctatttattttgatcaaattntctttgaannaaaacctttttccattgccccttgtagaattgtttctttccagcaacgaacttattttagggaattttcaggctaggttccctaaacattaatttggctcccttgattgagttcctaaagttttgaaaccgccataaattgtcaacatatcaaaaatagaaattatggcgaacataaaattaatccaatgacatggatttggaggggggggggggnncctccccatttatcttctccccctactcatccctttccgccccccaaactcttcagttcacccacctgtttactctctaaccttcatcctcccacatcccctcttctctctttttacaccccctcagttattccccactctatccctctctctttctctccactccttattctctctaccctccgcccaacttgttggcatcccccctctatacttctctcccctttcactttcttccactctccctcatttatttttgtcctctctataattccttccccttccccccatcctttctaatatccctcctcctatccccccttctccg

SEQ ID NO: 5374 - DNA, 457 bp, Glycine max
tgccattatgaatgggtcatccttgtaaccaacttttttaaggtctactaaagtgaatcccattttgtctttacgcacacctatgttttcattcacccacttacatttgaaaagaggtactctaaattcaccgtaatcaacctcctaaatctcttcaataacaccatagtaaggcatgcaagcttcaatgggattattgttagcagcactgcaaaagtgattcgattgaccatcaacactgaccccgctattctgcacactacttttatcatcctgggactttgtgtagaaagaacattgattgatatcatatcccttccaagtgggaacattcatatttggacccacagctagcaatcttaatgtgtttgaagcactgtcatcggtgaagattgtttgtccaaaccaaggtatgaaacgtatattgtgctcttgcaacaacctcatcatgttcatt

SEQ ID NO: 5375 - DNA, 385 bp, Glycine max
ttcctcgagcacgttcatcatccacactgcttgacaagcaccaagtgatgctgccacatactcaacttcagaggtagacaaggccaccacatcctgcttccttgaactccaagccactggtgcatcatagtacatgaacaaataccctccagtactcttcttctgttctggatctcttttccaatcagaatttgtgtaaccaaacagatctgattcatatgattcaacttcaaaagggaacaacacaccattgtcaattgtccctttaacaaacctaagtattcttttggctgcttgcatgtgtgaaagtctaggtttttgcatgaacctgctaataaacttacttgcaagcagatatcatgtatgctgctgcataagtacctca

SEQ ID NO: 5376 - DNA, 311 bp, Glycine max
taaaatattatttagttctactgggcctacaggattacatgtgaagaaaattgcagtgaaaccctttttcggccaaaggaacttcacatgatcacgggggtgccaacccttttagaaggaaaataaaagagtccatgatagatgaagatgatgaggaggtttcaagctttaagctgtcattttcactggtaccaaatagagatatcaggctgtttctgaagagcatccatccctactactcctccttgcatatcctccttgaaatcaaaggatgccaaatcacaaggggaaccaaacatcaaatggaagtt

SEQ ID NO: 5377 - DNA, 522 bp, Glycine max
  unsure at all n locations
agcttctaaaaaaagatttttaaaggtgcaaactattgcaacccgtaacaatttggaaatatcccaaaaatgtgcttaaaatgacatttttagttttcaattatcatgaaataaatactcaaggtagggagatcaaaaacccaacttttttcaaacattaaaacaacatttaaggcacttaaagtcaccaaagctcctatttttcgtagcaacccgaaactatgataaaatagaaccgaaaatggcttataatgctataaacattatgaatttaattccaaatggtttttaaatccaaatccaacataccttgaatttagccctatatttttaaccatagggaatccattttttagataaaaaatactaaattntgtaccaaacactgtcagtacgtcgaagtagagccaaacttacttaaaatgcttcaaaacattaagaatttgtttcccaatgattcccanatccaaattaaataaattatacatgtaacataattctatattttgaccccaatgaatc

SEQ ID NO: 5378 - DNA, 477 bp, Glycine max
tattttgatgattgctttgaaacaattttaaaggtatgtcaattgagtatgggaagaaaatgggctgcaaataggcaaagcttatggaatgaattcaacgatccaaccaaaacaagagatgaaatcataaaaaaatgtgtggataggcatagataaagatcaatgggctcgttttgttaattatagtcgtaaaccatcaacattggtacaattagactgttttaattattgaattgtttttatagctcattatatgattactattacaagttgtaaacttgaaattgctttgcatataggaactttgtaagagaaataaagaaatttgaagcaagcaagttattccacacactggtggatccaaagctaatcctataagaagaaatgagttggtgatgacactaaatgttaactttactaattaaagaggttcaaagtttacttactctttatttattttaccctgttaaaaaatgg

SEQ ID NO: 5379 - DNA, 505 bp, Glycine max
agcttcccgtatccgtacttggaaggatctgattaccgccttcctaaggcagtatcagtacaattctgatatggctccggaccgtactcaactgcaaaatatgttcaaaaaagagggtgaaacctttaaagaatatgcgcaccgatggagggatttggcggcacaagtagctcctcccatggttgagagagagatgatcaccatgatggtagacactctgccagtgttctactatgaaaagctagtgggttacatgccgtccagctttgcggatctggtgtttgccggggaaagaatcgacgtgggattgaagagaggaaagtttgattcgtttcctccacaaacgtgaacgccaagagaatcggggcaacacgggcgaaaacgaaggaaagagatgcccatgccgtctctttaacacccgcatgggtcaaaccccctcaaacacctcatggtgcccatcaatacgcgccaaatcacccaacctttttggttatgttggaatgcc

SEQ ID NO: 5380 - DNA, 379 bp, Glycine max
gacactatgaaactaagcttgataaattactcggaagtggtaactacattttttaagctgaaagttctactgaattttgtagacatttggaccaaaattataaaaaaagaaccaagcgatttggattaaagaaaaaaattagaaaaatcacacaagttggatgaaaaatcagtgtccagcaaaataaaagtgaaaaggaagtgtgcttgttgttttagctcaaaattgtttctataataggtgcctactttataccactcctagttctgaaacttcaattgaaaataattatgaaaacacgtgccaaaaatagaggtttcttgagtctttttttcgattttcttttttagattttctactctactctatagcctttata

SEQ ID NO: 5381 - DNA, 427 bp, Glycine max
agcttgctagcggatttttgcatttccaattcatggtagaaatccagcagttaaaaggctatttttccatcttccaagtcaacaaccaatctacttcaatgatgatgcaaatgttcaagatctgctctctaaaccaagtgtcagtcaattatgtttacttcatggatggaagcaaacaaagtttaccttgaggctagtgatctcacttatagccaattcgtaactagatttttttatgtgaaaaaaaagttgttggacatgtgtcgcaaccttcccttcggagggagggcgacccgtgactcgctggtgcatcttcccagaaaggaatatgcgcggagtccccaccaacgtttatttgaggaaaacctcagaaaaaccaaaaaagacgtggtctaacaactttaagtgaaaagttccgggagttgtt

SEQ ID NO: 5382 - DNA, 376 bp, Glycine max
ttgcatcagacaaagatgatagcaaatccattttaggatatgtttacactttaaatggtggtgcaataagttggaaaagttccaagcaagctatggtagcagattcaactactgaagcagaatatatagcgacaagtgaacccgctaaagaagctgataggataaaaatgttcatagttgaacttggtgtggttacttcaatagaagagacgggcccattaacgtgcgacaataatggggctattgctcaagcaaaggaaccaagatcacaccaaaagttcaaacatattgtgcgaagggatcacttgattagagagataatacaacgaggtgacgttaagattgaaaatgtttatggaaaggagaatgcaacaga

SEQ ID NO: 5383 - DNA, 219 bp, Glycine max
agctttaacaaatgtcttcacgaataatcattacacaggagaaaactaagcccactacccctcatatctaccaaaaccccatacccacgaatatgaagagggaaagaagtccaccccaacctgaaatttcgaaggcccactcgtaaccacgcacttcacgactccaaaaatgctctcctttcacgatttggggcataaatggtggccaaaggttgaaac

SEQ ID NO: 5384 - DNA, 464 bp, Glycine max
acactatacaatacctcagcttcactgaatagcttgtgttattgaagaatattcttcttgaatagaacacgttacccaaaaatcagtacgaggcaaataagatattatgtcttgcacatatggagtaccaaaaaatacatgcatgccctaataattacattttgtatagaaatcagtttgtcgaaacacacaaataccccacaagtgggtatcacagtacaaattgaaggataacacatgtggtgatgatgcaacgaaaaacaacaactatttatcaaaggtgtgctaatatctttcaattattccaaggttgcagtgattgttttctaatggacatgataccaaaaaacttaacatggcatgcagctggtagaaaaagtgatggattgctccaacatccccgtgattatccctaatagaagacaattgatcatttgtatcctaaaattgcataggacctatga

SEQ ID NO: 5385 - DNA, 98 bp, Glycine max
ttacccatatcgttttagggtttttatgatgatgctcgcgatgtttatgtgctggcatcgattatggtcaactggccgttatgaatggtccagtgggc

SEQ ID NO: 5386 - DNA, 341 bp, Glycine max
tgaaggcgtgtcacccaccatcttctcatagtttaacaccgataacatgtctactatgattgttatcatctccctcttcatcattgggggcgttacttgagctgccagatgccttcacctttgggcatattctttgaaagattcatgctcctttttacacatgttctgtagctgcattctatcaggaaccatattagaattgtactgatgctacctaatgaaagaaaccattaggtccttccaagaatggactctggaaggttccagattactatactatgtgacagctgccccagtaagactttcctagtgtcataccctaaattcgtctggggatgatc

SEQ ID NO: 5387 - DNA, 265 bp, Glycine max
  unsure at all n locations
agcttgggcatttttctttttctctgttatacaaatatatgtcgngtattgagaaacaaaattttactctccattcgacgcacatgtgggtttttagttgttgattttcacatttaaatttgagaataacaaatgtttgaataaaatgaggtcgacatgagtttttacatacattttaataccctgctgatctcacttttggaaacaacaaaataaaagctttgtattttaattttttggaacttgtgtgggtcagatgctttcc

SEQ ID NO: 5388 - DNA, 530 bp, Glycine max
ttgacaaatgaataaggttccatggagatgatagacataactaagagggatggaagtgtccatttgtttgttttgcatccagttctaaagcaagctaaaaatgtccaagtgccaaataacctggtaggtaaacaaaatgtgacattaattcgtacttttgcttcattggaaatagacttatgtttgattttacaaagagggatggaagtgtccattttgtagttttttttatgacattgtggcacaggacaacaatggggcagcccaacataatggacctataccacttaatagtccacttcaagtcaatggaccaatagtatatgatggagcatgtaaatgtattgcgtctattgaagttaatgtgtaacattcctgcttctaggatcaatgactaacttcacaaaacacaaaaaagctttcaaacgggtttagtccttattcacggttttctggggaaactttcccaaaaggcacccctttcccttaactaacctaataccaaaatcccttaactattaagatcttaa

SEQ ID NO: 5389 - DNA, 550 bp, Glycine max
agcttgtcagcataagcattgccttcatggtagatatgtaaaattctaaaactaaactttttagttggatctatacaattcacctagcagttgtaaaaagtccagggggctgaaaaaggatgattatataatgcacaatattgaaaatattgttgtatgattgtgctaatcctaattgtattgagaatattgctacatgattgtgctgatcttaattgattctatttgtattaattctgattgtatgtattaattcttattggattttaattttattttgtatcttgatctcttgattattgggatcacttatttttaggatagatagttgtatcagatatgtcaggaaaagctataagagaaatcttagttaggtggttggatgaccttgtatatatatctatcaattgtttttaatagaggcagaacaacaaggaggaggtgaagcaaaagctaaggagaatgaaactcgagatgtcattgaagatcaaggaggaggtgaaaaagcagttcgacgtcgatttcttggcggtggcttgataccccgaat

SEQ ID NO: 5390 - DNA, 452 bp, Glycine max
tccatcaagtttgaatccttgtttgttcggattccccatataattcacttcctatgcagcatcatcaaggggtatacaacaactagattcatatgctcctccacatatactacaacctccaacctgtattactactgaatgggaaggttgaactacttgcagttgggttggcagcttactaagtgtctctgtcaatgattccagttgtttagctaacaacttgttcagtgccaacagtgcatcttgtgaagaaatctctagtaagcttctctttgtgggtacatgagttctatcacacagaatagcatgatcactagtagccatattctcaataagttccatttcttcttcaggagtctttaatttaatttttcctcaagaagaagcatccaataactgcttggactgcagtctcaaaccatcaatgaaaatgttcagctgaatcggtttgg

SEQ ID NO: 5391 - DNA, 527 bp, Glycine max
agcttggataatcctcaccttacaattcagttttctggggttgaattaggtcctaagcctaaattctaacagtaagttaacaaggcttgccagacttccaacaaaatttgtccatcctctacaactttcaagaacacattttctctcaaaatatcaagctgacacatgccacattgttattcaaagtagatttttcattcacaggaatttcaggcacattattgcataaaaagttatagacaccttgatcagttaataaagacattagaagctgctttactgccaaaattaaacgaaagattttcttttttattggtttgaattacagatagtttaacagcttgtggataatatcaaccacaggtttctttttcctgtcatcatggcatagcaaaggccaagtatgagaactgaaatatggaaaacatgttggtaatcaataccttaatacattgatgtattccgaagcaattccttcccacattatttgttggaaaaagaggatcatctatgtgaattggatcaat

SEQ ID NO: 5392 - DNA, 515 bp, Glycine max
  unsure at all n locations
tccttaaccagaacactctaagtggatccaagtagagccaagttcataagagtgtctataaacaactttctatgaggaccctcgatagaaggcatcttgaaaggtgtagtattcatccccttatgagaaatgtgagtgatggaagcaattcaagtacaaaggtgataatgagttgaaatatgtaattgatgttgtaattgattatagaaatattaatttaattcaaaggattaggttcttcaatgaaatggatgattaataaattaattcattaaggattcatatgaaaatgattacttttcatatcaatcaatcacaaacagatgatcaatgacatgttcatgatcataattaactgcacaaatctcgaccttttttattgattatgtatctcaaccctttaaaatattttatgttaaatanagcatacagcatatataaaattgaatcgaaaaaagactacattntatgcaattcattattgaactactgtggcatctataaaattacacttc

SEQ ID NO: 5393 - DNA, 523 bp, Glycine max
agcttgcccagagaaggagtccacagaggaaatgcttaccacctcaaaagactggaaagcggtttctaatgactcctctgcggcctccacataaggcatagaagatgggcagctcaccaagatgtcttcctcgcctgacacgatgaccaaatgcccctccactacgaatttcaacttttggtggagtgtagagggcacaactcccattgagtggatccacggacgccccaacagacagctgtagggggggttaatatccattatttggaaggtgacttgacaggtgtgagggcctatttgtactgggagatcgatctctcccctaacctctcggcgagtgccgtcgaaggcacgaaccaccattgaactcggctttaagtgggaagcattgaatggtaatttctccaaagtgctctttggcatcacgtttaaactggaaccattatcgatgagcactttggctacgatatggtccatacacttgactgataccgtgaaagcctttgtattgccctctccccct

SEQ ID NO: 5394 - DNA, 436 bp, Glycine max
tttggtacaaagaagaagaagaagttcatagagatctcaggcttggtaaggattgtaagagatttttcaaaatgcataacaaagccttgcttttatagactcttgatgtctggtcaagaagaccattcagaagagttatgacttttagaaaaacttaaaacccatttgacaaagtcaaaacctttgtgaagagttacatctttagatttttcagagacaaacactggtaatcgattaccaaataagtgtaatcgattacactaagcttttgagtgaaaggatgtgactcttcacattgaaatttgaatttcaacgttcaagggcactggtaatcgattaccagaacattgtaatcgattacagccttttgaatatatttggaacggtgtaaagtcagtttgaaagtcttttcaaacttatttttgctactagtaat

SEQ ID NO: 5395 - DNA, 516 bp, Glycine max
agcttatccttctatcaattcaatctgactaaagcctcattggaactcgttcagttaattaatcatcccattactcaacctgaaaaatattacttttaatttcttcttctatagctacataacagcctaacatatatctcttcaaccttttttcataattcaacatcagagtttaaacaatcacgcaaacgaaaatcaaagaaataataaaatggaaacaatacaacaaattgccccaaaaaaaaatgaagccacacgtcacacacaagcaaacagtacatctaaaatgtaagcagccacaacacacggttattcataataggttggtgatcttaattcaaggtttggatcagaattacaagagacaaaccaacatcccaatgatagaaattagaaacctaccattcctaccacactatcatccattaaacaaagtagacatttaggacaatttcaatttcaagggacaaagctagaaagcagatcacttttcaaaaaaactagctgccaacaaca

SEQ ID NO: 5396 - DNA, 436 bp, Glycine max
tgatcaaccccattttccatgcaaaacatgttgattaatcattcaaacaatcaaaacaaatattcccaaactgaatgcaatgaacataaaattaaaaaggactgggttgcctctcagcaaacgctcgtttaacgtcattagcttgatgcatcttactttatggatcaaggtcaaacttggttccaaccttcagaaccttctccttctccacttcatctatctcaaaatagacattttggtcctgcaaatgcttttcttcctcaaataagtcgaagttgatcttctgattatcaacacccatctccagcttcttctttcccatatctaccacatagctggcagttaacatgaaaggacatcccaagatcaaagggatttcagagtcctcttcgatgtccattacaacaaaatcagttgggaaaatgaaatgctttac

SEQ ID NO: 5397 - DNA, 453 bp, Glycine max
agcttacatgcaaacctataacacaaggatgcataacctttattttttatgtgaaggatgcataaccttattcaggtataatatgagataaaatccctatcttgttttaagaattgcaccaacagtaccataggtactgtgtctcaacacattttaagtttttcccattgtttaatgcatttaagggatccaaccaagacagtatagctaaattgattgaatatgatgcgtgagcgattataaacctctcagtacatgtcttcgattcctacagacaaaaaaaaaaagaatccaaggtgcaagtttgaaaatatgttcatcctttaaactttttttgtgcctccaatccgttgactatgagtttgtgtattggcagcaaaatatatttttaaaaatgtcatgatgaattactgaaggattagcattttaacaagcagcacaaaccataatcat

SEQ ID NO: 5398 - DNA, 479 bp, Glycine max
tattgcactgcaaggtcaacggatattggagataataatgaacgccattttactctctatgttgatcatacattaagaagagaaaagaggcttagtgtttcttgtctgctcaatttgtatccactaaaaaagttaacaccatttttttacttgaaaattatattgtcttatttttcatcatcaatttaagacatttttccaaattaatcaccgaaaaaacatttactagtttgggatagtttttgtcatatgatgactgaatactattttattttgctatttttataacatgcgaaacatgccaaaaattaaaaacactgcaacaagcaaaatgtattaaatactaaacaagttttgtcccttacatatgtgagagtcatttacataaatggaaacaatggaagaaaacactataacttctctttgtacgtaccacatgtttattaatgttctgcaacctaccttcaccacaagccatg

SEQ ID NO: 5399 - DNA, 333 bp, Glycine max
agcttgacgtcttaaaaatcaatggtttttattagtgattgactacatatgtctctcaacataaattattagtactatcattactatgatctgtagctgagcagtcacatctggataaacacgcggagctgaagtgtgttaaattaatatcttgagttgccatacttacaaacaaatgtgattaggctagcattaatttgtaatgcccaggtgtcttaactactatcatattacatgcgtgttaacatataagctccgacctaaactcgaatataaaaatacgtatggtgagttattattaacaatatgatctgctgaatatgttaagtcaaa

SEQ ID NO: 5400 - DNA, 515 bp, Glycine max
  unsure at all n locations
tgattagagttctgtcaaggttaaactacttagtttcacgctttagtgttttggaaatcagttagaaactccgtttcatgctttccaaagcattttttcacttttctaggcagcaaaacgtgattgacaaaaattgtcacttcgaacaccaccgatggtaatgttgcgtttatttgtttaaacttattaaaaaagttttttctaaataaaataagcagttgtgttttttaatgtttgcttaaagtacttttgctttttaaaaaaaatgttttttcaagaagcaaatttttatctgcttgaaaaacactcttttcacaaatgttttttttttcaagtttaaataaacaagcccaataattcttgaagtatagacataagctaggattgaagcctttacaaagtccttaattttatttattttttatagattntgttcattgttctaaaaatatatnaataaatttgacttttttgttataatatcctgaatggtatgttgcatctatcactctttg

SEQ ID NO: 5401 - DNA, 402 bp, Glycine max
agcttgaaggtgtgtagcccaccatcttttcatagtagaatactggtaatgtgtctactatcattgacatcatttttttctttgtcattgagggaaacacttgggctaccagatccctccacctttgggcgtattctttgaaagatctgtgccccccctttttttgcacatgttttgtagttgcatcctatccaaagccattatactgacactgcctaacgaaggcgaccattatgtccttccaagaatagactcgggaaggttccaagttagtgtaccaggtaacagctaccccagtaagactttcttggaaggaatgtatcaacaattcctcatcttttgcgtatgcccccatctttccgacaatacatctttagatggtttttggggcaagtagtcccc

SEQ ID NO: 5402 - DNA, 448 bp, Glycine max
tttcgcaaagcttacggtaaaatctgggacttagccatggtagaagtctccacagtggccattacctgcctcgcccaatattatgatcagccgatgaggtgcttcacctttggggacttccaactatcacctatggtagaagaatttgaagagatcctatgatgccctccagggggaaggaaaccatacctcttctcagggttctatccctcattagctagaatttccaagatagtcaaaatctcggcgcaggaattagaccacaggaagcaagtcgaaaatggggtgattggaataccgagaaaatatttggaggcaaaagcaagaatcttggcaggtaaagggcaatggaccccgttcatatacatgtgaaatgagcaatacaaggattggttgctggactccagctctttatgtatgggtaggttcacacctttttcgccaaaag

SEQ ID NO: 5403 - DNA, 226 bp, Glycine max
ccatgcaaaatttctgtcttccaccttaattcataatgattcatatgggttttatcgaactcgcttacttaagaaaaccaaatgatggtgatgggagcttgccttcaatggctgcaaaaaaaaatgagagacacacgtcctcacaggcatttcggacttctaaaatgtttgcgtgcgctacacacggctattgctaaaaggatggtgatctgcattcaacgtctgg

SEQ ID NO: 5404 - DNA, 430 bp, Glycine max
tttgcaagctggaatcatttatcctatctccgatagccaatgggtgagtcccgtccaggtagtcccgaagaagactggcctcacagtgatcagaaatgagaaggaggagttgattcctactcgggtgcagaacagttggagagtctgcattgactataggaggctgaaccatgttaccaaaaaggaccattttcccctgccattcattgaccagatgcttgaacgcctggcaggtaaatcccactactgtttccttgatgatttttctggttatatgcaaattactattgctcctgaggatcaggaaaagaccacattcacctgccccttcggcacttttgcttataagaagatgccttttggcctgtgcaatgcccctggtaccttctagcggtgcatgattaatattttcagtgattttttagaaaat

SEQ ID NO: 5405 - DNA, 874 bp, Glycine max
  unsure at all n locations
ttgaatgcatgcattgcccgngatnctntagagtcgacccgcggcatgcaagcctaacatagcgatgtgtatatggcacacgatgttttatacactgatgatttcttcatcgccgaaaggtacgccttgagcccttgtaaacattgtttaacatatataccataaataatcaccctattccttgacttaatataatagatgactacagctccaataagatcctgtggtttaaacactatttataagcaccatcctcttgtaataatgccatttgtatggtatccaccctatgacacgtagaagctataattgatttgaatatgatacgggtgcgactatgaaactctgattccaagactacgattcctccatccaaaatataaaagataatctctatgaggcgaggaaagaaggtaatgctcttcctctttaacattttatttgagcctaccgatccgacgacatataagtcgagtattggactcaaaaaatatttttatatattgtaacataaactcctgaatgatttggttaatagcatcccccaacaagcatattcatcgataactgtcacactgtctctcccacacaggggcatgcagataggattataagtctcaccgcgtgtctttcggggaaaatattcctatccacaaaagattttgaacagggctatgagaccgcttccgtatttctgtaacgaaaataatgaaatccttctagctgagccttggcgagacccggagaaaacattcagagtttatacaccgtctcttagaacaagcgcacttaagactcctctccattcgctgagacctcaaaatttttttttcaataatagacgctctatataaaggggttcccctattaaacc

SEQ ID NO: 5406 - DNA, 824 bp, Glycine max
  unsure at all n locations
atagccctgtggagtcacctgagattgagacattatgatcccctttacctatctatgccgatcattgatttagagcagaatagaagcctattgtgaaatggccgctcaattccgcttccctcaaggagttgacgcgctttgtgtatcttggaaaggaattaagctcgtagaataatcagtagtgtagtgtgggagagtggtgtccaaattaagtaaccggaaaatacactttactaactttggcgataagttttttgtcataatgatgacttgcatgactaattttatttttgatagtctcttataaacattgcgaatacattgcccaaaaattaaaaaccactgcaccaagcctaatgtattcacatactacaacaaagtatttggtcccctcaccatattgtagaggaggtcattttacattaaaattgtgataacattggacagatgaaccactattatctttcttcttttgaccgtaccacattgtttattaatggtctggaaccctaccttttccaccaaccattgtattaatataattgttaggggacaattgggggacctaaacgttggcatttaacgtggaaaaaaatgcctggggggggatacaccttgtctgaactctcgtttgccctacttaaccttcttggcttgcacttattatacaatatacaccttggttttttccatgttcaccaacttcccctttgttccacgagccaaactttttctataattatttattacccaatggtacctattctatacacctctttttttggggatntatctctgtgcnagactaaaaaaatacacatacg

SEQ ID NO: 5407 - DNA, 595 bp, Glycine max
  unsure at all n locations
tcttgagaagcttccttgagaagattcctaaagaagctagagcttagctacacacaccccctataatagctaagctcacccccatgccaaaatacatgaaaatataaaaaaagtccctattacaaagactactcaaaatgccctgaaatacaaggctaaaaccctatactactagaatggccaaaatacaaggcccaaaagaaggaaaaaccaattctaacatttataaagaagaatggatccaaccttgacccatgggctcaaaaatctagcctaaagttcatgagaaccctagggccttctttagtagctctagcccaagcctcttggagtcttctatccaatacccttggnggtaggattgcatcataatgtaatcgattaaatactcaaagtaattgattaaagtgttcttgttcacttctgaacaactaagtgagagagaagtaatcgattaaaccactacgtaaatgattaaagtatagactcttgaataatcagtcatttgctcaaacaacagtgtaatctgttagaagatatggagtagcaacatgaacaacttaaccctaaaacttgaagcccaaggctaaagttt

SEQ ID NO: 5408 - DNA, 462 bp, Glycine max
tttgagaagtattataagctcggaattcatagcctctgcacttggattttgggataccaaattgggctttgctctgtgcaatcaacttaactagattaattatatgggcctaatcaaagtgttgaacaaatggcctcaataacttaagaagggggtgaattaagtttaaaatttttcctcttacaacttttaaccccattctaaatgataagctcaaaatgcacaagaagaagcaacaatcaatttaataatgttcttttaacatgcaagaaaaaattgattgcaataacatatatgagattagggaagagagaaatgccaacttgatttatactggttcgaccatttttcgtgcctacatctaatcgtcaagcaacttcacttgagaattttcaatatcttttgtaaaatcctttttacaacttttaacacctaaagaatccctttccctttgttcacaaa

SEQ ID NO: 5409 - DNA, 924 bp, Glycine max
  unsure at all n locations
tacgtacctaacatccccgcgcacacatnancgtntcaaactcacttcctgatcattnactgtttcttctacgtatccatnaanacaannccaacacacnnaaggnnntttgattgcttggcagtcncctgngatnctctaggatacactagaggcgagctgaacgcatgccacctttacaaccttagaaatcgagtgatcatacgtgccgcaatatctggggagacaacaccgatcattatctctatactatggctggcagcctgctccaaccatgattttacgaattgtgatattttcacaaacaaggggagatactaactaccttgctgttgatgttttccccacgtaaatgatgatatcaggcaattgtagaatatgctcttttttatattcgtgaaaactactctactaaaagaacacacgacactaatttcaaaataccactcattttttatgaacggaaatacgtataggcatatcgaaatgtatagccctataaacaaaaatatataaagatccacaaagggtttattttctggcgagtggacaacccgaaaagatgacctgttaccaccgctcaaatgtaaataatgacaacctcctgacaattgaatttcacatcttagaccgcgcattcaaaaacccaattgcgggaatattctccactggttaccaaaccgtttaaaaataaacttaaaaaacgggaaccgctactcggttttttaaaaaaaggatatggacgcgattccataaccttttcatacagaatccccccntatacaaaggctccactcatagaacaacaatgaccgtgtaaaaacttaacgcttaacaaacattcttcctatttataaaaaaaaaccaccctcgttcttcaaaaaagaacaaagactttcattcttaactaaactttgtggaaag

SEQ ID NO: 5410 - DNA, 102 bp, Glycine max
ctttgtttggtggagtattgatttttaaacgacttaagcctagtcttgacccctagaattacaagtctaccatatggggcttctatatattaattgatacac

SEQ ID NO: 5411 - DNA, 569 bp, Glycine max
agcttccttgagaagcttccttgagaagattcctaaagaagctagagcttagctacacacaccccctataatagctaagctcacccccatgccaaaatacatgaaaatataaaaaaagtccctattacaaagactactcaaaatgccctgaaatacaaggctaaaaccctatactactagaatggccaaaatacaaggcccaaaagaaggaaaaaccaattctaacatttataaagaagaatggatccaaccttgacccatgggctcaaaaatctagcctaaggttcatgagaaccctagggccttctttagtagctctagcccaagcctcttggagtcttctatccaatacccttgggggtaggattgcatcataatgtaatcgattaaatactcaaagtaattgattaaagtgttcttgttcacttctgaacaactaagtgagagagaagtaatcgattaaaccactaggtaaatgattaaagtatagactcttgaataaatcagtcattgtctcaagcaacagtgtaatctgttagagataagggagtagcaacatgaacaactta

SEQ ID NO: 5412 - DNA, 453 bp, Glycine max
  unsure at all n locations
taggccaatgcttccattttgagagtcattttaggcttggaattcagagcctctgcacttggattttgggatccgaaattgggctttgctttgtgcaattagcttaattagataaattagatgggcctaatcaaggtgttgaacaagtggcctcaataacttaagaggggggtgaattaagtttcaaaatttttcctctaacaaacttttaaccccattctaaatgataggctcagaatgcagaagaagaagcaacaatcaatttaataatgttctttaaacatgcaagaaaaaattgattgcaataacataaatgagataagggaagagagaaatgcaaacttgatttatactggttcgaccatttctcgtgcctacatctaatcgtcaagcaactcacttgagatttttcactatctttgtaaaaatcctttntacaacttctgaacacct

SEQ ID NO: 5413 - DNA, 477 bp, Glycine max
agcttgtcagcataagcattgccttcatggtagatatgtaaaattctaaaactaaactttttagttggatctatacaattcacctagcagttgtaaaaagtccagggggctgaaaaaggatgattatataatgcacaatattgaaaatattgttgtatgattgtgctaatcctaattgtattgagaatattgctacatgattgtgctgatcttaattgattctatttgtattaattctgattgtatgtattaattcttattgtattttaattttattttgtatcttgatctcttgattattgggatcacttatttttaggatagatagttgtatcagatatgtcaggaaaagctataagagaaatcttagttaggtggttggatgaccttgtatatatatctatcaattggttttaatagaggcagaacaacaaggaggaggtgaagcaaaagctaacgagaatgaaactcgagatg

SEQ ID NO: 5414 - DNA, 536 bp, Glycine max
tccatcaagtttgaatccttgtttgttcggattccccatataattcacttcctatgcagcatcatcaaggggtatacaacaactagattcatatgctcctccacatatactacaacctccaacctgtattactactgaatgggaaggttgaactacttgcagttgggttggcagcttactaagtgtctctgtcaatgattccagttgtttagctaacaacttgttcagtgccaacagtgcatcttgtgaagaaatctctagtaggcttctctttgtgggtacatgagttctatcacacagaatagcatgatcactagtagccatattctcaataagttccatttcttcttcaggagtctttaatttaatttttcctcaagaagaagcatccaataactgcttggactgcagtctcaaaccatcaatgaaaatgttcagctgaatcggtttggagaatccatgagttggtgtttttcgcagcaagctacagaatctctcaagtgcttcactcaaggactcatcttgaaactgatgga

SEQ ID NO: 5415 - DNA, 738 bp, Glycine max
  unsure at all n locations
ttcaatacaagttatcaggaaaaaatatgagttataatattcatgtaacgaatttttacaatatttttataatttgtttgttatacatttccccccattattatgccaatcatgatattttaacaaatcattgatctatacttcttacttttataatttagttttctccgtattatctatcgcattagtcatttatattatatactttttttttatttgttgaaaattttgtacaaaattgacatacaattataatttcaatataaaaaacattatatatatatatatatatatatatatatatatatatatatatatatatatatatatatatatatatatcccctccgagatgtataacccgcaaggacagtaagataactntacctgtcacatacacttggctttttctaagtcaattccaggactagttaagtaggtttttttattctttctttcacgaactttttctcacaatgatgcatgttccatcccataactatggaagaagaatctaagataccatgcccggggagtaatctttttataattncttattctttggagcacccctctataataattatatatccaaattaattataccccgtctcttatctcatgtattttgaatattgtggttggaaaatattaaacctcagctcttacaaaaaaaaaatacctaccctactttatggaaaccttctggtggggatttccttatcttattggggggaa

SEQ ID NO: 5416 - DNA, 466 bp, Glycine max
tgctcactttgatactttgtgcttgctttgtcatttttgttcccatagctcataggctagttaagattgtgtataatcaactacttttgcattgactttgccatataattccatgtcaggtttatgctatattgaaataaattttcattgactatgggtgtctctgggaagtggattaaagcattggttggtctaaagaaatcagaaaagccagagaaggatggaaatgtgagtctctctctcataacacttcatactcatattcctgagtttcagtatttattttcatgttatgttggcaaaaataatcatcacctatggcgcttttaactaaggttctgtatcatcatgtagttatttctacccacactaccccaaaagaaaaacaaaagagttttgttgcttgtgtttcaactcaagagggaaaagattaatggttttcttgtgcatttgcgagtgtcatact

SEQ ID NO: 5417 - DNA, 358 bp, Glycine max
agcttatatatatcgattcgctcaaaattaaacatcagaaactctcaagaaattcaaatagtcataactattcacacggatgtccgattcgggcgcataatatgtcgagaggctcgaaattgaacaacggaagctgttgagaaattcaactggtataactttttacaccgatgtcccattcgggcgcataatatgtcgagaagctcgatattgaacaacgaaagttctttagaaattcaaatggtcataacttttcacacggatgtccgattcaggcttataatatatcgatacgctccaaattaagcatccgaaactctcgcgaaaatcaaatggtcataacttttcacacggatgt

SEQ ID NO: 5418 - DNA, 237 bp, Glycine max
tgaatcggacatccgtgtgaaaagttataaccatttgaatttctctagagcttccgttgttcaatttcgaacttctcgatatgtgatttgcctgaatcggacatccgtgtgaaaagttataccagttgaatttctcaagagcttccgttgttcaattttgagcgtctcgatatgtgatttgcctgaatccgacatccgtgtgaaaaggtatgccccctgaatttttcacgagctttc

SEQ ID NO: 5419 - DNA, 533 bp, Glycine max
agcttgctcgtcttgctgatatttatcatgcagacttttctgatgatgaccgaggaacaattagggatcaacttgaaacttatgtgcttcaagtgagaagaaatgcttctttttccacttgtgaagatgttcaaagtttggctatgaagatgggtcaaactgagaaacatttggtatttccattggtttataaacttattgagctagctttgatattgcggtgtcgacagcatccgttgaaagagctttttcagcaatgaagattatcaagtctaaattgcgcaataagatcaacgatgtgtggttcaatgacttgatggtatgttacaccgagcgggagatatttaagtcgcttgatgatattgatattattcgaacatttacccgcaaaaagtctcggaaaggacacttgcctcgtaattttatttaacccgctattgaagagtatgtttatctcttttattttaaactatatctttgttgacaaaatgacgagtctcttttattttgaatgattactatctacatattat

SEQ ID NO: 5420 - DNA, 508 bp, Glycine max
  unsure at all n locations
taggtaaacatcataatcctctaggactaacacgattaaagtagggaatcttaaaaaaaagtaacaacaagtagtttatgcaatgactacacagattcatcacacatcagtgcaattatctcaatatttgttctttgtttccttggtttgcgcagaagggcaaggatttcatctggagaacacccaaaggttgcatttaactcaatcggacccttgatactaaattacgaatagatgaaaaatatttttcctacatcatcgtcgtgtttgagctccatacagtcatatgcaacacaaccatcacctatatagattggttaacagtaaaaaaagatttattaaaattctacaaccttcattgtgtcaaaaattattttccttaaggcagcaaacaagatgtcctcacttattgtgatgactttangatcactanggctttcaaacactattcctttatctgatggaaataatgtcacatcataatgcacaaaagcggatacactcttca

SEQ ID NO: 5421 - DNA, 349 bp, Glycine max
agcttataatatatcgatacgctcgaaattaaacatcgggaactctcgagaaattcaatttgtcatcatttttcacacggatgtccgattcgggcgcataatatgtcgagaggctctaaattgaacaacggaagctcttgagaaattcaactggtataacttttcacaccgatgtccgaattaggcaaatcacatatcgagacgctcaaaattgaacaacggaagctcctaaaaaattgaaatggtcataacttttcactctaaagtccaattcatgcgtatcacctatagggacactcggaattgaacaacggaagctctcccgaaattcaaatggtcataacttttc

SEQ ID NO: 5422 - DNA, 286 bp, Glycine max
cgaatcagacatccgtgtgaaaagttatgaccatatgaatatctccagagctaccgttgttcaatttccagcgtctcgatatgtgatttgcctgattcggacctccttgtgaagagatctgagcatttacatttgacgagagctttcgttgttgaactttcagcgtctcgatatgagattggcttgaatcggacatccgtttgaaaacttacgaccatttgaatttctccagaactatctggtgagaatttccagcgtctggacatattatgtgcccgaatcggat

SEQ ID NO: 5423 - DNA, 1044 bp, Glycine max
  unsure at all n locations
aaaataacgtgattactcacaacttgcaccacaacttcctcctcaactattctccgctagtatatgtaatgtctaatatctccancacanaacctccaaccaaccaagatgaaaattgattgcatcgcattccactccgaaactcaccgagacacctcttgaagcgatctcgcacgcatgacaaaataaatgagtctatgagatatattatctcataaatctctaaaacaacacccaggggtaggggtactgtattctaattaaacactacaacagttaatctttaactaaaatctgcaagaattctcaatccaatactgtatctatattgcacacacaaagcgggggttgaacttcttataactccggaaaaaagattctcctctcgaataattcaaactagcttggtgtcttctaacgttaaatgaattacttctaaaaagcgtgtacaaaattcaattaacttaatcgcaattcgaaactacaacatacacgcggccctggtacttagacgtaatcggcgccaaacccaactacctacgcatggcttacaacgcaatcttacattagaagcaaactatttaaaatacctccctaataagcgttaagcaatttagaaatttctccactatatatttaatacctttcatatatcaccctaaaaacaaaacaactctgtcactaacaaaaaattttataagccatacacatgcaaaattttcttttataaaaaacacaaggccaccgcaacaataagttacataacaaacttgatatcttaagtggacctgtacatcctctatggggtggactacccttataaccacccccctcccctgtgccatagaccattgacaaaccagatatcaacaaacggtacttcccttttctttcggcacagaaaataaattcaccccactcatacaaacatcgggagtacctgtacaacaaaatcatatatactaaatgcgcttcaatatatgcgctaatatcatcaacgacacatatccaccaatataacagagcgcgtgaaaatatctatcg

SEQ ID NO: 5424 - DNA, 934 bp, Glycine max
  unsure at all n locations
tatagggaacgtcaacaatcctaccctcaatttctatcacctctcgagcgggatctacanaacattctactaccatcncaaaagtcccgggacncnattgattggcctcgcctttgcgngacacttgctacaaagttgaccttataaatatacgagcttgccggcggtctcgcccctgccagcttatctcaacccaacgaaaccggttgcttgcggcaaatgccaacaacctttggaggaatcctcgcgaaggcccacgggcccgatgcttttacacccattttaactaaatgcacccccctctcccatttggttggaaaatcaattttcgcaaccttacaaacccttagaatcaccctccaacctgcttaatcccaactaccgctctctggtaaaaatccccactcagcttatacttgtgggaacctgcactctaaacctcctcaaaaaactcgaacactcaagctcaacatcctcacaactatcccccaccccctacaataaatacttgaacataatcttcccttttccacaatccacaccaccacccgactcgatctgtttcttcctcccctcccctctcataacccatcccaactccttcctgccaatccacccactatctgctttttccccacnnccctcttaaacttttccacccctttcctccccccacccttttcccatcctctctaacttngatctctcttcctccccccctcctcctnttttcttttccctactaacctccctccacatcccttctcacacccaattccgtctatctctgcacaatataccacacgtctcattggtaaccccaagacattttctacgtactaatgttcctagcacgactctgtacaccccaaaaatatctaacattctcactaacacctctaacgataccttttatcaacacaacaaaactacg

SEQ ID NO: 5425 - DNA, 197 bp, Glycine max
agcttcaccggatgatgccgatcgaacatttcctaatcgacatcatccaattgttattcagggattgaataaaataaacaatggccggggtccgtcgttatatggccccgactgatatctttcagccgacattgcgcaatttcttttacaaacgctggccgataatgtttttttatttacggtagaggaagtttttt

SEQ ID NO: 5426 - DNA, 345 bp, Glycine max
agcatctcaatatgtgatgtgcctgaatcggacctctgtgagaaaagatatgaccattagaatatgtggacatcttctgaagttcaagtgatagagtgtctcaatatgagatgtgcctaaatccgacctccgagtgaaaatctatgacaatttgaatttctcagaatcttacgctggtcaataaagagcgtccccatatgtgatgtgcctgaatccgactaccctgtgaaaacttatgaccattttgaatttctccaaaagaatttgtccggccatatggagcatccatgatatattagtgcgactgattcccacattcgatggaaaagttatgaacttttaaat

SEQ ID NO: 5427 - DNA, 443 bp, Glycine max
agcttctggtgggacatcttgacttgctttccaatctgacattcaccacagattctgccttcttctattttcagattgggaatgcctctaatagcacctttgtcaatgattttcttcatgcctcttaagtgcagatatccaaatctttgatgccatattctgacttcatcttctttggaggatagacatgtggaggagtaactggtttcttgaggtgtccataggtagcagttgtcctttgatctgctgcccttcattagaacttcacacttctcatttgtcactaagcattctgactttgtgaagtttacattgaatccttcatcacacagctgactgatgctgatcaaagttgcagtcagtcccttcaccaacaggactttgtccagactaagaaagtcatcatggactatacttcccattccagagatcttttctttaaa

SEQ ID NO: 5428 - DNA, 466 bp, Glycine max
tttcgattcattctatgtacccgtggtggtccacattgtgtttcgcgtatttttattctcgtttcatttactttttatacccccttttgacgtgcttaagccatcttatttaagtcatttctcgcttaaactaaaaataaaataaatttccaccgatcgtttgaattgtattatccgttaacttcggttaaaatgaattccgaccgttcggttgtgccgtaaccacgttggaaattaaaaaaaaaaaagaggtaaaaaataatataataataaaaaaacatctttttagtaaaataaagcggaaaatcaatcggacgttttctctttgggatttctcattcttaaccgaattgactaataactaaagtgaaactaaggctaaaatcaactctcctagtcaagctcgtccataaaaatagggtttttgaagtttgtcatttcaatttcttacctaataaaatggatc

SEQ ID NO: 5429 - DNA, 477 bp, Glycine max
agctttcaacaaatgtcttcacaaataatcatcacacagcagaaaactaacaaaactacccctcatatctcccaaaaccccatacccacgaaaatcaagagggaaagaagtccacccaaacctgaaatttcgaagtcccactcgtagccacgcactttacgactccaaaaatgctctcctttcacgatttggggcagaaatggtggccaaaggttgaagctttgcttgaagcttcaatggagaatgaagaagaagaaagctacgtgagagagggagagaaaaggcttctgaatttctgctttggctgagtgaggagagagaaaagctttttggttttaaaaaaaaataagaaggggtttcccttttttttccattattttattcaagctctgccacatgtcccttattgattggagcaaaaaggcccactttctctttttgactgtgacccatactcaagcacaaaagtgagaaaaa

SEQ ID NO: 5430 - DNA, 521 bp, Glycine max
  unsure at all n locations
tcactgaatagcttgtgttattgaagaatattcttcttgaatagaacacgttacccaaaaatcagtacgaggcaaataagatattatgtcttgcacatatggagtaccaaaaaatacatgcatgccctaataattacattttgtatagaaatcagtttgtcgaaacacacaaataccccacaagtgggtatcacagtacaaattgaaggataacacatgtagtgatgatgcaacgaaaaacaacaactatttagcaaaggtgtgctaatatctttcaattattccaaggttgcagtgattgttttctaatggacatgatacaaaaaaacttaacatggcatgcagctggtagaaaaagtgatggattgctccaacatcccgttgattatccctaatagaagacaattgatcatttgtatcctanatttgcataggacctatganacctaaggcttggtcttgcttcagctggaatgaatcatgttggtaacttaagcaccaaccataattcatggcatgtt

SEQ ID NO: 5431 - DNA, 798 bp, Glycine max
  unsure at all n locations
gaaanatganaccatgtcgtacccgngatcctctgagatcctctgcaggcatgctaccgcgtgcgccctatctgaatgagtggcattataacgcgctaactgccatcatcacgaggggaccgcatctgttgcagttaaaccaacaatgtttttgaaaatcaacagtgcatgaaatgttgtacactacgaacataactattgcacgacagatggaggtgttgggtcatcttgaaaaggatgtgtaccacctgcaacattaacaggtcgggtttgggtttataaagtgagctataagagaagagacattctctcccttatgttagtgcaatcacccttaatatcctagcgaaatgatgtatagtatcaaccattttcgttgcgagttttactgtattctgcatagatgaagcttataaaatcgccgtatttcgtgaagaatatgtgaattttactataaatttaagactatcaatcatccccttataagaatactcttttttgaaaaatgtcccattataagacattagatgtcttattcatgaaagacttagttcattgaacataagaaaccaatntatttgttgtgtagttgacctgtccaattatgcggtatttattttaaacttcctgccaccgtgctggaaaattaacaaagaagagcttttttggatacattttccgttgggggagaactttaaaccacatcagggggggggtcggtttttacatggaagctacattaaaagtgttgtaattgtataccaccaaaatgcggctttgggggcccgttattttttg

SEQ ID NO: 5432 - DNA, 278 bp, Glycine max
tgccgcccagctcgcccatgcgagctcatattacccaggcgagccacgttgcttactacacatgccaccaccctctggaggaatcttctggaaagcccatgtgggcctcgattgctatttacacccctatttactaaatgcaccccccttttctattcctttgcgatcctttttccgacacgttaccaacttaatttttgtcactgaataaaattttgactaattctccacagtgggaattttatgccccttaaaaaaaataacaccatctcccattt

SEQ ID NO: 5433 - DNA, 475 bp, Glycine max
catgggttaagcacaaggaagactctttaagaagatgagttgtacaggctcgcttaacacactgcttcatcccactaagcgcatcgcttcagttcattagctaagcgagaaaggcacgcgcttagctcaaattcactaatatgcgctacacgatccataagtgcgttaagcgcacgagcacgaacaaggccacctatttacacctgaaataagattttacagagagagtttggactgcgattcacagctttgcatgtagagggtttctagagagagaacaatccatgttctataaagttttgagagaattgtgtgtgcgataatctgcagagaccatatcttgaagcacgagccacgtttagagctcgagatgagtttttgagtgattgggagatcctagagatgaaggggacatcctccccacttgttttctgcaatttttcatcttgccctctctttcttggaagaacgcttc

SEQ ID NO: 5434 - DNA, 487 bp, Glycine max
cccgagagcatctgtatttaagcacttcagccttagcttttctgtagcttatgaaaaacgtcaattcttcttctttctttctttcaaagccatttctaaagttccaagcactttctccatcacccacagccaccattagcaaccacaaaccatcattgttctccattgaaaacccacaccgagaggaacccttcaaccgaagcggaatcttccaacttggcttgcggttccggtagagaacgaaaaccctaatctgacctttcaaggtaaccatgggtctatgcttatttcttgttaggtccatattgtctttgcatcttttctgcctttggaaccgccattgcatgtcttatgcttcctttgaaaaaccttagagaaatagactttggtaacgttatactttcatgaaatgcatgttattttcgtaaacaacactgaacccccggcaaattggcgtggggcggaatttcaaatgacgttcctttgt

SEQ ID NO: 5435 - DNA, 566 bp, Glycine max
  unsure at all n locations
agcttgtgtgcctcatcaataggagttgcatttttaggtgctaacggacaaaatcacaaaatacccacatttgttgcggttaagccaataaggtttttgaattaaagctgtgaaaagaaggttgtacacttgaacaaactatgtatgtttaatggattgtttggtctcttgaaaaggatgtgtaccactgaaaaacatttgaagggtcagtgtagtgggtttataatgtgagctatttgagaagtgtcgttctctcccttatttttgtgcagtcacccttaatattataacgaaatttgtttaaatataaaccatttttgttaaggatatgtacttttttctgtaaaaaaaatgcttaaattatgttagtatttcctgaaatatatttgaattttattattattttttgataaattttttctttattttttgcttcctaatatttgaaaaaggtcccattantagccattaaatgtctaatacatgaatgtctttattaataaattaaaaaaanattttttatattttttcttctttttccgatcatccttcattttttttctttc

SEQ ID NO: 5436 - DNA, 481 bp, Glycine max
  unsure at all n locations
tgagcaagatttgttgaacggggaagcaagatatgacacaaaatatagtgcatgatacgacattcaaaagtgaatgaaccaacaagcaattgaccagacatataagcattttcagtgcaaaccattttgtgggcatcatgatttgaataaatatgcttccagtcatcaaccaaagcgccctcaaaaggtacaccttgactactcaattttgtcaatgaataaaataaggactaatcaaccacaatgggaattttatgcacctcagaaaagataacaccatctcgaatttcagattattataaaaaacatagactaattcagaatagtatgacattttgagagtcataaaatcgattaattcagaattttgaaagacttgatggtaatcaaaagtctctccttcaaagaattntaagtctaaatatttgggatcaagaatgactcgattgganaatgaggaatagtacctttgacgttgatc

SEQ ID NO: 5437 - DNA, 488 bp, Glycine max
agcttctatataagctgaaccattttatcaataaagacaagttgagttttattcagaaaattagagtttatctcttttatcttagtgagagtgattctcctaaattcttgagtgattcaagaacaccttggctgtatcaaaggactttcacaacctttgtgtgttgcccttgctggaaagagtgaatctttccttcctttcatcatcacccttgttctttcaaaccacaattccagaaaatccacctctgcccagaattatctcgtggccataactcccattttacgcactcaaattaagtgattcttgagcctaaattgaatttcaaaacgagacctttcacctcgttttggaatcacctcatttggagccctgtagcttcagttattgccatttctatatttctgtccagccaccacttaacctacgttttaccatcccattcatccattttatgccaagaaccaccttattaagacccacgaaat

SEQ ID NO: 5438 - DNA, 427 bp, Glycine max
  unsure at all n locations
ntntggagtagaaacatgggaccaactcattttatttcaaaaagtcgtatctagtcaaggtctgagagaccgtacaagtttcctagcgatttctaattatgtgggtcattaagtctatcatatgctgacaatagctgagaagcccgtgaatttcttcgggggcggagtaggtgtctgccatcgccttggccttggctaacaatcggggaagttcttgactcctgttcaaggtaagagcaaaccgatccatccacatggttgcctcttggtgtaaagagtcgatcacccttcctctagcctctttttccgcgtatacttgggcatactcgtccgcgaccctatgctcgtgggccgtggctagacctaactcttcttggtacttggcgatgatagctagcatgttggtctctgtctcgcataaacgctg

SEQ ID NO: 5439 - DNA, 544 bp, Glycine max
  unsure at all n locations
agctttgaaaagtgttgtttttcaccttctcgctaagccaatctgctggcttagcgagcgtctgctaagcgcaacactcatgggttaagcacaaggaagactctagaagaagatgagttgtacaggttcgctaagcacactgcttcatcccactaagcgcatcgcttcagttcattagctaagcgagaaaggcacgcgcttagccgaaattcactaatatgcgctaagcgatccataagtgcgttaagcgcacgagcacgaacaaggccacctatttaaacctgaaataagattttagagagagagtttggactgggattcaaagctttgcatgtagagggtttctagagagagaacagtccatgttctagagagttttgagagaaatggctgtgtgataatctgcaaagaccatagcttgaagcaggagccagttntagagcttgagatgagtttatgagtgattgtgagatcctanagatgagggagacatnctcaccacttgtatttttgcaatctttcatcttggtcttctctttcttga

SEQ ID NO: 5440 - DNA, 457 bp, Glycine max
tccgttcccgagagcatctcttatttaagcacttcagccttagctttcctgtagcttaggaaaaacgtcatttcttcttctttctttcttccaaagccatttctaaagttccaagcactttctccatcacccacagccaccattagcaaccacaaaccatcattgttctccattgaaaacccacaccgagaggaacccttcaaccgaagcggaatcttccaacttggcttgcggttccggtagagaacgaaaaccctaatctgacctttcaaggtaaccatggttctatgcttatttcttgttagtttcatattgtctttgcatcttttctgcctttggaaccgccattgcatgtcttatgcttcctttgaaaaaccttagagaaatagactttgtaaacgttatcctttcatgaaatgcatgttattttcgtaacctacactgaaccccggtcaca

SEQ ID NO: 5441 - DNA, 536 bp, Glycine max
  unsure at all n locations
agcttttatcttgcgaaaaatcataaaacccaaaaaaagtgggacaccagagaaggctgaggttcacaaaaaaatttaagcttttgtattgggagaaataaagaaacaaacaaaatgtagtcagagaatcaaagaaaacaaacttgtttgagataaaaatcgaagctttttgtagattagtgtcttgttccaccttctctgcatacaatagcaaaggtattgtgagaagtcagaaaataaaataaaaaaaattaaactttttgtagtgcgagaacttagaaaacaaaataaaggaagaacacctaaaaaattaaagcttttgtcttgtgaaaaatcataaaaccccaaaaaaatgggtataagaaagaatgaacacatttgagaaggctgacgaaaacganaaaatttaaccctaaaccaaaaaaacaaagaaaatgaacccatactcgtggagttttcaaataaaaactgcagttgtagtctgctctccacctcctctgcatgcaatagaggttgactaaaaaaatgtaagcttt

SEQ ID NO: 5442 - DNA, 489 bp, Glycine max
tgaactttaaaataaagaaggaagcaaattgaacctttaatggcagagctgtgcaatgtttcttaatcgtttgtgatttgttttgaggtgtaaggttttttaaaattggaatgttttgtaaaaaaaaaattataagcaaatgttaattgttagttttttttgttagcacgagggattgaatcgcaaggcggcgacctttccctccttcccttctttcttaaacacccaaccaaccttatatctccctggtttgttagtttgttagtttttttaaaaaaaattggaatgttttgtaattgttgggataatggtttcctgtggtttgttatctctggtattgactttaaaattgtgtgtgtgtgtgtgtgtgtgtgtttgccacgtgacgtcgcctcatgcgaacatgtatcactttggagatcatgtggattctggtaattttgcatttaccgcatctgagtcttgtgactactcaacttgcttttgggt

SEQ ID NO: 5443 - DNA, 463 bp, Glycine max
ctaactgcacgcgtgcgagcttgaatttggaattgggaaagccccactccatcattatgattaggacctgacatctcataccaaccaattatacgtaacaagacaattatagttgctgtttgaatacctcacccactccagtgtttcacacaattatggcttttctataatgaaacactcttgccttttaccactctaatttcccttgagttcttaagcaattcaagagattatgggcacaacaaagaacaattcaccaatatgtgtaaggtaaggctagacaaggaaaaggttgaccaaaaaaaaggctgacaatgtgtttaggctcaaatgaaggaaataaaattcataatttatgaaattaagtaacaatgctttatgccaccaatatattaccttaaagagagttttttttttaagtccttcaagcatgaaccattcagccccatttttttttttttta

SEQ ID NO: 5444 - DNA, 221 bp, Glycine max
gtgtgaaaagaattgaccatttgaatttttcgatagggggcgaaggtgaatgtttagcctcatgactatattatgcgcccgaatgagacatccgagggcgatgttatagatacgcgatttcttctagaacttttgagagtgctttccagcctaagcacatgttttccacccgcttgggacccacccttgccattgaacgacaagttttgtagagatgcagc

SEQ ID NO: 5445 - DNA, 805 bp, Glycine max
  unsure at all n locations
tgcnccgtgaanattggtgcgtctagacccgcgaccctatcattgaaccgccggcggcatgcaatctagtaagccctcgtgccctgactttgttgtcttggctgttgttgctaaaatattgagggtggacctgcttttgggttgagaagcaaagtctatactgtttgggggaggaaagaatctccatttttccactctaggactttctgaacctttgagaggtcactttacacagcatagttgctcttgcctatcacccaagagtcctgcctttccttttaatggaggggcagtttatttgcgatccacatcacttctaatttgtgcactcctccccttaaaacccttcgatttagtgcctttcgttccgagatcctctttcttaatcattccttttctctaaggtagtcattccttgaacatgagctccttccttcacatattgccattggactacgtgggagcaaattcctagggttccattcagcacccccctcatggatcaagagggcccttttaatgcgctgtcctctcatcacaaaatattcccttctgttgcttcaaccgttgaatcctttcctcctgaaggttgcatgctggccataatttgaggagatgaatcatttccttcaatcctaagcgggggaggacgaatcccttaactaattttgttccctactcctttcacaaggttccttctttgacagtatgtggaactatacgttccatggatcccgcaccatgttcttcctgctgggcgaaacttttattcctttgttggaagaactcggcgttttctctctct

SEQ ID NO: 5446 - DNA, 414 bp, Glycine max
tgaagaggatgctctaatggaggaaaagaaagagagaagggggggagcacgaaagtgaaggaataaaagagggaaataagtggaactttgaagtgtatctcataagactttcattcatcaaagttacaacaattgttacacatgcttctatttatagactaggtagcttgcttgagaagctctcttgagaaaacttcattgagaagcttctttgagaaaacttccttgagaagctagagcttagctacacacacccctctcataactaagctcacctccttgagaagcttccttaagaagattcctaaagaagctagagcttatctacacatacctctttaatagctaagctcacctccttgagatgagaagcttgaacttagctacacaccccctataagctaaactcacccc

SEQ ID NO: 5447 - DNA, 819 bp, Glycine max
  unsure at all n locations
ntgattgagaaccatgttatnacctacactatacaatactctatcttgcatgccagctgggcgactctataggaaacccgggtacctttctctaattcacgccatagagaatcggataaccattcacaggggcgttgaataccacgtacgagactgggccaatcctgacgatagccactcttaacgcccaaggattacatgcccctctcaacaggtggccgtcttcctaataggcccggaccgaactatctttccgacttgtgttcagccctaatggataaaggcacctgacgcggggttttgtccttactcgtggaaggagttgttgacaccgtcctctagccccttcttagtacaatactattgtgatgcccgatatgcaaatcgattctcgacaaccgccaataccgcttacgcaaattgcatttgggcataataaagtacatattgggctctaattcgcaataccccctcttttactattttataaacaattttcatgttgggacaccatttttttaacccattttttacaattataaggcccccctccattcctttagcggctaacaagaacttttaattcccccccatcttccgaaaaacattttaaaataaaacattttcttttcaccaccatttgtttccaacaaaggaaggttgccctcggaccaggggaaatcacactttctcccacaccctttggcggaaacggaataaattcatataaacaatatggttggggggataccgttaaccaatattcttttttaaatatgaataaacttttctcaataaaacccgaaactctctctttcg

SEQ ID NO: 5448 - DNA, 395 bp, Glycine max
agctctaacttgttttctattaagctcattttaacacatccacaagttttgaggtagattttttttttatagaaaattgtgttaagcttatttggataatctcgggctaaaaccttactttactaaacttagagccaatttaagactgtgttagacgatctttaatttgatcaatttcaagcgctatgccttggctgttcttgaaaaggtgtcttatttgacaaaaggtttaaagttttcactaacaacattattcaactcaggccttctagtatgtcctatatattgtagatcactaactatgatgcaggtactaaagcctacaaattatatacatttaacaatgggaagattgctgtgaatgaaaatgttttagttggggaagaaagcctaca

SEQ ID NO: 5449 - DNA, 360 bp, Glycine max
tattacaagaatatccgatcatatttaacaagctgtggcttattaacaagcctggtgccttaagtcctacattggcttcttcctctcttattaaacatgggcggtcacaaatcccctacctggtaacagattttggcttttatctgtcgtggattcacctttttactgccaagggaggcatactaatacaaattctacattctcttttacctcctagaaaacacggaacaactcggatccgcctctgtacaagtacgtgttacaatctgcagggtgaaggataaaagataaataggctggtttcatcttactggttccccatcatacccacttttggttcaatattttttagatctaaaa

SEQ ID NO: 5450 - DNA, 370 bp, Glycine max
agcttatatgacaagcaatagtgtagatgttatatgacattactcatgttaatgaatttattctagtatttaagcttgtattgtaattttttttattaatattgttttattattgaacttaaacaaaatttgatatttacaagcataggtgtttgagcatctgcccaatgttggttacatggagggagaggattacatgggtggggaccttctataaactaaatggaagctattaagaggtaccgggcgtgccctttcgatcaaggagaaattgaatgagttatagatgaatgttgtcatctaatatgcatataaggagcataagaatgtaaggcctttactaaagcaaacactttatattggctttact

SEQ ID NO: 5451 - DNA, 486 bp, Glycine max
  unsure at all n locations
tcttagaatcagtcattcatttggcttgaagctagtcatggcaatgacaaaatcaaataggagatttagaacctacaattctgatttaggaaagataacaatcgactacgacacatttgtgagcttcgactcaaaagatatcaacaaagagaaaaacatgactatgctaaggattaacgaaaggagcaaagtgatggatgattgatcagaagcactactggatccagataaccccaaatatacggctgcacttcaactgcataaagtatacaaaagctttcgtacaagaacaaagctagcagattatacaattcttattgaacaaagctggtactttatttattgtaatgagaacctctgtccttctttactaaactctccatgagttntaattttatcttttggttttaatacatatgtagaagctcttacattntgccgaactcaagcacaactctatatctttctttcacattgagaaacatg

SEQ ID NO: 5452 - DNA, 234 bp, Glycine max
tgacatttaatctatgaatcgaagacaatcatacatctaaaattatggttggacatgcgtaaagctcattacttattcaaacttcaaaacaacacatgggataaccattgtggcatttcatcaaacagttggtgtgcgcatgttaaaacacgtttaaatgacggatgatgagccatttgacatgcaaatttacaaaaaaaacaaggataggtctacagccacccatttgggcca

SEQ ID NO: 5453 - DNA, 451 bp, Glycine max
tggaacatataaactgaatcctaggcccccttaaggacttaatcaaaatatttgctggctgatcattagaattaatgaactcagtgataatttctttggacagtagcttccccgaataaagtgacagtcaatctctatgtgcttgagcctctcatggaagactgggtttgaagcaatgtgaagagcagcctgattatcgtagtataacttcatttgcaccactctgcagaatttcaactcttcaagaatttgtttacccacataagttcgcatgtaaccatacccatagatctgtattcagcctttgcactagatcgagcaacaacaattcgcttcttgcttttgcaagaaataatatttcctcgaatggagacagacacaatatcctgatgtggatctcctatccatgggatatccaacccagtgtgcatcacagtacccacatatttgt

SEQ ID NO: 5454 - DNA, 459 bp, Glycine max
agcttccacaacatccaagcaaaacaacattcagacagcacaagctatcacagccaagccaaacagagcaaaggccgaaaactctgccacaacaccaaccaaatcacagcttttctcacttaaagaccccagtaacaattcctacgatccaattcgttaaccgttggatcgactccaaaattttactggaagtatatagtacatgagcctacattgtgaccgctgggatctactatcaaacatccacaactcattctgcactactctttccacagccaaccacacacaagcatttttctgcacaaagccaaaattctgctgcacctattgtgacagcaaaattctgcgtaagtgcagatttcgaaaatcacactttctctcatccaatcttgcccaaatcaattcctacaagtcccaaatcatgtatcaatcatgtctaaaccaaagtcaagctttaca

SEQ ID NO: 5455 - DNA, 419 bp, Glycine max
  unsure at all n locations
tgcttcattttctcctcaagtctagttctttcgttcttagtgtccgccttcaatttggttaagccaatttcactggcatggaatttcttttatgatgtatgcccattcgagaagattgaattaaatgcgtccaaggtttatttgtcattctcaagcatataccatcttcatatttgtctaattcctcacatatctctttgatttgttttcgaacatcaggaatagaaagaactgacttgaggtcttgattgtcttggaggaaggtagtgtgaaattgttcccaaaccttttgatattcagaaagattgtcaagttgatttgcacttggttttgaagcaactccattttcttcttcatgactnttccattggtgcataatagtgttatcatcgtcatcaaattcgaacatgctactctct

SEQ ID NO: 5456 - DNA, 521 bp, Glycine max
  unsure at all n locations
agcttgcccagagaaggagtccacggaggaaatgcttaccacctcaaaagactggaaagcggtttctaatgactcctctacggcttccacataaggcatagaggatgggcagctcaccaagatgtcttcctcgcctgatacgatgaccagatgcccttccactacgaatttcaacttttggtcgagtgttgagggaacaactcctactgagtggatccacgggcgccccaacagacagctgtagggggggttaatatccattatttggaaggtaacttgacaggtgtgagggcctatctgtactgggagatcgatctctcccctaacctcttggcgggtgtcgtcgaaggcacgaaccaccattgaactcggctttaagtgggaagcattgaatggtaatttctccaaagtgctcttatgcatcacgtttaaactggaaccattatcgatgagcacttttgctacgatatggtccatacacttgatngatacgtgcaaagctttattatgccctctcccct

SEQ ID NO: 5457 - DNA, 483 bp, Glycine max
  unsure at all n locations
tgcttctatgtccttttcattgctttaattgttgagtaatccttgaaaaattgtcttgttaaaattccattggtttagctttcatttcattttatttggtctttggttattacttgtctctttgtttccttgtttgttggttgccatatagggaattggaaggaggattggtgccatcccttgaagaatttgagttaagaagaaaggggccaaccaccttaagagctattggactaagaagcactccaaattgagtgaatcaccaaagagagaacaaccaccaaaattgaggactgttctgtaattttgtaatttgcaatttacttaccttcattgctttcaagttttgtaacaaaaaggcgtttcattggaagtgtgttgggagcctccaattggttaccaaacttccatttgtgtgtaataattttaggcaatntttccttangatagtgagtgttttgttgggaaccttgaatgtggtca

SEQ ID NO: 5458 - DNA, 586 bp, Glycine max
agcttgcataagacccatatatagtttataatttgtcctattgtcttattgaacatgagcaaaaattgcatcccattttgatacaattaatctttctttaatcactttggtttgttgttgtagtctttcattatgaaaaaaatctgaactacatagataacaattagaaaaagtggtgattgtggcaatgatcactttaaaatagtcaataaaaaaaaatcccttaaactcccacatctaattctcttggaccatgaaaaaacatgacagttaaaaataaaacaatttgaatatgtgatccctggactatattaatgatctaatgattaaattaatgttatgattttcttttatgtgtagaaatcaaatataatattaaaaatttataataactcacacactctactcaatcaaactaataagattttttaaaagattaaatattaatgatgataagagaaaattatgtatttctttttatttattctccatgaagataagggatttgataacagacgaaatccccttaatcatacataacatcaacattatatcaaggaaaaaaaaactatatgaatttcaataa

SEQ ID NO: 5459 - DNA, 564 bp, Glycine max
tcccctgtagtaattaaagctaatagattgccaatcttatcctcaccctttttcttttaggcaaatattattcaatgcacttaggacttataaggatattgatttaaaaatttaaagtaaaaatatttttattagaaaataaaaaattatattatttataatttttttctttcctattatttatacaataaatatatatatatttttattttaatttcttaaccaatgctgcaaaggtattagttaggataaaacttgcttaaattacaggcatacccactctctcactcaagttaaacctgcttaaattataggataaaacttctagagaagggtataaaatataatatattcattcaagatttaaattaagtatattaatttttttggttcagattttttttatattctaaatgaaataaaacatttcactttttttatataattctaaactatctatgataataaatcatcaatattttaactagaataatacatgtgatataattggaaatacatcttatctccttaatatgtggttagaaattgattcctaatatgaat

SEQ ID NO: 5460 - DNA, 464 bp, Glycine max
  unsure at all n locations
agctngggtttgattggttggtatttttatattttgtttttattgtgcgacaactgtttatttttaaaagattagaattctgatcttttttatatctttatattttcttcaaattatattccttgagatgttatattatttttattttatccaaaatgaaattcatgttttcaacggaaaataaaatgaaattcatgtttttcttaccaccacattttcattttatccaaaatgaggtttgtgatttcaattgaaaatacttcccgtctttggttcatctggacaaaatatttttaccgaaaatgttttcaaaaattccaaccaaacgcatttttatcaccattttctatttatagtgaaaataaaaataagaaacaatcaaaccaaacatgctaacacgttacattatcctccatgaaaaatttaatatttttgttgttgttacaatgagaagtttaattttt

SEQ ID NO: 5461 - DNA, 453 bp, Glycine max
tgtgaaaagaaaaaggttcttacggaagaaagtggcattacaagttaatattctacagaattacagaaatcaaaacatagtggttggatgacagagcatcctgcagaattctctcctttttgaagtccaaaaaggaacagttggagggctctggtaacacccatctattgaaatttgaaagtactaaagttcattcttttaccagtggaagttatactacaagttttaagacgaggttcacaatggaacccctaattcaggaggatcagccaaggcttttcatcataggttcacaacatctagatttgacaactctggtagggatggattggggaagttataactggtggtagctttcttgattatactatatctgtaaaccaatataatcaccttcattttgaagttcttaaatttatattcattctcttcttttcttttattctttctata

SEQ ID NO: 5462 - DNA, 510 bp, Glycine max
  unsure at all n locations
agctntgagggatcaaagaagaaatagcaatatggtgctgattattttctctgtccttttcgctctatccacaaaagaaacagtgctgtttgaatttgatcattgtattgctagatttttgtagttatatgaattttctttttgaattggttcaatgagtgcatgcatacattttgttagatttttatgggactagacttacgctcatgagacttataattttctgacttttttatttgcttttggtcttttgccttttgccttttgatttcgttacttattaaaacattgctgttggttgccattggagtttgtgagaagacttcgtactagtatttttttgagtgctgttattttactttattattgctaatgaataacagcttttgaatgtattaaggagtaataatacattagtattatctgatacactattgataatctttaaaccaaaataaattaagagcaattggttagtttattaaattataaactgaaaaaatggtttac

SEQ ID NO: 5463 - DNA, 431 bp, Glycine max
tcttgcacttcaagaaggcctatttgtaagttctaaatctctagaaatagccattattgagcctattcctccaataactagatatctattgtcctttctccctctctccctctctgtgttaatgtcaaaaccagtacatcatgataaatactaattcatcaaatacaaatagttatagcacacaaaatttattcagtgccctctaggttgacttatcttgtatgaatgaatattcagtgccaagagcctagtcaccccaaatattcaaactttaatctttcgtaatagaagttagaaacagggttattgtccttcgtaattctcatcatgggttacttttttcacctcaacggttattttttttgtctcaattttaagtgctggtgcgagtacatcaactgcaaacccgagtaagttaataatgaccaata

SEQ ID NO: 5464 - DNA, 517 bp, Glycine max
agcttataagaacaaaattgccttaatcattaccaaatatgcatgtgaattaggacgcatcaacaagaatcaaaccaaggctattgtgcaagcaatcaatggggcaaaacacaccaaatgattataatgatggatggctcaaattctcacaaaggtaaaatcatcactttcaaattgagctttcaaaactatcatgacatgtagaaaagaatcaaggatttcaagtcacaaaatgtcaagaacttttattttcaaaacaattacccatttcttgaacatatcctataattcaaagaaaaacatgcaaagtcgtacgtgcacatgatattgacccaaaatattaaactgaaaatccgacgaaactaacaacattaacaaattaacacaactaacaaattaacaaaaccaacaaaactagcaaaaccaaagaacactccccccccatacttaaacaacacattgtcctcaatgtagcacaattaaaagattaaaaacaattaaatcatcaaagagaatc

SEQ ID NO: 5465 - DNA, 478 bp, Glycine max
ctaagcttctatgaaggttcgttcctaatttctctacaattgcatcacctctcaatgagctggtgaagaaaaatgtggcatttacctagggtgaaaaacaagagcaagcctttgcttttctcaaagaaaagcttactaaggcacttgttctagctctttctgacttttctaaaacttttgagctagaatgtgaagcctctggagtgggagttggagctgtattgttacaaggtgggcaccctattgcttattttagtgaaaaaattcatagtgccaccctcaactaccccacctatgataaagagctttatgccttaataagagccctccaaacttgggaacattacctttgttccaaggaatacgtcatccatagtgatcatcaatcacttaagtacattagagggccaagcaagttaaacaaaaggcatgcaaaatgggtagagtacctagagcaatttccatatgttatcaaata

SEQ ID NO: 5466 - DNA, 476 bp, Glycine max
agcttcttgctacattatggtcaatgagctgcagaatgaggggaaaaagcaattttcctgttataaaaaatatattagccaattttgatgatgctttctgagaattgagaggcttgcctcctaaaagggattgggatcatgctatcattttgaagagggctcaaattcctaatatttgcccccacatgtatatgcattatcaaaagaatgagatagagaaaattgtgaatgatatgctttgtgctgtaaggcccaacactaaccctttcagtagccctgttatacttgtcaagaagtattgtgtgtggagattttgtatagactatcaggccatagacaagtaagcaccggataaatttcctattcccataatttatgaactactaaatgtattgcgtgatgcactgatttttgtaagatgaactactcttttgctaacataaatacactcttaatggtcttgaacagtataagac

SEQ ID NO: 5467 - DNA, 492 bp, Glycine max
  unsure at all n locations
tggagaggatgcttcaatggaggaaaagaaagagggagagatagagagaggggggagcaccaaattgaaggaagaaaaagggagagaagttgaactttgagttgtgtctcgcaagactctcattcatcgaagttacaacaagtgttacacatgcttctatttatagactacgtatcttccttgagaagctgtcttgagaaaacttccttgagaggcttctttgagaaaactttcttgagaagctagagcttaactacacacacgcctgtaataactaagctcacctccttgagaagcttccttgggaagattcctgaagaagctagagcttacctacacacaccccctataatagctaagctcacccgcatgccccaatacatgaaaatatataaaaaagtgcctattacagagactactcataatgccttgaaatacaacgctaaaaccctatactactagaatggccnaaataccaggccccaaagaagg

SEQ ID NO: 5468 - DNA, 444 bp, Glycine max
agcttccacaaatccctcatgtaagactatgtctaaactaaacaacattattgtaacaatataattaaaaccaaaacttaacctacaaatccctcatgtaaggctaagtttcaatcctgcttcaatcaagttctaaggcaataatacatttcctaatgctaaagtcacctaattgtgcacacaaatgggtgatcagaccaaaagcatacaaacattaagcattgaagggagcattgaacacagaaaacataatcaattagatattaggtatttacatcagctgttcattaaaaatccccaaatagggtgtttagccaaccattaaaaagaaaccctaacaatgaatgagattaaaagcagagaatgatagttccttacacaagaagggggattcctcctcctcttctcagtatctcacactcactctctactcaataatctctc

SEQ ID NO: 5469 - DNA, 477 bp, Glycine max
ttgagccaaaatcctgactcaccataaaccttgacccagggtgagaatgtcaatccttaccctcggaagcaaaaaagaatagaagggaaatttccaatcaaagaaaagagaaggaaaatttccaatgaaagaggaaaaagaaaagaaaggaaattcccaatcaaagagtgggagaaggaaaaaagaaaaggaagaaaattcccaaccaaagaatgggagaaagtaaaaaaggaaggaagctcctggtcaaagaaaccagaagaaatgtgcagagaggtctttggaccagacgatatctgaacagtacagaattgtcactaaatgaacaaaaaggaaggaaaggaaaccacgacctaaaatggtcttctccctttaattaccaaccaaaatcccgtgcgctagcgacccttttttctcgccccgcactaaaaaaaaaaacagaaaaaggaaaagcccaggaaaatcaaaagccaaaaa

SEQ ID NO: 5470 - DNA, 806 bp, Glycine max
  unsure at all n locations
ccccctgatgagtctcttgagaaccctctnaaatcgtnagcttgtgaaaagaaaaagggtgctttctgcataaggtggcattccacattttttgtttgacacctggccgacaaattcaaacatagtggttggattactgaggagcctgcagaattattttctttctgaagaaccaaaaagaacagttggagggcgcgtggtacacccatctattgaaattttaaagtactaaagttgatacattaccaggggggagttattcttcaaattaccatataacgttcacaatggaacccctaattcacgatgatgaaccgaagaaattaataaaatgcacacttcctcttacaggtgcttgggcctgtggggatagattgttgaaaaaattacaggagctattttccctgattatacaacgttcgccctacaaaataaaaaccccccattttgacacttccttaaacaaaaataaaataaaataggctgagtttatatactttttactgcgcacgcgccaattttaaaccgctctcaatctttaaatccctcccaaagcgcaagcggggctctctttataatcctttcaattaatctcccctcttactcccttcaanaatccactcaccccttttttaaccttctctttgagaaatcaatgttctacaaaataatcggcctgacatgatcgaaaaactcctaacgtgtaactcttggtgtcattctcgccataaaacgcctatacataccttgtttaacatccttccaattggtactaccacggactcgaaatcacaaaggatatttcc

SEQ ID NO: 5471 - DNA, 372 bp, Glycine max
  unsure at all n locations
gctttgaaanataataacttgaattttaaaatacccattttctctccccctttggcaacatcaaaaaggccaaagtgcgtgaaacatgaataatttaatcatacacaaagcataatttgtaaaacaaacatataagattctaaaaacatacataaagcataattttaataaaaccaaattgagatgcaaaccacttagtcatatatcacaaaataaccaagtctaagtataaaacataagcatctaagtgccaaataaagacaccaagatcagtcataattaactaagtaccaaatacctaaaacataactaatgttcacagaataaataaataacataatggtgtaaatcattcacaaaacataataaaag

SEQ ID NO: 5472 - DNA, 514 bp, Glycine max
ctcagcttgcattcctctcttcccttaaacttcttttatttattgctatttatcttttgctttaaagaagtttattttgaattgtcttttgagtaattcatgttaagggtgcattgttaatccaaaaagaaagagtgatagttcaattggggaatagtctttgcatcttaattcaacccccctttttcttaaggtaactgaggccatttgtcccacatcctattcttgataactcacttctctctaaaaagacaaaatgaggtcacatgaacgtctatatttttacttgaaaacacagtcaatcaaatgcctttttatttttttattttgaaacttattttgaaacttatttgctttgaactttactcgctgttttacgacacccccaccaacgtgcaagacgagtaatctctgattgaacagtcttagaagtcaacactcaagaacgcaagtcgcttgagccaacagaaccatggctttgccccacattccagtgaaagttgaataaccaaca

SEQ ID NO: 5473 - DNA, 414 bp, Glycine max
agctttcttagtacaaaatgcatattctttttgtgattggtatttgaatataattcattgtatacatacctgaattggagtagtatcttagtagttttttgggtgaacattagaagtaaatgtatggataggtcatacacagaggacttaggttctgtttttttttttgtatatgttttgtgttgatgtaattatctctcattgcacaactagtacatgtatatgtatcatttttttctaaatacatatcaatttgctataaaaaggtttgtttttaataagcaaaaatgaaagctatgctctaacccaaatacacaatccacatatttgctactttacaaagtgaaaaatgtattattttggataaattttgtgttttgataaaaacaaattcatggtttaaaaaaaaaacta

SEQ ID NO: 5474 - DNA, 455 bp, Glycine max
ttgagccaaaatcctgattcaccataaaccttgacccagggtgagaatgtcaatccttaccctcggaagcaaaaaaagaatagaggggaaatttccaatcaaagaaaaagagaaggaaaatttccaatgaaagcaaaaaaagaaaagaaggaaaattccccaatcaaagagtgggagaaagcaaaaaaagaaaagaaggaaaattccccaatcaaagagtgggagaaagcaaaaagaaaagaaaggaaaattcccaatcaaagaatgggagaaagtaaaaaaggaagaagaagaaggaaagaaagctcctgatcagggatcgaaggaaaaacagaagatatgtgcagagaggtctttggaccggacaatatctgaacaatacagaattgtcaccaaatgaacaaaaaagaaggaaaggaaaccacgacctaaaatggtcttctccctttgattac

SEQ ID NO: 5475 - DNA, 323 bp, Glycine max
agcttgatgtgagaaagcgtggaagagtcagtcttcctacttttgtttgttgaccacagagtggtacctggagatatgtcgcgggggtcaggagaccttggggacgtcaggtggggtgctattgcccaaaaccaagcttgaccaatcccgacccaacccgggcatagtcagtcagtgagaacctgtgacgtacctaagcaggcgagctcctggcagtcaaccaataaaagaataaagtccacaaagcaaggaggcttgtgtggcggctggcccactatgaatcttgagtggtatctggaaaatggcctctggtaatcgattac

SEQ ID NO: 5476 - DNA, 505 bp, Glycine max
ttgcaatcactaagagactcttttaacaacgatagactaagacttagctttcttattgatctttggtttcttggtcttgatttggacttaaaataaaacttgtgtttcttttgtcttggcatcatcaagaccatcatacacatacattcacaaacatcgctatattgtcgtaacaacccattgtcttttgaaccatggatccctcccactcaagttttggtgttatgcattgtaaatcgcaacgtgtctcatcaatcggatgccctctctcacactaaacgaaaagtctccattagaagtcttgtttcatcgtccatcaaattatagtaaactaaaagcttttggttatctttgttttccttggttcactccatatacaactaacaaacttcagaccaagtccgtaccatgtgtttcttaggttacaatcttactcaaagtgcatatcttttgttatgatctttcagagtctaagttgtcacctcccgcatgttgaatcattgaa

SEQ ID NO: 5477 - DNA, 440 bp, Glycine max
agctatagatattagctgaaagactcatggatgactttatctctaaaatgcaccctgatgaaagagcccctctcacttgaagcgtggaattgtaccttatgttgaaatttgactttttacatagagtaaagtggggacgaggtcaaacttttgaccagtggccggcgaagctttgataccaaaattaaagaaaatggtttacagaaattgtttgttaggcagcataaatgttttagtatttacaaatcctatttacaaaatcagagtacttctaacttaacacaaatacaataacttgtatagtaatcagtaggcttaattaattatacttttggctcctttgtgatagtcaatgtgtgatttttgtcctcttataattctttgcagcaatcaaatcctccattgtttccaattaaaaatacttttggctcctttatgat

SEQ ID NO: 5478 - DNA, 481 bp, Glycine max
tgcttctacatatgggttctatcgcacagaatggcatgatcactggctgacatattctcaattagctctgttgcttttttggggtcttcagctttatttttccccctgcagaagcatctagcaatttcttggtttgtggtatcagcccatctataaacatattcaattgaattgtcttggaaaacctatgggtgggagttcttctcaataaacctctgaacctctccaatgcttcactcatagattcatcacggaactgatgaaatgaagagattacagctttcccttccgcagtcttggactctgggaagtatttctttagaaacttttcaacaactttttcccaagttttcagactgttacccttaaataagtgaagccacctcatttgctctcctgccaatgagaatgagaatatgctgagtctaatagccttatctggcacaccggcaatcttaacactgttgcatattttaatgaa

SEQ ID NO: 5479 - DNA, 571 bp, Glycine max
agcttgactatatacctcttccattgtgctaagcatgctatttacaacatcttttcgtgaagaaagactgaaccaccaaggaaacaattcgaaacacctgaaagcaaaactcgataaaggaaatcatgttaccaagcaatacataaattggctacatagtgtataaacatgtatctattaggaatggatgctcccatgttaaaattccatattatcttgccatgtaaaagttttgtctcaatgtctccatagacatttgtgtgagctctattaaaatttgtgaatattttcaaagagactataaataagtaaaagatttcttagaaattgggcttaaggccttagtgtcaccacaatgaagacagttgagggtttgtgaaagcatagtctcccaagtcaagaggcttttataccaactataaataaagtgacaactatattggttctcccaccaatttctgcccagggagaatacaaatgtatataggctgcctaataattctaatctaataataccagcaaaaagaaacctgtttgcattcctaatataataaaaccaggcaactaattt

SEQ ID NO: 5480 - DNA, 358 bp, Glycine max
tattgtggcttgataacctgcgaaaaaatgataaaatggtatcattatattactcagaacaactcttctactttatgctaatactaaagacattaattgcattaaggaaattatcccctctaatttggcacgtgtatgaaagaataattacaatgtacgtaatggaaacatgcataaaatgggttaaagaattcatacaaccttgggtttgtttcaattgataattacaaattcagagacgtccttacaaattcagatgataattacaatgtgccgtaataaagccgtcgtaagttcataagctgatcctggctggtcaacctgcatgagatcgtactagatgttatcatcgattaca

SEQ ID NO: 5481 - DNA, 158 bp, Glycine max
tattgaatataactttttctaatgtctcgctcacgaaattataatcgtcaacccgtatttcttttgtttttccccccggccatctcttcacaacgggaaaattttacagtcacaatcccccattcctcacccggccatcttttttttctccctccctt

SEQ ID NO: 5482 - DNA, 637 bp, Glycine max
gcttgtcttaagttctgagagacaaaaggagtcatgtacttatgaagatctcttaccaagtttatgtagtattttgctaccttttgtcctgtctcatacctatctgctttgtattggatcatccacaggttcccggctctatgagggaaagcagtttctgttgatggattctcagccattcttccaccataagggttgaaatacattactgctttctctaattcaatcatcttcttccaaatccctcccaaccctccttgggtattggtctcttcacatagtcagatttccttttcaagtacttgagagaccaaggttgtctctctagcaaaatctcaactggggttgcaatgtccatgttgtaccaaaacagcacggattgaagccagcttgtttcgatgcattcagattgcttcaaccccaattaaggagacctctcctccatgacagaaaacagagttttggagtcgctgaggaagagagctatgaaggtagcccctcactgtctttatgatcttctgttggagataattctgttcgagacattgttgatcaactaatatggacacttcttcaaatttaagtcttgattcatcacgttgctggagactattaaccccttttgttggtctcaact

SEQ ID NO: 5483 - DNA, 483 bp, Glycine max
tctatccatggtggttaagcattgatgtcaagcttctaccatggatggttaaacattggtgtgttgcttctgcctttatggtggttaagcattcaaatattgtgttttgcttctgtcttgagtggttaagcaccatgtttagcttctgctcttgatggttaagctttgttgattctgcctataaggtggttaagcacttgttgttggttcgcttctgtcttgagtggttaagcatcatgtttggcttatgctctggatggttaggctttgttgcttctacctatatgatggttaagtacttgttgttggcttgcttctatcttgagtggttaagcatcatgcgtagcttctgctcttgatgattaagtttggtttgcttctaccttttatgtgggtaaatggttaagcattgtgttgtggcttctgcttaatgggtaagcatattccaaatgtctttgaatgttttcagtcattgtcaatctg

SEQ ID NO: 5484 - DNA, 543 bp, Glycine max
agcttcttttatatatatatatatatatatatatatatatatatatatatatcgaatgttaattagtatccttagagtattaattaaggaactaaaggagaaagattttcttaaaaaatatacaaaattattttatttatgactttttttacttttattatttctattataaatattttttcatttagtgtcctaaggttagcaagaccatatatatatatattcctttggcggatcgaaataaataaaaaatcttttgagccttgtggacgagattctagagggtaatttgaagaaaaagatcattgtaaacagttgtagcatttgttgctagagaaatgattatttggactcaccaggttcactagagcagacttggctttaactttttcagacagcttcaaattaattccatttttcattatcaaattgaataaagcacatgatcaaatctttcacagtttttatttttattagatatatgtttcacagttttaattaaaaaaatcaacatgtcattatttattagaagactctgatgac

SEQ ID NO: 5485 - DNA, 585 bp, Glycine max
  unsure at all n locations
tgaagtttgcatcttgcttgattctattattgaagaagctaattaagaactctattcaaaatggcttttgttactgtcaactatttgaggttcaaatgaatcaggttccacagatcttttgtcatttgtttcaatagttcatttcatttgtatataacttccgtgtgatttaatcatgatgtgatacatgtgcatttgaataaattcttataagcttgttcaactcatttgaagtttttgtttgtttgaagtccgtgaatcataaaattcatgtttataatactattgtctggctcaatgcagtgcatacagaggactatacattctcaactggatctatcgctactttactgagccccactttgtccattggataagtatgattctctcttattgtgttttatgggtactattttttttgcttctacgcttattataattattaagtaactacactctgcattattcactactatgtcttgtggaaccttttcatcgcatatttttaagttcatacttntaaaattcttcatacctgagatgcatttgtgacgttgttcaaaatgtttttcccttatcatacaa

SEQ ID NO: 5486 - DNA, 441 bp, Glycine max
  unsure at all n locations
gagcttgaatttgggttagacatgattgatacatgatttgggacttgtaagatttgatttgggcaagattggatgaagggaaaggtggttttctaaatctgcatattgtgcagatttttgctgtgaaattgagcagcacgattttgcacaactgcataaaaatactangcatttgctggttgcggaaagagcattgcagaatgagttctggatgtttgctagtagatcccaacggtcaatatgtatgcttatgtactagagacttccactcaaaatttggagtcgatccaacggttaacgaattggaacgaaggaatcgttactggggtctttaagtgagaaaagctgtgattttggttggtgttttggcagagatttctgcctttgctctggtttcttggctgagatagtttgcgctgctcgaatgttgcattactttga

SEQ ID NO: 5487 - DNA, 460 bp, Glycine max
tgtgcgaatcaaatcactcctgcatttcatctctaccatgcatttttctttctttacccactcctcacgtttggttttttagggaaaaacaccataactaaacgcgccacaagacatccctatcgcaccagatccaaatctagaacgatgggtgatcaagaggagacacaggaacagatgaaagccgacatgtcggctctgaaagaacaaatggcttccatgatggaagccatgttagggatgaggcagctcatggaaaagaatgtggccaccgctgccgctgtcagttcggctgccgaagcagacccaactctcttagcaactgcgcaccatcctccctcaaacatagtaggacgcggaagggacacactggggcacgatggcagccctcacctgggatacaaccgagcggcttacccttatggattgccgcccaactactcaccacccgtcttgcaag

SEQ ID NO: 5488 - DNA, 457 bp, Glycine max
  unsure at all n locations
agcttcacaaggatgtgttatggtacactttttaagaaagagtatattagcaagttatactttgagtatgtagcttttaagataatcggaattataactttctaacttattaaaaaatgaggatactttaataaatctttgattagaatttataataagcaaatattttttaatatacatatatatatatatatatatatatatgaagaattttaattatgatataagattctctaactattgataatttgttttaaagaatattaagatgtaatctacatataaagataaatatagaaggtcgaaagaggtaaactattaagtatattaaatatgtaaataaagataaaaagagaatagtttgaaatagttgatagaaaaaatagttgactagttttagaaataggctgtgaaatgtatgtgtgaaatgcntctccnacgatgagaagagagagag

SEQ ID NO: 5489 - DNA, 464 bp, Glycine max
tctagccaaatggacttaccttgaattaattcctttgatagcccctttgagcctattttcccctttctttgttttgaagctcattacaagccttaagtgaaaaaaccatgatatcaccttacccttaaggaattatggagctttggaattgttttgggaataagctgggaataagtgtgtgtggggggggggggggccatggatccctcccactcaagttttggtgttatgcattgtaaatcgcaacgtgtctcatcaatcggatgccctctctcacactaaacgaaaagtcttcattagaagtcttgtttcatcgtccatcaaattataggtaactaaaagcctttgggtatctttgttttccttgggtcactccatatacaactaacaaacttcagaccaagtccgtaccatgtgtttttaagttacatcttactcaaaggcatatcttttgttatgatctt

SEQ ID NO: 5490 - DNA, 472 bp, Glycine max
  unsure at all n locations
agcttaaagtatgcccgagtcattcatccctatgagatgttgntgaagtattggcgatcagaattgccattccttggattataaggttgaaccaagctcatgctcttacaaaaaggttcatcaagtcaagttgaaatatggaagtaaccgtctttcaaaattggggcaaaagatgaatcgagtcacatcactgcttcgtctactgccaaacatatttaggattattgatgtccttgttacttccagtttcaccttgacaaagatgtcatggaccatgttgaaaatctaaattgattcaaccccatatcttgcgtaaaaatgccattccttggattatagggttgaaccaagctcatgctcttacaaaaaggttcatcaagtcaagttgaaatatggaagtaaccgtcttgcaaaattggggcaaaagatgaatcgagtcacatcactgcttcgtctactggcaaacatattt

SEQ ID NO: 5491 - DNA, 407 bp, Glycine max
ttgagccaattcaaacgacaataactttttactcggatgtctgattgagtcccgtaatataacgacacgctcgaaattgaatgttgaagctctgagctaattcaaacgacaataactttttactcggatgtctgattgagtcccgtcatatatcgagacgctcgaaattgaatgttgaagctctgagccaattcaaacgacaataactttttactcggatgtctgattgagtcccgtcatatatcgagacgctcgaaattgaatgttgaagctctgagccaattcaaacgacaataactttttactcggatgtctgattgagtcccgtaatatatcgagacgctcgaaattgaatgttgaagctctgagccaattcaaacgacaataactttttactcggatgtctg

SEQ ID NO: 5492 - DNA, 438 bp, Glycine max
agcttccactccagttcccattcgagtacctaacgggtgtgattttcaaacgttaaaaaccagaatacacaatacccttaagctaaccgacaaacaatttttggatgaaatttactaacgacagcctttcacgtatgcaggtaatcaatttcggtttaaatgtatgcaactgaaagatgatgctgatgttaacacaatgttaatgtgtaatcatgaatttttgtttgttgatccgattgagtttttatgtagcattgctagaaccccagatggcattttaaatttacttgaatctattatgaaccctactcatgatgccctgctatattacaatgggaggtggaacatgtcacgccaaaatgagtttgttggttactcattcgtaggaaaaaatccccaaaactttgacattcccactggatgtaccatggatgaact

SEQ ID NO: 5493 - DNA, 425 bp, Glycine max
ttatgttttccctcccgtggatgtagccttgatcaaaggtgaaccatgtaaatctgtgtgttctttctcttttttcttctctttcaccttgctgcacaattatgtgtgtatgacatttctattctgttgcatctcctgctgctgttcttgtttgttcttcatcacttccacaacaaactggtatcaagagctcaagttgcgatcaagggaattcaagattcttgtctgaatacaaagatcaagctatgggagtcttgtttctggttcttccactgcttcattgtgatcaataacactcaagaaatcatgtgaaacacaatcaggattgaaaaattcaatggaaagaacagcttcaatctgtggcgcatcaaaaagcatgctttgttgaaggaacaacgtgtttgggctcctgttgcgttttcatc

SEQ ID NO: 5494 - DNA, 372 bp, Glycine max
  unsure at all n locations
agctttatttaaacaaattttcattaaattaattaattagtaataaataatgtagatatgttttaatttttaaatgacatttctaatttactaaggcaataataatataacatttctgtggaagcaaagctaccatgatgattcaccaaaatgttttgatgatgccaaagctcaaagagttgtttcaagattaaagaatcaagcattcaagattccactcaaagattcaagaatcaaatgaagaaatcaagaagcatcaagccaagtcaaagtaggtggtaaaaagtatttttcaaaaaacatcaaatagcacactttttgttttaaaaaggattttctgaaatcttctaagttaccagagtntttactctc

SEQ ID NO: 5495 - DNA, 423 bp, Glycine max
ttgcagatttggccttcgccagtgaaaggatcaatgtgggtccgaaaagaggcaaatttgatcatcctactaggacgactgaaaaaactggggcaaataaagagggtgaagatgaaggagaaacccatgctgtgattgccattcctgtacggccaagtttgccaccaaacccaacaatgtcattactcagtcaataacaaacttcctccttacccaccacccaattatccacaaaggccatccctaaatcaaccacaaagcctgtctatcgcacttccaatgacgaacaccacctttagcacaaaccaaaaacaccaaccaagaagtgaattttgcagcgagaaagcctgtagaattcaccccaattccagtatcctatgctgacttgctcccatatctacttgataattcaatggtagccat

SEQ ID NO: 5496 - DNA, 1160 bp, Glycine max
  unsure at all n locations
acctctcctcccantttgtactncatactctctcttacctctgttcctcanttnacttcctcttnacaactatttcattnccccacccgacgggagaatgattacttgatttcccttggacacccccatagactcgaagcatgcccgcctcgaattttggttgagaacaaccattcgatgctattttattactgcacattgtaaagacatctgatctcctgtcttagaatgcggattgaacggagatagaagtaggcttgttctacacctctgacaatctatgaagcaagagtcttctgctcgcgcatattagaggcgctgccgattttttgcaacaaactgtcttagaactattacataaagcggtttccgcatgtttatgccgngatagcgaggcatattgcccgcaatgcgaatcccgggattgttctgcatgcgctcgagctcccacgagactatagatgtatgggatctatccaccttatgaggacatatctccacccatgttctccctgggttttcatcacggcccagcgatacaaacaaaagaaacgcgccttgggagccggataaacccgcgcttctggaggtgtatcaaacaacccgccaatgtacttctttcgcgtgtggtatgaagcataaacaaacatattggccctttgcgtcctcggttataacccccccttctagactacgtttctggcgccgtcgccaccacaatagtttctacttggccctcgtggcaatcgcgagaacgcctcttcaccatgaatagaatgtgctctcccccactagtacggcctatacattccttttagtgaaccgcgttcaacaatgaaacaaccatccatccccctcagtttggcgcggtccgatcctccttcggttgcttctctgggttaacagctctagcaatatcttttttttcttgctgcacatcgactgaacaccctaacacctctcccttgggaaggcttaccacacaaccaagtggtagcgtcctcctctatttattattagaccgccggtatacacctcgtctccacgctaaaaaaacaaacctacactcccttgcctgngtcatttatcctttccccccggatgccgcataactccatcctccggtagagaagtttccacatacttactggacacctgcc

SEQ ID NO: 5497 - DNA, 355 bp, Glycine max
agatgaaataaatcatccaaatcaaaatgtccgagctatttattgattattgcctatggaatcaattgtgttaaaaaaaatattaatcctatgtgtatctcacctcttttgataaaaactgatcgctaattctgattaatatcatggtcagaaaaaaaagttaatcttgtattttattatgacaggaaataggaatgtttttataccatagaagcattaatatgccttttcatttgtgtatgaccatattgtttcattaattcattgccatattccatgtactattaattaccgatccaaacatttatgtcttaagacctatacaatatttaatgacaatcaatttgcaaacatg

SEQ ID NO: 5498 - DNA, 375 bp, Glycine max
catgcaagcttggttaagaagattcctaaaaaagttagagcttaactacacacacctctctaatagctaagctcaccttcttgagatgagaagctagagcttagctacacacccctataataactaagctcacccctatgccagaaaaaacatgaaaatacaaaaaaagtccttactacaaagactactcaaaaggccccgaaatacaaggctaaaaccttatactactataatggccaaaatacaaggcctaaacgaagaaaaaacctattctaatatttacaaagataagcgggctcatacttagcccatgggctcgaaatctaccctaaggctcatgataaccctaaggcctttccttggattatctggccc

SEQ ID NO: 5499 - DNA, 394 bp, Glycine max
ttctaaagttttctggtttccaaaccttgaaaacaaaagtgtgctatatcttttcattctcttctgcctttgccaaaaagaattcgccaaggactaatcgcctaaattctttttgtgtctatcttctaccttctgcaaaagaacaaaggactaaccgcctgagatatcttttgtttccccttcacaaagtttcaatggactaaccgcctgagaactttgtcttaacacattggagggtacatcctttgtggtacaagttgagggtacatctactcgggttgttatgactgagaacacaagagggtgcatctcttgtggatcaattcaagtgaagggtacatccacttggttgttcaaagagaacaagggacggtacattccttgtggatctttg

SEQ ID NO: 5500 - DNA, 308 bp, Glycine max
aactcgaggcgagcggcaggcatgcaagctttttgttgccattgaaaaatctaaaccggagctatgatcaactttaatttatggctgattcaagaccgactatctgacctatcacttgctgggacgatccctaatcctacggatgatttttacgaccacataaaaggaggttgtcgtattatacctcctgatttcagacgcaacggatgttgccacaaagacaacagtgatattttttttattgcgataaagacaccaatgatttttatggacattttcaaagaaacccatgtggcatccttaatata

SEQ ID NO: 5501 - DNA, 396 bp, Glycine max
ctgaaggtgcgtagcccaccattttccctagtagaatactggtaatgtgtctactatcattgtcatcgtttttttcgtcattgaggtgccacttgagctgccaagttctccacctttgggcgtattctttgaaagatccgtgcccccttttttgcacatattttgtagttgcatcctatccgaagccattataccgacactgcctaacgaaggcaaccattaggtcctcccaggaataaactcgggaaggttccaagttagtgtatcaggtaacaactaccccagtaagactttcttggaaggaatgtatcaacaattcctcatcttttgcgtatgcccccatctttcgacaatacatctttagatggttcttggggcaagtaatccccttgtact

SEQ ID NO: 5502 - DNA, 383 bp, Glycine max
agcttgcttaagaagattcctaaagaagctagagcttagctacacatacctctctaatagctaagctcacctccttgagatgagaagctagagcttagctacacaccccctataatagctaagctcacccccatgacgaaaaacatgaaaataacaaagaaaagtccttattacaaagacaactcaaaattccccgaaatacaaggctaaaaccctatactactagaatggccaaaatacatggcctagacgaaggaaaaacctattctaatatttacaaagataagcgggctcatacttagcccatgggctcgaaatctaccctaaggctcatgagaaccctagggcctttccttggatctctagccaatctaattggagtc

SEQ ID NO: 5503 - DNA, 371 bp, Glycine max
tgaatgggattcagacgtgttgtgatgataacagtgatgacaataaagcatgatgacaactgtgagtggcccagcccgctcagcgatctgggatctagctccgagttcatgagcctagcacgatgctagatctcacgactcgagatcaagatttcagactccagattgccgaatgaagaacagactcactcatgataacgcctaacttttttctcccaacattgaataccacatgagtttctgacgaaatctttacccatgagcttttactctctactaatcgatcaccatactggtgtagtgggctacccggaacgagatgacgcttgaaaaagttttcaaactgaatttacaatgctccactcattttc

SEQ ID NO: 5504 - DNA, 467 bp, Glycine max
agctttatacaattaattaagatcaatggccaatatacaattaattaattacatatatacttatatagtgggagaatagtgtctatcagagttttaattttttgtactgttttaattacaaagacttcatttatttttttttaaaaaaaagttgattcatggattattttaaaattcaaaagtaaatgatttccactcataataccaaggaataatagtaaatgaaggaaatatttattctctatttctataattaactttagaaaaaatttattaattaaactagctatacctgttattattgttttgaccccctttttttgatagactagtttcttttttgtgtgtcagcaaaatcaaagatatattaagcaaggtaccagagatgtaccaagatagaatacaagtttaagtccatccctggttactctatatttatcacatataataaatataaattaatcaat

SEQ ID NO: 5505 - DNA, 510 bp, Glycine max
tgtgcggtgaactaacctcctttaacatggaattgtggtgcaattgtgatttgatacaaattgatttaactaagaagggcaggaaaaataagggaaagatcatatttgatgtggacatccccacagatagtgttttcagattatagcttacacagaatgttagcataaatatagttcaaatggctgaaatattttacttcttagaattcattcattatattattactaatttaaggatcctggtgacaaatatgattgttttaaatgacatcaaaagtggatgaatttgaggtgtaaatctatattgtatgtttgacttgaaattggtgagaacgacaagaggggtcatgtgataaattattggcttttcaactattgatagattagttttgcgaattcctgcataagtagattattatattgacgtggtgatttgtttagcagacatttgtcatggaacctgcatttcttccttcacttattattgatatatttaaaagagtttggaaa

SEQ ID NO: 5506 - DNA, 490 bp, Glycine max
  unsure at all n locations
atttcgttcattttcgaattcttttcttccgtctttaacgcgcttttaccgtttatttaagccgttttctcacctaataaatgataaaatgaatttcaaccgatcatttgtgttgtaatctcatttaatcactcttaaaatgaaatctaaccgatcgttcacgctataacctcggttaaacaaaaaaagtaaaataataataaaataatcaaaatatcttgaaaaataataataaaataaacaaaatatctttgaataaaataaaacaaaaaaatcaatcggacgttttttctttggaagtttccttgaatgaattgattaataaccaaagtgaaactaagactaaaatagactcacaaatcaagttttgtccgaaaatcactaaaaaccgttttaaggtccaacgccttanacggtcctctttgcttttatcggttaacatggaccgttcaaaagcataaaatcaacatgtaactttaccgcttttgaa

SEQ ID NO: 5507 - DNA, 381 bp, Glycine max
tgttaaagaacttcgaaaaaatcaagaacaagcttgttcgcacatcgttcgcgtgtatgacatccactccacaaagtttgaaattgaagagaccttcaatcctattacacaacgtggccgacaaaagtgggcagttaacttgaatggtcattattgtcaatgcagaaggtattctgcgcttcactatccatgttcacatattattgcagctttgggttacgtgagcctgaactactaccaatatatagatgttgtttatacaaatgagcacatcgtaaaagcttactccgcacaatggtggcctcttgggaatgaagcgactattcctccttctaatgacgcatggacacttatccctgacccaacagcaattcgtgcgaa

SEQ ID NO: 5508 - DNA, 582 bp, Glycine max
  unsure at all n locations
cttggatcttcttcatcaatggagtcctatgcttcttgaattttaatcacaggggaatggaaaagaagaagagttgagaggagacaccacttcaaggagaagatgagtcaagaagaagctcaccaccatagaaagccatggataagagcttgaaggtagaagaagatgaatggagggagagggagagaaggagcacgaaattttatgcctcaaaagaggtctgaactttgaagtttaattctcaaatgatcaaagttgaaaaaattcacacacatggcctctatttatagcctaagtgtcacacaaaattggagggaaatttgaatttctattcaaatttcacttgaatttgaaattgaatttgtgaagccaaattttggagccaaaatttcactaattatgattagtgaattttagctatggttcagcccactaatccaagatcaagtccaagattctccactaagtgtgcttaggtgtcatgaggcatgntaagcatgaaagacatgcacaaagtgtgactatatgatgtggcaatggggtgtagcaagcaaatgctcacctcccctctcaaatttaatt

SEQ ID NO: 5509 - DNA, 485 bp, Glycine max
  unsure at all n locations
tgatggtacgctaagcctcacatctcaggctaagtgcatattgcagaaaagtttgcgttgcagaaagtgctaagcacagcttattgtgctaagccccagatgctcactggactttacaacttcaagttgggcttagcgcgaggttaggctaagcacttgggtttttaaactcaaacgtcacatgggcacgctaagcacagctgtgcactaagcgcgccatacaaatttcaatttttattaaaaccaaaggctaaggcacttgggtgttaccccaaatacctttagcttctccctttgttaaccttgagcaagtgtgtatttctgctgcgtgtgtgtactgcttgtcagcatcttctttggttcatttcaatcacaatccaagtaagtgggtacatttccattnttatttttcatccttcaaaccttaggataaatgacttctccgtttcttagttgtatgttggtaagttaagttttttagtttt

SEQ ID NO: 5510 - DNA, 925 bp, Glycine max
  unsure at all n locations
aaagtagagcaacacacacaaataaatcccatactgagcgaaatataacaacactcatcccaaaanncagcccggantttgatcatgatagcaanccngnanaataaaccaaccgaggatgcaacatncaacataagtgatgatgatttattgaaaccaaaaaccacatgcgaggggaggggagtaataccattaatacaaggatcctttattatggataggaaattaaaacggaaaattgattgaagtggtgggaaaaaataactcagaaggacacccaagaaaaggccctatctaaaggacaatctaccttataaaaacaacggcaataatagggtaaatacgcctaaacgaaaaaaggaaaactgttggtttggaacaaaatgcaaaaaacaaggtggggcgaattgtaacacaaaggtaaaggggggttaaaaaccctaaaacaatgggggtaatcaaaaataaatccaaactcaaaataacatccacaatggggatatactatggcctaaccacgcacaacggggaattaacaatggcaaaacctacaacaagaagatataaagggcgcacagaaataaaaaaaaccaatagaaatagcgaaaaaaaaacagagcgcattaaataggattgtaccaaaccaactgataataataccacttataaaatagataaacaaacattaatatgtaaaaaatacaccggaacacaaacactgcttaaaaaagagagtttaaaattagaaagggtggtaacatcgagacacaccgccttaaaagtgcgaaaaaagaaaaagaagtgggctactctgaggacatataagggaagggactagaacaaagtgtatatagcggaatatcatcttgacaaaagcgtggacacaccacaagacgacacatcttcgaataatagggagatgacg

SEQ ID NO: 5511 - DNA, 311 bp, Glycine max
agcttctgaaggaaactgcctagtctataaatagaagcatgtgtgacacttgttgggactttgatgaatgaaagtcttatgagacacacttcaaagcttcacttctctccctctttaaatccttcaatttcatgctcctccattgtctctttcttttactccattgaagcatcctctgcaagtcacattcttgggggtgaagctacttcttcgatggcttattcccttgtggacggggccttttctcacctattattctttggctttcgctgcatcttcatggcggaaaattaccgttgaaagacctgatt

SEQ ID NO: 5512 - DNA, 497 bp, Glycine max
  unsure at all n locations
tctaggtcaatttattagcatgcaaaaatataagctaaagcaagaaaagggatgtgctttcgcgctagttgctcatccgtagcttggtctttacgcatgctaaaaaagctattctttgggacgtagaaaggaaatatcctaattcagtagagaacgtagctggtgcacaagacaaaggaggacaggaggggttcgggggaggagctctcggcacatagtcagtcggcatggtctttcatgacccatangctttgggcttcgatggctgcttgaaagacacatattgggaagttggctatggtccgtcgtgcattgtgcagacgactgatggcttacattgccaagagggcattgtgagacaaaggaaagggctgaaaaggatggtgcccaggatctcactattacctatgcatgtgccagaatgcgataccgtaaaggtcgatgtgtcattgcgacacttaccatgtataccgggctagagtgttgttccaccgaaa

SEQ ID NO: 5513 - DNA, 470 bp, Glycine max
agcttgggacattcttgcaaatacctatgctagttctgataagttgaaaagagtcaagatgcatactttgaagcagcaattcgagctattacagacgaatgagaaggaaggtatagccgaatacctaaatcgtgtgcaaaatctgtcgaatcaagtgatggcttgtggtgaaaccttgaacgatcaagatcttgtagaaaaggttttaagaaccttaagttcaagatttgattatgtggttgctgcaatagaagaatctaaggattttgcataaatgaaattggatgagcttcaatgctctcttgaagcacacaagctaagaataaaagagagggaaacagataggtcatctgaacaggctttacttgctcagagtggaaaaatattccacaatggctcacgcagtagtaaagggaaggctaaacccaaataccctaaattgaaaaaacaagagatgatggtactgttga

SEQ ID NO: 5514 - DNA, 426 bp, Glycine max
  unsure at all n locations
tgcaaaccaaatgctcaccactattagaggagaaatctttaagttgtttcatataaacctcctcctctaaatcaccattaagaaaagttgttttcacatccatctgttgcaactcaaggtcaaaatgagaaactaatgccaagataatacgaagagaatctttcttagatactggagaaaatgtctttgtgtaatctattccttccttttgagtaaatccctcaacaacaagtcttgccttgtatctctcaatgttgcctaatgaatcccttttggtcttaaatacccatttacatctaatggcctttgccccattangcatctttacaaggttccaaactttgttactctgcatggaattcatctcatccttcatggcatcataccataaatttgactctttacaactcgtggcttgatccaaag

SEQ ID NO: 5515 - DNA, 115 bp, Glycine max
aacactgcctgatgcatcgaccaacaagtttgcacctttgatatccctaaagaaccatatacaacaatggtaatcacgttttattaactaaaaagcaaaaagggggggggggggg

SEQ ID NO: 5516 - DNA, 436 bp, Glycine max
tcgacacatgagggaagatattgaatcagtgagtgcttgtagagttcaagtttggagcataatttgctttgcaatttactttgtggtatttatagcagtgtttactggaaccctagttcattaagtttattttttagttcattggctaaagcaaagtactgcatttgcattagtctttttttaatagtccaacttctgtttttctttttctccctgttatggcattgtaactcaaaacagttatttatttgttatgttatattaatagcttatattatctatttatttatttttctttcctaaatcaatacaaagagtgatgtgaaaatgaaagagataagtacaatgagaagctggcttctatttggtgcacaactagtggtcttttttctgggggtttctcttataaacacgctgagagactgggtagctttgc

SEQ ID NO: 5517 - DNA, 339 bp, Glycine max
agcttctcactttttttttcatttgaatttattgacagccaaaagccacatgcatgttgagtggagtcatcccattagtccaaggttcctttttaattgataggatattaaacggtaaaatttgattgaaattgttggcaaatactagctttagttggacgtccaagtaaaggcctttttaatggttaatttgcttttaaaaataatgcctataattggctaaagtatgcttaagcataaatggaaattttgtttttaccaaatgaaataaatttgagctaattaacataagtaatggtgttaattacctaaatcattgtgtaattaaattaatccaac

SEQ ID NO: 5518 - DNA, 473 bp, Glycine max
tgcttgtggagcttctatggaggctggatctttgagcttcaatgaggtcctttaatggtgattttccaccatagagatgcagcggaagacaaaggagaaaaggtaagaggcggcgccatccactaaggaagaagccatggaagaaggagcttcgccaccaagatgagccttggataagaagcttggagaggatgcttcaatggaggaaaagaaagagggagagaaagagagagggggaagcacgaaattgaaggaagaaaaagggagagaagttgaactttgagttgtgtctcacaagactctcattcatcaaagttacaacaagtgttacacatgcttctatttatagactaggtagcttccttgagaagctttcttgagaaaacttccttgagaagcttctttgagaaaactttgttgagaagctagagcttagctacacacacccctctcataactaaactcacctcctt

SEQ ID NO: 5519 - DNA, 321 bp, Glycine max
gcctctttgaatacacaacaactaacaagtattaaaattggaaatatatattgggtttagggtttacacacgaatggataaaaataattggttgtgttttacaaatgcaaggttaagtttgcacattgggccttaaagagactacttccgaatagccttggagacctatgtagtgtttgaaagccatgaacaatatgatcactctacaacatattgaaattaaagcattctttgaaacaactacacatgtggttgggcatgtttttaaagttaccttatacaagaaactatttggcatggtatcaaagtatgtgtttaacc

SEQ ID NO: 5520 - DNA, 880 bp, Glycine max
  unsure at all n locations
cactgaatcctcaactttcccctaaattcttacattcttcataccccctgtctccnncctcccacaagccccggnaanatgatgcctgcangtgcancctgacacttagagactcagcctacatccatcgtgtattacgaagcacaacgactgattctacgaggatggagtaggatcaatctggatacggtaattgcactaaaccatgcgatgcatatgtgacgagatcgaaaatggataccagaagaatagcacaagactttttgaccccactaagagggacaatgacatcacatttctcatagttaaaaaagacattgttgattaatataacattctaatcgtgtgatcttcatataatgaaatcataaggaaactagtgatgatgcccaatcttaagaagaccttgcacatcatgaatgagattggaatagtgattggggtgagaatcttcatggaaacgatcctatgttgagaattgtacagccaccttgaaaacacacgagctgttttaattcttaaccgccctacaaaataacacctttgctttgtgtccacccggacgacaaaaccacaaaaaaacccttccacctatttgggatagaatgaacaaacaagcacgaaatcgaaaaaaaaaaaatttgtaggaaagggaggtggtgaaaaaaatgggaaaatatctggggggggggggcaccactctctctcatacctctcctccctctccttcatgtacattattcaccatttctactcccccncgtcccgctacattcctccacaccatacaactcacattccataccaacaacaaccaaatttcttacccccaccaacacaacacaagctacacacactacacccataccgactacagcca

SEQ ID NO: 5521 - DNA, 418 bp, Glycine max
agcttttgatactaacaagtgtatgtataccttaatttctcttaacaacaaccatattgcttattgtaggcatggacttaaacaatatcgtaatggttgggcggatggaccaacttatattacacagtgcccaatacagacaggaggcagttatacttatgatttcaatgttactgagcagagaagaacactatggtggcatgcacacattctttggctgaaggccactgtgtatggtgcaataataattatgcctaaagctggaacaccatttcctttcccacagccagctagagaatttgaaattctcctacgtcagattgaatttcaagcgtataatcttaatattggaaggataaaagggtaagaaatatgctataagtaattttttgtgcatgcaatacgtgaatggtggaac

SEQ ID NO: 5522 - DNA, 313 bp, Glycine max
aacgccattttactccctctgttgatcatacattacaaagagaaattatgcttgatgtcacgagtcagctcgattccgctacaataccaaagttcacaccatgtacatactggaaaattatactgacccatgttccaatgtacaattatgagaattaattctgactatcatcctggacacataaactacttgggaattaccactccctagcaggacagaatactagtacattgagctatgtgcatccttgcgaaacatgccaaacctgcaaatcactgatacatgccctctgtaactccttctcgaggaattt

SEQ ID NO: 5523 - DNA, 395 bp, Glycine max
agcttcatatttgtatgtcagttggcattaaaaaatttatttgactaacattttgatataaatcattatcgaataacaaaatttcacattggttctggtcttttgtgaagtagattcttctaatttctgaaatttttttcttttgggaaaagggtggaaactaaggagcttaagaaaagttaattcctaatagccaacagttcatggctaggaattgggaaacctgctgggcgttaggctgatttaatgtgtttggtttaagccgtatcaaattccaatgcacgttgaatgcaatttcactcaaaagaagctttggcgttcaacgtgctaaacgtcaatacaagcagtcttactttctgcaattcaacatactgtcttactgctgcctcctcaat

SEQ ID NO: 5524 - DNA, 240 bp, Glycine max
tccttgagaagtaaggaaggtagcttccttgggaagttagaggggggctattcacacccctccaatagctaagctctccctcatgccaaaatacatgaaaatacaatgggaaacttccttgagaagcaaggaaagtaacttccttgggaagcaaggaagaaaacttccttgagaagctagagaggggggggggggccctttgaacgggttttggctttactactgtcatacgttattttc

SEQ ID NO: 5525 - DNA, 490 bp, Glycine max
  unsure at all n locations
agcttatttatttgattaatgaatcatattgattattaattaatgctttatttgtttttttaataagcaaaagtgatgatatatattatacacaaagggtaagcaacctatttacaagtattgaaaactgaaaatactatctccataccttggttacaaaatattaacataacaacaatataaatattaagtaaccaaggaatccaaaaagagaaagttcacctccctgcaagtcactgtaatactactagtgacaatcctacccaatcaccaaaaaaacataaataatgccttaccctcccacatgttgttcccaaaatattaatgctttatttgttgttgatgtatgcaatgcaaggcaattgtgaatcccaatgaatgaatgatttcatgaatgagagcaagctgaatgatcctctgaacagctctgattatgtcccaacctatgaggacaangatggtgactggatgcttgccgcgaatgcccatg

SEQ ID NO: 5526 - DNA, 941 bp, Glycine max
  unsure at all n locations
aactgtccaggagtttgttataactctcactaacatttacctctattcatcgctctccacacgccacctaanacctcccccctnctcntgctaccgcncnctttgattgcctgccattacgagacactatacaatactcaagcctcatgaagatgatccccgatgaaacacgcagctttgatgattataaaaagcccgataaaatgaattcaggattcaggcattgcagctacgactcggattaactttatgcgtcttgcaaaaaggatccccaaggtactagccccgagaatagtgtggtctctcgaatcacgagaaagtgactttctcattgttgtaaaaaaacttagaatacatctcccggcagtagtgtaatcatctcttaaaaaacacacatatcacaaaggttgtttttcaaaatagatatactcaaaattctccaagtcaccgggaggtgttattatcttggggttgataatcaacattccagaaattgatttcctgtggcctcgttctgccttcgaaaaactttaaccgcatgtgcaaagctccaaaccagttctaaaagggtgcacctctgtccgggattccggaatcgactaaccaagcatgatagaattttcactctacttcgggaaagcacatctcttcctaaaaatggccagggaaactaataacattttatgggaatgcgatgtcgttcgacacatacggcaaaataattggggaggagggaggtcctacccccggcctaccccacctatatcttctcggaaaaaaccatctctaatgggcttctctcctccctttacattctttcttatacacctacaccccccatccgctatccaataccactttcgaccccacgctcttgattactctacgacacactttcatcaatcacatgaaaccatcacggtgtcctctccgtcttatct

SEQ ID NO: 5527 - DNA, 382 bp, Glycine max
  unsure at all n locations
ggtaattgatcanactcttccaatntatggntattttgtagtgttataagtattttctgttaagtatagataataaatacttagtacttccattntgtgtgtttaataatcattttctctcaatttcaggttaattaggcaagctttgaaaagtgttgtttttcaccttctcgctaagccaatctgctggcttagcgagcatccgctaagcgcaacactcatggnggctaagcgcaaggaagactcttctaattaagaaggggggttgaattaattattcctaaacctttactaattaaaaatttactcttctatggcttttactatngttgtaagtaaatgaagaatagaacataaacttaaccaaaagtaaaagcggaat

SEQ ID NO: 5528 - DNA, 275 bp, Glycine max
  unsure at all n locations
gctccttcttccatggcttattccctagtggatggcgcctcctctcacctattctcctttgtcttccactgcatctccatggtggaaaatcaccattgaagctcaaagatccagcctccatagaagccccacaagcaagcttccatcangttattaaagctatcctgaggactttcgaactcgcaccaggtctcanaattaactttgcaaaaagcagttttggagcaataagagtgcctgatcagtggaagcaacttgcagccaattacttgaat

SEQ ID NO: 5529 - DNA, 412 bp, Glycine max
  unsure at all n locations
tcttttctctctttttctctcaattgttcttcattcttctccctcttttcacttatgttcttcctttnttcttgcacaaattntgtggctcttctactggtgatgatcatggaaggctaaacacaatcaatccaatgatccactccaagcaaggctgaatttaagttctagtttagtatttcaattttgtgtgaatgtttatctttttcttcaatcctatntccaattttcatgattatgaataggcttangattgaaaactaattangttatggattcatttcctaatttcaaaatttaatcacaagttngttggatgacattccaactaatttgtgatctcaaagaatttangganttaattcgatgaactaactctaatgacattgattgaactttcataacataatca

SEQ ID NO: 5530 - DNA, 342 bp, Glycine max
  unsure at all n locations
tattattaaagatgtttgatatttgatattaatgaaccactggataagtggcacagtcagttatttatcatttctgtttatagtgcgttgtcaagttgttcatattgtgcatgttacttattctgcctaacacttctactactgcatattcatagtttctagcttattttcttgaaggatttcaatgaagttgtggtcttgcaactttaattcacagcttgcaaatgctctatcaattgaaggggactaccagggttcaatctctgccttanagtgtggatatgtctgtgctactgaagtatgcttcccggagttgcaggtatgttgtcataggttacaaat

SEQ ID NO: 5531 - DNA, 406 bp, Glycine max
  unsure at all n locations
tgttgagccactagaaanatgtgaagcaagattaagagataatgactgattaaaccataatgcagaatacggctgcagtagaatctgcaataaaagaattgtgatgaacacttctggtgttgtacctcttgcttcagactatgttgaacatcatttgtaggggtttgttttttcctaggtttaccgcattccgtgaggtaccctgtttcctggaaccagatcaaaaccatacataggtgagaaaatctttcttctaaataattgtctagaagtaacttattttgcctgtggactacagagaaagatacaattatattaaattagaccattattattacaatattaattatgtcaaacatatatgctttccataaaatcaattctctgttcatccatcccattacat

SEQ ID NO: 5532 - DNA, 363 bp, Glycine max
  unsure at all n locations
ctaagcttaagaattatggcctcatcaaactacttgtttcccgagggaaattctataaatagacctcccatctttaatggagtgggttaccactactggaaaacccgcatgcaaatctttatagaggcaatagatttaaatatctgggaagccatagaacaaggaccttatgttccctctatagtggccggaagtgcaacaatagaaaaacctagagcagattggactgatgaagaaagaagattatttcaatataatttaaaggccaaaaatattattacatctgccctaggaatagatgaatactttaaggtttcaaatngtaaagtgctaggatatgtgggatcactacagtaacacatg

SEQ ID NO: 5533 - DNA, 402 bp, Glycine max
  unsure at all n locations
tccatcagtgcataacgtgacttcaaaagtatttgctnttccctttntatattnttatanttttttgggttcgacaagggttgatgcaatcctaccccgcaagggcattggatagaagactccaagacaattgagccagagatgcaagagaaggccctagagttctcatgagccttanggtagatttcgggctcatgggctaagtatgagcccacttatcttagtacatattagattaaggtttcattatttttgggccttgtatttagggctcaataatgtaggtaaggtaccctagaaatgtatgatttttcagcccttgtattttagggcacctagactagttnttgtattangggtagttttgtaatttcacatgcattaagtgaatatttgatgtgt

SEQ ID NO: 5534 - DNA, 363 bp, Glycine max
ggaccttcaaactcagcgttcaatgcagcagcttctaacgagggatgtattcatattggagaatacagagaggcaggtataatgacgaacagaaatggataatagagtactctggtgaagaacaggagctttcctccttcttagcttgtctcacaacaaagggtagaaccttaatatccttatcggctacttgcgccccgtcttttaatttatgcattgctgaaatgaatgctcgtgcataaatatatctgcatgatgaaaatgtctgttcctagcttgttgtttttattataatttgatacccagatatatacaagatcaatttgcacccaaatatataagattttaatttatctcatgttt

SEQ ID NO: 5535 - DNA, 400 bp, Glycine max
  unsure at all n locations
tcaggaaaatgggagtactagcctaggctttggctcttagaaaaacaacacttattgtaggtgaaatgcttggaccaatggaaatgcaaggcttaatccttatcttcttaatctaagcactttgaatgaccattaatatgactaatcggcagcttggacagccattgatgtgctctccacaagctcagccatgccttatatgacttcttgcaatttttcaaaactaactataaaaggataaagtagagttttaccaaanatggtaaaaaatgcttttgctaaaattggtaaatcttatcctaatattctagaatagtgtgttaacctcccttgagacatgtatactcagagtgaaccttgcacagagtccactcacactcatacagagacaaaatatact

SEQ ID NO: 5536 - DNA, 464 bp, Glycine max
  unsure at all n locations
tctttctctgctatcattgatacgtgtaagtcccacaagtttgatttacatttgcaagctgtctgtcttgtgcttgaaagataaagatcttggtgacagagcattcacgaataacgaaatctgggatacaaccagaaatttgttacttttttaatttattattgtttaaataaggctaaaatatatttttttattcttaataaatattcacaatttatgttgatttctgagcatgtcaccactgaataaatggaggagaaacatcatctccatttgttgttctattcatttcttccatttctatggntntgaaaaaataaatggtactcttcaattaatgagttacatgtcgtccattacatttatctatccaaaactntagtaatgagaagagtgaagagaanaataattggagaggataagtagctttctgtccagactgaattatgtgttttttaattaat

SEQ ID NO: 5537 - DNA, 307 bp, Glycine max
  unsure at all n locations
tctttggacctcgaacaagcaattaactcctctttcagaaccatgctatgtgctcgcgactggtctctttcttcccttcgcaacttgagttcactattgctaccccatagagctccgcgaaatttgtttcggccatactcttccttgcgagccctcttggtctcttgttcaagggctcttgcggtaattgcattctcttcccgtaacccggcacactccttccgaacgtgtgtagcggccaacttgaacttctccttggcaagttttgcctttcctaactcgcttttgagagctnggacttcttcgt

SEQ ID NO: 5538 - DNA, 468 bp, Glycine max
  unsure at all n locations
tctagccaaatggacttaccttgaattaattcctttgatatgccctttgagccttgtttccctttccttgttttgaatctctctacaagccttaaatgaaaaaccatgatatcaccatatccttaaggaattttggagctttggaattgttttgggaataagtgtggggggtttttgtttcattggataacttgttttgttggctatgcttcatgatgtattttgggccatacttgatgtacattgtatattggttaaatgttggacatgctgaatgaaatgttgtttctcanaggctatagagtaaaaaaaaaaaatattcgaaaaaagaaaaagaaaagcaataaagttgagtgaataagatcttaaatggcacaagaatgatgaaactcttggttctactctttgatgttaaatntatctttacttctttttatttcttaatttttctaatatgcacttattccc

SEQ ID NO: 5539 - DNA, 377 bp, Glycine max
gattcactaatcattaaccagttttgaaaaaatgtgtatacacctaaagggtgaatgctgtgaaaattttcccgaacgcccaaaatagactcggatgaatgcatgaattgataaaagaatatgctttggaaacactgggttgacttaaatagggaaaatgaatcttgagccctagtgtcacatgaccataaaaacttgatgcttgagtgtccacatgggtgcatgcatgatcagttttgcataaaatttcctaattatcattattgcatgtgtgtcatggaaataatgtgggacatcccctttatccctgaaccgctggtcaaaccaacgctctgacatatatcatgtccatccgttctacaagccttgagccaaag

SEQ ID NO: 5540 - DNA, 422 bp, Glycine max
  unsure at all n locations
cacttctgtagggtttcagggctttccatcagctctgtttaatctgccatatactcagccggtattaggcctcatgagctttctcatattcagcagcttattggatttagcttgngtgacttccctttcagatacttgggtgttccccttttatcatctagattaaatgtatgtcattatgctcccttactttccaagattactggcctgattcagggatggagcaaaaagtatttatcttatgcaggtaagttagagttgatcagagcgcgtattcaacgaattgtgacattttggatggggatttttcctttgccgcaatctgttctggaccggatcaacgctntgtgccgtaattntctgtggngcaaagcggatattggaaaaacaagcccttggttgcttggtcagtagtttgttct

SEQ ID NO: 5541 - DNA, 346 bp, Glycine max
  unsure at all n locations
agaaaatagacgaagaaacatgccgganacacattggcagcagatggaaaatgactgagaaacattcaaagacaattggaatatgttgaaccattaagaagaagccacaacacaatgcttaaccacttaacagaagcaaacacacttaaccacctaaaaggtagaagcaaaccanagcttaaccatcaagagcagaagctaaacatggtgtttaaccactcaagacagaaggaaaacacaatttttgaatgcttaaccactataaaggcagaagcaacacaacaatgtttaaccatccatggtagaagctngacatcaatgcttaaccaccatggacagaaactta

SEQ ID NO: 5542 - DNA, 172 bp, Glycine max
tactcatttgcaagctacggcttatatggaccagacagggctatcaactctagttacaatgcggtattctaccacaaataaatgctgagtgaatgcctcttgtgataggtgtcactatgagacatcttgcttccacctgcctatcatagagatgatcatcactctggattat

SEQ ID NO: 5543 - DNA, 387 bp, Glycine max
  unsure at all n locations
tacttctactgaagctgagtttctaccctcctcctgttctgacatataatctctagtgcagctgaaggatgttctagggttctcgatcattccgattcagtccttgattcttattgatctttgtcttcggggtatctctcattaaataaatatcaatgaacaatatgacggattatctgcgtttcctttttctggtctccgagacaagataatgattttcattggtctcattattcagtatttggatttgtacatctttattggttattatctattcattcattatattggtgaacttaaagtttttctacataacaatatttgatgcacaaatanaataaaatgattagaacttaaggtattaattaataattattatctcattta

SEQ ID NO: 5544 - DNA, 579 bp, Glycine max
  unsure at all n locations
cccctggcgaacactctgaacactaaccgaccgcgaccgctactgccacncccagccnnnncnngnnnaatgagcccttgacccctcgattcccggaccaccaaacnaagctggcaagataggagaccacagcattttcacgccttttaccgagggccacacagagacacacgacctntgtgagacactcctaccacacagacaataaagaccatagcgaaacaccataagagagacgtagtgccagaacataggaatcacattcagcaggaacaaatgattgggacaataccaacattaaaaaccatggtgacatagcaaaaaccacgcgcagcanaaatgcataaacccaaacaggggaagaacaagacaattgcagacattagcaaaaccttgtgggctatgaaaccagggcatacaggagcaatcccgcaaaaaacgtgacgaaatagaaactgctataaagaggaaatagcaccacgccccgaagcccacaaacagaaagggaccagaccaaaactggccaaccgcgaacaaacgaatcacccacgtctaagggttacccacatgaacggcaan

SEQ ID NO: 5545 - DNA, 353 bp, Glycine max
gactcctctagaagatgcattgctcactaagtatattcaaactcatggagaaggccagtggagatcactaccaataagagccggtaataataatatactatattagcttgctgcccattcatttcttaccctagccagctacctctctatatatgatacctcctcttgatcaccttttcatgtttaatccggcttcctaatcttctgatctcatattggggtcgtgattagatctatttttggcgacactagtcctcatttgtgtgcccttcgttataatcatagctatatattattcatagagtaacatgtcatatctcttctttctctctctttcgtcttatattttttgt

SEQ ID NO: 5546 - DNA, 370 bp, Glycine max
  unsure at all n locations
gaagcttctcaaggaagctacctatgctataaatagaagcatgtgtaacacttggtgtaactntgatgaatgagagtcttgtgagacacatttcanagttcaacttctctctctcttttcctccttcaattttatgctcccctcccctctctctctctttcttttcctccattgaagcttcctctctaagctttntatccaaggcactctcttagtggtgaagcttcttcttccatggcttatttcctagtggatggcgcctcctctcaccttttctcctttatcttccgctgcatctccatggtgggaaaatagcatngaaggacctcattgaagctcanagatccaacctccatagaagcttcacaag

SEQ ID NO: 5547 - DNA, 121 bp, Glycine max
  unsure at all n locations
taggcacgtaaacttcanatgatcaaatctcttgtgccatatccatgaatcactaaccacttgcacatattaacattgattatcagcagtattaatttgaatatgagaggtcctattttgt

SEQ ID NO: 5548 - DNA, 294 bp, Glycine max
  unsure at all n locations
tatagctgaggttggccaagcaggaacatagttcanaccttcaaaacttaccatgacatctttgtgcanaactgttgatttgttaactaataataatcatttaggtctcaccaagtaagatgcccatatctcattagctggaggaggaggctgaacccaatgccctggtatgcggctggatgaagttgcaaggaaacaaaatcaaataagataaaatgctttattttcattnttcacacttcataanagacattagaaaaaccaatacagttgcagataagccacataacagcg

SEQ ID NO: 5549 - DNA, 378 bp, Glycine max
accctgatgaggatgtcccatatgttcttataactggactgattcatttgcttccaaagtttcatggccttgtaggtgaagacccgcacaaacatttgaaagaatttcacattgtctgctccaccatgaaacccccagatgtccaagaggatcacatatttctgaaggcttttcctcactcattatagggagtggcaaacgactggctgtattaccttgctccaaggtccatcacgagctgggatgaccttaagagagtattcttagaaaaatttttccctgcttccaggaccacagccatcaggaaagatatctcaggtattagacaactcagtggagagagcctgtatgagtactgggagagatttaagacactat

SEQ ID NO: 5550 - DNA, 428 bp, Glycine max
  unsure at all n locations
gtcctgccttcttcattcctagttctcgtgaagtttaatgttagtgcagagaacctttggtgcctggtggattaaaccatttncaaagctgaaaggcatacaaaagttcaaacgaaacaaggtaaggaaaatacttcttttttttatgtatagataaaataattcgctataacaacaaaactctccctgagtatttaatgcgaatgtatacctaanaacttcaatatctnctagaacaattatgcgctaattatttcacgggttcaataataatgataataataataatttatcatgaaccatagtgtgacccaagccctgtaatcaattaattatactttngtggttttcaattaacttatctcaattatttacactangtgatgaaatgtttcaagccaagctagtcattacattttaactacatg

SEQ ID NO: 5551 - DNA, 427 bp, Glycine max
  unsure at all n locations
atgtgttaactctcaagctntntatgattatatctgtgtgaaatataaaaaattcataaaattactaatatttaaggtagtatatgcttatcatttaaggtaaaatatgttnttaatttttatacttttgatcaaatttaattttagtcctttgtaatatgttaaaaatttaaagggatgtcgcgaaaaggatatataaacgaaataatataaattttaacatttatagtcatattaaaattcacatttaatgtcatctaataaatattattaattttcaatactatttagcaagccttcttctcaccacatttaatttaatgtcatctaataaatattattaattttcaatactatttagcaagccttcttctcaccacatttaatgtcgatcaattaacnaattaaaataataaacaattaataa

SEQ ID NO: 5552 - DNA, 330 bp, Glycine max
  unsure at all n locations
cttctcgatctattatgcgcctgaatcggacctncgagntattagttatgactattaagatatctcaagagcttccggtggttaattgcgtgcgtctcgatatattatgtgcctgaatcggacctctgagctaaaagntatgaccatttgaatttctcgagagcttcctgtgttcaatttcatgcgtctcgatatattatntgcctgaatcggacctccgagttaagagttatgaccatttgaatttcttgagagcttccgatgttcaatttcgagcgtctcgatatattatgtgcctgaatcggacctgcgagtgactatttatgacca

SEQ ID NO: 5553 - DNA, 254 bp, Glycine max
aagactgtataacgaatgatgaacgtcgaagaacagacgaaaaccttcgcgaaatcactcacggaaacgttacggaagcgcctcggcttggattgtcttcacggaactaaatctcctcagttattttgagaaagagagaagtgcctaaggtgctgaacccttttctacttcacttctccacctatttatagaaaattcggggagaagcttgccacccagctcgtccaggcgaactcagctcgcccaggcgagca

SEQ ID NO: 5554 - DNA, 360 bp, Glycine max
  unsure at all n locations
tgccacaatntccatgaaatgtaaggccatcgtatgagttgtataatgggaagggagcattcccaagtgaattcctttagaanagcaatcaacgatgactaanatagtagtatgtctgcagtacactagtaaaccaacgatgaagtccaaagaaaggtcctccacagccgggacggcactggcagggggcagagcaacctggcgggctttcgggcttcatatttagtgtgctggcaattgatacaagctgcaacaaacgtttgcacatcctttcttaaccctatccaagtgaaatttttgcacacccgtgcaagggtcttcataatacccatgtggccacttgtgggcattgaatgaaac

SEQ ID NO: 5555 - DNA, 268 bp, Glycine max
  unsure at all n locations
ctacatacgtgcacgtgagctaaatttaaaggtgggcaactggggatggtgtgcttatgcctggtttgtggaaatgggatagctgatttgtgccatcgctcgatcgccacctattgccacatatgaagggtgccccataatccaataagcttggtgtgagaaagcatggaagagtcagacttcctactttatttgttgaccacagagtggtacctagagatatgtcgcggtggttaggagaccttgtggacgtccngtggggtgctat

SEQ ID NO: 5556 - DNA, 274 bp, Glycine max
caaagaaatgaaaagccctcaattgtggtggctattatctctatagtgattcactcaatttggagtgcttcttagtccaatagcgtcttaatgtggttggcctcttgcttcttgactcgacttcttcaagggatggcaccaatccttctttctaattgcttatatggcaactcacaaaccaggaagcatagagacaagtaataacccaagacccaaaagatgaaatgaaagctaaaccaatagatctttaacaagagatattatcaaggattat

SEQ ID NO: 5557 - DNA, 382 bp, Glycine max
  unsure at all n locations
actaagctggtacaaaccttcactacatcaaccgtaataatcatcctctgactgctatcctgaatcaaacatgaattaggaaagaaggttaacttgcaattcaatacagaaaccaattttgatatagagattaaattgaaattaaaagatggcaagtatagcacatcttctaagtgtaaaaactcagtaaatttgactgttccaaagtgtgtgactatgacttgntgaccagtaggcaggcgaactactatgggatttatttctctatatgtagaataacaagtcaatgaggatgcaacatgaattgtagcaccaaagtccaaaatccatgctgcagcttcanacttgtgaatattacaaacaaaggatagtatattaccta

SEQ ID NO: 5558 - DNA, 422 bp, Glycine max
  unsure at all n locations
ctattacggacctatgaaactcagcttctttactgcgttgatgccattcacgttaaataattcttatgaattntacagatctttcatcgctaaagtaattgtgacaatgtttgntattattatttcatgtatcatttgatttattggtagtctaattcataattcctggcttgtgtctacttttattgcattaacttctctgagcattgaatactttagtgctcaacatagattcatactttattttgtgtgcatattttactactaagtaatttttatgacaaaattatgcagttgagtgttctgggatgtacaagactcagtatttgagggtattgtgactattttataagctacaagtctatggatacccaacgggtgaagcatcgtacttcttcattagttgtattgataaattcact

SEQ ID NO: 5559 - DNA, 84 bp, Glycine max
  unsure at all n locations
atgatttaattttcttacaaatcatgaatgaagaacgaccantcttggagttggatacttagattagaagggatgaggggggtg

SEQ ID NO: 5560 - DNA, 419 bp, Glycine max
  unsure at all n locations
cgaggtacttacccgttgaagatcgaagaacgatgatgaacgaatgaagaacgtcgaagaacggttgaaatctttgcgaaattcctcacggaaaacgttacggaaacgtttcggaagcgccttggcttagattttcttcacggaaacaatttttccaagcaaattcgaaagagagagaagtgcctaaggggctgaaccccttccttcttgccttcctcccctatttatagcaaaataggggaggtggttgccgcccagctcgcccaggcgagctcagctcgcccaggcgagctcagctcgcccaggcgagcagggttgcttcctccagaagcaaccgccttctggaggaatattccggagggcccaagtgggcctgggtgctatttgcacccncatttttacttaagtacaccccctct

SEQ ID NO: 5561 - DNA, 441 bp, Glycine max
  unsure at all n locations
cgtgacactatgaaactcagcttctaaggaagttntcttaagaaagcttctcaaggaagctacctagtctataaataaaagcacgtgtaacacttgttgtaactttgatgaatgagagtcttgtgagacacaactcanagttcaacttctctccctttntcttccttcaatttcgtgctcccccctctctctttctctccctctttcttttcctccattgaagcatcctctccaagcttcttatccaaggctcatcttgggggtgaagctccttcttccatggcttattccttaatggatggcgcctcctctcacctcttttcctttgtcttccgctgcatctccgtgggggaaaatcaccattaaaggaccccattgaaactcanagatcccagcctcccacaagcaagcttccatcaagtggtatcagaattaaataac

SEQ ID NO: 5562 - DNA, 544 bp, Glycine max
  unsure at all n locations
atgagacattgatnacgngaactatgtctactcaagctgattttgtgatganangcgtttantgggagatcttctctctctcttctctataagnnnnngaagnannaaagannannagancatggggggtctcacttaataactacgtataacatgatatgggtgtcacacagttgattctggatgctgaaatagaccgacagttgctgagaatgatctaataattgataatctactgcgaanggctgaggaataactattaatgatacattgaaatgatacaccttctggtaagtaatactttaatttaaattttagactaactagatatcgcttcatatttttaacgatacactgccttcaatcaaatctaaatgtcaagccattaactattaaagatactgagaatattatctatatntattaaataaaatatgaatacactttgtgatttccttgcagatgatttcggaaatacaaagccgggaaggagcattgtgattctatatttaacgacatgtactgatgcaatattgcattacag

SEQ ID NO: 5563 - DNA, 451 bp, Glycine max
  unsure at all n locations
cattacatagtttatttgatcttctacacataatatacattgatgtctagcttactatcgccatatagtttggcgaattatatcaaattcaagttagacaacattattttcaatatttgactcattgtattaagttgaatatgacaattctattattatttgtatctaaagataattattataaaattcaatacatttacattacattccctacaagaattataatacataatattctataatattttataatttgatgaccataataatgataaaatgcattacgctagttaactccactgaaaccttntcaatgaaacttatgtctctaacatataatatcatattaaatatgaataattttagtctcatgtacgtatgatataatatggacttaactcataaaatnttgacttttacattanctcacgcttataaaaatttcttgccc

SEQ ID NO: 5564 - DNA, 318 bp, Glycine max
atctaatcattccaatccacataaatcttacaattgctcattcaaatcattctcaaacactcatttcatacaaaataatccactgcatatcaaattcaaccagttcactgttcaaacacgctctttgtacaagcaaacaactcaaagtgccaaaagttatagaactgaaacataaacattgaacattaaatgactgaacataaatcataaaataactgaaataaactaaaatgttcaaaatgcacaaatttaaatgtcctgctcctgtgggtgctcttgtgcatgctcattaagatccaacacctgagcaactggtga

SEQ ID NO: 5565 - DNA, 416 bp, Glycine max
  unsure at all n locations
ngaaggcatgtaacccaccatcttctcatattagaacactgttaacgtgtccactatcanttttatcatctcgctttccatcattgngggcactacttaagctgccagatccctccacctctgggcgtattctttgaatgattcattatctctcttgcacatgttctgtagctgcattctatctgcggccatattggaattgtaccgatactacctaatgaaggcaaccattaggtccttccaggaatggatccaagaaggttctagattagtataccaggtgacggctgccccagtaagaatttcttggaataaatgcatcaacacattttaatctttcgtgtatgcccccattntcctacagtacatcttcaggtgattcttggggcaagtagtccccttgtacttatcgaaat

SEQ ID NO: 5566 - DNA, 476 bp, Glycine max
  unsure at all n locations
actcagcttaacattcanattcgagcgtgtcgttatattataggactcagtcagacatccgagtaaaaagttattgacgtttgaatctgctcagagcttcaacactcaatttcgagcgtgtcgctatattacgggactatatcagacatccgagtaaaaagttattgtcgtttggaattgctcagagcttcaacattcaatttcgagcgtctccatatattacgggactcaatcagacatccgagtaaaaagttattgtcgtttgaatttgctcacagcttcaacattcaaattcgagcgtctcgttatattatatgactcagtcagacatccgagacaaaagtattgacgttgaatttgctagagcttaacattcatntcgagcgtgcgctatatacgggacatatatacatccgagtataagttattgtctttgaattgctacagctcaacattaattcagcgtgcgatatata

SEQ ID NO: 5567 - DNA, 473 bp, Glycine max
  unsure at all n locations
tgtctccgctgatgctacatggacacatgtgttggacatcattagtatgtctgcatggtcctgttagtgggtatgaagttctggctggttntagttntaccgattggttttgtaattatttttttgttagaataggaaaggatcctaaaaaactagttatttcttctgggtggagataaattgtaaaagaaagggaaaagaagttactttgatgttcaattgagtttatgatcctcttgacttgngtattggtgtgcgtttgaatcggagaagtacatgcagcgggttattttactgttccaaaataaaacangaaacagaatggctcatgaattaattnttgaagaggttgttggtcatgtaattgagaatccgtttgagaagtggaanaagaaaaatgtggcaagagtattattattgaagtctgtaagtnaacctggagactgttttgattgaaagtgtaccataattta

SEQ ID NO: 5568 - DNA, 211 bp, Glycine max
  unsure at all n locations
tncttgagaagctagagcttagctacacacacctctctaataactaagctcacgtncttgagaagagaagctagagcttagctacacacccctataatagctaagctcacccccatgacaaaatacatgaaaatacaaaaaaaaagtccctactacatagactactcaaaatgccctgaaatacaaggctaagaccctatactactagaat

SEQ ID NO: 5569 - DNA, 431 bp, Glycine max
  unsure at all n locations
taagaattggaggtcctaatgattccttgaggaggtccaaacattaagcctttgaattgccccaagtattacgtgtaatatcgcttgacgatgtcaaaattcacagacgaaggtagctcttcatcatccatgttcataagaaacaacgctcctcctgagaaagtcttcttcaccataaacgatccttcatagtttggggcccatttacctcggtgatccttttggacatgcgacactntcttcagaacaagatccccctcgctgaacttacacgggcgcactcttcaatcaaaaacgttnttcactctgcactaatatagtctcccatggcttatagtagccaatctcataccctcgataagaattaattggtcaaagcatgcctgggcccactctgcttcttccaatcctaactctgctaagaatcttaa

SEQ ID NO: 5570 - DNA, 399 bp, Glycine max
  unsure at all n locations
ttcgattcattctatgcacccatggtggtccacattgtgtttcgtgcacttttattctcgttntgtttactttttatacgccctattgacgtgcttaagccattntacttaagtcatttctcgcttaacttaaaaataaaatcaatttccaccaaacgtttgaattgtattatccgttaacttcggttaaaatgaattccgaccgttcggtcgtgctgtaaccacgttggaaatcaaaaagaggtaaaaaataatatagtaatcaaaaaacatcttttagtaaaataaagcggaaaatcaatcggacgttttttctctttgggatttctcattcttaatcgaattgattaataactaaagtgaaactaaggctaaaatcaactcgcctagtcaagctcg

SEQ ID NO: 5571 - DNA, 181 bp, Glycine max
  unsure at all n locations
tcctagttgatgcagacgctatacgccacatcatgcgatgtcgcgaaccgtttgaagacgccacgagtgcgagtatggtcatatgaggaacccgactgattggtcgatgaaaggccatcgccattnctatgttaccgagcaggatttgcacgactgtgccgaaactggtcggacatcccct

SEQ ID NO: 5572 - DNA, 449 bp, Glycine max
  unsure at all n locations
ttctatgtacccgtggtggtccacattgtggtttcgtgtattttattcttggttcatttactttntatacccccttttgacgtgcttaagccattttatttaagtcatttctcgcttaacctaaaaataaaataaatttccaccgaacgtttgaattgtattatccgttaacttcggttaaaatgaattccgaccgttcggtcgtactgtaaccacgttggaaataaaaaaagaggtaaaataatattataataatcaaaaaatatctttgagcaaaataaagcggaaaatcaatcggacgttntctctttgggatttctcattcttaatcgaattgactaataactaaagtgaaactaaggctaanatcaactcgcctagtcaagctcgtncacaaatataggtttttgaagttgtcatttcatttcttactaagtaaatggatcatc

SEQ ID NO: 5573 - DNA, 405 bp, Glycine max
  unsure at all n locations
agctgttataaacagtttaaacttttggtaatcgattacataccttgtgtaatcgattacaggctgttaaattcaaattcaaaatttgcaaattatttcataaatcaatttagccattggtaatcgattaccagagaggaaatatcatatttttgaaaatataattgttcttaaaaaaaacttgtaaaatatttcctttagccaaacctgtgcagtattaattaaggaattctttctaagatcctaactaagtacatcgttcttcttgcatttctgaattcttgacttgaattgcgctcatctttggcatcattaaaacttcatatcatatatgcttctacaatactccnnctttttatgatgacaataatatgaaatcaagataaacgatatagcattgataat

SEQ ID NO: 5574 - DNA, 351 bp, Glycine max
  unsure at all n locations
atcatctaataacctcgtaattttcttttgtatagattataactaacagagacgatttcttgaattggtacctaagagtaaaatttagcgattaaatagttacagtctctaaatcgctagcatatatattttttgttttgttttttgtttatcatgattgttgcatatgattgttcttaattggacctaaattgacgtacaaagaattgggcaccctccaaagtttgtgacaatgatgcacagttattggtccaaatgtgaaccggcccgcattgaagttattgtgcattattattatgaatagaanaagaaaggcttacattggttcagttctctattataaatgggaaa

SEQ ID NO: 5575 - DNA, 288 bp, Glycine max
  unsure at all n locations
tattctctatctaccaagctacttctgttcctaaacaaattaacatatttgttgaagagtgattacgcacagataaggctatcatcttatagatggatatctaacttgagcacattattttttaactctcaagatatacaaggagttttgagagtttttttttttttttacaaactntgaatgtatagaataaagcttagagagaataagaaattcaaaaataatttgttctttgtaaatcttctagtatttataaacttctttaacaagtagtcgttatctctaaac

SEQ ID NO: 5576 - DNA, 388 bp, Glycine max
  unsure at all n locations
ctttaacaagctctgaacaatatacttggccttcatttaactgtctctgggcttggcggccacgctcaacaaagtactttcgacacctactgtacgttgatttgaccaaggctgttatgggaatgttgcgacaatccttcaaaaccttattgatacattctgagaggctggttgtcatgtggccatatcgacgtccttctttatcataagccatcagacattttttctttgaaatgcgatcaatccatgttgctatggctggacttagttcacgaaattnttctaaatcttgatcaaaaatatgcttgcaaggagtggaggctgcatanaattacttatcaataacaactttaagatatatggaagtaaataaactgaccataaatat

SEQ ID NO: 5577 - DNA, 383 bp, Glycine max
  unsure at all n locations
ctagttccgctccggagtacgacagtcaccgctntatgagcgctgtacaccagcagcgcttcgaagccatcaagggatggtcgtttctccgggagcgacgcgtccagctcagggacgacgagtatactgattttcaggaggaaatatggcgccggcggtgggcaccactggttactcctatggccaagtttgatccagaaatagtccttgaattttatgccaatgcttggccaacagaggagggcgtgcgtgacatgagatcctgngttaggggtcagtggatcccgttcgatgccgacgctatcagccagctcctgggatatccgatggtgttggaagagggccaggaatgcgagtatggccagaggaggaaccggtctgat

SEQ ID NO: 5578 - DNA, 405 bp, Glycine max
  unsure at all n locations
gtgtaatcgattacactgctntgataatcgattaccagtgattgtttctgaataaatcaaaagatgtaactcttcanaaggtttttgactntntcaaattggttttaagttcttctaaaagttataactcttctaaatggtcctcttggtcagacatgaagagtctataaaagcaaggctttgatttgcttttcaatatacttttccaatcaatcttatacaatcctttacaagccttgaatctcttggaacttcttcttcttctttgtgccaaaagctttccaaagttttctggttttttaaaccttgaaaacttgtgctattcatccttatcattntcttctccctttgccgaacagaattcatcaaggactaaccgcctgaattctttttgtgtctctcttc

SEQ ID NO: 5579 - DNA, 424 bp, Glycine max
  unsure at all n locations
ggaccttcaaactcagcttacatactatattttatctntatcttattgttagattattacaaacttgaccgataaatagacttgtaggttagaccaagcctatgctcttaaaaaagcctttaacaaagtctagctcagctcaacttattttcacctttatgtttggtcattgtgaatatgacaccctctatctcacacatatatgtactaataataaaaggaataaaaatgtgaaattaattaatagtttttaaatcacatttaaataaaagtctttcaaaagaataaaaggctcacattcactcttttaacatcataatagaacttgttcaaataaataataaatcatctcggctcanagcaaggtncgccaagacttcatgcaatttatatagaaacttatactccaatgtcacatnctatc

SEQ ID NO: 5580 - DNA, 217 bp, Glycine max
ggacttcacccctcgtgtcatcccggaagatttaagccaagcccctacttttgaggggcaactcccaccttatgaagactatcccgggcaagacgatggggaaggagatacccatcttgtgccgctgctccaccacaaagatccatccccgcatgaactaccccagtcaaacatagtccgccatataccggcctcacccacacccgtaaaagaatct

SEQ ID NO: 5581 - DNA, 383 bp, Glycine max
  unsure at all n locations
tctttggaccttgaacaggcaactaactcctctntcagaaccatgctatgtgctcgcgactgagccctttcttcctttcgcaacttgagttcactattgctaccccatagagctccgcgaaatttgttccggccatactctgtcttgcgagccctcttggtctcttgttcaagggctcttgcggtaattgcattctcttcccgtaacccggcacactccttccgaacgtgtgtagcggccaacttgaacttctccttggcaagttttgcctttcctaactcgcttntgagagctaggacttcttcgtcctcttccggtgcttcanaactctctttgctgacgacttttaacttggcgagccaatctaaacctcgtatatgaac

SEQ ID NO: 5582 - DNA, 183 bp, Glycine max
ctagtttaggggccccccctctctccctcgcgggagactctctctctctctcctctctctcttctattcttcgttattagttttagtctctcttctctttctctgttatttctgctttttttgaattccagttcagacttttagttttatcaataaaatttcattctctatttgattaatgga

SEQ ID NO: 5583 - DNA, 342 bp, Glycine max
  unsure at all n locations
ttggagaggttaatgaaacaacgagatgatgcgctccatgagaggttggatcanatggagaatagagaccatatgaattgctcaagagcttccattgttcaatttcgagcgtctagatatataatgcgcctcaatcggacctccgagttaaaagttatgaccatttgaaatgctcaagagcttccattgttcaatttcgagcgtcacgatatattatgcacctgaatcggacctgcgagtgacaacttatgaccatttgaattgctcaagagcttgcattgttcaattttgagcgtcacgatatattatgcacctgaatcggacctgcgagtgacaacttat

SEQ ID NO: 5584 - DNA, 432 bp, Glycine max
  unsure at all n locations
tctacatttccttagtgacaagtcatctgcctagaagtttcttgtcttgacctggntgntgtgtctttctcatctgccatgcacttccatgtttaatttcgagtgtctcggtatattatgcgcctaaattggacatccgagtaaaaagttatggccatttgagtttgcctagaacttttgtgttcaattntgagcatcttgatatattattggcctgaatcggatatccaagtcaaaagtaatggcccattgaattntccttctgcttccatatataatattgagcgtctcgatatgctatgcacccgaatcggatattcgagtgaaaagttatgaaccatttgaattcttgagaagctttcgtgttaatntttgagcgtcttgaatatcatgggcctcaatcatacacccgagtcnaaagtatggtaattt

SEQ ID NO: 5585 - DNA, 397 bp, Glycine max
  unsure at all n locations
gagacatttaacatanaactagtcaatgtattctacacttatgcacatgttgaccttgaacgtaacctcttctatattgttaatggagtcgatatggtcgcagatgtttccatgtggaaggaagttgctggtctagacataggtggagtccataagtttgatgaaactacagatggttacaacaagatgcagacatataggggaatgcttcttgatagtgttcccagaagtgatcaaaaacactttaatcaattaaatcaagaatctaattgattacactattctttanagctctctaggtattgggaagaacactntaatcgattacctctccttgactctgntttcatatgttnttacatattggtgtagcatatgtatgagtttctaaagatgc

SEQ ID NO: 5586 - DNA, 367 bp, Glycine max
  unsure at all n locations
gtcttcanaacattgttcagttctatagaatttgtgttattataactctcgggtccctatgaaatgctatgaagattaagttagctacaattggggattcgatatatttttacaagtttgggtagctgatgatgtattggaaactgaagctcataaacttaataaagcagttgtgttcatataaagttnttgttattcttattagcctcttaatggaagcatcccctataatgaggtttggatgatgtangtctgagagctcgtgtgtcgatatattatatnttttattcttattagcaacttttgagacttacatctttaagttagcttagagacaaacatatacgttcagtctctctatgtatgt

SEQ ID NO: 5587 - DNA, 348 bp, Glycine max
  unsure at all n locations
taaaagtactttttaattaactaatgatgagaagactcttacaccaataatactcgtttgttaaattcttttataaactatataaactttccttttccgcttaccatgcattacagctgtatatatgttcctttgaaaagaaaaaacatgaaactcatccatcagacagcttcaaattcgtaaaacttcacgaaaaatctgtcaattntcacttttaattatcgctcggaatgtgtgagtggcttgctattatatatctgattaattcgactcgaatgaactgtttaaaaggataaatttctcactgtattattcatttatttgttcatgaaactttccatatctagc

SEQ ID NO: 5588 - DNA, 360 bp, Glycine max
  unsure at all n locations
cgcatactttgnggataaattgctgatgtcaatgggctccataacccataatcatctgtacaaatgaaaatattcaaatagagactctttttgtccttttctaactatgtacaactctttttggaaatccattattattgagttatgcttgtgattattacaagtatatagtacaatgcaaacttcaacttatcatatatagagaagaagaaataagagactcacacgacgactggtggatatatagtccagcacttaccatccagacatgagatcatttgctcgtgggcncatatttatctaatttgtatttgaatatgcctcanaccaattagacactatgggtatgcctatcactcc

SEQ ID NO: 5589 - DNA, 436 bp, Glycine max
  unsure at all n locations
tactcttcatgtaacctatgtaaactacatggatattgattaacattgntaatatctctatatgtgctttaaccggaatgatatcgatatctacattaagtagaatattgtgcatctatacacanacatacaataaatatgaaatattatttcgttcgataataaacattatttgttattgctttagtcttctggcacgatatatataggggcccgtcttgtaaattttattcaagtatgtgtgcaactgacatattctgctatagactttttgattgatgcatgcactgacaccaattatgaaagaagggttctgaatattgtcccaattaatcacattctntgaaaatgaaatgcttgtcataacttgtattctatatatgttatgatattaacatttccaatatctgatttctggttggtaaaagtagtatat

SEQ ID NO: 5590 - DNA, 299 bp, Glycine max
  unsure at all n locations
acttacccgtgaagactgaagaaaacgatgaacgaacgatggatcttgaagaacgggtgagaatcttcgcgtaattactcacggaaacgttacggaagcgcctcggcttggattttcttcacggaaataattttcctcagcaaattcgaaagagagataagtgcctaaggggttgaacccttttcttcttcacttctccccctatttatagcanaataggggagaagcttgccgcccagctcgcccaggcgagcaaggttgcttcctccagaagcaacagccttctggaggaatcttct

SEQ ID NO: 5591 - DNA, 266 bp, Glycine max
  unsure at all n locations
ctcagcttctggtgctgactagatctatttagctagtccttggtctaanatatgaagatatcctattctacaccggagacctacatatactaagaggggaaggagctgcatcaacttcttgggattctggcagatcttggagctttaatctcgctgagttcattaaagattgtggcggatttatctacacgtttgtgtcatccacaactatctctttagcatcttttctttattttacatcattccttttaactatattattgata

SEQ ID NO: 5592 - DNA, 345 bp, Glycine max
cttcttaagtacttagataaaatgattacttaaagtaaaggttctaagtaaaacttaatactaccactttagaagctaccttataaaatcacaagttatgttgtcataccaggtttggcttttcacatttctaatgcaaggtagatgctacttttgaataataaaactgctttttaaaaaccgtttgataaaatatcatagtaaagcttttgtaaacaaggtttctccaaaactaaagatgaacatgcaacaatggaaagtaaatgagaaacaatgaagaaggatacaatacacaaagaaattcacattggttcaacctaaccaggggcgtgtatacctacacct

SEQ ID NO: 5593 - DNA, 394 bp, Glycine max
  unsure at all n locations
ntctataagtcctanatgacatttcaagctagggttaactcactntaacctccaactctcanaacctcactctntttccactcataacaccatattctcactntctaaccctaggttaactctacccttcatctctaacagttttccataagcaatttcagcacataaacatcacaagcatcatcataaaaaccctaaaactgaatgggtaagcttaactcatccaaacatggcaagttcaacatcctttcaacaaatttcttcacaaataactatcatgaagcagaaacctagcaaaactacccatcatatctcccagaacccaatacccacgaaaatcaagtgagaaagaagtctacccanacctgaaatttaagggtccacacgtagagat

SEQ ID NO: 5594 - DNA, 359 bp, Glycine max
  unsure at all n locations
tggtaatcgattaccagtgtgtttgaacgttgaaattcaaattcaaatgtgaagagtcacatcctttcacgaaaatgctttgtgtaatcgattacactgatttggtaatcgattaccagtgatagtttctgagcaaatcaaaagatgtaactcttcaaatagtttttgactttttcaaattggtttaagttnttctaaaggtcataactcttctaatggttctcttgaccagacatgaagagtctataaaagcaagactntgttntgcattntaanaacatctttccaattcattctttagacaacaaacttttgccaattgctttctgagtctctttgaacttcttctttctcttcct

SEQ ID NO: 5595 - DNA, 301 bp, Glycine max
  unsure at all n locations
tgatgatatcttagatgatgacananagctcacaagtcaagagcacttcatgatacaacagatgatgatctctcgaatcaaaaaatgagttcgagattgaatcacgaacacttcaaggttccgatggaacattgatttctagaatcaagaattaagtttcacgattcaagttccaagaatcaatatccagattcaagaatcaagagaagacttcatcaagataagtattaaaaagtcttttcaaacactgagtagcacatgaatttttctcagaaccttttaccaagactttctagtctct

SEQ ID NO: 5596 - DNA, 322 bp, Glycine max
  unsure at all n locations
ctgctctgctctcacttcttttatatatatcataacatatgcatacacaaaagattgaagcaagtcatatttacaacacanaatgatcaacatcatgatacttctatagatatctaactatgtcagtgtattacttctcagctctgggtgatttgatgaacaccagaatccagatccccctccttctgccagtaatgcaagattcaggttaaagcatgttttttttctcattaatatttcttcacgaatccatcctaattgaggtaacagagaaccaatggccatagcatgcctgcacagaagactcttctgctatcctatg

SEQ ID NO: 5597 - DNA, 389 bp, Glycine max
  unsure at all n locations
gtggtattatagcacaagagcttcaagtatgtgctccttaaacctccatatatattttgctgtaccttctcttctatagntgcttcttcattcttctccatgtatctcctcacatgtcttgtgataaatgtttntaacatgattatttagagtttccactgattaaatttgctatacaagctagatttgattttctatggttcaaatttcttggtcttgttcttgaaccatgaattttgttgagtttaagttcctttgagttntgtcttgatattttttgtggctgacaccgaaaccataaaattcttacaaacatattaaagtataagaaaacctcacacatctagagtgacttgntcacctattgtagttntgtcatacaagtcatg

SEQ ID NO: 5598 - DNA, 289 bp, Glycine max
  unsure at all n locations
tctcgaatattatgcacctcgaatggacttccgtgtgactagttatgaccattntaattnttcgagagcattcggtgttcaatttcgagcgtctcgatatattatccatctgaatcggacttccgtgtgataagttatgaccatttgaatttctcgagagcttccgttgttcaatttcaagcttctcgatatattatgcacctgaatcagacttccgtgtgaaaagttatgaccatttgaatttctcgacagattccgctgttcaatttcgagcgtctcggtatattat

SEQ ID NO: 5599 - DNA, 253 bp, Glycine max
  unsure at all n locations
cactgcttccatgcccacccctgaggcgtgcgtctncatggtaaataggagggagaaatctaactacatattaacacgagctgacggtagagcctcctttagggtcttaaatgcttggtcagcctccaaagtgcattcgtaaggatccctactggtgagcttgaccaaggnggcaacaatatatagaggcatacccttgaataaaccgacggtaaaaatcggcgagacccatataacttcatatagatctcgt

SEQ ID NO: 5600 - DNA, 295 bp, Glycine max
  unsure at all n locations
agagtacttagtgagagtgattctcctaaattcttgagtgattcaagaacaccctggctgtatcaaaggactgtcacaacctttgtgtgttgccctcgctggaaagagtgattctttccttcctatcatctccacccttggtctttcgaaccacaattccagatnatgcacctctgcccaaaattatctcgtgaccataactnccatttcacacactcaaattaagtgattcttgagcctaaattgaatntcataacgagacacttcacctcgntgtggaatcacctcatttgga

SEQ ID NO: 5601 - DNA, 368 bp, Glycine max
  unsure at all n locations
ctcagcttacaatcaggaagcgttgatggtgtcatcgaccctccattcctagtcagacgccacgtgaagtggaagatggcccgcacgaagaanacaggggaaatgacgactgaggccgcaaaggaaatcgctgagaagattgtaagtcattntcaactaaccattacaattatatttcaatattttgtgaatgccatgtaccactgtgtgttttctgtgtaggattcttttgaggagcaggccacacagggatccttcgtccctcatcgacgtcaggatgttctcgccgctgctattggacgtccagagcaccctagatgtgtccatgctgctggatccngtgtcaccatcaatcaatactttggatc

SEQ ID NO: 5602 - DNA, 131 bp, Glycine max
agttagagctttagtagtaagaatatctgcttattagtctggagatggatcatggtacactaacatgcttctatttagtacctttctgcacataaaaagtggcccaatatgtatgctgtgtcctggagtga

SEQ ID NO: 5603 - DNA, 374 bp, Glycine max
  unsure at all n locations
tgcgggtctgggagacgaaagtcaagtgttcgctatatgtgaagatgatgttccaagtacttcggatttggtccgaccatgccctcctgatttccagctgggaaattggcgagtggaggaacgccccgacatttacgcaacaagcataatgtaaacctttacggttntaaaagctctatagttgggcctaggctttagagttctcattntgttaaggctctgtgtcttttgtttttgaatttataatacaaggatctttcttcatctgttcctggtctctacccattctcattcatttgcatgtttacttctttttctgaaacggcagattcgatgacgagtcccccgaagtactaatacctgngacccgtcta

SEQ ID NO: 5604 - DNA, 414 bp, Glycine max
  unsure at all n locations
nttcgtanagcatagcggaagatctgggacctagtcatggtagatgtctccaccgaggccattgcctccctcgcccaatattatgactagccgttcaggtgcttcacctttggggacttctagttatcacccacggtggaagagtttgaagaaatcctatgatgccctctatggggaaggaaaccataccttttctcgggattctatccctctttagctagaatttcagagatagtccaaatctcggtgcaagaattacaccacagaaagcaagtcataaatggcgtggttggaataccatcgaaatgtttggaagcgaaagcaagagtctcggcaggtaacgacgaatgggaacagttcattgacatactctcactgttgatctttggagggtcctctttccaatatgatggg

SEQ ID NO: 5605 - DNA, 292 bp, Glycine max
  unsure at all n locations
aacttcgccaaaaatccgcattgagaaacctttattcaaacctttcacagttagtgagaaggctaatagaaaaattatggaacttagaacaactaaatccttaattgaaggcgtaggtgacaaccatagtgaattactaaacaagattggtagtttacttaaagtcattccagataccccccaagcctcggaaaatacttncaaaatggtgacaagaagtacctgcaaattaatcaatgctattaatgaagatagtgaccaaaactcatataacacaactgagataggatca

SEQ ID NO: 5606 - DNA, 310 bp, Glycine max
  unsure at all n locations
tactcaattgaatcaacaacagtcccagaattctgacaagctgccttctcaagctgtccaaaaccccaaaaatgtcagtgccatttcattgaggtcgggaaagcagtgtcaaggacctcaacccgtagcaccttcctcatctgcaaatgaacctgccaaacttcactctattccagaaaaaggtgatgacaaanatctacctaacaatttctgtgcaggtgaatcttcttccacaggtaattctgatttgcagaagcagcacattccccctcttccattccctccaagagcagtttccaacnaaaaaatg

SEQ ID NO: 5607 - DNA, 426 bp, Glycine max
  unsure at all n locations
atatcccacgaagcactactacatcatatgtgtatgacatcacttatggaatgcatactacatcaattntagaactcatgttgntcaacacaatgttaaatatatgcatatatttaacatcgatatgatttcaaatcaatgtagaaccctaataacatttaacattggttccccttgattntgatgtangaagtgacacgccctgcatgagtcaagtcacatcttacatcatttattgacataaccgatgttgaaagtttcgcttactacattgattntagcaaaaaccaatgcaaaatgtattttttttaataaaaaagttagcattttgatatgtattcattgggtccatgtntatanttgngaatatgcatcttatatattaatacactattacctatatgctatcaagttaattttttttta

SEQ ID NO: 5608 - DNA, 347 bp, Glycine max
  unsure at all n locations
gtcttggattcttctagtaagttatcttatccacttctcagataaaatttcttctttattattaaagaggagaaaagagagaaattcttgaatggtcttgacttatataagattattgtagaacgaaagaacttggtctctataacaattatcccaaaataagataaaattatcttttaagacaagtgtatttaccttttcaaatcaactaagttctttctatgataattagccttacaaaanaatgtgaaagacattattgtctaataattcatattagactctataccgacttctctaacagtaaaaaatgaatattgttaattaaactattgtgataaccatct

SEQ ID NO: 5609 - DNA, 208 bp, Glycine max
  unsure at all n locations
tatgttgatgcctactattgatatatagcattgaccatacatgatactagctagagagaatagaaactatcgataatagtacactccataggtagtaaaccacancaaactctagtggcttgcataactttagataaatttagcggctcttaatgcttatcctatatatattataatgacataagtatttctaacttggtacctccta

SEQ ID NO: 5610 - DNA, 302 bp, Glycine max
  unsure at all n locations
atatgcatgcaatctacggaggggagcggtgttgcgaagcccanacccttggtgatatacttcactaaaagcgcagcttcgcaaaagcctggacacccctttgtagccaaacctgttcctttcctgtaccaaaatagccacgcggtcccgtggagatatgcacctccaagggagaaggaagaagaagtcactgacgtcagctcgctgtcagctaaagtaacaaatatcacgggactgagtggtgtgacccgtagtggtcgtgtgttcgcacctccggacctaccagtccaacccgcggacgt

SEQ ID NO: 5611 - DNA, 265 bp, Glycine max
  unsure at all n locations
ttattccatttattactttgatacatacgttcatagatttgtcattcagaataataaagaaatatatagctctctaacttatactgttgtttgtcattatatatacatgatcctttctttctttgttagcttctcagaatttccgcatgctttgtgaatcttctttgnttatatctacggacaggtgtttcaatttgtgacatgtatagttatggaaaacattatgtgatcatgaagctgaacaaggttcaagcatactgtatat

SEQ ID NO: 5612 - DNA, 387 bp, Glycine max
  unsure at all n locations
tacctattactgccttagtcaatgaaacatttaataaaataaatgattaattngttactaatggcatgaaaatcatgaatatgataaaggtaggacatatgtactttgaagacgtatatgccatgatgcaagagaatcaacacattgctacctgatattatgttcgcatgtatgttcgagaaacatgagagtntgaggttcaagaaattgtaaatatgcggcttggttgacgagcaatgtcatgcattgtcnacatgaatgaatggtcgtgtgattatggagaatatcacacacttcanattccttgctcgcatgtgattgcaacgtgtgctntttgcaattcagattatgatgactctgtcgatcctatatacaagttggaaaaca

SEQ ID NO: 5613 - DNA, 345 bp, Glycine max
  unsure at all n locations
ctcacatgcatccatcatttctgctggagatagttggctgaatcaactgaacaaatgattntttttgttgtgactagcagatgcttgttgaaagtatgatccaatgcacaaactactagacttattggattctctccttgcctcctagctttcagatctgaaatatcacaaatcacactagaatgagggttgaacagtgttaataaaatacaataactnttttgtaaatgaataatttatgacaagttcanaaagatatatgcattggagttgtccactgataaggaaaaacaagtttgacgaaaatagaggtcgatcattcagtacatgtanagcaataatttc

SEQ ID NO: 5614 - DNA, 307 bp, Glycine max
  unsure at all n locations
taaacaaaaatcaattgagggagcttcgccaagtgtccccatcgaaattgagaaacctttattcagacctttcaaagttagtgagaaggctaaacggaaaattagggaacttagaaaaactaaatccttaactgaaggcgtaggtgacaatcatagtgaattactaaacaagattggtagtttacttaaggtcattccagatactccccaagcctcggaaaatacttctaaaatggtaacaagaagtacctncaaattaattaatgttattaatgaagatagtgaccaaaactcagataacacaact

SEQ ID NO: 5615 - DNA, 376 bp, Glycine max
  unsure at all n locations
tctcacctcttctcctttgtcttccgntgcatctccatggtggaaaatcaccattgaaagagctcatggaagctcanagatccagcctccatagaagccccacaagcaagcttccatcatctaatttcattaaaaccctaaaaattaaaagctaaattctatgggtttctcccctaaggttaaccaaagtaaaagagtaaagggaatgaggaacttacttggattggtgatggctgaagattcgtanaagatgcagaaagaatgaatgcanaaatgcacgaatttggtgagagagaggatgcacgcagtgttctaaaaatttcaggcacatgtgagtgtaactgatggtacactcacttaagtaatttttaccctc

SEQ ID NO: 5616 - DNA, 429 bp, Glycine max
agcttgaaatgaggaagtgtagaagggtggttcttcctgcttttattcgtcgaccacagagtggtacctggagatatgtcgcgggggtcacgagactttggggacgtcaggtggggtgctattgcccacaaccaagcttgatcaatcccgacccaacccgggcatattcagtcagtgagaacctgtgatgtacctaagcaggcgagctcttggcaatcaacagataaaaggaacaaagaccacaaagcaaggaggcttgtgtggtggctggccagctgtgaatcttgcgtgatatatgggttatggcctctggtaatcaattaccaaaggtgggtaatcgattactaggcttataaatgaagacaggacgctatgatggtctctggttatcgattaccaaggggtgtaatcgattaccaggctttgaaa

SEQ ID NO: 5617 - DNA, 450 bp, Glycine max
  unsure at all n locations
agctntttggagtagaaacatgggaccaactcattttatttcaaaaaggaagtcgtatctagtcaaggtcttagagaccatacaagtttcctaacgatttctaattatgtgggccattaagtctatcatatgctgacaatagccgagaagcccatgaatctcttcgggggcggagtaggtgtctgccatcgccttggccttggctaataatcggggaagttcttgactcccgttcaaggtaagagcaaaccgatccatccacatggttgcctcttggtgtaaagagtcgatcacccttcctctagcctctttttccgcgtatacttgggcatattcgtccgcaatcctatgctcgtgggccgcggctagacctaactcttcttggtacttggcgatgatagctagcatgttggtctccgtctcgcataaacgctgagacaagcttctttt

SEQ ID NO: 5618 - DNA, 428 bp, Glycine max
agcttaatgaattttatactatatttattataaaaagaattaaatagctgaatatttttacaatgaccgtgagcaattcaatgccaaagggcggcaaaatttggcaaatattcaaatttaagtttttagtttattaaaaacgcaataagtatatgtgttattttagtcacaattttttaataaaattccaaactttttgataaaatagttaagtcctaatttttaagtgatagaacgttaagtttaggtcttaaaagaattttttaaaaaatgaacctttaaaaaaaggttaaattactcatttggttcctatagtttcataattcttacctttttggttcctataacttgaaagtggtttttttagtccctataatttatattataattctctcttactccctataattctgaaagtggatatttaa

SEQ ID NO: 5619 - DNA, 448 bp, Glycine max
  unsure at all n locations
agcttgtgagacanaaggacctatgatcatctgaatctttacactatcagcttagatacaaatccatattaggtcccaccacccaaaagtgccatagacatgaaagcatttcaaagggacaatgacaaagaataacacagtaaaatcaaattatttgtaacataaacctgngggagaattggtttcacaaatctttcccagtttttatgtttatcaagtacacatattgataggctcatgaaggccatgacagaaaaataaaggaaaataagccaaagtagttagagtagatatagaagtagttaggtttggtttaatattagttagttactgaattagtttggtggctagcttaaatagcagaagggaagtataagatcactcattctgcattgttacttagtgtacttaccanaatccagagccaggacatgtcaaggtagatgtg

SEQ ID NO: 5620 - DNA, 408 bp, Glycine max
  unsure at all n locations
agctntgagcaaattcaaacgacaataacctttntactcggaagtcggattgagtcccgttatatatccagacgctcgaaattgaatgttgaagctctgagcaaattcaaacgacaataacctttttactcagatgtcggatagagccccgtaatatattgagacgctcgaaatggaataccgaagctctgagcaaattcaaacgacaataactttttactcggatgttcgattgagtcccgtaatatatcgaaacgctcgaaattgaatgttgaagctctgagcaaattcaaacgacaataaatttttactcggatgtccgatggagtctcgcaatatatcgagacgctcgaaatggataaccaaagctctgagcaaattcaaacgacaataactttttactcggat

SEQ ID NO: 5621 - DNA, 384 bp, Glycine max
  unsure at all n locations
agctntgaggataagaaatctatattcatatatcctattcttgcttaagtgaatgctctaatgctagagtttaagaattcgactctctttataatcctgccaaactcatttgtttgcttttagacacaaagtataagttcaacagaaattaatctttgcccagtttgttcttcttgggatttttgttgtgcgttcaagattntagtctcttagcctctctagtgtattacgttaacatttatggaaattgactttataacgtggatctcaccaatatatgcttatagcattagtcacataatatctgtacatggatataataatgttgaatgtgactttcatattgattgctattaactctaaatgttcctataggtataacta

SEQ ID NO: 5622 - DNA, 430 bp, Glycine max
tgcttaccacataaattgttatattatgatttagcaatgtcgaatagatgaatgccacagggattgctaatatcaacacctcaataataatacccccaggtgtatgacttgcatatacatgtactcttaaagcatgaagattgcatgtgaatttagtctttttattttatcggcaaacgctagcttttgttatccggcagattcaaacccacatgaatttagtcttaaataatcagtcttggaatcctataaatataggcgattgaaatagacagagttgtagctagctgcttaccatttaatacatatgttgatgactgagaaagacaatggtacatgatgatcataagacagagctcaaacctatgagccatgatatggctcgcaccaagataactggtcagatgacgtctgatgcaaaaacgaaatt

SEQ ID NO: 5623 - DNA, 438 bp, Glycine max
  unsure at all n locations
agctntgtgagtgattcttataaatcgatctctagctacaatgaacgattgggctcctcctctcatagctgcggctntgttttggctcttgagcccgggaatgatctttcagttgccggggaagaatgcaccctttcagtttatgaacatgaagaccactgttgcatccatgtttgcgcacactgttatttatggtctgtttctgatgttgttcttcgttggtcttagtatccatctttatatttaagcagcagcaaagggtatttaaagaaaacttatgtgttgctttatcttttaaagtagatcatgtaacaaccttctcttgttgatcaatatgtatgtgctcttttcgaatttccacttgatcaggcttctactaatactttcacgagtgatatgctcgtcgttcattatttaaaagtgacgtgaattactatg

SEQ ID NO: 5624 - DNA, 440 bp, Glycine max
  unsure at all n locations
agctttgagctttgagcacccacgactgttccaagagcagtctagggttttcttcgacccacagttccaacagtaatgtagggttttcttcgacttttcttcgataggaggttatgtgggttccaacgagcggtttccgacagtattgaaatgaatgtggggcaatgtgggtgtcgaccgagtagttttcggcagatttcgggtgggaggagaaagagaagagagaatgcaacagggttttcgagcgcgcgagttgtgaaatttcatcacgttttaacatattaacataacaacatcaacatcggttttttaaggataaccgatgttaggatgaatctgttaacatcggntttgtaaaaaccgatgttaacttcaacaaggtaacatcggtttttaaaataccgatgttaacatcaactccttaacatcggnntacccta

SEQ ID NO: 5625 - DNA, 434 bp, Glycine max
agcttgtaaatcacttgcacgggtccaacgctgtattgcttcacccaagacccttcgtcccaataatccttcatcacccacacgtcaaagcgcttctctgttcccctcacagggtaaacaaggaacccaattgaagcagattcttcaaagggtaccaaagttccaaacttttcatctgaagaatcgcgaatttttggcacccttatcttcctaaacgattctttgaccatatcaaatgctagaacaacatcttgtgttgcatcagactcttcaacaaagccccaccagtggcaacaattgtttgcgtaagtgaaaacccgagaagaaccccagatttcaattggaagagggagaagagagggatcaagttttctccaagagtttgaattgaggctatacaactcagcactccaatacccaagttgtctttcatc

SEQ ID NO: 5626 - DNA, 380 bp, Glycine max
  unsure at all n locations
agcttatataaatcgatacgctcgaaattttacatcgaaaactctcgacaaattcaaatggccatatcttttcacacggatgtctgattcgggcgcataatatgtcgagaggctcgaaattgaacaatcgaagctcttgagaaattccaatggtcataagttctcacacggatgtccgattcaggcttataatatatcgatacgcgcaaaattaaacatcggaaactctcgagaaattcaaatggccataacttttcacacggatgtccgattcgggcgcataatatgtcgagaggctcgtaattgaacaacggaagctcttgagaaattcanatggtcataacttttcacacggatgttcgattaaggcgcatcacata

SEQ ID NO: 5627 - DNA, 448 bp, Glycine max
agcttggatttcctttgctccggaaacctcttctttctcatttgaacccaaacccaatctccgggttggaaaacaacctttttgcgccccttgtttgcttgtctagcatagctctcatttctcttttcaatttgggccttgactctttcatggagctttttcccatagtccactttggcttgtccttccttatgcttaaaaactgaaatattaggcattggcaacaaatcaagaagagttagtggattgaaaccataaacaacctcaaaaggagaacaactagcggtgtcatgcacaaccctattataagaaaattcaatatgaggtaagcaaacttcccaatttttaagattttttttaaatggtccttagcaaggtacccaaagtcctattcacaacctctgtttgtccatcccattgagggtgacaagcagtagaaaatagtaac

SEQ ID NO: 5628 - DNA, 446 bp, Glycine max
agcttcttgacttgtcttggaaccagaccacaatctgtaaccccaggtacctgttcatgtcaagaggtattaggaaaatgatatctaaagaatttagaaaaaaacttagcactcagaatcaggctagctaatacaacttcaaaaatgtagtataccagtatcatctcaagtccctttgtcaaaccaacaagacgaggaagtcgctgtgttcctaagacaatttaaaaccaggttagcaatactaaagaaaaatataataatgacaattagtcacaagaaatgcaccattactcatggtctaacttcattttacaaattattctaggcctatctaacatgtgaactaaggtattaaaccaaacttgtagttaattaataaattcattataattgaacttcaaacagctttcaatgtaatgcatgtcactcaacaatgagcagtaaca

SEQ ID NO: 5629 - DNA, 451 bp, Glycine max
  unsure at all n locations
agcttcatgatgatgaacctagcaattntgatgatgtcaaaagcccaagtgatatattcaatacttcaagatcaagcatcaagaatccaatccaagattcaagattcaagggaagaaatcaagaagaaacaagtcaagacttcatatggaataagtattaaaagatttttcaaaaaccaaatagcacagttttgttttacaaaataattttctcaaattttctcaagttaccaaagtgattactctccggtaatcgattaccagttggcagtaatcgattacgagtaaccagattgggtttcaaaatgttttcacatgatttgtaacgccccgaaatgatnttcacatagtgtaatcgattacactatattagttatcgattacaagtgaatctgaacgttggaatttacaatcaattgtgaagagtcataactcttcataaaatacattg

SEQ ID NO: 5630 - DNA, 369 bp, Glycine max
cctgctgcatgcaagctttgagcaaatacaattacttaactttttactcggatgtctgagtgagtgctggaatatatccaaaagctcgacattgaatgtctaagctctgagcaaattcaaacgacaataactttttactcggatgtctgattgagtcccgtaatacatcgagacgctcgaaatggaataccgaagccctgagcaaattcaaacgacaataactttttactcggatgtctgattgaggccggtaatatatcgaaaagctcgaaattgaatgtagaagctctgagcaaattcacacgaccataactatttactcggatgtctgactgagtcccgaatatatcggaacgctcgaattgaatg

SEQ ID NO: 5631 - DNA, 432 bp, Glycine max
agcttaatatttaatggtattttaagaaaaagcccaagccaaacttcattaattttaacagaaacgcaaacacaaagtaaacaggcagaaaatcataagacatgcaaaaagttatcattaattttcagttgtttttagactagctgttgtctaacatgtgtaatgatgagacaatgttgaatacttgtaatattgtttacatgttgtaacaaaagtattttgcagaatgtcccaaaagatttctctaaatctttccctctccctggttttgtaccttcagtttggactttaagctgttgtagttgataattggtttgcaggctttactgacaaagtcacaaatctgagaagaatgggtgcctttaacgcatgagttactggcacacacaaattcatcattttattgtatacaaaaataattaccttctcaat

SEQ ID NO: 5632 - DNA, 437 bp, Glycine max
  unsure at all n locations
agcttctagaaggagatcatctcgatgttctatgcttcttgaagggggcagtccatgaggaatctccttgggaaagacatctttaaattcctgcaataagggttgaacactaggagaaacataaatagttaactgattagaattatcactctctctctcttgtgtatcactcttttcctcgggtgtatcactcttctttttcatattcctttgtggtgcctcactattttctttctcttgttctctcttttctctcattctgatttggtcatcacacacttttctaggggatagaggtttaagagtaaacgaggaagatttggctattcgtctgtagggctcttctttgttacggntcaataaacgttgcatttgtgtagtccacgcgtccagaaatatgcgctgagatttctccagttgatgatatacaccaccat

SEQ ID NO: 5633 - DNA, 429 bp, Glycine max
  unsure at all n locations
agcttgtaacctgaatagaaaatgtccaacttttttttagaacccatttgttttttgcagccactatatttgtccttcctctagttctaatcattcaccatttttagttaagaactatgatgttcctagttcctagactatgtttcagacatttaagaccttttgctttagtatcgtcaaccatagagagctctgtcaatgattccttagtgagtctagaaattttggggaaaaattgaggataatttgattaagaaaaatagtgtttagtaggttatagaataggaattcattctgaaatcgctttaagttgtgtgtttttagaaattcactcaactttggcacaccaatgtcaaatgccaaccattcggntctaatagctttcctttttacgaacttatcacctaaagctataaacaaatgagaagt

SEQ ID NO: 5634 - DNA, 395 bp, Glycine max
  unsure at all n locations
agcttcatgatgatgaatcatgtatgaattatgtagttntgatgatgacaaaaagcccaaaagaataaaaggtctgaacgttgaaattcaaattcaattgtgaagagtcacatcttttcataaaatgcattgtgtaatcgattacatgattatggtaatcgattaccagtgacaagttttgaataaaaggtcaagagatgtaactcttgacattgatttcttaaggttataactcttccaatggttttcttgaccagacatgaagagtctataaaagcaagaccttgacttgcattcacaacatcttcttgaacaacttttgagaaacctttaaacctttacaacctttacaattctttaagaattctttcctaactcatcttcttcttcttcct

SEQ ID NO: 5635 - DNA, 338 bp, Glycine max
  unsure at all n locations
agcttaatgaaaagaaaaacttacctcgattacgactattgtgacgacgacgcgacagcatgaccggcggtggtggcaagacgaaacaccaatggggatcaacatgcgcggagtagaagcaacccaatattacggaaagtactgtagcggcaaggatgggggaattccaagagcttttaaaataagggtgaagggcattntttccatttcaccaaatatgttgggtgtaccagcagttgggcaggtgcccaaagccatgatagagtcaactttgaggcccactccacttcgacagccaaacccatttttttgtcagtaccaactttgtttatttttta

SEQ ID NO: 5636 - DNA, 425 bp, Glycine max
  unsure at all n locations
gttattagttaaagttaatgaaacttggtagtttgtcaataattgaacacaatttcagtggtagagatgaactagtataaatctttgtaacttatatgtttccttgtgtttttctgctttaaagtgacataaggtttaaatttgattttgttttggaaagttctatttgttttacaaagtttctcttcaaatgataactttgttttgttaaaaaaagacttgaaaattttctaaaaccacaattcaatctctcttcttgtgatatttgcatttacaatatatatatatatatatatatatatatatatatatatatatatatatatatatatatatatatatatatattctaacactcatctaattgtctaaggtctaattangagtagactgtgcccaaaaagaaaatgcacataatgccgcat

SEQ ID NO: 5637 - DNA, 378 bp, Glycine max
agcttattatttactttattttgtttattttagtatttcataaaaagagagctctatttgactccctattaaataaataaataaaacatcctttttattttctaaaaacatatttattttatttaccttaaaaccattattttaattaataaaactatttattcttatttatttaattacaaaaacctcattgtttttcaaaaactctatttatttaaaaaaaaaccatttttaatttattttatgaaaaacgggatgttatagaagttgatgaggaagaagcctagcttgtttcaccaatcacaattgtaccacctcatatgcaaaattttgaagaatctttttttcaagattttgaatacgagcatagcttggatt

SEQ ID NO: 5638 - DNA, 451 bp, Glycine max
  unsure at all n locations
agcttcaagaaaaagatggcctcatcatatttcttatttccagaagggaattctatcaatagacctccaatctttaatggagagggttaccactactggaaaacccgaatgcaaatttttatcgaggcaattgatctaaatatctgggaagccattgaaatagggccttatatacccaccacagtagaaagagtttcaatagatggtagttcatcaagtgaaagcataaccatagaaaaacctagagatagatggtctgaagaggatagaaaacgagtacaatacaacctaaaagccaaaaacataataacatctgccctacgaatggatgaatatttcagagtttcaaattgcaagagtgctaacgaaatgtgggacactcttctattaacacatgaaggaactacagatgttaaaagatctangataaatgcactaactcatgagtatg

SEQ ID NO: 5639 - DNA, 450 bp, Glycine max
  unsure at all n locations
agcttgatggcacactaagcctcacatctcatgctaagcgcatattgcagaaaattntgtgttgtcgaaagcgctaagcccagcctgctgcgctaagccccagatgctcactggaatttgcaacttcaagttgggcttagcatgaggttaggctaagcgcttgggtttttaaactctaacgtcacgtgggcacgctaagcgcagctctacactaagccttccatacaaatttcaatttttaaaaaaactaaaggttgagtcacttgggtgttacccaaaaaccattagcctctctgcctttgctaaccttgagcatttgtgcctttttgctgcgtgcttgaactgacttgtctgcatcttccttgcttcattctgcatttcaatcacaatccaagtaagtggatacatttccatttttaatnttcattctttaaaccatatgatagatga

SEQ ID NO: 5640 - DNA, 379 bp, Glycine max
agcttcaagaaagtcctctccaagagtgactaatgaggctgttcataaggctgtgagtgcttattttctgtagttttctgttcaactgcttaattcagttgagcaagatttgttaggaaatttattgtcttgttcactgttattgatgacatcttttattctcttctcaggctgctgcattgaagggttctgatcatcgtcgcgccacaaatgtcagtgctagattggatgctcaacaaaagaagttcaaccttccaatcctcccaaccaccacaattggatccttccctcagactgttgaactgaggagggtgcgtcgcgcatacaaggctcacaagtaagatatgccttgagttgataggttggcttgtctcttgac

SEQ ID NO: 5641 - DNA, 411 bp, Glycine max
agcttggtgaacagattaatattccatcttttatgcagaggcttggttgtttgattttaaaaatcctgtgtttgttgaatggtttgaaatgatcgattgcatgatttgagtgaagtgtagtgagtaaatcttatgctttgaatgtgcatgcagagattataagagaaagaacatggattatgatcatgactgaaaatgttagttagtttgacagattgattttgaaggtactcattagccacaacccggtgagtgtgtgatctttatttgtgagagaacgactagcattgagtaatgatctttgtatgaatctctaattatggaatgaatgcatgagtctgaagatgatgaaagtcatgcttgattgaacagtctcttatcacaaagcttaccttatgaatgattgatttt

SEQ ID NO: 5642 - DNA, 379 bp, Glycine max
  unsure at all n locations
agctntatataagggttttattacctataattntgcagcattgccgagtgctttgctttccttgtatgtacaaagcggtccaatccagtcattcatagaaattcaagagaagccagtagttcatcttcaactacgattacatatcttgactggaacagtggtttagtggtttctacagacgaaaatcaacaccaggggagaatgtgtagccttcaagacataggaggtcattttatgaaagtaccaattattgtattccaggttcttctttgtatgcatctagaggtatatgataatgaattgtgtgtttggccagcctttggaatattgtttttggagatctgaactgttttgtatttcacggaacacctgtctgtgc

SEQ ID NO: 5643 - DNA, 386 bp, Glycine max
  unsure at all n locations
tcgaagagggtctgagaacatgaaaatttgattatcctgctttgatgaatgggaagcctatggcaaatggagagaataagaatgagggaggaacccatgctgtgactatctgtcctatatggccaaatttcccaccagctcaacaatatcaatactcagccaatatcagcccttttcattacccaccaccctatcagccaagaacactcaatcatccataaaggccacccctatatcagccacanagcctgcctgctgcacattcgataccaaacaccaccctctacacacatcataacacctactagggaaggaatgttctagtaaataagcctacagaattcacccccattccaatgtcatatgctgcttactcccctattact

SEQ ID NO: 5644 - DNA, 566 bp, Glycine max
  unsure at all n locations
aagaatgactcttcgaccgatcgctctatataantcnantacttanttataancnanttttttctctcctctcgcggaccgcatgacnccntgttgatgcccgtcgnagtaccctgcgatcctctagatcaacctgccgcatgcaatctttaggtacacagatatagtattacgttcttcgagattccaggctctgttaggactgtaatatattgatcgcacacgcactccacatcgaccgattgaaattgaaaatggcaaatcaagcctggctcttatagactctccaagactgcccgagaagaccattcacaagagtcatacctttacagaaacttaaaaccaatttaagatataaacacatcttgaagagttacatcttttgatgtattcataaaccccctcctggcagcagacaacaaatcacagtaccgactacacaggctttacgtgaaaggacggacccttccatctgaatgtgaattccccgtcaaggactggcatccataccatactatgatgcaatacacctctgaattgatgaacgcggaactcatctgaaaccg

SEQ ID NO: 5645 - DNA, 409 bp, Glycine max
agcttcctttttccctttgattaggattatctttgaagcctactgctgtaagtttgcggagcttctgaagtcaatttccttaatgtgtagatgattctgtcgatttcaaatctacctagaaaagatgctttttgtcgatagtttgctcctgcagtgttgctaccttggagattctgctgtaatgcgtaatgaccattactatataggattttggcttaactatattcttggacactaatttcgtgtattatctatgtgctgtcttattattaacgaacaacacatgttaagatggaaattctcaaaaggaccaactcgactacttttaatcctaggttgagatcgtagcaactaaacatgaggaaagttaactttttatttctttcagataaaggtcactcaatatgat

SEQ ID NO: 5646 - DNA, 252 bp, Glycine max
agctttataacaatgagctgggaccgaatttatgtcagcttcagtggtagtatgcaaaaaattctcgcacatagcaccattcaggcaagtttctacttcctgaaatacattatgtaggaatatgatggggtcttcaatgtcacacattttatgttttgaaaatctatacttatagcatgatggcatattatcacttaatttaagccttaacaaagtattctgtattctgtatgcttgaaatttgttttatat

SEQ ID NO: 5647 - DNA, 305 bp, Glycine max
  unsure at all n locations
agcttgtataggctacaacaagaaagtgnttcttaagaatgaaaacgggtaatatagataaattggccatggtaaacaattacactatcataagtgtgttgctcttttcctcattgcttttggttttcatgagtgcccaacaacatcatcatcgtattactttgcttttaacagaggccagacagctgcttctgcaaataagttgacattcgagaataaaatcatgtaatgtaattcatgcccctctattcatgtgaatacttanatacacgcatgctttgtttgcaaatctctgggtagagggt

SEQ ID NO: 5648 - DNA, 348 bp, Glycine max
  unsure at all n locations
agctntgatggagtaccctaacttaaaaagtataccaacccactgaaagaatagttccctacaggagtgctgcttccctatagaggagtgcggtacagggagcatggctaagtgcacatgagagaggttatttttgttcttccgggtgccataacaacaataatcttggtatattttactccaaaacacaaggttgtttttaaaattattctgttattccttttcaaagtagttttatatttaaatgttctttgtgctgtagataaaaactgaaaatcagagaataaagttgagtaagcaccagttttcatggggtttttgatagtagtaccttgggcgggacatgaa

SEQ ID NO: 5649 - DNA, 378 bp, Glycine max
  unsure at all n locations
agctnttaactcggaggtccgattcaagcgtattatatatcgagacgctcgaaattaaccaacggaagctctcgagaaattcaaatggtcataacttttaactcggaggtccgattcaggcgcataatatatcgagacgctcgaaattgaacaacggaagctctcgagaaattcaaatgatcataacttttcacacggaggtccgattcatgcgcataatatatcgagaccctcgaaatttaacaacggaagctctcgagaaataccaagggtcataacttttcactgggatgtccgattcaggcgcataatacattgagacgctccaaattgaacaacggaagctctccaaaaattcaaatggtcataacttttcac

SEQ ID NO: 5650 - DNA, 392 bp, Glycine max
  unsure at all n locations
agcttcatgatgatgaatcaagttgattcttgtagctgtgatgatgacaaagatgatgaccaaaagcccaagagaatgatttcaagattgagtccacaagttcaagatcaagtgtaatttcaagcttcatgagaagaaatcaagaagattcaggaatcacgagaaatttgatttctagattcatgagaagatgaattcaagattcaagagaagacatcaagaagacttcacaagggaagtattgaaaagatttttcaaaaaacaaacatagcacaattttgtttttcaaaagagtttttctcaaaattttctaagttaccagagtgtntactctctagtaattgaataccagcttcctgtaatcgattaccagtggcaaagttcgatttcat

SEQ ID NO: 5651 - DNA, 363 bp, Glycine max
  unsure at all n locations
agcttgagatgaggaagtgtagaagggtgatatcttcctgcttttattgttgaccacagagtggtacctggagatatgtcgcgggggtcaggagaccttggggacgtcaggtggggtgctattgcccaaaaccaagcttgaccaatcccgacccaccccgggcatagtcggtcagtgagaacctgtgatgtacctaaacaggcgagctcctggcagtcaacagataaaaggaacaaagaccacaaagcaaagaggcttgtggtggctggccagttgtgaattttgtgtgatatgtggattatggcctctggtaatctattaccaagggtgggtaacngattacaaggcttagaaatgaagaca

SEQ ID NO: 5652 - DNA, 327 bp, Glycine max
  unsure at all n locations
agcttctcatggctatgagaggctaaaccctcattgttgggagcttggcatgccaactcttggtattcgtttagcctatttcatacatttctgatcttaatgcaatttattatttttatctttgcaaagaaatttgggagaaaagaataaataaattatgctcttcatgcgggaaatcaaatataaagtgtcttagtagatgtgggtggaaacaaagatttcattagatagaanaaaaatcattaacattgcatcacaagtagttttggcatgctaggctccaacataatcacattctgaattcatctttcggcatttaaattattg

SEQ ID NO: 5653 - DNA, 383 bp, Glycine max
agtgcactgccaaagcttttattccatcatgtgtttgtgcattgaagaactccaattgaggcacatacatgaaaacctctgatgctcctgtgagcacatattgtggcacttgccagaaaatggaaagtgaacttgacccatcacaattgctacaatcttttattgcaaacttcaacctgaatttctctaccaaccctgctgagaccatggccatgattgcaaggactagaccaattcccatcctttgaagctctgtgagtttggatttcattactttggccacaaaagggtcgagggcgtgcctatagatgaagatgaagaatgccacgcccaaaatgtcgaagctggacatgcttgctggagggattttgaaacttgaaatt

SEQ ID NO: 5654 - DNA, 435 bp, Glycine max
agcttctggaaggagatcattttgatgttctatgcctcttgaaggtggcagtccatgaagaatctccttaggaaagacatttttaaattcctacaataagggttgaacactaggagaaatagaaatagtaaactcattagaattatcagtagaaattttactgtctttgaaatactgtagattgagtggttcatgagcaggtaacactttcctcacttcactcgcctctgcaaaataattaaattttctctcatgtgtatcactctctctcttatgtgtatcactcttttcctcgggtgtatcactcttctttttcatattcctttgaggagcctcactattttctttctcttgatctctcttttctctcattctgagttgggcatcacacacttctctaggggatagaggtttaagagtaaacgtggaagattt

SEQ ID NO: 5655 - DNA, 423 bp, Glycine max
  unsure at all n locations
agcttgccaggaagaactgtttatgagatttagaattattgcaggactcacttcaagaaaaagataagggctcacttcagctaaagatatgaagaagactccagaatacaagtggactatgatgtagttatttctggtaataagtagacaactatcattgccttgtgtacccctataaactgtctacattatatagaatcatgatatagagtttgggacatctagtctcccctgccaattaatccaatcctatgattaggaaacatgacaaaattaattaaaatctattcatctaacctactctaaattgagatgcaaaattgtactataaagggctaacattcaggtatcttcacaattcatccattaaaattgagtatttcagtccacttgaacanaatttcagaacattcatcgatccat

SEQ ID NO: 5656 - DNA, 274 bp, Glycine max
agctttataggaagcactatggttaagaggtttggtttcaaaactacttcaagtgaaagagccaaaaatcactgtagtacactatgacagtcaaagtgcaatgagtttgaacaaaaaccaagtgtatcataacaaaacaaagcatgtgaatgtcaagtatcacttcattcaagatatgatcaatagtaaagctattgctattaagaagatatctacaagggagaatgttgcacacatgctcacaaaagttttaccctatgagaaggtcaactat

SEQ ID NO: 5657 - DNA, 338 bp, Glycine max
agcttgtagcatatgcaaacggcaataacgttttactcggatgttcgattgagtcacgtaatacatcgaaacgctcgaaattgaaaacagaagctctgtgcaaattcaaacgacaatacattttaactcggatgtccgattgagctccgtaatatatcaagacactcgaaattgagaataaaagctctgaacaaattcaaacgacaataactttttactcggatgtccgaatgagtccagtaatatatctagacactccgaattgagaatagaagagctgagctaatccaacgactttaacttttactcgaatgccgatggcgcccgacgtgtttaca

SEQ ID NO: 5658 - DNA, 342 bp, Glycine max
agctttggtttagttattgattaattaatatcaaattacaatgggtggcgtctactgtgaagtttttcagaaatggaccactggtgaggtaagccttttgtacctttaataggcggtcatcagcaggtgaagcacttcattggtttgtaaaaaataatgaaaaaagatataaaattggagtcaggggtaattttgtaaataggagtagtagcaaccaaataataaattaaaaaagagattttttatcttcaactttttcatttatattgaatgcgtgttttattttgaaatggtgataggtcgagggttttgattcaggatcaaatgtattggggggtggta

SEQ ID NO: 5659 - DNA, 438 bp, Glycine max
agctttgctagttttttgttcccttagaattatcatatttccctagtttatagtttaaggacttggtagtattttcaaaacaaataaccaatgcacttacatggattgttcttaatactcatgggttatattggttgtgccataacctttttttcttggatttaaaaagaaaccttttttttctctatattatttcttaagcaaataaagtgtatagtttaagaatcgcgatattaggttatttaatgttgtcatttattggttgttttctttattatcaatgtaattttccatgcatatgtattatactatcatatacaaatattctagatagcgatgtaggatcttacagtccgagttacaattctcgagtttcaaatttttaactcccatccgatcttacgaaaatctcgatttgacaccttgctctatatatat

SEQ ID NO: 5660 - DNA, 417 bp, Glycine max
  unsure at all n locations
agcttaagctccttcaactacacaaggctcttaatatttgaagagtatcctagtggaaccttcacccgacgaagacactgacaaaaacttatcttctccttcttggacaaagtatggcaggctgggggcatataggttcattccatcactgtctagtccaagtctaagatttcttggctcattcccgaaatccggatacaaaccatcaatcttcttccactgggagcaatcagccggatgacagaccattccatcagaaatccttccatttgcatgtcatgtaaggtcttttgcgtcatcctcgttagcaaagagacgcttannaccttggaataattgaagataccacanaaccttcgctggnggacccttgttggagttntcatcagaaatgctntcctcttaatccttgacttt

SEQ ID NO: 5661 - DNA, 285 bp, Glycine max
agctagacgttgatgtagcttgtggacatgttcttgatgagctctattctaccactgtcgcttacataaggctaacagactctattacttattgtggccattccacctcccctaaaagattaaacactccattgggattgttgtactgtgccagatggaagaacagtattcgtgaaaaccccgctcccgccgtcaaatctctatactcgtgctggattaaccattaccctaacgtatgagacatgcttctctactctgccttaagcgttacgactatggctgctc

SEQ ID NO: 5662 - DNA, 421 bp, Glycine max
  unsure at all n locations
agctntgatttttgttctgattgcatgatgctatgatagttgatagttaaaatagtgttaggaattatattttcatacaatgtatgttgctctggttaggatttgatggcctaattgtagaagcaagcttcatgatgatgaacctagcaattttgacgatgccaaaagaccaagtgattgattcaagacttcaagatcaagcatgatgaatctaatccaagattcaagattcaagagaagaaatcaagaagcaataagtcaagacttcatatatgataagtattataagattctttcaaaaacaaaatagcacagtttttgtatacaaaagaattttctcacattctttaagttaccagagtgattactctctggtaatcgattacctgttatcagtaatcgattaccanttgtcataccc

SEQ ID NO: 5663 - DNA, 440 bp, Glycine max
  unsure at all n locations
agcttaagctccttcaactgcacaaggctcttaatatttgaagagtatccttgtagaaccttcacccgacgaagacactgacaaaaacttatcttctccttcttggacaaagtatggcaggctgggggcaagtaaattttcttcccatcagaccttggatgcaactatgatctgatacccatatcagttagatcttgacgggtattcaagccatccttcgtcttgccttgaatgttaaggagcgtcccaatcacactgtcacaaacatttttctccacatgcataacatcaatacaatgtctaacgtcaagatcacaccagtacgaaagatcaaagaaaatggacctcttcttccatatgcaactctgacttttatcctctctttgggtcttcccacatacagngntcaggtgttgaacccgctgatatacctgctcacc

SEQ ID NO: 5664 - DNA, 363 bp, Glycine max
  unsure at all n locations
gcttatgtttgccttattgcaagtcccactgaggttaaactctgtgcttaaaatatcttcacgtccacctgttaatatatcatcttgtaaaactgatgcagaggggtttacattatctacaatctcagctaggggttctcttatatttgagccagccatttctttggaatcaatgcccatttggcatgtaccagcaatctcatccacattttcattntcttcagtaatgcagggaaggtctaattttaaactcttacgctttcctgaactgcctaagtttgaattaattcgatcccaaagagtttgaactgaagaagtgtactgacccttgcaatttggttgcaatcagaaagggacctcggc

SEQ ID NO: 5665 - DNA, 394 bp, Glycine max
  unsure at all n locations
agcttgttacaaataaacatattaataacttaagtgcagtagtgcacacaatgggagatgtgctcttgtaaaggtgcataccacgagaggcaccttcattaggacacacaatgggagaagagccaaaccatattttctttagagctaatatgcaaaaggactggttggaacagagccaacatgttgttagacaggttcaaacgatgtcaatctgtggtaagagtagggctggaacagaattatacagttcgaaatgtagctggaacagagtgataaaagtgagaagaaaaacaatatatgggttttgtggggttgaataactatttaatgagactcatanacttgagacatganactctcttcaaggtggataccatggccctgatatgggttt

SEQ ID NO: 5666 - DNA, 388 bp, Glycine max
  unsure at all n locations
agcttgtaacatatcaaggaaaaaatgctctgatttcctgaatcttttgattagaaaggagaagaaagttatgattattaaattaataaactattatatggtgtttaaatgtatttaggtgcctaactctggaactctttcaaccttgacatctttatatggtgtttaaatacatttggattttgaataattggtgaaattaaaatgacgaaaataatgttttataagctgccgctttctcatacacaaatttttatcttttatttttattaaatttaatataatgtgtgttgcacttccatgttgccatttgcataacagtatgcaactgtactgttagccattgttgcatttattcgtttgggttctctttggcntatatctatcg

SEQ ID NO: 5667 - DNA, 267 bp, Glycine max
  unsure at all n locations
ctatttctcgcacttggctgttcagcgtgtgtctcgcccatattctacactggtagcacggcttatcacagagcattcgactcaggattatcatacggtagcccatcttcatcgggactagggcttctttttgtcgtcaatagcattatcttcatggcactgggtttcgtcattggctacccagttgcttcagcttcaggtaaaaattattttcaaatttaatgataagcccttttatttagttcaattntgataacgacaaaactt

SEQ ID NO: 5668 - DNA, 270 bp, Glycine max
  unsure at all n locations
agctttgcacgtatcagtcaagtgtatggaccatgtcgtagccaaagtgctcatcgataatggttccagtttaaacgtgatgcctaagagcactttggagaaattaccattcaatgcttcccacttaaagccaagttcaatggtggttcgtgccttcaacggcacccgccgagaggttaggggaaagatcaatctcccagtacaaataggccctcacacctgtcaagtcaccttccaaataatggatattaaccccncctacagctgtct

SEQ ID NO: 5669 - DNA, 376 bp, Glycine max
agcttttgcatgacataacaatagcatcatattcttgaagaggctcacttttctgagtcatcatcttctaattcagctatatccagggaatctcaaacaatagaaattgaagccgaagtcatggctgaagagcaacatcgacgagtgaccctggaagattactcaagtacatctgtgccgcagttctttactagcattgcacgaccagaggttcaagcacagaatataacctatccacattcattaattcagaacaatttgtttcatggtctgcccaatgaagacccgtatgcatatctagccacttatattgatatttgcaacactgtcagactggctggcttgcttgaggatgctcgtaaattgagcttgtttc

SEQ ID NO: 5670 - DNA, 448 bp, Glycine max
  unsure at all n locations
agcttcctctctaagcttcttatccaagacactctcttggtggtgaagcttttccttccatggcttattctctagtggatggcacctcctctcacctcttcttctttatcttctgctacaactccatggctaaaaatcaccattgaaagaccttattgaagctcaaagatccagcctccataggagcttctcaagcaagcttccatcactatcatatctgaagaagttgatataaatgttaaaaatgaggaagatgttggcgtgaaagtagaacacattgattgctcttatgtctttaatacttctcaggtatttgtctaatttggtgttggaacagtaattatattacataaatgtgcattgatctcagactttctttgaattgtgttatagttggttgctactcgtgatgaagttttacattgngcacgatcggtggctcatgaaa

SEQ ID NO: 5671 - DNA, 352 bp, Glycine max
  unsure at all n locations
agcttccatcaggttattaaagctatcctgatgactttcgaactcgcaccaggtctcaaaattaactttgcaaaaagcagttttggagcaataagagtgcctgatcagtggaagcaacttgcagccaattacttgaattgtaatttgttggccattccttttgtgtacttgggcatacccattggggcaaacctgaggcgatgtcagttgtaagatcccatcattaataagtgtgagagaaaattagctaagtggaagcaaagacacgtttcctttgcggggagagtgacccttatacagtcgggactaacatcgattcccatttacttcttttcattnctttagggcccta

SEQ ID NO: 5672 - DNA, 333 bp, Glycine max
  unsure at all n locations
agcttgagatgaggaagtgttgaagggtgatacttcctgcttttattgntgaccacagagtggtacctggagatatgtcgcgggggtcaggagaccttggggacgtcaggtggggtgctattgcccaaaaccaagcttgaccaatcccgacccaacccgggcatagtcggtcagtgagaacctgtgatgtacctaagcaggcgagctcctggcagtcaacagataaaaggaaaacaagaccacaaagcaaggaggcttgtggtggctggccagctgtgacatttgtgtaatatgtggatggtggcctctggtaatcgattacaaggcttaaaa

SEQ ID NO: 5673 - DNA, 454 bp, Glycine max
  unsure at all n locations
gctttggagtttccaagagccaattcgtcttcttcttttgttcagacttcttctggcttcaattcatcagtgggctttccttctgtgtccagcatcttgggatgttcccagcctttgatgacagctttccaggttctgctatccagtgatttgaggaaggccaccatccttgctttccagtattcatagttggttccatctaggattggcggtctgttcactggtcctccttctttctccatgttcatcagaatttatctccctagatctcactctgtgatttcgagtgtttgctctgataccaattgaaattctgatactgnggacagatgtcgtaccggatgtcacgacatctcacttcagaacatgcagattagatgcgttcgtctgaacagattacacatgtaaataacacaagaggattgttacccagttcggcgcaacttccctacat

SEQ ID NO: 5674 - DNA, 437 bp, Glycine max
tagcttctgtattaattaaatatgacgagtatatgtatcaaaactttggacagaacgcaacatcaatggctgactacatgcatatagttgtgactagttaagccagcgacttgcaccaggcatcattaatttattcctctaaaagcaagggaaattgaaaatgaacaaaaaatatggattccaacaaacataccacatgaacccaagatgagatgagagagcccgcaatcgttggaatcttgcacttcatcttttgcaaagcttgagtcaccaacctttaattatataatagagggttagcatgccataaacaatcctaatgtgaagaagaaggtgcaatacttgccctcgcagagaatatggaagtccttcttcttcttatatgacagaagagaagatggtagtctagcctacgctttagaaatatgggatctatg

SEQ ID NO: 5675 - DNA, 415 bp, Glycine max
  unsure at all n locations
agcttattctaaagataacattaacttatgcatttcaatttttgtttaaaattatatgaaacatcttctataatcaggtcaaatgaaaaaccattatttcgaatacttaaatgatcaaaagattttagagttgcgttcccagaaaggtattcaaacttcaactaaaaaatacaatagtttacagactatatccatatattctcgagcaaaagtgttattgataatatgaagatgaagtaaagcaaatagccgcgagctactcatcatattccattaagagtgacaacaactgtacgcggagtaggataatcccgatgctcacanagccatataccctaagcaaaatggaagattaaaatttattaacaattgtgaagctataataatctagactcacggttattactattaatat

SEQ ID NO: 5676 - DNA, 367 bp, Glycine max
agcttgcttctacaactgtgtctcttttcgatgatgacaacttctgagatcaagatacatacacacacactttttgctagtcgatcactcacataaattgccattctcccgctttgtttttgaatgtatgcttctcttaaaatctaagcgattactcatgtgagttcttgatttaatccctatttctctccccctttggcatcaacaaaaagccaaagtgcgtgacatatttgaagcatacacatataactaagcctccataccacattcatggaagaatatcaaccacatcatgaagcaagaaccatgaagtaacaaccctgaatagattaattataaaaccacataggtaataacatacttaata

SEQ ID NO: 5677 - DNA, 391 bp, Glycine max
  unsure at all n locations
agcttacgcaagaattnttttataaccaactatttagcattagcaaaaaataaactctaatttgaagttagaattgcatttgcatcaacaaacaacgatatttaacataatgtcaactacgtggcatttaatgttgacgagtgatttgatcgttttaaagtagcaacaagttagccgatgcttataagatatttattttgcatagtaaagctatttcaaaatggtttagcacattaatgcatgattaatgtaattgctgaagcaacatatgaataaataaaataacacactttctcttgccatcatttttccttcaccctttgtcatcctgctccctggtcatactaccatactntgnttcgtncctattcattctccttcatatcacaca

SEQ ID NO: 5678 - DNA, 418 bp, Glycine max
agctctgctgttcaattattgtatataatttatgaatatagggtgaagaaggagatcaaaattagtgtttaaaggacattaaagactcgatgaacataatatttaagataggatttaaagaacaataatgattatattatgatatgactaacaaacattatacacttgccttcgcataacattgtgtgtcaaggtacattcttcactaatttcatttgttacaccttaataaaaaagcaaagcttttaataatggcttctctccttcaactgcgttcaaataagcactcaatattctaattcgaatatgcagcatcaacaattgcttgctgcaatgtctcttaagtgagttggttaaaggttttttttttactactgaaaatggaatgtggatgcatattttatcctgagacatattt

SEQ ID NO: 5679 - DNA, 263 bp, Glycine max
agcttgtctttggtttagacatgtttggatttgatttgggacttgtaggatttgatttgggcaagattggatgagaggaagggtgattttcgaaatctgcacttatgcagaatttttgctgtaaaattgtgcagcagaattttgcacaagtgcagaaaaatgcttgtgtgtggttggctgtggaaagtctagtgcagaatgagttctggatgtttgctagtatatcccaacggtcaaaatgtaggcttatgtactagagactt

SEQ ID NO: 5680 - DNA, 376 bp, Glycine max
agctttacagcagattttagtaatgaccctctaacctagaattaaaataacttaatgccattaacctagggaattaaaaaaaacttaatggctgagtgtaactgaaattgtggcaaccaaaagtcacccccaacagccaacaagtcagccaccatttggtctcccaaaaggctgatgcctattgttgccaatgggcccttattacaacttgaactaaacctaactaaagcccttttagttgattaacccaaaacatatttttggcagccaactctcaaggattgggcattattagacaaactaacactctaaaatgagacaaggtggggcatttagtcctcctcatttggcatgaacactcacaccttggactttt

SEQ ID NO: 5681 - DNA, 366 bp, Glycine max
gcaagcttgtggttgttgtgttagtattctatccttggtttagatttcacaaagtctcttaagtcttcattttgatgttgcacaccaaatcttctcaaggacattctcagctttccacttgtcatctctgtgtgtggcagcatatggaaagtgagatgctatcaacatcagtcttctaatgtgtcctctgtatgtgtggcagcatatgaaagacatgatattgtctttgaggtatagtagagaacaattatgaacttcagtgattaaagtcaaaatcttcatcatcttgatgcagactctgatgaaacttcattctgatcctgtatgcgcattgcaacctttgaaacatcttatatgtaaggccat

SEQ ID NO: 5682 - DNA, 450 bp, Glycine max
  unsure at all n locations
agcttcccagatccgatcacggaaggacttgtcaactgccttcattaggtagtaccagtacaatacggacatggctcccgatcggaaccagcttcagagtatgactaagcgagagcatgagtccattaaggaatatgcccaaagatggagagatctcgcagcccaagtcgtaccgcctatgatggagagggagatgatcacaattatggtagatacgttacccatattctactatgaaaagctgataggctacatgccagctaactttgcggatctcgtcttcgccggagaaaggattgaatccggactacgaaaaggcaagttcgaatatgctgccaacatggtccccaacaacaacagaagagccccagtagtgggtgcgaggaaaaaggaaggagacgcccacgcggtcaccaccgccccgacgtggatgaaagcaccccanaatat

SEQ ID NO: 5683 - DNA, 366 bp, Glycine max
gagcttgttttgatgcctgagaacacaagagtgggtgcatattgtgtgaagctactttttttggccagcaatcagctatgagccacgctataatagtttccatacacctatacgtgtaggaattttgttcatcacggacatgtaagtgtagaataggtagcaaaatacctttggcaatttacactttgggtatggtagcaaaatacttggatgtatgtacatgtaatttctggtagtcaaaatgtctcacaaaaatatatatatatgttgcatgttatgtaaagaaataccttacaaagatacctttgaatttgaatgcaattttagtcagcacaagaatatatacttgaatttgcatgcggcttt

SEQ ID NO: 5684 - DNA, 459 bp, Glycine max
  unsure at all n locations
agctcgatcaaagcaattatctaatcattcttatccactcatatcatacagttgctcattcaaatcattctcaaacactcatttcataaaaaacaatctactgcatatcattttcaaccaattcactgttcaaaccagctttttgtacaagcaaacaactcaaagtactaaaatttaaagaactgaaacataaaaactgaaatttaaaagactgaacataaatcataaaataattgaaaataaactaaaatgttcaaaatgcacaaatttaaatgtcctgcccctgtggttgctcctgtgcatgctcattgagatccaacacctgagcagctggtgaatcctgagggataggctactctagctcagatgctgnggcagatggtatggcatcatcacgtatgggtgctggagatggctctgggatctggtctgtggaagtctcatcctcctaagccacgt

SEQ ID NO: 5685 - DNA, 448 bp, Glycine max
agcttaataaatctatatatggtttaaaatatgcctcccatatttggtaccttaagtttcatgggattatttcttcatttggttttgatgaaaaccccatggatcaatgcatataccacaaggttagtgggagtaaaatatgttttcttgctttatatgtagatgatattttacttgcacccaatgatcggggtttgctacatgaggtaaaacaatttctctctaagaattttgacataaaggatatgggtgatgcatcttatgtcattggcattaagattcatagagatagacctcaagatattttaggtctatcacaggaaacctatattaacaaaattttagatacatttcgtatgaaagattgttcaccagttgttgatcctattgtgaaaggtgatagggttaatttgaaccaatgcccaaagaatgactttgagagggaaca

SEQ ID NO: 5686 - DNA, 442 bp, Glycine max
  unsure at all n locations
agcttcaacatcagaccacttccagggtgctggaactacttcacatggatttgatggggcctatgcaggttgaaagccttggaggaaagaggtatgcctatgttgttgtggatgatttctccagatttacctgngtcacctttatcagagagaaatcagaaacctttgaagtattcaaagagttgagtctaagacttcaaagagaaaaagactgtgtcatcaagagaatcaggagtgaccatggcagagaatttgaaaacagcagattcactgaactctgcacatctgaaggcatcactcatgagttctctgcagccattacaccacaacagaatgggatagttgagaggaaaaacaggaccttgcaagaggctgctcgggtcatgcttcatgccaaagaancttcctataatctctgggctgaagccatgaacacagcatg

SEQ ID NO: 5687 - DNA, 433 bp, Glycine max
agcttctccatatattattcccctgaatcgtgacttccgtttgaaaagttatgaccatttgaatttctcgagagcattcgttgttcaatttcgagggtgtcgatgtattatgcgcctgaaccggacttccgtgtaacaagttatgaccatatgaatttctcaagagctttcgttgttcaatttcaagcgtctagatatagtatgcgcctgaatcggacttccgtgtgacaagttttgaccatttgaatttttcgcgagcagtcgtggttcaatttcaaccttctcgatatattatgcgcctaaatcggacttccgtctgaaaaagtatgaccatttgaatttctcgagagcattcgtttgttcaattcaagcgtctcgatgtattttgcgcccgaatcggacttccgttgacaatttatgaccatctgaattt

SEQ ID NO: 5688 - DNA, 416 bp, Glycine max
  unsure at all n locations
agcttcattaagaggctttctcaagaagctttctcgtggcttctttgaaaaactttctcaagaggcttctttgagaagctaacgctntaactagtaacacccttttaataactaaactcacctccttaaaaataattacggataaaaataacacaacaaatataatcaaacatcaaacataattactaataatatgtagatatatatatcagggtgttacacgccatatgatgtgtaaagtaagggaaatctcttgttcttgtttattctgaagttaatttagcttttatacctaaagatacttgatggatagattctggtgctactactcacataagtgtaaccatgcagggttgcctgtggatccgattgccaagtgatgatgaaagattcatatttgttggcgatgacaaaaa

SEQ ID NO: 5689 - DNA, 297 bp, Glycine max
agctttaacgaatgtaatacacatcttctttattctttgtgattcttgactccatttcattgaaccgcatatccacttgtaattccaaattgtcaaacctctcaccaacaaaggtttgaagaccatcaaacctgtctaaaatctttgaaaggagagatgaatcctctccatcatgtccttcttcaccaacatgtcgagtacctttcttcacccaagaaccatcttgttcctttcgataacaaaaagatgctatgactgaagagcctataagataagatctcttgatttgaacataat

SEQ ID NO: 5690 - DNA, 244 bp, Glycine max
aacttgtattgagatcttgcaaccgccgcatttagatatagatgcataccatgggccagggtatttggaaaccatgatgatgcctgattatgagtggccattgatgtggcggtctgctcctgtaatacctacaaatcacttgtactcataacacatctttctattcacgtacccaacattatatttatcgatagagtaattaccctgataccacctgaaatttttttcaaatttcacataatat

SEQ ID NO: 5691 - DNA, 259 bp, Glycine max
agcttctcctttcttttctataaatagaggaaggagggaagaacaaaaatgttcaaccctcctggtatctgagattcactgaaaattagttagaaaaattgtttccatgaagaaaatccaagccgaggcgcttccgtgacgttttcgtgggcgattttgcgaagattttcaaccattcttcgtcgttctttgttcgttcttcgacgttcttcgggcttcatcccggaagctcccataattgaatctttcatttcattct

SEQ ID NO: 5692 - DNA, 332 bp, Glycine max
agcttgtggttgttgtgttagtattctatccttggtttagatttcacaaagtctcttaagtcttcattttgatgttgcacaccaaatcttctcaaggacattctcagctttccacttgtcatctctgtgtgtggcagcatatggaaagtgagatgctatcaacatcagtcttctaatgtgtcctctgtatgtgtggcagcatatgaaagacatgatattgtctttgaggtatagtagagaacaattatgaacttcagtgtttaaagtcaaaatcttcatcattttgatgcagactctgatgaaacttcattctgaccctgtatgcgcattgt

SEQ ID NO: 5693 - DNA, 452 bp, Glycine max
  unsure at all n locations
agcttatgcgcatatttccttacaaacgttctcttgcacaagacattctattaaccaaaaaaaaaaatgcacccatatacaatcaaggcagcttcgttacctagattatttacacgtacttccaaggtgtatttgttacttacatcacacacctccttggctaaattcacatacatgcatactcaaagcattttggggtaccaaaaattgcacatgtgcacatcttggtatttctaatacctatacatacacaaacttcatgatgaatcttgactatctacacaataaggtgctacattttatgctcttttcaagtttttgctacctaaagccgcatgcaaattcaagtatattttcctttgctgactaaaatngtattcaaattaaaaggtatacatnttttggtaatgtatcttctttacataacatgcaacatatttatngtatatttt

SEQ ID NO: 5694 - DNA, 441 bp, Glycine max
agcttgaggttgatgttgcttgcggacatgttcttgatggtttttattcaaccacttctgcttacaaaaggctaacaaaatctattccttagtgtggccattccacctcccaaaaaatattaaacacttcatttggattgttgttctgtttcagatggaaaaacagtatttgggaaaaccccgctcccgctgtcaaatttctattctcgtactggattaaccataaccctaacgtttgagtcatgcttctctactctgccttaagcttttcgattatggttgctcttcgaaagaagctaccatggctttgattaacaatttcacagaataatgtctgttgtacgtgctttttattttcgacgtcgtgaagactgtgcttttttctgttgtggcttgaaaggaaacatggaccaatagaaataggctttttttttcattata

SEQ ID NO: 5695 - DNA, 363 bp, Glycine max
agcttagagctaattcaaacgacaataactttttactcggatgtttgattgagccccgtaatacatcgagacgctcaaaattgaatgttgaagctcgcagcaaattcaaacgacaataactctttactcggatggctgattgagtcccgtaatatatcgagacgctcgaaattgaatgttgaagctctcagccaattcaaacaacaataactttttactcggatgtgtgattaagtcccgtaatacattgagacgctcaaaattgagatgttgaagctctcagcgaattcaaacgacaataactcttttcctcagatgtctgattgagacccgtaatatattcgagacgatcgaaattagatt

SEQ ID NO: 5696 - DNA, 403 bp, Glycine max
  unsure at all n locations
agcttatcactacttgaagaacataatatatttatgaaggtaatatgctacagaacaaaaacaagacaacacttaagttaatgaacttatcatttcctctcttgggttagtcttcttcggcatatattaantatgtttattgcattatagttcgcatcctgtgtaacttgtaaccaacaatatgccagaatgaaccataactcataaggaatcaaaagatataaagcattagcttgattcatttattactttggcctaagctgttatggtgtataactacaaaacaaagatgaaattatgtaattgaaaatgacacaaatgtaaaacatgacctcctataaagctcacaagatttgttaatataagcatacacagttntgatgttgacatattccatgaactg

SEQ ID NO: 5697 - DNA, 440 bp, Glycine max
agcttcccagatccgatcatggaaggacttgtcaactgccttcattaggcagtaccagtacaatacggacatggctcccgatcggaaccagcttcagagtatgactaagcgagagcatgagtccattaaggaatatgcccaaagatggagagatctcgcagcccaagtcgtaccgtccatgacggaaagggagatgatcacaattatggtagatacgttacccacgttctattatgaaaagttgataggctacatgccagctaactttgcggatctcgtcttcgtcggagaaaggattgaatccggactacgaaaaggcaagttcgaatatgcttccaatgtggcccccaacaacaatagaagagccctagtagtgggcgcgaggaataaggaaggagacgcccacgcagtcaccaccgccccgacgtggatgaaagcac

SEQ ID NO: 5698 - DNA, 439 bp, Glycine max
  unsure at all n locations
agcttgcctcanagaggtccaggaaggacatggcagccgaaggaactagttccgccccggagtacgacagtcaccgctttaggagcgttgtacaccagcagcgcttcgaagccatcaagggatggtcgtttctccgggagcgacgcgtccagctcagggacgacgagtatactgattttcaggaggaaatagggcgccggcggtgggcaccactggttactcctatggccaagtttgatccagaaatagtccttgaattttatgccaatgcttggccaacagaggagggcgtgcgtgacatgagatcctgngttaggggtcagtggatcccgttcgatgccgacgctatcagccagctcctgggatatccgatggtgttggaagagggccaggaatgcgagtatggccagaggaggaaccggtctgatgggttcgatga

SEQ ID NO: 5699 - DNA, 436 bp, Glycine max
agcttgtgtattagggagagtattttagcatggaaggctaattaaggtgaagtggatcagagagagagatgaaaattcatgtttttttcatttctctcttcgagatcgccagagaagaaatcaactaatggcccattagagtggagatatgtggttaattagaaggaggggaacaaatcaaggatgaggtgacaaggcaattccagcaagtgttttcagaatcaaagttcacacgaccttgtttaccaggtgttgagtttaaacaaattagccaggtagatagctcttttcttattactccttctttggagctggagatcaaggcagcggtttggagttgtgatggtgatacaagtcttggccctgatgggttcaattttcaattctcacggcgtgttgtgaattttaaggcccaagatttgttgtatggtgcatg

SEQ ID NO: 5700 - DNA, 321 bp, Glycine max
  unsure at all n locations
agctttataaaaaaattggtgtaaaattcatcaataaataaataagttggtgtaattctgtttataatgaacaagttgaggattaaaattaactaaaaaaataattattttagcctgctacatcaacttaatggataaaatttgtaagttttttaaaaattagaaataaaatatgtcaaactaatttgttgaggataaaattcctctagaaatatatcgaagggagaaaggacaatcattttaacattccatgtcaacttaaaattgaancaaaataaaaaggcgaatgtaaaaatgaaattaagtttttttaaaaataac

SEQ ID NO: 5701 - DNA, 229 bp, Glycine max
agcttataatatatcgatacgctcgaaattaaacatcggagactctcggaaaattcaaatagtcataactattcacacggatgtccgattcatgcttataatatatcgatacgctcgaaattaaacatcggaaactctcgcgaaattcaaatggtcataacttttcacacggagatccgattcgccacataatatgtcgagaagctcgatattgaacaacgaaagctct

SEQ ID NO: 5702 - DNA, 324 bp, Glycine max
  unsure at all n locations
agctttgatgtttgtgttgaatgcattatatgtaaatagaccaaaagtaagaaattaggtgcatatagagctacagacatcttggaattgatacatacggacatttgtgggccatttcatgcaccttcacgaaatggtcaacaatattntatatcattcatagacgattactccatatatgcatacttgtttcttatacatganatgtcacagtctctggatgtgttcaaaaaatttaaaagtgaagttgataatcaactcaacaaaaaaatcaagagtgtcagatctaactatggtggtgaatactaaggcaaatataacggt

SEQ ID NO: 5703 - DNA, 208 bp, Glycine max
agctatgctactgacaccatatataaccacatcctgagatatacttaggagagtttttggcgagaggagacacgttcttcgacaggagacatgttctggggttttagagattccagtttttactgtggatgcgcattgctcacgtagaatgaagtccatgtcatgcaaggttgtttccgcttcaatctactatatcatttcctactga

SEQ ID NO: 5704 - DNA, 511 bp, Glycine max
  unsure at all n locations
gacgcgtatgaatcatgctattacggacctatgaatctcaagcttatagtgctcgtcctgcacacgaangtcataggtacgcgataagtatagatgacctcccactctcgtaggatatgatgccattatgctttctacgataacacctggcataaaaggcgagtggaggaacgcccctgcatttacgcatcttagcatatgtgtataatcgtttacggactttaatattactctataataaggccctacagctttaaatggatgcatcttcgttcacgcttcattgtttaccgcatcttacctgaagaatcttggacctatattactctgatcctggtgtgtancctatctgatatgcttacatgtatacttctttttctaaaaagttgatccgttgaccacctcgctctatgactattacctgtgcccgtctatagactactctgcaatgtatcatccggggataatagatgctgtgtggactttctgtaaatagacgaccgtcgccatg

SEQ ID NO: 5705 - DNA, 267 bp, Glycine max
tgcagagagtctgtgataggctcgcgaaagtgtgaaccacatcagatcagaacgtgaacgagaaccttctttgctttgcttttttttctctatctctctctttctttctgtgtgtctttcttacaccaaagattatcttctttattttatccaaacctgatcatctaagatgcatgaggcagcaaatcattaatctttaattaatttatttattaggtgctttggattttctttcttttgtgtgctttcagcactaccaatgatgat

SEQ ID NO: 5706 - DNA, 551 bp, Glycine max
  unsure at all n locations
gcattgaaatcgtgcccctgcgatctacgtgacactatataagaccttatgcttggtgcaagcttatcgtctatatcataaacaactccatcgtctaaggtatactatgtgactaactacgtgaggcatacctnctgtgcacggcgatgactacgcttctcactgaacctctcgttatctctatttgtagtactactggtctcgtggtccgctcacactctgcgtacaataaatatcgtcctcatagttgccttaaatttgaatcatccgacaaagctactgctgctaaagggtttcgattcagatgagctactataacccggattatttcgtgaagtgcattaccaagataataccttctgctccttacttatacgacgtgaactgcgatccagtattggttcctgcagatgaatagtgactggctttttactatcgctgactagaggtgaatgtgatgactgacaaagaatatcttaccgagatatttctatctacaggtattgaatgcccatcttttgacaatgttcaagacgcccttattaaaacct

SEQ ID NO: 5707 - DNA, 261 bp, Glycine max
tatgcactcttatgtactggaactagtgagtatattcttcgacatgtattattttagatcataagaaccatgttgtgaagctgctcagtcggggtattttggcaatactcttgttcaatgccaaatatggctattgaccactatgacatccaataagagagtgaccaattagatagaggagaaggatagggcgaggggaattatgtgggacaataaaatgccaatctacaaatagcttattgatagtgatgaacaagactg

SEQ ID NO: 5708 - DNA, 597 bp, Glycine max
  unsure at all n locations
caatatcactacactgtgctcctacttaactctaatattaganttacattntaactatatcttatcacaacatgcagnctttgaaatcgagttcctaccagtcactatanacaacttaagctacactaactatatatgccacgtctaatctacgataccattgtactgaagttgtctgaccacaatcgattcaaacattgttgtggnccaagtataatgtatatcgacacctctagctctccttcttgcatcttactcatgctgccccaaatggtattgctgcatcacccatatgtttaatgtcaagaatgtatacccagtgctctgtaccaaataacgcgaattgatcattatgatcagatattacatggaatcgatgaaacatcttcgatgctttcattgagtcccatatctctgagcgaatgcataagacattgaactatcgaattatacgacccatgaagacacttatttacttgtaacccacaaaagtgtgcgcttgaacatgttaccaatctgaacgagacaacgttttactctcagtcgtattggtccttgcactaacatacgctggagattagaacaatatctcttacn

SEQ ID NO: 5709 - DNA, 197 bp, Glycine max
tgaatcatgagccgttctgagagcttacgacgatattgtgagtgattgttatatcctatacgtgcaagagacatcctcaccacttgcatattttcaatcttacaccatgttcttctatctgttgtaaagaccgctacctattaatctaaagctaaatcctctgtcggtacttccctataggcacctgctgcaaagat

SEQ ID NO: 5710 - DNA, 335 bp, Glycine max
agcttgaggagggcgtcatccacactcctcttccttccatctaaggggtgattatattttgcctcattgcggatgatagacgtctccattaagcgcgtgatattaatcatagacatatatgcgactaacatatcccatgctagatacaagatcactttctcatagataactcatttcaaacaacattgccagctactacggtaagaaatgaccaccacaaatgctcatttacatatgcagttctatataacatgaacgcggtcggccttgtcttaaaatataaatatttttctttcccaatttattttctctctttacctacatccttttttccc

SEQ ID NO: 5711 - DNA, 92 bp, Glycine max
gggcacgaggtggaagcactacctatcaactctttttgcatataggattctactgatatcactgccaaatatcgttatcttgaataagattg

SEQ ID NO: 5712 - DNA, 424 bp, Glycine max
agctataggaatatgatttctatacacaagttattcgtctaaagcgactaacacaatcccccaaatttatagttttacttgtcctcaagcaaagaaagaacaactcacttgcccttaagtgataaagacagcggccaatcaaaagaaaatggtgtttgattcatcaaggacatcaagcatatgaacttaataccatggaatgcttaaaacaattacttctcacaagcatgtagtttttcaaagataagagcacaagtattagagtcacagctgaaataagctagtaagcatgacgaacatcaaggaaggatcatcaaccaaaacctcacagtcattgtttcactcaaactcaagtgtttaggcttattccttcataaacaaccaacacaagttccaacctttgcatttcatctcctatcataca

SEQ ID NO: 5713 - DNA, 466 bp, Glycine max
  unsure at all n locations
tctccgtcttttccctataatagggagcacagggaagaattttgacgttcaaccctcctggtatctgaggatcacttgaaattagtgaaaaaaaatcgtttccgtgaagaaaatccaagccgaggcgcttccgtaacgcgtctgaaacgtttccgtgggtgattccgtgaagattttccgccatctatcgttcgttcttcatcgttcttcgtcgtcctgcggtcttcaaccgataagttcccgaaatcgaacttttcaattcattctatgtacccttggtggttcccacttgtttcgcgtacttttattttcatttcatttactntctgtatccccttttgacgtgctttagtcatttatttaagtcattgtctcgcctaatcacaaaatataataaatctccaccgatcatttaaattgtaacatttgttaatttctgttaaaatgaaatccgaccgttcggtca

SEQ ID NO: 5714 - DNA, 447 bp, Glycine max
  unsure at all n locations
agctttcaactgaacttacaatgttccaattgatttcaaaatgttgtaattgattacaatgttttggtaatcgattaccagtgtgtttgaacgttgaaattcaaattcaaatgtgaagagtcacatcctttcacgaaaatgctntgtgtaatcgattacactgatttggtaatcgattaccagtgatagtttctgagcaaatcaaaagatgtaactcttcaaatagtttttgactctttcaaattggtttaagtttttctaaaggtcataactcttctaatggttctcttgaccagacatgaagagtctataaaagcaagactttgttttgcattntataaacatctttccaatcattctttagacaacaaacttttgccaattgctttctgagtctctttgaacttcttcttcttcttcctttgtgaaaagctntctaaagttgat

SEQ ID NO: 5715 - DNA, 418 bp, Glycine max
  unsure at all n locations
ngatcaaaacaattatctaatcattccaatccactcaaatcatacaattgcttattcaaatcatactcaaacactcatttcatgcaaaataatccactgcatatcattttcaatcaattcactgttcaaacacacttttggtacaagaaaacaactcaaagtgctaaaatttaaataactgaaatataaagcaaactaaaaagcaactaaatcctgataaactaaaatgatcatgcttttcacaaattaaactaaacacaatttaaacatcctgctcatactatggctgatgttcattaagatccagtgctggaactgctgatgaatcctggataggctgctttggctgcgtgactggtgcacatggatgggtctcctcacggatatgtacacgagatggctcatggatctggtttat

SEQ ID NO: 5716 - DNA, 365 bp, Glycine max
tctagcttcttaaggaagtcttctcaagaaagcttctccaggaagctacctatcctataaatagaagcatgtggtacacttgttgtaactatgatgaatgagagtcttgtgagacacaactcaaagatcaacttctctccctttttctttcttcaatttagtgctcccccctttcatcttctctcccttgttcttttcctccattgaagcatcctttccaagcttcttatccacggctcatcttggtggtgaagctccttcttccatggcttattccctaatggatggcgtctctctcacctcttctactgtggcttctgctacatctccatggcggaaaatcaccattaaaggacctcattgaa

SEQ ID NO: 5717 - DNA, 589 bp, Glycine max
  unsure at all n locations
cgcatactgcctgtgcgtntntcacnctatntgatanactcgttntcacttttanaantaaannnctaacccactaacaaacagatggannttganattgatgtcattagctgacactatacaatactcaagactggctaatcaacctgacgttgatacatacagaaatcaactctctaatttgatgtaccaccgatacatcacccatgctgtaatggaaaatacttattcactgacacaacaacgctaagtctggaagaagttgaaacgacgtactcaagttatatacacacaagcgcagccgcatacctcgactaacaagtggaagaatgcgttgaaaaatatccatatcctatccttccacaacaatgtctttaatggtatgaccacttcttctggtcaacatatccttccaaagcccgttagagagcatttgccgaatgcttctcaatagaaatggtatctacagttctcgagaacccagagacaaccgaaagaattctttaatttcatgaggtcacaacgatatgttccccctggctttgagtgagaaaccctctcttcttgttatgtacaccccgcgaccgcg

SEQ ID NO: 5718 - DNA, 417 bp, Glycine max
  unsure at all n locations
tagcttcaccataaaaaatggtgtcatccgctttctgttcgatgctgatcggcacataattagcaccaaccagatagcctttgaatagattattctcctcagccctgctcataacccaatcaaaccttctgcgagagataaacaagaggcgactaaggatccccttggcgaatgcccttttgagggataaaatcagaattcggacttcattcccaaaacagaaatagaggcggatatgacacatcctttcatccacttaacccagtgcggactataacctgttctccccagcatataaaacanaatagctccagataccgaatcatatgccttttcaaagtcaaccttgaacactangcatgatcgattgcttctcttatcggcatcaataaccctatttgctatgactacactatg

SEQ ID NO: 5719 - DNA, 308 bp, Glycine max
agggccctctaggcctaagtcatgttatggcatttattctaatactcgcaagctgtccgcattcaacaaatggtcatcatacatacacagactgctatctagaatccatttatacaaacttaagcacaaataccattgaggcattacaccgagcacttggtggacgcactattgggtaccaacaacacaggaatgggggaaaagtggcttgccccatcatcttagaacacgatctatgcctaaagccattccctcacacccctcatattatagaaacaaagcataaatttgccccaaattgtctcacg

SEQ ID NO: 5720 - DNA, 275 bp, Glycine max
  unsure at all n locations
agctntagccttaggttgttcaccatgttgctccccctatctctaacaatctccccttttttggctttgatgatgccaaacatgaattcaacattgagtgcatttgaagagtcttgagattggattggagaacttgatcacttagtcttatcctcaaaaagtcttaacacttaggaagaagataattcatcatcattatcatatatgccaatatatatatatatatatatatcaattcatcatcatgtatatcaatcaagaattcagtcaatatc

SEQ ID NO: 5721 - DNA, 444 bp, Glycine max
  unsure at all n locations
tctcaggaggtgaacttagttatgagaggggtgtgtgtagctaagctctagcttcttaaggaagttttctcaagaaagcttctcaaggaagctacctagtctataaatagaagcatgtgtaacacttgttgtaactttgatgaatgagagtcttgtgagacacaactcaaagttcaacttctctccctttttcttccttcaatttcgtgctcccccctctctctttctctccctttttcttttcctccattgaagcatcctctccaagcttcttatccaaggctcatcttggtggtgaagctccttcttccatggcttattccctagtggatggcgtctcctctcacctcttctcctttgtcttctgctacatctccatggtggaaaatcaccattaaaggacctcanttgagctcanagatccagcctccatagaagccccac

SEQ ID NO: 5722 - DNA, 362 bp, Glycine max
acctgccgcatgcaagctagatttgcgagttgatgttagtcttactttcactttggttattactcatttcattcaaggaaacctccaaagaataacgtcagattgattctttttgattattttattcaaagatattttgattattttattattatttcgctttttttggtttaaccgaggttacaatgtaaatgatcggttagattttgctttaacagtgattaaacgagattacaacgcacatgatcgattgacattcattttatcatttattacgcgagataacggcttatacgatcggctaaagcttggtaaaaacggaagaagatataaccgaacatgaacgagatgaagaccaaagc

SEQ ID NO: 5723 - DNA, 521 bp, Glycine max
  unsure at all n locations
tttccatttatcattttcacagtagttaatcaacnacaaagtggttgaatcgatctcatccgaacataaactaacttaggtggcccgtggcaaattaaagggaactgtttattcttaatcgaggaaaggccgtatcgcacttcagaataacggtaattcatactatacaatcggatcgccatttatagagccatgatacgccatatttaggcatgtatgctcgatgaccgcttaatcgagtaattgttgtacaaccattgtgtaagacaacaataggatgggggcaaagaggctcgatgcaacgactgataacagaatctaagtatatatgaagatcctgccacctctctattaaagaagcatacactaatttgtctcaaattgctgcgggagtggccagtcatagaccatcatagataaaagctcatgggaattataaaccaacggatagcgttactgttggagtgacaaaaactaaaagggatcttatagaatatgggggctagggcaaatatcaaaac

SEQ ID NO: 5724 - DNA, 472 bp, Glycine max
  unsure at all n locations
agacatctgaggcatgcaagcgttgccaaaatagcttacatcagctctgaaaaatcatttnttgaagaggataagtcataagtgactggctaatcagcttcacagatatacatgtatatataacaagtagtaacaatgtgctttacctggactttatataatgaaacaacttccacaacaacaccaatggacaaaccaagttcaactacaacaaactaattcagcttcacctggagttgatataatgagtaatggctttagaagaactcaaagccaaaccaagttcaagtacaacaaattaattaatctttttctcaaccaaagtatgtcaaactacttgttggatattaaaagtgttagttattcatgtgacaggcaaagagagttgttagacaataattcttgtttaaaactgtcaatgaagtattgcggcattaatttgatacacactgatcaataacaatcgatacat

SEQ ID NO: 5725 - DNA, 572 bp, Glycine max
  unsure at all n locations
atacttccacgttcntccnacctntaatctaatcgtaataactntacttcgaacanatncaaaaaaacacgagatgaattgatgaccttcagacaccggcactatnaacatgaagctgatgctgcgacagatggagacaatcaagtgtatgatgtgatttcacaccatcatgcggcacagacacggcatgcacatctgaattcgatcgtcttggccttgacgagctgaataggcgagaaagtccagcccgcctcaagatcatagataatgggtgtgatgttaccttatatcatgatacgagcgctgacagactgaaagatgggaggccgacttttgttgtgactacttaaacttcctagagaaaagcactgatcaattgcatagtacgtggaaagaaagtagaatctcttccatcgaaccatcacatgagtgatcgcatcccaagcaataacacccatatagggaacggaactccaaactttagtcacatcctctcgggcatgactcatggacggaaaacagtttcagtgcacagttggatagcgtaatgaatgaagcgaggacaaacctcc

SEQ ID NO: 5726 - DNA, 537 bp, Glycine max
tactactgaatgtatcaattattcattatatttatgattctatacagcggatgaatggtcatccatccgacttaattataacttaacttgaagagatgcactgactaaagggaggagttaccatccatgtgtcatcgattacacattgtcagaatagaattccaatatgtaagactcgtgtatatttcagctgtggtaactgagacaacttcatggaatgggatacatgccttacacaacttatagataaacttttatcagctgtttttgcaagagatttggcgcactggcaatctgattacatcctctgttaacagatcactcgatggagaatcctctgcacacatattataccttgcatatattggcggagactcttgttgttccacgtggaattccctccgtgaagcctagacactctcttgaagacgtttcttgtatgctacaggatcctcggcggtgaattaacacttaagacgagctcgatgatcttcgaataaacttcgtacactcatgaccacctcgcatgctccatcg

SEQ ID NO: 5727 - DNA, 613 bp, Glycine max
  unsure at all n locations
ncacttcgccatctgantgtacacantactctatagatttttaaantaaatatataanntcntctacacacgcgcgagagaatgagatcgatagcctngcnaatacgtgacactatagaatacacacgctagangatttgtatacgaatatcaacacactactgcttatcttttatcacactagggcagtagattacacaaatgtaacactctaatatcgctaaatcgagtgacgctgaagtactttctntgtcttgtacgcggagggcatagactatctaactcaaaagtcaactcgactgtactgacgaaccacatattatgcaaacgtccatctaaagccgttttatgatacagctaaggccactgataatactgccacatcatctcaaagtccaatactggagaagcaacccactcgaaatacatacgagctaatattcagtcgccaatccgtatggcgcattcatttgtaacacgctctcttaacactaaaaatctttaaagctggacaattgaatgacaaggatctcatctcagtaaaaatgatacgaaacacatgagccaattgcataaagtataaaagctcatgaaacctgcttaatatcgaatg

SEQ ID NO: 5728 - DNA, 350 bp, Glycine max
tcacctgccgcatgcaagcttcccttatcgatattgccgtatgcaatacttaacatcagtataaacaatagatgtcagtggatcttaggtattccacctttccatcaagcattaatgccttttttggagcacatgcattaatatctgattaacatgtgttcatgctatttgtagaaaattgtatatcattgtacattgtatcaatatttttctcaagattctctagatacttttctcaagacatcacgattgacaagtcacaagtatacacaatttataaataaaatggtgaaaggcatcggaggaaaccgaaaaagttacctaatagatggacattttatacagtcttc

SEQ ID NO: 5729 - DNA, 460 bp, Glycine max
tgaacttgcctgctaagcgagagtgcgcactgagctcggattacactctgagcgagctgtccaattcttccaactcttcttcaattcttgcatcaattgtcctctaaagcacttgaattcttcttctttcgacttctgctaataaaaaattgcaaagatgataatttcttcgttatttcattcaaaacaatagtaaagtgaacaaattacaatcattattagtcaaaattgactatcaagttaactcagatttcgcagatatcaactcctccaaattaaaacatttgcttgttctcatgcaaaagacaagttctgagtgtgccaacacatgagataactatgaatccattaaaacatttgtcttgatcttgcgatggaagcatgaacgaatacacatggagatgaaaaatgttatcacataaaacttcatcaatgcaaaatacaacacttcattcctcac

SEQ ID NO: 5730 - DNA, 436 bp, Glycine max
  unsure at all n locations
agctattgttgaataaatcgactcccatattgatccgcactaccaatgataataaaataatcaaatttaattcttcagggtgacagcatataatgaccaatagcaaacaatatacctgaattcaacaacatgacccgcaatttcagagagctcaaaacactttgttttattggttttaaactcttccaacagagaagaagcaaaactttcatcaatgttcccagtatctgcatgccaaggtcccatgaccccggccaaattcctcattccagaagcaaaacgcatattcagttcattgtgcctaacaggacttgcagatccaactggngaagtggatacaacagagtttgccattggacttcctgggtaagacatcccgacaccatatgcaggatttccataataaccatgaggagtggagctgcctgattaccac

SEQ ID NO: 5731 - DNA, 438 bp, Glycine max
  unsure at all n locations
ntgcacgaagttacttggtaaaactatggcacatgttttcgggtagaattgagacttgtgaatgtaatgcaatttctgtaatgatattgataagtagggcctattagagtaggaaggccattatagcatgtttgcccgagtaccagtatattgagttattttctctaaccaacatgtattatgcattttgttaggatggacccaaagaggtccaaaagaaggatgtttaagtggctcaaagattataaaagataatgttttttatttataaattatagttctttatttaatttatattaaaataacatgatgttgagacttggataattattatccattgattaaatgtcccttagattatatatgtatattcatctttacctattatcatttattaatgaaatatcaagtttatcttattctctgtatagctgtatg

SEQ ID NO: 5732 - DNA, 457 bp, Glycine max
  unsure at all n locations
agcttactatcattggctcaagttgtgaataacctatgtgtgcttttctataagggtacttaggattcaatgctttgtgttgattttgaaagcctagcatctatttagacacataacaataatatgaatacaaattattaagataattaatactataatttagatgactaaccttaccttanattcgatgcattggcgtttagcaacaaaagctttccattgccccttggatatgaatggatacatttgtggaggatgctcatcaacactaccattttcatcataaacattattctttgttaagtaggttctaaaatttctacaaagtttatttgcttctttaagaacccatctttgacagctattatcaacaatgaatgttgtctacaaaattgatcttaattgatcaagtatgtttgtataagaatcatanaatatgtcaagtatgtatagtacc

SEQ ID NO: 5733 - DNA, 444 bp, Glycine max
  unsure at all n locations
tcatattctgaacaaggaagataactcaactgtntcatatgatcacaaactcattatagcaatcaaacaagacaaacaaataaaattctgttagtcatcatataaacaagttaaataaaagagaaatttcaaccaacttaattttaaaagataatggttttgatgttaccttttttcatgattcaagtgcttagatctttaaagatggaagtcagacttttgtttttcttacttaaacttcttgagagatgttctcatcactttcatagtccttggatagaaggtcgatctccttcttcgaaccatcagatgagtcattgccatcccaagcaatatacgccttcttggatcatctttctttataacttttcttctcattcttctcgggccatgactcatttgacggacagatcgtctttatgtgaccacgttgatacacttata

SEQ ID NO: 5734 - DNA, 417 bp, Glycine max
  unsure at all n locations
agcttatgctgcanatatttacaatagacctcctcaacctcagcagcaaaatcaaccacagcagagcaattatgacctttccagcaacagatacaaccctggatggaggaatcaccctaacctcagatggtccagccctctgcaacaacaacaaaagcctgctccttccttccaaaatgctgctggcccaagcagaccatacattcctccaccaatccaacaacagcaacaaccccagaaacagccaacagttgaggcccctccacaaccttccctcgaagaacttgtgaggcaaatgactatgcagaacatgcagtttcagcaagagaccagagcctccattcagagcttaaccaatcagatgggacaattagctacccaattgaatcaacaacagtcccagaattctgacaagct

SEQ ID NO: 5735 - DNA, 465 bp, Glycine max
  unsure at all n locations
ntannaattgaattanaatgttctgtaactattggtaatcaattaccatccatgtgtaatcgattacacattgtaagatttgaattcaaatttctaatgactgttgtaattattttcagctgcttgtaattgactacaatcctcatgtaatagattacatgccttcaaaaatattcaaaatcatttttaaaagcgttttaggaagtgttttggccactggtaatcgattacatcctctggtaatcgattactagagagtaaatctcttgtaaaaatattttagcttaaattcattggccaaacctcttgtcgtttcaacttggaattcccttcctaaatcactagagattttcttgatgatgtatcttgaatttcttggattcttgtcttgaattaaacttaagaagtgcatgatcctcttgcattaaacttgagaagcacatgatcacgtggcatcatcaaaac

SEQ ID NO: 5736 - DNA, 429 bp, Glycine max
  unsure at all n locations
agcttggttcgaggtacttacccgttgaagatcgaagaacgaatgaagaacgtcgaagaacggttgaaacctttgcgaaattcttcacggaanacgttacggaaacatttcggaagcgcctcggcttagattttcttcacggaaacaatttttctaagcaaattcgaaagagagagaagtgcctaaggggctgaacccttttccttctcacttcctcccctatttatagcaaaataggggagatggttgccgcccagctcggccaggcgagctcagctcgcccaggtgagccaggttgcttcctccagaagcaacagccttctggaggaatcttctggaaggcccaagtgggcttgggtgctatntgcacccccatttttactaagtacaccccctctgctttttttggtgattcttttttcgaaagta

SEQ ID NO: 5737 - DNA, 461 bp, Glycine max
  unsure at all n locations
tgttgatttcttcaggatgatcaacacaatattgcatttgctgcttcaattttggcctgcagatttcacaaataatacatttactatgcttatttggtaggtttaaattttcatttttttaagggaggtataattttttattaaaagtcattgtatttttttagaattttattttatgtgaggtcaacttaagttttttattttacacaaatgtaatttattttattgccatattatccaattcattaatttgatttagcaacacactgaatttctataagtgttaatatttagcaacatattctctagcacatcttttatatcacacattctattatagattaaaatttattacaaactaaaaaattaacagagaaataactcattaaataagaagtgagactaacaaaaattgtgattnntaataaattctaatcaatctttaataatatatttaaatg

SEQ ID NO: 5738 - DNA, 380 bp, Glycine max
  unsure at all n locations
agcttgccgccacggagtttttcgactatgctcttgtgtggnggaacaagctacaaaaggagagagcaagaaatgaagagccaatggttgatacatggacggagatganaaagatcatgaggaagcggtatgtgccggctagttactcaagggacttgaaattcaagctccaaaaactaacccaaggcaacaagggggttgaggagtatttcaaggaaatggatgtgctcatgattcaagcaaatattgaagaagatgaggaggtaactatggctcgatttcttaatggtttgactaatgatatccgtgatattgttgagctgcangagtttgttgaaatggatgatttgcttcacaaagcaatccaagtggagcaacaa

SEQ ID NO: 5739 - DNA, 400 bp, Glycine max
tgaatcggacatccgtgtgaaaagttatgaccatttgaatttctcaagagcttccgtagttcaatttcgagcttctcgacatattatgcgcccgaatcggacatacgtgtgaaaagttatgaccatttgaatatctcgagagcttccgatgatgaatttcgagcgtatcgatatattatacgcctgaatcggacatccgtgtgaaaagttatgaccatttgaatgtctcaagagcttccattgatcaatttctagactctcgacatattatgcgcccgaatcggacattcgtgtgaaaagttatgaccatgtgaatttctcgagagctttcgttgtgcattatgagcggttctatattttatacgccacaatctgacattccagtgaaaaggtattaaca

SEQ ID NO: 5740 - DNA, 409 bp, Glycine max
  unsure at all n locations
agcttatggtaagatctgcgacctacccatggtagaggtctccacagaggccattgtctgcctcgcccaatattatgaccagccggtgaggtgcttcaccttaggggactttctattatcacccacggnggaagagtttgaagaaatcctgcgatgccctctgggaggaaggaaaccatacctcttctcgggattctatccctctttagctagaatttccaagatagtccaaatctcaacgcaggaattataccacagaaacgaagtcgaatatggtgtggttggagtaccaaggaaatgtttggaagtaaagcaagagtcttggcaggtaaaggcgaatgggccccgttcatggacatcctcgcacttatgatctttggaggggtcctctcttcacatgtggatgggt

SEQ ID NO: 5741 - DNA, 425 bp, Glycine max
tcgtcctcagatccctcttattggacaaaacttaaccagaaccgcattaagacataacatactagaaactacgtttctgtaccccgatgtttcatgaaaacacgataagctagccctgtcctatcacgttctaaggatcaaaccatttcccaatggtgagtgatcctaactaagcatgcagttacgtgatcaatgcaaaggcacactagaattaagtactgatagcacagtgaacacataaaacatcattagatagatataaaagtatttacatcaaggtccccatacgaagaaccaattgaggatttagctctccatagtcgggaagctttctttaccacgatgagaagagaagatgaacgattgaagaagttcaaattgtggcgatgtctccttcacctctaaaaccttacatctctcaaatc

SEQ ID NO: 5742 - DNA, 363 bp, Glycine max
  unsure at all n locations
agcttgtttaacccagatgaanacatagtgtttaacgtatatcaaactatatttatacgtgcttgcaaacttgatagatgctggatttttccactgtaagcttacttatccaaactttaattaataatttgaaggcaaaaaatagcgttgacttggacaactattgtgacataacgctgggagagcaagataagcatggtgctagacgaatgatgaaattggcattgctatgtgtggatgtgactagtagaagaccatcaatggcgcagattgtgcaagagttggagcacattcaaagagaaattgctccagtgtattctcaattcaacgaggagattggtgccgtgactctatggagtgagc

SEQ ID NO: 5743 - DNA, 435 bp, Glycine max
tctgcttgtgtgtgcatggatcatcaagtgtggctctgtataatatgcattctgcggactcccaacatagcaccattactgtgcataaaggatacaaatagaggttcatttgttggataattgcaaccaatgctatatgaaatcatcgcctaatacaagagccgtatctaccgcaatgagaacgttgcggtcatactaattacaatatgagacaacactatttgctttaatcaacgattatgaaaatgaatattttactaaccagagaacctctttttgataaaaattaaacccatgaacctaaacgcatcaataatacagcactgttatgtgatatgcctggatcacttgcttcatatttactcaccatgaattactttctataatgaagactagagaagcattccatcagcttcttatgctggactaaaatat

SEQ ID NO: 5744 - DNA, 465 bp, Glycine max
cacctgccgcatgcatgcttattgaaataaagctagaaagatcttataagaaagtcacaaaccacttctataaacccatgtaagcacttctaaatgccctccacatctgagattattgcagtgggattctgttcttcaaaaactctcttgatcctatctccagatgtattagaatctcctgcttgccttgctttataatgtcaaattcacacagctattaatgaattagtatctaaaatggtattattttctgcacacatgggcgttgaattgcattgatgtcacgcatgtaactttaaagggttttaatgagagaaccaacgtcatctccatttatagtactctaattttgtagcagcataagtgaatctttttgcattggaattgacactaccaatagagaacttcttcatctttatgaacactatacatctttcattgtctcttattctttaatggaattaa

SEQ ID NO: 5745 - DNA, 434 bp, Glycine max
  unsure at all n locations
ngggtgatgttgcgcgtactgatgggtaccatgaggtgtttgctggggtttgacccacgcgggtgttgaagagacggcatgggcatctccttccttcctttttgcccctgttgccccaattctttcggcattcacgtttgtggaggaaacgtaatcaaactttcctctcttcaatccaacctcgattctttccccggcaaacaccagatccgtaaagctggacggcatgtaacccactagcttctcatagtagaacactggcagagtgtctaccatcatggtgatcatctctctctcaaccatgggaggagctacttgtgccgccaaatacctccatcgctgtgcatattctttaaaggttacaccctctatctcgaacatattctgtagttgagtacggtcatgagccatatcagaatcgtactgatactatc

SEQ ID NO: 5746 - DNA, 335 bp, Glycine max
  unsure at all n locations
gagcttgagctaggatattgcgattagtgacgttgcggtgtacgactccctccccggataggtgcagaattctttcaagcattgtgcgactattttcccagaggctctntgagaagataggaaagctagaaactcccaggtctttattaacaaaactgtgccacggtggcagatttctgccttggtggataccatcaatagtgcactcaagggcaaggggatgctttgtcctccaggagtccgagattggtgcagagtattctcccttcttccctgcgggaacggtttatgttgaaggtagctgcttgggtccacacgtttgtcgggctttggcg

SEQ ID NO: 5747 - DNA, 452 bp, Glycine max
taggcttctcttttcaacctatatttgttgagtgggccaactcattgtgatctattctttacaagtagaaagaatagcaagccataacttattgagccatcctgtttgacatctctaattgtatcaatgatcttatcttacaatatattgttttctttttctattatactttttatactacaatataaaatttctcttaaagaatatagggtaaactatgtttttaaccactaaactttttcaaaatttgatttttagtacataaataaaagtttttttatactagaaaacttttttttatattctgaagcgtattttgtagaagtaaagatattttgatgttctgatgatgccaaaggaacgcgctttttgagttttattcaagacaagaatctaagatatccaagaaattcaagaaatatgatcaagataattcctagagtcttaggaag

SEQ ID NO: 5748 - DNA, 419 bp, Glycine max
  unsure at all n locations
ttacagtcacctgcggcatgcaagctagagatgaggaagtgtagaagggtgattcttcctgctnttattcgttgtctcacaaagtggtacctggagatatgtcgcggnggtcaggagaccttgnggacgtcaggtggggtgctattgcccaaaaccaagcttgaccaatcccgacccaacccgggcatagtcagttagtgagaacctgtgatgtacctaaacaggcgagctcctggcagtcaacagataaaaggaacaaagaccacaaagcatggaggcttgtgtggtggctggccagctgtgaatcttgtgtgatatatgggttatggcctctggtaatcgattaccaagggtgggtaatcgattacaaggcttaaaaatgaagacaagaggctaagatggtctttggtaatcgatta

SEQ ID NO: 5749 - DNA, 471 bp, Glycine max
  unsure at all n locations
ngaagtctgcgtagttctgtgaggacttcattcagaagagaagtggaatcacccctttgtggtggaggagatggggtaagctcgtaaggaataggcagaggcaagtcttgtttgtgaatccactgaccatcaacatcatttcggtaaccaaaagagctaaccacaccagccccaatagaaaaatatctcttaaccttcacatatggttcatcgtccaaaggaatattgaaatgatgaagaaaaagagtaacaaggtggggataaggtagaggtgcattggcccgtaatgccttatgcatccggtaccgaactaaatgggcccagtcaatctgacaaccagtttgaaaggcccacatcagaatcaaatactcctcagaggcttgagcatggtttgaagaccggtgaagcaaaatacgaacaatgatataatgcatgatgcgacaatcaaaagttaatgacccagcacgtaat

SEQ ID NO: 5750 - DNA, 575 bp, Glycine max
  unsure at all n locations
aatcaccacgtgaccgaacgaagaatctctnttccactctacctacccacaaagccnataggannnnnnnatgaaccctttgagacccgtgacaccagagacgactgcagcangcagcgtcttcatatttcgataagaaagggttgtattcgattatccttcatccttcttcctataatccgagactccttcatccttttatcttccctgattctcttttagacttcttattctctttttgttcttgtcaaaggacgtggtacgataaaaaactcgaacgaaactacttaacaaaaaaaagaaccacaagttaaatcgcaggaaattatcacaatgatccctgatatctaacaatgccaaaatcggcccaataatataactaaaaaacaacatgatacactcatgatgtgatataataaatgcgcactcatactaagaaatcttgacattttcacttagaatattagctccataccctcatctatacccgcatcctcaccatcatggacaactatgtatgggtggccaacaatggcttatcacaacatcagcaaagatcagagagatctttggcg

SEQ ID NO: 5751 - DNA, 458 bp, Glycine max
  unsure at all n locations
ngagaagttgcatcaacaagctgaccagataatgcataacattatcaatgagcatagagaggctaagtcaagtgccacaggagaccagggagaggaggaagttcttttagatgtgctcttgaagaaggagtttggcttaagtgatgaaagtatcaaggctgtgatctgggtaaggatagacattttccaccaattttattgcatgatagaaaaatggagaaaagtatgctttactgccttcacactttagtttcaaaaactattttgtattttctaaaatgattagtaatcattttgtcattcaaaatttaataggttttgcaaattgctttgaatataagtgtttaaaaagaaaagaaaaatataaacagttaaggacatattttctcatcctctttctgtaagtgctttattcaagtatctagaaggcaaacttttaaaaattagaaatgtgatat

SEQ ID NO: 5752 - DNA, 354 bp, Glycine max
agcttgaaattgaacaacggaagctctcgatttaatcgagtggtcataaattttcacacagatgtccgattcggggaaataatatatcgagacgcacgatattgaacaacggaagctctcgagaaatttgaatggtcattacatttcactcggatgttcgatccggcgacataatttatcgagacgctcgaaattgaacaaccgaagctcttgacaaattataatggtcgtaacttttcacgcgaatgttcgaattcgggacataactcatctagacgctcgaaattgaacaacggaagctctcgacaaatttgaatggtcataatgtttcacacggatgtccgatctcggaac

SEQ ID NO: 5753 - DNA, 220 bp, Glycine max
attcagaggaatacagtctatctcccttatcttagtgagagagaggctcctacatacttgagagatccacgcacactctgcctgtagcaaaggactttcacaacctttgagtgttgccctcgctggaaagagtgaccctttccttccaagcatctccacccttggtctttcataccacgattgcataacattcaccactgccctagattatctcgtgaaa

SEQ ID NO: 5754 - DNA, 252 bp, Glycine max
  unsure at all n locations
agcttctcaactaggtgggcttagttattataggggtgcgtgtagctaagctctagcttctcaaagaagttttctcaaagaagtttctcgaggaagttttctcaagaaagcttctcaaggaagctacctagtctataaatagaagcatgtgtaacactttttgtaactttgatgaatgagagtcttgtgagacacaactcanagttcaacttctctcctccttttcctccattcaaatagtgctcccccccc

SEQ ID NO: 5755 - DNA, 372 bp, Glycine max
aggaaacctctagacgaatcctcttattgaagcttctagagaaagctacatgacgctgcgctcgtataaacgctgcacagccttcgttaaccattggatcttttcgaaatttggtctgaaaattcacatgacagttgtccatgatctgaccgttgggatctttgagaagacgtttggagtgtgctagaagcctcttaatgaaccttttggaggaagcctcctaatgaagcttctagagagacctacgtgaagctacctcattataaacgcttcccagccttctttaacgcgtggatcttctccaaattgggtctgaaacttcacataacaattgtacatgatctgaccgttgggatctatgagaagatgtct

SEQ ID NO: 5756 - DNA, 443 bp, Glycine max
  unsure at all n locations
agcttgaggttattccacaagtaaatgagtagttggatgagggtttggttcgtaagggcttaactccttgtgctttgttggtatccaaaataggtattatgaggcactgaatccctatgataggtggtatgatgaatgtgttgagtggtgcaaccctcttttgtaaaatcactcatgcatccaacatcttcatgattcacatacatagggactcattangtaggtttgttcttatttttagtttcaatacaaacttaggtgctcatgcggaacaccttangtttgttgtgctttttggtaggaataatcaacatgaaaatacagaaaaaaaaatgtatgttttatcgcattactttccttaatttttaaatagggatcatggggttaccacaaaccctaagagaataaaggtcagtcctgagtgggccattccaccaagtata

SEQ ID NO: 5757 - DNA, 414 bp, Glycine max
  unsure at all n locations
ntgatcatgtgttcaatttaatatattggtaaaactacaatattgtttctatatagctgttttcactccagaatgtttctgattcttgatctttctcatgtaatcattcttcgtaaacgtgtttcattggagaacagacgcacatgacaacaaagaacctttaagaaccactaaaattcaatgtttcacgatggagtggctctaaacactacctgcaccctctcatttctctccctccgcactctacttcctcgtccatcggctccacatgcaacccaccatcgcggatgctttcatcttcgccgttgagctctaaactcagtgctccgagttggatcactcactcaacgagttgactcaacaacttaaagtgggtctcatcacatacagtctacttctttgacaaaattcatg

SEQ ID NO: 5758 - DNA, 451 bp, Glycine max
  unsure at all n locations
agctnttactctcttgtgcttgtgcctaccgttgtgcttgtgtgcattntttctgcgtgtgctttgagtctattctcctgcattcttgctctcatcttacatctttcacctcaatccaagtaagctttttatgttattttaattttccttcagaagcttaaaccttagggtagacaatttatangcttttagtttcatttatggttagcttttgtgttttcagtttttagggtttacaatgtagggtttagttaggtcttagagcctaatagaggtaatgcctataagaggcgtgaagaccccccatttttgctggaaatcacgatgaaccgcgctagtgcgccagctgcgcttagccaattcatcgcaactgtcannattttatatttccagatgatcgcactaagcccgaccatgtcgcactaagcgcgttcagccttctgatgagttc

SEQ ID NO: 5759 - DNA, 119 bp, Glycine max
tgcactatcacacatgtgatcattagcaacatatattatatagttcctaagatctttcgacaacatttataaaatgttgccaaatatgaataaatgttactaatatgtttttgcaacat

SEQ ID NO: 5760 - DNA, 451 bp, Glycine max
  unsure at all n locations
agcttcgacaccctaatgttgttcaatttcttggagctgttactgacagaaagcctcttatgttaattactgagtatctgagaggagtatgtgaatgcatataactagacacctaggttctgatgctctgaacttatgcaatcttatgctntaagattaaactctactaaatctctatttcatgcccatttttagggtgatcttcataagtacctcaaggacaaaggtgcacttagntccttcaacagccatcaatttggcttggatattgctaggtatggtgtgtcataccttaagtttcctttatntttctttntaaaatttttataaagagaacaaacagaaaaccacanaacangagaatcattaacccatagatctcttcaacctctccatanatctggtatatanatataaaccactcctaaataattctcacacgtcagttact

SEQ ID NO: 5761 - DNA, 411 bp, Glycine max
tgtcctccccgccctctcccaacactccattgttgcttccattctcccccaaagttgctggtatgtgattctattaattatttcaaatttatttattctttataaatcgttatattttatttgttgcatgctttttttttgcaggtggtcatcttgtgtacaaattgctgttagtttaattcgcttattattttagttattttttattaattatataacaaagctgttatttgtgctttaatttttagaatataaatttaattatgattcatagtaaatattactgtgataatgttattatgcgtatttaaaaaacgaaggcttattattattatatatgaaaaatatatatatacgtgtacttatattattttctgaaatatgagaaattgacgaaaataatatatatat

SEQ ID NO: 5762 - DNA, 448 bp, Glycine max
  unsure at all n locations
agctngaaggggtgtaacccatcattctctatagtagaacagccggaacgngtctactatcattattatcatctccctctccatcattggagatgctacttgagctgctaggtcccttcacctctgggcatattccttgaacaactcatgctccttcttgcacatgttttgcaattgcactctatctagagccatgtccgagttgtattgatactgcctgatgaaggcagccattaagtcttgttaagaatggactcgggaaggttccagaatagtataccaggtgacgactgccccaataagagtttcctggaagaaatgcatcaacaatttttcatttttcgagtatgcccccattntccctactgtacatttcaggtgattcttggggcatgtagtccccttgacttatcaanatctgcaccttgaacttcggagggataacgat

SEQ ID NO: 5763 - DNA, 438 bp, Glycine max
atatatcgcaccatcactctattcacttattctagaataatatgagtacctattctgagatgtaagaagtcgaaattatgaatcacaaattgattcctaaactaaacttaaggaagtacatatatatcatatatgaaattgcaacctaaaacaaatggatgcgattgcgtcaataaataaatatatttatattacaaatcaagatcgtatctattattgaaaacatatatgcatatatgatatatcactacttttatttcaatgcacctacaaggaattctagcacgagagatttggccatgagaacttgtaccctgtaattcaaatcaaagcacatattccatcgatagaagatttttgcaaatctactaaaacaattgcgcattctaattctcagcggattgcgtctatgtataggacccatcttcacgaaaatca

SEQ ID NO: 5764 - DNA, 227 bp, Glycine max
aacaacaccagcatcgagcacatgaccgagcggcaaaccccctgaaactgtcatttgatatttaatagagtaacggctctatgtgaaaggctagagggaaaagacactaacgactctttgaactaaacacatttgcacccaacatacgagtcttattcttttaccctaaaatggcctctgttcatgagagagctagactcctaagaactaacaatcgttcttctatc

SEQ ID NO: 5765 - DNA, 551 bp, Glycine max
  unsure at all n locations
tctcatgatctattntctaaantttttctcgtattcttatatttccacananacctccctcagcagctagncatganatcgtgttgatggcgtatcttaactactcatgctttagtcttcaagcttgagcgtcatcgaagtgtatgagaatgtatctgtcatactgttgaaaggtagagaccataccgaagagtcaagacttagcataagacactgtcgagcaacttgatatatcatgggccttagtcgtcgagcacgtcaaacgtttgcacgattgaaaggcctagagcttccgtgttctgcgaatgaagtgcctaaagtgtgaggtgcatgcaaacgacattccacagcgaggatagattctatgaatttgtgatcacttaccaatggacataacgaggtttaataattactgagtccacctggcgatgatcaagacgaatagttgcatgatgggatccgaccaacatacttgaggccagatcagggataaagcttggaaataaatgcaacaagggatggcctatggtggtagacgatgcccacgagcc

SEQ ID NO: 5766 - DNA, 366 bp, Glycine max
  unsure at all n locations
agcttgtgcctcttcacatctgaaatatgaatgtagcatatagatccaaagacccttaggtgttntgctgatggcttcttccccgtccaagcttcaattggagtcttgtcttttacagacttagttggacatctgttgagtatgtaaacagcagtgtagactgcttcagcccagaatgtcttaggtagtcccttctccttgagcatcgatctagccatttccataattttgaaattctttctctcggacactccattntgttgaggagaatatgcgactgtaagttgtcgctcaatgccttcatcctcacaaaatctttcaaactcgcgagaggtgtactctntgccgcgatcacttcttagtact

SEQ ID NO: 5767 - DNA, 394 bp, Glycine max
tgcgggagtttgtgatagcgattatgacgttgatgttgatgatagaaaagcactaccggatttgtattgtttatgggcgaatgagttattacatggagatctaagaagcaaggcattgtgacactttctacttgtgaagccaagaatgtagctgcaacttcttgcacatgtcatgccatttggctaataagaatgttggaggaacttcagttgttgcataaggaaagcacaaagatctatgttgataatagatctgcataagagcttgccaagaatccggtgttccatgaacgaagtaagcatatagatacaaggcgatcattcattagagagtgcaataccacgacagaacgagaactgacttatgtgaaaactcacgatcaagttgcggata

SEQ ID NO: 5768 - DNA, 199 bp, Glycine max
tgtgataagctagaaccttatctatccacacgcctatgataacttaattaacctccctatagataattacggatgaatacaacgatacatagaatctatcatccggcatacctactattaatatatagatatatatatcagggtgttactactctctcaccctcttagaaaatatgcctctaaggataccttactcaga

SEQ ID NO: 5769 - DNA, 359 bp, Glycine max
ttttcatctatgatccctaccctagaaatgggctacgcttctttctttcctttctaaggtgacctttctcttgtcggcatgtgtaggcttgtaacctagaccgaagcttccacaattttcaacaacctccccaagctttctgtgccattaccattctgagctcatacccatcgctcaacataacttgggccaccatcaaggaggcaccagatagacgcggttgcagcggaggagcctccacataagcattgctcacaatttctaatgcttgaaaagatgtttccaatgactctgtcacagcttgcacataaggcgtagaagatggacaactcactagtatatcttcttcccctgacact

SEQ ID NO: 5770 - DNA, 461 bp, Glycine max
tgtaatcgattacacacatactgtaatcgattaccagaggatgtttttataagacattctcaacagtcacatctttgtatctggttcttaagtggccatcataggcttatatatatgtgactagagacacgaatttgaaaaaagtttttcagaacaaaaaaggtcttatcctcttaaaaagcaaaatcgttttatcctcttacaaattccttgtccaaaacacttgtgattcaataaggaattatttgagtgctcaaattgttcaatttatctctttcaagagagatgtcttcttctcttcttcttcattctgaaaagggattaagagaccgatggtctcttgttgtgaaaggattctaaacacaaaggaaggattgtccttgcgtgtttagaatttgtaaaaggactttacaagataatggaactctcaagcgggtgcttgtggactggacgtacgcaca

SEQ ID NO: 5771 - DNA, 227 bp, Glycine max
  unsure at all n locations
tactttgtcttcatttaactgactatgcgcttggcggtcacgctcaacatagtactttcgacacctactatacgttgatttcaccaatgctgttatgggaatgttgtgacaatcctttaaaaccttattgatacattctgacaggatcgntgatatgaggccatatcgacgtgcgtctctatcgcaagccatcgaccatttatcctttgagatgcgagcaatccata

SEQ ID NO: 5772 - DNA, 446 bp, Glycine max
  unsure at all n locations
ggttcttgattntntcgaagttctttaacaaccttanaacattatacttgtccttcatttaattgtctttgggcttgtcaaccacgatcaacaaagtactttcgacacctactatatgttgatttcaccaaggctgttatcggtatgttgcgacaatccttcaataccttatttacacatttggacaggttggttgtcatgtgaccatatctacgtccttcttcatcataagtcatagtccatttttcctttgaaatgcgatcaatccatgttgctatggctagactcaattgacgaaatttttctaaattttgatcaaatatatgcttgcaaggagtgtagcctgcataaaattagttagcaataacaattttaagtatatatgaaacttacattaacttcatattataaattaaatcttacccaattgtttcaacatttctttt

SEQ ID NO: 5773 - DNA, 395 bp, Glycine max
  unsure at all n locations
atcctcagagacacctgaggcatgcaagcttcaacattcaaattcgagcgtctcgttatattatattatctagtcagacatccgagaaaaaagttattgacgtttgaatttgctcagagcttcaacattcaatttcgagcgtgtcgctatattacgggactatatcagacatccgagtaaaaagatattgtcgtttgaatttgctcagagcttcaacattcaatttcgagcgtgtcgatatattacgggactcaatcagacatccgagtaaaatgttattgtcgnttgaacttgctcagagcttcaacattcaagttcgagcgtctcgtatattatacgactcaatcacacatccgagtaaaaagttattgtcatttgaatttgctctgagcttc

SEQ ID NO: 5774 - DNA, 468 bp, Glycine max
  unsure at all n locations
ntaggcaaattcaaacgacaataactttttactcggatgtctaattgagtcccgtaatatatcgagacgctcgaaattgaatgttgaacctatgagccaattcaaacgacaataactttttactcggatgtctgattgagtcccataatatatcgagacgctcgaaattgaatgttgaacctctgagccaattcaaacgacaataactttttactcggatgtccgattcagtggtgtaatatatcgggacgctcgaaattgaatgttgaacttctgagccaattcaaacgacaataactttttactcggatgtatgattgagtcccgaaatatatcgagacgctcgaaattgaatgttgaacctctgagccaattcaaacgacaataactctttactcggatgtccgattcattgacgtaatatatcgcgacgctcgaagatgaatgtcgaacctatgagccaattca

SEQ ID NO: 5775 - DNA, 439 bp, Glycine max
  unsure at all n locations
acccgggattcttagagtcacctgccgcatgcaagcttatggtaatcangagttagttcctctctcttaaggaaaaactcaacattattntcattggatttacataatgaanaattgtcctaatgataaggttgatcacttcaaggctcatctagttactaatggtttcactcacgtttatggtgatagcttttcacttgtcaccaagatgccatttgtttgtctcttccttgccatgactcccatgtgttattgggctctatttaaactagacgttaanaatgtctttctacacaacgaacatggagagaaaatttatatggaacacctcattgtttttaggaggagtctaatttgggttataaacttcattgctctctttatgggttaaagcagtcttcctgtgcttggttccaagggttagtattggtattcaact

SEQ ID NO: 5776 - DNA, 472 bp, Glycine max
  unsure at all n locations
tctcagcggcttcagatgcaacataaatatgccaatgacacttataaattnttcaaaaaatatatcgaaagtagatattatgcaagcctcaagagggaggtatatgttgagaggaaagtgaatctcacggaaggtgaattcactgtgattcaagagatctttgaggataaagggtggactaaattgatggaaatagttatctataatgaaccccttgtcagagagttttatgctaatgtcatctttctagatggtttcaatgaaaggaagtcttgtgtcacaggcataattgttaaatatgactaagcggccatcaataatctttttggctccatattgagaatagggaaaagccaacaaacagactatgaggagtgtataaacaaagagaaaagaatatgattggtgaaaaagttttgtgcattcccaataggcatatagagacaaactctaaaggaaaacctatgagagt

SEQ ID NO: 5777 - DNA, 428 bp, Glycine max
  unsure at all n locations
agcttaacaaacttagaaatcttgtggtcatttattccgaaatatagggggagtaaacgcacattnttatctatatacaattgtttgttgcttgcttgaatcttgatttcacgtattgtattgtcatcatcaaaaagggggagattgtagatgcaattgcctttggtgttttgatgatgatcatgatgatgaaattgatgcaaatgggcttttcaagattaaattcaagacaatacttcaagattacaagtcacaacatcaagatggtcactagtaaattaggaagggaattcctaattgaattagcaaaaggttaggccaagtaatgtaaattaagaagtgtatttcagaggttntactctctggtaatcgattaccagaggatgtaatcgattaccagtggccaaatatattntataacagctact

SEQ ID NO: 5778 - DNA, 300 bp, Glycine max
cacatactgtgatccatcaccataggattctatcaggaaacattctccacagtcagatcgatatatctggctgttatgtggccatcaaaggcttatatatatgtgactagagacacgagcttgcaataagctatacagaacagaataggtcttatcctgttaaaaagcgatgtcgttctattctcttacgaattccttgcccaaaacacttgagattcagtaaggagttatatgagcgctcaccattgacatggtatctctttcaagagagaagtcgtcatctcttcttcttcactctga

SEQ ID NO: 5779 - DNA, 363 bp, Glycine max
  unsure at all n locations
agctntggccaaaccccagcagcagttgttttcttagagacttgtcttagcaccttgtctttgagactgaggataattacactgtgtgccttttgcagtagtgctttcttatccccatcagccatcatcttttcaagtttggcttctccatcaagtgcttccaccaggccctgctgaacaagaagagctctcatcttcaatcgccataacccanaatcattntgccctgtgaatttttcaacctcatacttggccgagtccatttcttgaatcgaactcaaaaatcgctccacgctcaccgcaccaatttggtgtgccaagatcagaatttagttcacaaaagagtgagtttcttgtatgaac

SEQ ID NO: 5780 - DNA, 417 bp, Glycine max
acacgtactgttgtctgataccaaagtactctttctgataacaggctcaacagacacatcttgttatgtggatcttatgtggccgtctaaggcttatatatatgtgactatggacacgatatcctaaggtgttattcagagcatgagatgtcttatcctgttaaagagcgaagctgtgatatcctcttacatatgccttgatcatgacacttgtgattaaataagggattatttgagtgctcgaattgtccaatatatctctttcaagagagattacttcttctcttcttcttcattctgaaccgggattaacagacccgcgttctattgctgagaaaggatgttaagcacaaaagaatgattgcccttgtgtgtatatgattagtcagagggatctacatgatagtggagctctca

SEQ ID NO: 5781 - DNA, 358 bp, Glycine max
  unsure at all n locations
agccttctacttattaattatcataatttagtttanaaataaccaagtagagaataatatataaattatatatttttatggaattatttntgtgaaataaatttataagttatagattcaaatgtatgtctcttttcgtatattaaaaaaataatatctatctatactattataattcanaattaatttgattattcaatatacaaattcaataagtattntatcaattatttgaactatcaattaagtaaactaacacatantttgaaattactaatattattatttttctattntactcctannatttaaactcantttttttatggtcttcgtattaatcctataatatagaatc

SEQ ID NO: 5782 - DNA, 492 bp, Glycine max
  unsure at all n locations
gcattacggacctatgaaactcagcttagcagcttattgccataattcacaaacctagattccaaataacagcaactcanagtagttattagatagcatggaatatatttcatttttataaaaaataaatactatttaagagaaagttaaggatacaaatataagaggataagatatcacccctaacagagcaaaacaaatgtagttatttgatttagtacataattacatcactgtaagtgatgtatattcacttacgttttagcagcctgcctgcccttaccaattgcagcaccgaaatatctctagaacaattaccaaatgaacaaatcattacaaaaataccacatggaacttccaaaaaggaatatcaattgcatgtgtaattataaagaagtctggaagttgctatcaaatgacaaaaagtagctcacatagganacaccggaaggttcaaccatgtacaactgtggtccatccctgtcataacct

SEQ ID NO: 5783 - DNA, 341 bp, Glycine max
ctcgaaatggaaagttgaacctatgagccaattcaaacgacaataacttattactcggatgactgatagactcccataatatatagagactctctaaattgaatgctgaacctctgagccaattcaaacgacatataactatctactcggatgttcgattcacaggggtaatatatcgtgacgctctcatatgaatgttgatcttatgagccaattcaaacgaccataactatatactcggatgtatgattgatccccgaaatatatagtgacgctcgaaatcgaatgatgaacctctgagccaaatgaaacgacagtcacttttgactcggatgatcgat

SEQ ID NO: 5784 - DNA, 437 bp, Glycine max
  unsure at all n locations
agcttgactgacaactggagtcacatataggtacaaagcaacaatgatgttaaaacattgaggaactctgtttcacctaggaatgaccttacctcatatttagtaagaaaattatgtgcaaaaaattcatgcattatttaaggctcttaacaatccccaacccaccatgtttgagatattattatttgacagttattgactgtgcttgtacaaatttcaaagccacacaacagattttacaacatggctagttttggttctgaaccaccacccatcacgtagtctagcaattgacatataagacaactttggtagaatgtgcaaaagttacagcaataagcataataattaanaatgttaatagacaacaatttaccgaaacaccagcaggagggtcacgataaccagttagaagtgcatacacatagttctgacca

SEQ ID NO: 5785 - DNA, 455 bp, Glycine max
gagtttctgatgaattcttttaccactgattgatgtctatgggatctaagtttcagaaagacccattctccaacttcaaaacacaagtccctcctcttcttgttagcataccttgtcatttgttcctgagctatgagcaagacgtgagttgagttgaatcaaagcctcatctctttcactcgactccaatgccgcagcagcaaccttagtctcattatacagaaatctcaacaatgcaagaggttgcctcccatataccacctccaacggagtcatcccaatagacacatgataggaagtgttgtgccaaactcaggccaagggacccacaatgaccaagtctatggatgatcataagcagagcaccgtagataactatccagacacctggctaccacctgcgtttgaccatctgtgtccggatgatatgctgaactcattgtcagcttattacc

SEQ ID NO: 5786 - DNA, 446 bp, Glycine max
  unsure at all n locations
agctntatacaacanatatactaagactcattcttatatgcaatgtggtaccatgttagtgaaaaacctcgttggactcctaggagtacatgataagacagaccacacactagtaagtcaggtcactctcactaggtaaaatcatagggagaccagtcagggtcactctattttgtgagaacactccaaccatatgagatcagcataggcttcaaggaacattcaaaccgagtgtatttagccccaaggcctacactccaaagagtccgtcatgggcctctccttctgggtcaggtccaacccagaaaaattttagcacgcagactctatctatgaactgtacaaaacacacgactcctcaatggttctcaaaaataatttaactcgtcgcgcctcanagtgattaaactcatcgagttcccacagtggatcccatcataatattc

SEQ ID NO: 5787 - DNA, 412 bp, Glycine max
  unsure at all n locations
ntcttgaganaacttccttgagaagcttctttgagaaaacttccttgagaagctagagcttagctacacacacccctctcataactaagctcacctccttgagaagcttccttgagaagattcctaaagaagctagagcttagctacacacacctctctaatagctaagctcaccttcttgagatgagaagctagatcttagctacacactccctataatagctaagctcacccccatgacaaaatacatgaaaatacaaaaaagtccctactacaaaaactactcaaaatgcctcaaaatacaaggctaaaaccctatactgctagaatggccaaaatacaaggctcaaacgaaggaaaaacctattctaataattacaaagaataacaggctcatacttagcccatgggc

SEQ ID NO: 5788 - DNA, 387 bp, Glycine max
  unsure at all n locations
agcttgtaccagttgcaagcactcagactccaccacaaacgaggtaaaggagaggtcacgagccatttggatcacccatatcttanaagatagagcatcttataactttntatattttatttcccttccatccttaaaatatgtaggggtaaacatgctagtttgtttattcatggacatatgcataaaaatatagtgtagaacaagttagccaaacctctatcattaatcaagcacaagacanttattatttaacattgaatntatactatagtgaattgttaaatcanatgacaaatgagtccaccaaatattggttttcacgcaatactagttgtacactttgttatatattatctgnaaatattatgtaatcgagtttttctc

SEQ ID NO: 5789 - DNA, 385 bp, Glycine max
  unsure at all n locations
agaaggaagaaagaccactcttggagtgggttcagacgccaaggaaagagnaataaggaggctcaaagcccaagtccagcatttggatctggattaagacatagagtcaaagatgatagaaaaacaaaaatctatgttagatccttactcctttttagcccctccttctcctactttctattctccatcccaaaatcctctagattacttttttcccaaagctagtccatcatggtctttacctatagcttctgcttataagaaaaaaacagaaccaccaaagacaaaacctaccaaattaaatatctctttccaagagtcagttgaatctcccacaaaattagaaaacactctaaagaaagatacccatgactnttaagattct

SEQ ID NO: 5790 - DNA, 431 bp, Glycine max
  unsure at all n locations
tgaggcatgcaagcttctctttggcctaacttctcttttcgtgtccattgttttaatgctagtttctttntgcgctgctcatttctttgtgcttaaggataagtacaagaacatcttattccccatttatggtgccacttgcttgcccgtgaccttctatgcagtgattcaatttccgttgtatgttgatctacttaaagctatttttaagaaggtgccacaacgcgccaaaagataagggttgccatttttggttcttcttactccatcctccttgatcaatntaaacagatcactagtttaattggaatgtttgtaccagactaatgtcttatctgtatttaattatgtctggaaaacagtataccaatttcatagtttggtggtggaatttgctcgcatttatatcatctcattattaatagccatca

SEQ ID NO: 5791 - DNA, 462 bp, Glycine max
cttgtgaataccaacatccaatgtgctgagaccctgtgaatgtctagaatggagataaacaactcacacaaatgtttctatctaagttagttatcgtccaatgatcacagagtacacgtatacacatcatgaagttgatcaatgttctagaaactgtttattttcattccctcataatttttgaaatgctaatcatttgaagttcaagtgtatattgagacaggttggcaaaaaggtatattctctgcagactgttgctaataaaagtagtggaaagcataatggaagggataatactatttttacctttctctctccatctcaagttgccatgttgcatcattaccagctatgagagaacaaatattttcgtgaaggcactaaattccacaacggtcacatatttctagatgaccaagcgcatcaagaaacaacttttgcaatctgtggtattgaagtgct

SEQ ID NO: 5792 - DNA, 513 bp, Glycine max
  unsure at all n locations
ganatgaatcatgcattacggtcactgtcactattcaaactcgaggctgcggctataccttggacaaacaatgccgtgcttttgtatgcaaccgcacatgaggcggactgtagtaccgtctccgctacactaactgtatcggagcgcggatgcgctgctttatcctctataagctttctgggctttaacatgaacctccggatggataccatctgatctttcaacgccgataaccggtcatcatctattcctgcacaccctctttattactccatctttctggatcgagcggtatactcggtgcctggcgttttcttatttatcatgaatattcctacagaagatatactaatgtgaagtatgcctcctcccacaagcgatattgaaagtgaatcgatcggagcacatggatccacccaaaggtttttagcaacgtgatgagatcagacactctcttttatacataaacatagcttcttctagccaagatataccccggcgttactgagaccg

SEQ ID NO: 5793 - DNA, 329 bp, Glycine max
agcttgctctctaagctatttatccaaggcactctgttggtgtgaaagctcctccttcaatggcttattccctagtggatggcgccttctctcacctcttctcctttatcttctgctacatctccatggttgaaaatcaccattgaaggacctcattgaagctcaaagatgcagccttcatagaagcttctcacgcaagcttccatcactactggaggatccccatgaatccttctttccctaacaagggaagacccccaatagaaggcatagccatggaagctaagcagcgtagcgaaaggaaccttcctttcctcacgtgtatgatg

SEQ ID NO: 5794 - DNA, 460 bp, Glycine max
  unsure at all n locations
nttcgattcattctatgcacccatggtggtccacattgtgtttcgtgcanttttattctcgttgtgtttactttttataccccctgttgacgtgcttaagccattttacttaagtcatttctcgcttaacttaaaaataaaatcaatttccaccgaacgtttgaattgtattatccgttaacttcgattaaaatgaattccgaccgttcggtcgtgccgtaaccacgttggaaatcaaaaagaggtaaaaaataatataataataaagaaaaacatcttttagtaaaataaagcggaaaatcaatcggacgttttctctttgggatttctcattcttaatcgaattgattaataactaaagtgaaactaaggctaaaatcaactcgcctagtcaagctcgtccacaaaaataggcttttgaaatttgtcatttcaatttctcactaagtaaaatggatca

SEQ ID NO: 5795 - DNA, 471 bp, Glycine max
  unsure at all n locations
agcttgtgagtgtcatcatccacactcctcaaccttccagttaaggggtgatgaatatttgcatcattgaggatgaaagactaaaaaattaagtgtatgatattaatataagaaatatatgtgactaacatatcacatgtaagataaaagatcagttaaaaaagataactaattaaaaacaacatgacaagctactaaggaaagaaatgaccaccaaaaatgctaatttagatatccagttatatataatatgaatgtgtttggttttgtcctanaaatataaattaatttttctttacagaatttaatttctttcatttacctacatctttttttcccagtctaaatatggaggagaagggataaactcatcacctctacttgtacatnagtatattggaatgatgggattgtgttcatcaaatcatanaactgtagaatcacgatgatgtcttagaagtatgcacatga

SEQ ID NO: 5796 - DNA, 465 bp, Glycine max
cctgagattgagagaaaatgattattaaacacaaaatggaagtactaagtatttattacctatacttaatagaaaatacttataacactacaaaataaccataaattggaagagtttgatacaatttacacaagttttatacacaaaagttagtcgtattcatcgactaacaggtggaagaatgcgttgaataatagcactatagttaccttccacaacaattatgtcactatggatgtacaagttcttcttggttaacatatccttcaaaaatttggcatagaagggcatttgctgaagtgcttctccaaaaggcaaggtaatttccagtttcttgaagataccaagaaatctagccaaatgtcactctttatcttttcatgagggtaccaattgataaggtacctccttgcattcaataggaggagcctctttcttcttttctatgttagcctcactcttacc

SEQ ID NO: 5797 - DNA, 448 bp, Glycine max
  unsure at all n locations
agcttctagagagttctacactactctagtgttctctaggacgttctaganaattctacacttttctagagagctctagaattttctagaacctctccaattaaggagggatcccaacacatctccccctcccgacttaattggggggtagtagcaaaccggcaccttggataccttatgtcaatgtgctttggtcatcatgcaaggattgcttctcttcttgcatgactcttctccactccaccaattcataggtgttattctcatgcacggattccatctcttcttgcatgactattctccactccaccaattcataggtgttattctcatgncaggattgcatatcttcttgcatggctcttctccaccaccaattcataagtgttattctcatgcaaagatatcatctcttcttccatggctattctncactccaccaattcat

SEQ ID NO: 5798 - DNA, 380 bp, Glycine max
cgaaactaattttgatatgccaaataaggcagagtttgaacatggtctgttaaggtatgatgccataacttgcagacttgaagctatgtttctgcggtatttacatcattatattttgatcttgttccaatcaagcgaattatcaagctcgcataaggaaataaggttaggtagcagtagtggcgatattaattgctcattgcttgttggctatatagaatataacatgcctactttttgtactatgtatagaagttagaagtgcaccttcctttctctcttctgcctcaaaaagccaacatgatatggaggagaacatattctaatttatgacatgtaacattaataacaacctatagtgctgacagattagtctgctt

SEQ ID NO: 5799 - DNA, 423 bp, Glycine max
  unsure at all n locations
agcttgnngaggatgatggngacccggtgtttagagaaacgaggatatgggctacgtgggagtacgtgagctcagttggaggtgggcaacaggggatggtgggtttatgcgcgatttgtggatgtagaaaacttgttgtgcaccatcgcccgaccgccacctagtaccacatgtgatgggtaccccataatcctacaagcttgagatggngaagtgtagaagggtgaaacttcctgcttttattcattgaccacagagtggtacctggagatatgtcgcgggggtcaggagaccttggggacgtcaggtggngtgctattgcccanaaccaagcttgaccaatcccgacccaacccgggcatagtcagtcagtgagaacctgtgatgtacctaaacaggcgaagctctggcagtcaacagata

SEQ ID NO: 5800 - DNA, 460 bp, Glycine max
gcttaatggctcaatgagcaaggggaaatgatagtcaatcaacatgtaaacatacccttttctataggagactactatgatgacgttttatatgatataatccttatggatgcagggaacattttgttgggtagaccatggcaatttaacaagaaagacatccacaatggtctcaccaatgaaataaccctcacccatgtaagcaaaaagctcaaacttgttcccttgacaccttcacaagtggttggggatcaagtacaaataaaactcaaatgggatgaggaaaataataaaataaagactagaagaacaacctttaatggttaaggaggagtgtaaggaggtaggtgtctcctccaataggttagctaagaagaaaagtcattctgcaataaagacaaacattaaagacactttccttcttagacaacctccacatattctcctttgtaaaggacac

SEQ ID NO: 5801 - DNA, 334 bp, Glycine max
agcttctataccaccccgtttctctcctcctttggcaacatcaaaaagccaaagtgcgtggtaatcaacacaagatgatataactaaaggtcacataatcaatcataagtcaaaaccaaatataatccaatcattcataagtcaaaaccaaatataatccaagcataaaagactaagtaccaaataccgaaagataacgaaagttcagaaaatgataacctaaaaagcatagccaaatacacggcttacaataaaatagaatgataatctataactaagaaggtggtggaggtcaaagcaccgacgaagataagtcacatcctcttcaagctgg

SEQ ID NO: 5802 - DNA, 447 bp, Glycine max
  unsure at all n locations
tgcggactatacctttgaacaaacactgccgtgtttctgtctcagcccggatttaaggcggactgcagcaccggctccgcttcactaactgtattggaggcggctgccgtggctttatcctctatagttttctggagttttaacatgacctccgagatggaagccatttgatcttttaaggccgatagatcggccttcatctattcctgcacgccctcttcattatacatttttctggatcgagtgttataggggtgccttggtgttttcttagttatgatgaaattcctaaagaaataaacaaaggtgagtatgccaccaaaacatgaatatgtaaatgaatgatcggagcacttggatccacccataggttnttatgtaacgtgatgagtccagaacttctcattgtataaaaagaacagagctttcatctatccaagaatatac

SEQ ID NO: 5803 - DNA, 379 bp, Glycine max
  unsure at all n locations
agcttctggtgggacatcttgacttgctntccaatctgacattcaccacagattctgccttcttctattntcagattgngaatgcctctaacagcacctttgtcaatgattntcttcatgcctcttaagtgcagatgtccaaatctttgatgccatattctgacttcatcttctttggaggatagacatgtggaggagtaactggtttcttgaggtgtccataggtaacagttgtcctttgatctgctgcccttcattagaacttcactcttctcatttgtcaccaagcattctgactttgtgaagtttacattgaatccttcatcacacagctgactgatgttgatcaaagttgcagtcagtcccttcaccagcagta

SEQ ID NO: 5804 - DNA, 440 bp, Glycine max
tcgaagggaagagagagaccaatcacgagcacatagcatggtcttaaaagaggagttagctgcttgctcaaggtccaaaagaagcttgtctcagcgtttatgcgagacagagaccaacatgttagccatcgtcagcaagtaccatgaagaattaaatctagccacggtccacgagcacaaagtggcggacgagtatggacgagtgtacgcgaaaaaggaggctataggaatggtgatcgactcgttacatcaagaggcaacaatgtggatggaccgattttctcttactttgaacaggagtcaagaactttctctattgctagccaaggccatagccaaagcgatagcgggcacctactccacccccgaggagatccactgacttatcagttattgtccgcatatgatagacttaatggcccatataattagaaaccact

SEQ ID NO: 5805 - DNA, 89 bp, Glycine max
atcgattgaaaacaactccatataatgaacgctataccaaggttctgacgaggatctaggactaccactgttcattctacgggccaaaa

SEQ ID NO: 5806 - DNA, 455 bp, Glycine max
tctatggacactgaatctttgaggtccttcaatgatgattttcagttatagagttatagcagaagataaaagagaagaggtgagaggaggcgtcatctactagggaataagcaatggaagaagaagtttcaccaccaaaagagtgtcttggataagaagtttagaaaggaagcttcaatgaagaaagataatgagagagaaaaaaagtggtgtgggaatgaaggaaagatagggagataagttaaactttgaagtgtgtctcacaagactctcattcatcaaagttatgacaagtgttacacatgtttctatttatagcctagcacgggaaactttcttgagaagctagaggaagaaagctttcttgggaagctagagtggggctactcacaccccttcaatgttaagttcaccccatgctaaaatacatgaaaatacaatgggaagctttcttg

SEQ ID NO: 5807 - DNA, 393 bp, Glycine max
  unsure at all n locations
agctaagtctatgatgtacttcccttcggtctgtatgactatagatatgaactgcgacgctgtcaacttnttagaatgacaaatcaagggatacaaatcacttttgcccgtggttattgaatatttatctgattttcagtgtccatgccccctacatctcattttacagatagtatataaccttttttttttctttttatcacattctgcatatgtaccatagaagatgatttcctgtgtatgatcaacgaccctgcaacaatttaaaaaccccttactgtacttgtttttaaataggagcatttaatgattgctacttttctactaacacacttatttaaatcagtttttacaacatgattaattttaaataaacttactgcttcatatcat

SEQ ID NO: 5808 - DNA, 138 bp, Glycine max
tgatgccgaacaaacatttactaatcgacatcatccagttgttatataacgagtgaatagaataaacaatggccggtgatgatcgatatatggtctatgctgatatctgatcaactacattgccgcaatttcttatac

SEQ ID NO: 5809 - DNA, 451 bp, Glycine max
  unsure at all n locations
agctngaacaatatagattaatctaacgactataaatcgtggtgaatggcatacagtcagtacacaaaaaaatatttagccctaaagaccaggcttgtaatgtatataagcttctaaaaatatacatgagttgaacagcaaaagtctcctagggtcttcaacatggtatttgcatcaaatgagaaacaagaaatctccaaatctcaaaaatcaatcctaaaaatagttaaacattaacaaaagagggagaatctttcctgacctttccctctgccgattagcactatcaatttctttacttttagggtatgtttggtttaaaggaatgaaaggcgtgttaaagtgacaagagatgaaagatttgaattaaagtagtgtatagatgtgcaacccacaccaatttctaanattttcatctcagatacacccaagatgaaagaaccaaacacta

SEQ ID NO: 5810 - DNA, 462 bp, Glycine max
tctatggacactgaatctctgaggtccttcaatgatgattttcagctatagagttatagcataagataaaagagaagaggtgagaggaggcgtcatctactagggaataagcaatggaagaagaagtttcaccaccaaaagagtgtcttggataataagtttagaacggaagcttcaatgaagaaagataatgagagagaaaaaaagtggtgtgggaatgaaggaaagatatggagataagttaaactttgaagtgtgtctcacaagactctcattcatcaaagttatgacaagtgctacacatgtctttatttatagcctatcacggtaaactttcttgagaagctagaggaagatagctttctttcgaagctagagtggggctactcacaccccttcaatagttaagtttcccccatgctagtatacatgaacatacaatgtgaagcttccttgagaagc

SEQ ID NO: 5811 - DNA, 309 bp, Glycine max
  unsure at all n locations
taattaaattctgtcactactacanttttacggccgcagaatgtcggtgttagctgaaattnttttatgacagaattgcgaatcggaattcaggtgtatttcgaataattctattataaataaagcattaacgtataacaaataagaaatttataacattaatttaaaagtactaatgattttattaaactgtaagccttagtaataaataattaanaaaattatttatagaattaagaaataattttttattaaaaatatcatangattacattaaaagttataataaaaaaagcgtattcataaaac

SEQ ID NO: 5812 - DNA, 272 bp, Glycine max
atgacctgcaagtcgcttacttatatctcttacttcgttaagaagacgtagcttgaaacaactacatgatcagctaagataattcaatctacacgctgactttatcaaatggtcaatgtcaacgcacgctgcgcaccatatagctaagacaagctaagtatctccttcttaaaacaacattttcacctacatatccgactattcaccagatgtcaagcgagtatcctgctctagatatgtaatgatgcactaatttaccataggaacagctt

SEQ ID NO: 5813 - DNA, 335 bp, Glycine max
  unsure at all n locations
gcaagcttctaaggaagttttctcaagaaagcttctcaaggaagctacctagtctataaatagaagcatgtgtaacacttgttgtaactttgatgaatgaaagctntatgagatacacttcaaagntccacttctttccctcttttattccttcaatttcgggctccccccttctctctttcttttcctccattaaagcatcctcttcaagcttcttatccaaggcaattcttggtggtgaagctccttctttcttggcttattccctaggggatggtgcctcccctatcctcttctcctttgccttccgctgcatctccatgatgaaaaatcac

SEQ ID NO: 5814 - DNA, 555 bp, Glycine max
  unsure at all n locations
tcttgtggcatattagattatgagtggtcgttttgattatacnnccacattataggcttgattcatgcttacggaacttacatactcaagctcaacggtgacgccgatctgcattgaataatccacatcttgcgttgtcattgagaagagagagagatacaagtgcgacgcaatagtattaagctaccgaatgaaattggagggcaaaaagcgcgaaatcttttttacaaactctgttctgtaatcatttttgatataatgtggagggagtaatatgttttacagcagacataaggacgtacggcgtattaatgaattaatgaccatgtgtagtctagaagaagaaaggcttgtaaggagattggcgagagggattgttgtaaagaggtttggaaaaaacaaagaacctaggttaaacctaagagaaatggactggtgcaatacctgcttaaactgatatatagaaggctgcaaacgtggtttctttatacgataaatggcacaaatgaagaatatattgcgcacatgccatataagatttgataagaaaggaag

SEQ ID NO: 5815 - DNA, 370 bp, Glycine max
agcttatccttatggctagcctccggacttcactccccgtgccactccggaagatttaagccaagcccctacttttgaggggcaactcccgccttatgacgactatcccgggcaagatgatgaggaaggagatacccatctcggccccctgctccacctcaaagatccatccccacatgaactaccccaaccaaacatagtccgccatatcccggcctcacccacacccgtaaaagaatctgttcccttcgcggaagataagggaaagatagaggcgcttgaaaagaggtaagagcagttgagggccttgcaattacccattctcggatttagccgatttatgtctcgtgcccaatatcgtcatttcctc

SEQ ID NO: 5816 - DNA, 486 bp, Glycine max
  unsure at all n locations
atgattcgatgcctgcgaaacctgaactattaagactcagcttgtgtcgggtacctacccggtgacgagccaagatatatgtttaacgaatgagaaacgcccaggagcggactatgcctttgcgaaattcttcatcgcaagtgttacagatacgagtgggaagcgcctgagtttatactgttcttcacggtaaccgatgtacaacgcnattcaatgagagggaagngccttacgggatgaacacattgctacttcggttactcacctatttatagccaaataggggaggtggttgacgaccacctggcccacacaagccagagtgtttcttgcatagatcacagtcttgttgaagaatatattggaaggaccatggagtctggggctatttgatccccattttttaaagacaccccactgtctattcgggatccttttacgaggaacgggacaactagttcaactaaaccggtctttagaacggct

SEQ ID NO: 5817 - DNA, 466 bp, Glycine max
  unsure at all n locations
agctcttcacagcaaaagagtaaagctgttctatgtcatgtttatcccgactaaanaagcattaaaatattgaccatccagacctagaagatgaactttcgcagaatttatggggtcgggaaatcaagaggggtaaagagaatcaaggtgaatttcttaaaccttaatactagacaaatcagacactagtactaaggcaaaacgaaattcaatgacccatcatgtcatttagtgcctaattttctacactgttagattaaaggtcaaaataccattattctgctggtcacggattcttatcatatgtaatgtgaccacaaatagtcactaaaatagttcaccttggttgtgttacaaagctatgtaattactatatgtctgaccatatgaccaacctgcttgttgagcccaaacaatacattgcttagtatgagttaattatatacaattgccatttgaatctgga

SEQ ID NO: 5818 - DNA, 406 bp, Glycine max
cgcgactatgaattggaaggctcttgaggcaattcaccattgttaactgcctcacaatagatctgctggcatgaaaaaaaatagagtacgcatttcactaggaaaacttcagcatgcactgcagcattctatagacaaatctcgtacaaacgtaagttattaagcttatatatctcacattgagcattccttgactatatgaatgtccaaagagaaaaacatatgccaaagggtgtatatcattttactcacttcatgtttgcctgtgtcaatgccattgcaagatgctagaaagaagtacgagttagggtcccttgctaatgaactctgtattctggatacaggctcagcaacagttctgaattccagtgttccaacaccagttgaagctattaaaggagtaaag

SEQ ID NO: 5819 - DNA, 388 bp, Glycine max
  unsure at all n locations
agctttcaccagatcatataagataaatgcattcaggcaatctgcagatatatcctcccaaacgtcaaattctccgcctatatattcaacctttccatcactggcacgtggagtgaatcttcctccatggtgcaatactaaagttatattgtcattcattctacacaatcagaaaccgcanacatggtcagatattatgaaataaaaaaacctacctcanaaagcgtgaagacattgacattgtcaaaaaccgcgaagacacaatcaaaaaccaaaaacattgtcatctataaaaacagagcatcataaacgaaattaataaacgatcataaacctccctacgaagcgcgaagacaatgccgcagatgaaacccctcgaacatgtaaa

SEQ ID NO: 5820 - DNA, 465 bp, Glycine max
  unsure at all n locations
tcagaccaaagcaacatataatctaggtatccaaaacccctcaatttaatggattatcaaggtttgagaagtgaaattgagaatgatgcaaatttgggctcaaactctcacctcacacaagtctataacatcaatctaaacttgctcaaactggatttgcacctaaaattccaccgaatcaaaatttgactcctcaacacccaattttaccctataaatggctctttgctcactatggccatttggttttctctcttgcacaacccangcttgctcataagtcctaaatgacatttcaaactatgattaactcactttaacctccaaataccactaaatccagatttggccttctgactctcaaaaactcactctttgtccactcataacaccatattctcactttctaaccctaggttaactctacccttcatccctagcagttgctcataagcaatttcagca

SEQ ID NO: 5821 - DNA, 431 bp, Glycine max
  unsure at all n locations
agcttctggtgggacatcttgacttgctntccaatctgacattcaccacagattctgccttcttctattntcagattgggaatgcctctaacagcacctttgtcaatgattntcttcatgcctcttaagtgcagatgtccaaatctttgatgccatattctgacttcatcttctttggaggatagacatgtggaggagtaactggtttcttgaggtgtccataggtaacagntgtcctttgatctgctgcccttcattagaacttcactcttctcatttgtcaccaagcattctgactttgtgaagtttacattgaatccttcatcacacagctgactgatgctgatcaagtttgcagtcagtcccttcaccagcagtactttgttcagactangaangtcatcatgaactagctttccatgccaatgatc

SEQ ID NO: 5822 - DNA, 453 bp, Glycine max
taacatgagattccaacaccttgaattctcgcaaacagcttaccaaaaactcacatgaatgtgaatctcatgatctcacataaagtctaatctaatcattaaataacatgatctcaaccacgtcttatatcatcattaagaaatcaaccaacacaacccaagatattcattaatcaacataattatctcatcatcaatataatattctcaacaacaacatgatatattagccatagtacaaggatagaccaaaccatgaataataaatgtgcgtcactataccattgtgacaactttatacctcatggttaaggttatcaaaacatcccatacgtcttgggttactatctccttcattatctattatgtggctatgaccttcatagcttatagacatgataaataaggatatactaactcagttaagttggttcttgtctcatgtgaaagcta

SEQ ID NO: 5823 - DNA, 268 bp, Glycine max
agcttcttatccaaggctcatcttggtggtgaagctccttcttccatggcttattccctagtggatggcgcctgccttctcctcttctcctttgccttccgctgcatctccatggtgaaaaatcaccattgaaggacctcattgaagctcacagatccagcctccatagaagctccacaagcaagcttccatcactccgtgacaaaattaaaccctccaacatccctaaatcatcttaaacatagccagacctgcatgaaaaatcccg

SEQ ID NO: 5824 - DNA, 382 bp, Glycine max
ctaacaagcactctggtcatgaaatttccctctcttcggctcaccagtgtgaaagatgtgcgtgagtagataatgcaaatgcaagatatttcaactcaacttaagaaattgtgaggttaatatgcttgagtccttcctgataaacttcattctgaacacatttctgctagaatatgggtcgtttaagatttcctacaacatacataatgacaaatggtctattaatgaattaatgaccatgtgtattctagaataaaaaatgcttgtaatggagacgggtgagagtgtattgttgtaaactgcttgtgggaaaaacaaagatactaagtctcaagctaatcagaaagggactggtagaataccacctttagctgatattgag

SEQ ID NO: 5825 - DNA, 260 bp, Glycine max
  unsure at all n locations
agctnttcaatcaatctttggctagctacattagtgcaactacccncatcaataatcaaagagcatattttccccatgatcatgcacctagtatgaaaagagttcttcctttgagtttcatctctatcctttcatgcactccccattaacctcctaaccatcanaagattaccttccaggggttgtgcatcacattcactttcactctcactagaagaactagaagagctagaagaagatgcactagtgatatccccatt

SEQ ID NO: 5826 - DNA, 466 bp, Glycine max
cggttcgaggtacttacccgttgaagatcgaagaatgatgaagaacgaatgaagaacgtcgaagaacggtcgaaacctttgcgaaattcttcacggaaagcgttacggaaacgtttcggaagcgcctcggcttatattttcttcacggaaacaatttttccaagcaaattcgaaagagagagaagtgcctaaggggctgaaccattttcttcttcacttcctcccctatttatagcaaaataggggaggtggttgacgcccagctcgcccaggcgagccaggttgcttcctccataagcaacagccttctggaggaatattctggagggcccaagtgggcctgggtgctatttgcacccccatttttactaagtacaccccccactgctttatttggcgattccttttttcgtaaagttacggaaacttacgaatgtcgtaacgatacttggtttctttccgtaat

SEQ ID NO: 5827 - DNA, 337 bp, Glycine max
  unsure at all n locations
agcttcaacctttggtgcccatttctgctccaaatcgcgaaaggagggcattttcgaagtcgtgatgtgcgtgtctacgagtgggacttcgaaatttcaggtttgggtggacttctttctctcttgattttcgtgggtatggggttttgggaaatatgatgggtagtgttgctaagtttctgcttcatgatagttatttgtgaaggaatttgtggaaagcatgttgaaattgccatgtttggatgagttaaacatacccattctgttntagggtttttatgatgatgctcgtgatgttcatgtgctgaaatttcttatggaaaactgttagagatga

SEQ ID NO: 5828 - DNA, 451 bp, Glycine max
  unsure at all n locations
tgcgannagcccactccatcattaggatttgttcctgccatctcaaacaaacaaatcaaacataacaagacaattatagttgttgtttgaatacctcacccactcaagtgtatcacacaattatggcttttctctaatgaaacactcttgccttttaccactctaattccccttgagttcttaggcaattcaagagattatggccacaacaaagaacaattcaccaatatgtgtaaggtaaggctggagagacaaggaaaaggttaaccaagaaaaaggctaacaatgtttttaggcacaattgaaggaaataaaattcagaatttaggaattcaagtaacaatccttcatacaaccaatatattaccttaaagagattatttttaagttcttcaagcatgaaccattcagcccagattntctttttttctttctaatcttgcttatatga

SEQ ID NO: 5829 - DNA, 346 bp, Glycine max
agcttctatgttcaatatcgagcgtttcaattaattatgtgcctgaatcggacatccgagtgaaaagttacgaccatctgaatttcttgagaacttctatttttcaagctcaagcgcctttatatatcatgggcctcaatcgtatatccatctcaaaagttatggtcgtctgaattggacaagagctttcgtgttgaatttcgagcgtctcgatatattgtggacctgaatcggacatccgagtaatattttatgaccatatgaatttccctacaacttacagtattatataaggagcgtctctgtatatcatgggactcaatgcgacattcatgttaaaagttat

SEQ ID NO: 5830 - DNA, 418 bp, Glycine max
tcattaagaggcttcctccagaagcttcctcgtggcttctatgagaagctttctcatgaggcttctgtgagaagctagatccttatctatccacacccctctttgaacttaattaacctccttaaaaataattacagatgaaaataacgtacccaataatcaaacatcaaacataattactaataatatatagatatatatatcagggtgatacagctctctcacccttttagaaatgttgtactccaaattgaccatactctaacaatgaatggcgagctgctcgcatctaactatctaagttccacgtggcatattctcctgatgcacctgcccaaatcaccttgaccaacggaatcattttgcctctaacgtgttatgttagcctatcctcgaacctcagaggcaatgcttcata

SEQ ID NO: 5831 - DNA, 350 bp, Glycine max
  unsure at all n locations
agctntgatggtgtcgagaagaaatcacatgtttgtcatcatcaaaaaggcggagaatgtgaatgtatgtatacatgattgtgatgatgtcaaagaagaatctaacaaggctgcttcaaatgataagcatttgcttcaagaataattcaagattgcttcaacaaacaaagccttgtttcaagattcactaaagaccaagccttggccttaaacaaagtgctttcaagacatgcaaggctctggtaatcgattaccaggaagtgtaatcgattatcagaagacagggttgagaaataactgttgaaaaatgtcttgaatgtgaattctcaacatgtaagtcgataccatat

SEQ ID NO: 5832 - DNA, 508 bp, Glycine max
  unsure at all n locations
ctgacttcatttgccctccngtgacttacctgacactatctagaactcaggtctggagaaatacacggtctggagatatgaactgttatgtagtttagagcaacgagtgagaacgctctgaggcattgttacaatcatctaccatctcgtttgctgaacgaggaggaaacacctcggcttataatttgcctaccgtagctaatctttctgtggatgctgaatgaatcatggaggcctcatgcgccgtccctggtcttgattaccttggcctacgactcatagccatatgcaggtggttgttgacggccacttcgtgcatacgaggcacggggcactcttcttctctgaagactgatgggagacgatatcgacgatcatagtgatcagggagctatgtgtagctcgctttcatattgcaccccagagtgcattatgagggacttattgatccccacaaaccagtaaactcctaatttctgacccgatactcagaacgagcagaccatcg

SEQ ID NO: 5833 - DNA, 450 bp, Glycine max
  unsure at all n locations
gcttatcgtaatcgattagataattatnttttagacaatgactgggtttttatgagtctctactttaatcaattaccaggtgatgtaatcgattacttctctcttaaaagagtttctgaagtgatcaataacactttatcgattatatgaagaatctaattgattacattgttcttgaaagttttccagattgtgcgaagaatactttaatcgattgaaatgataatataatcgattacttctttgaaataattgattacattgtatatttaatcgattacatgcgattataactattttctctataaatagccaccttgtgttctcacttcaatgtggaaaaattaagtgtgaaaatatatgagttgaagtaacagattaagagaaaagaataaagtgcttagatacaatgtgactcacaacttctaatctttgattatgaagatcata

SEQ ID NO: 5834 - DNA, 468 bp, Glycine max
  unsure at all n locations
tgtgcaatctanagccagtcagtttccaagatgaaattntggaaaactggatcccttgttacttgaagggtccatctcatggacaagaacttcagcaattttggggaaaggaacataaggaagttggctcgtggccgaggccaagacgtttccttctaaatcacgacaaactacgcccatgccaattccaataccgttcttgcaagcggcatcaaagtttaattttattaattgctgagggtggacaccatctattctgatgagtcactgttgtggcggctctaaagcactgtgtctcggcaaataacccaataggaacgatcaataactaagcttatggcggttttcttttgctgaaagatccaattattccttcttcgccagattgaccataacatcccaaacatctgctgtgcaaagccctctatccttggtttctaagcatcataccagccatgtattaaacga

SEQ ID NO: 5835 - DNA, 356 bp, Glycine max
  unsure at all n locations
cattgtgcatgtccctcaacctatccacattgtgtacntgaacctgaccctgaacctcacccatgttgtgtatctcacaccctaagatgcatgttcttgatattacgttacaaggcatcaaaagtgtttgcacgcgcagccggagaatgtgttcgtcacctgcggatcacggnggtggagctctgtgagaggcttcaaaccattggagaagaactctctgtttatgcaaacaatttgggcgtcaacttggagttctcggtggtggagaagaatctggaaaatctgaaaccagaggacatacaatggagggaagaatacgttcttgtggtgaatagcattctgtagctgcattgcat

SEQ ID NO: 5836 - DNA, 377 bp, Glycine max
tgtatgctttgtctcttgcacagtatggtaaggtatgcgacccagcatttctgacgcgatgataatgggtgaaaggggatatagagatatatggtataaatagcgatacgaactgctaccactgcaaaaaatgtattgtccctaattgctcactctgtataactcactacattactctctgctctatatccataatttcaatcgcttagtggagctatagatggcgctttggccaatttgatcattaggttgtctgacctgtaaattcattggtaatcatagacttactatgagatatgatacccctagaaagtaccatgtacgtatactaaccactgtcatgataactggcattctgactctcgaaagctcactga

SEQ ID NO: 5837 - DNA, 379 bp, Glycine max
ctgcagcttacttatgaagggtattccctctcgagctctttttttttttgagatgattcattttcctcttccatgcaatttgtggtgattcttgtttaacttgtgaccgtttataatcctaaatttattactaccacaaattattatatgtaagtttagatttactaaaatattatttgggaccaaaattttacatattttaattctattaggacaaataaaaattctataggaacaaaattaattttttttctatgttataaagaataaaacatattttaacctattatttataatacctatattgggtatccatgaatagttttcctattttttatggcttagaggtcaacatgagagagggtgtagtattgtattg

SEQ ID NO: 5838 - DNA, 496 bp, Glycine max
  unsure at all n locations
ttacgtgacactatgaaactaagctgaatatgctgaagattacagttgctttaggagtataaaccacatgttatcaacaccaaaatatcagtcataaataaatctttgataggatgagcttcaaactgtatgctttaagaagaagaaatatatataaaaattaaaaacataccactgagaatacttttttgactgcttaataaatcatgtggaccacatccaccttcactggtagttatctcctaggtatagccctggaaaagagaggcagatctttatgcattgcatatcattacatagtaaatacaagtcactaatcttctacaaaaattttaatttattatgatatcatactatcatagtgatgaaaagatttatgttttgactgattaacaacattttaaaattagtgtgcaatatgaggaacataaaggataccgagaaacaaagaaatacctaatatntgacacaataatacagaccgaagtagaatata

SEQ ID NO: 5839 - DNA, 259 bp, Glycine max
  unsure at all n locations
cccttcaagtaacgaagaattctttttgcagcttttatatgagaagaggtaggagcctccgtanagcgacacacaactcccaccgcatatagaatatcgggccttgtattggttagataccttanactccccacaagactcttgaagaccgtggagtctaccttctctccttcatcanactttgataacttcaagccaccttccatatgtgtgttcacgggattgcaatcaagcatattaaatttcttcaacacttctt

SEQ ID NO: 5840 - DNA, 487 bp, Glycine max
ggacacttaaatactaagcttaaggttatgacttcatgttgctcaccctatctctaagacacacaccacaaattctcctcatgtcagcctttgcctttgagttccacccatattttagtgcaaaccaagaacctgagaagattatactcattctttacggctgggttaggttgagtggattggaagcaagaaaaaaatactccctccgttactatttacaaaagggtgttgtcgaatttaagctaattaagtattaacaagtactaatatcaattaatgagacattaggaagtaacagtaacaattataagaaatagtatcaattatcaatcatcaatcatcaatcatcaattgatatattatcttatgtatagatcataaaataagattttatcacataacaatgactatgttcggaaaaattaattagaaactacaaatctagctaataactgacgggtgtatatatatatatatatatatatat

SEQ ID NO: 5841 - DNA, 351 bp, Glycine max
  unsure at all n locations
gagagacctgaggcatgcaagcttccaaattagtgtaccacactaccgcttctccggtttagctatcttgaaagaagtgtattaatagcttttcatccttagagtgggcgcccatcttacggcagtacatcttgagatggtttttgggacaaggctgccctttatacttgtcaaagtccgacactctgaacttcggnggaataacaacatcgggtactaagcaaagatccgtcatgtctgcgaacggatagtccccaaatccttccacggccctcaatctttcctcaaggagatcgaactgtctcctttcttcaggtgctgagggcggtccttccgtggacaaaactattg

SEQ ID NO: 5842 - DNA, 267 bp, Glycine max
agcttagctacactcacctgttcatgaactatgctcacctccttgagaagcttccttgagaagctagagcttagctgcacacacccatctaaaaactgagctcacctccttaggaagctagagctcgactacacacagccatctaacaactaagctcacctcgttgacttaggacatgcaagtgcatatggccacaagacgtgcctactacaaagactagctgaaaggcccgatggaacaacgctgaaaccgtatactactagaatg

SEQ ID NO: 5843 - DNA, 418 bp, Glycine max
  unsure at all n locations
agctgttcgcacaacttacggttaaatctgtgacctagccatggcagaagtctccacagaggccattgcctccctcgcccagtattatgatcagccgttgagatgcttcacttttggggacttccagctatcacccatggtggaagaatttaaagagatcctacgatgtcctctagggggaaggagaccatacctattctaagggttctatccctcattagctaanatttctaagatagtccaaatctcagcgcaggaattagaccacagaaagcaactcgaaaatgcggtggttggaataccgagaaaatgtgtggaggcaaaagcaagaatcttggtangtagaggcgaatgggccccgttcatagacattctcgcactgttgatctttggaggagtcctctttcaaatatggatg

SEQ ID NO: 5844 - DNA, 459 bp, Glycine max
tgcttctacaacctaagcacacttagtggagaatcctggacttgatcttggattagtgggctaaaccatagctaaatttcactaatcataattagtgaaattttggctccaaatttggctccacaaattcaaattcaagtgaaatttgaatagaaattcaaatttccctccaattttgtgtgacacttaagctataaatggaggccttgtgtgtgcagtttttcaacttgatcatttgagaattacacttcaaagttcatacctcatttgaggcttgaaatttcgtgctccttctctccttctccctccactcatcttctcctaccttcaagctcttatccatggcttcctatggtggtgagcttgttcttgactcatcttctcctttaaagtgacatttccaatcatctttcttacttctccattctgctgccattgatcttcaagaagtaaaggact

SEQ ID NO: 5845 - DNA, 341 bp, Glycine max
  unsure at all n locations
agctntcaccagatcatataagataaatgctttcangcaatctgcagatatatcctcccaaacgtcaaaattctccgctatataatcaacctttccatcactggcacgtggagtgaatcttcctccatggtgcaatactaaagttatatggtcattcattctacacaatcagaaaccgcanacatggtcagatattaagaaaataaaaaacctacctcanaaagcgtgaagacattgacattgtcaaaaaccgcgaagacacaatcaanaaccaaaaacattgtcatctataanaacagagcatcataaacgaaattaataaacgatcataaacctcccta

SEQ ID NO: 5846 - DNA, 441 bp, Glycine max
  unsure at all n locations
tcagaccaaagcaacataaaatctaggtatccaaaacccctcaatttaatggattttcaaggtttgagaagtgaaattgagaatgaggtaaatttgggccaaactctcacctcacacaagtctataacatcaatctaaacttgctcaaactggatttgcacctaaaattccaccgaatcaaaatttgactcctcaacacccaattttaccctagaaatggctctttgttcactttggtcatttgtttttctctcttgcacaacccaagcttcctcataagtcctaaatgacatttcaaactaggattaactcactttaacctccaaataccactaaatccagatttggccttctgactctcaaaaactcactctttntccactcataacaccatattctcactttctaaccctaggttaactctacccttcatccctagca

SEQ ID NO: 5847 - DNA, 411 bp, Glycine max
  unsure at all n locations
agctgtagttgtatccctacttttaagggtattctngcatgctgattggtttttattatcttgtgcctagctntttagttatcatgcatattgactattgagctcctgttaggtcttattgcgctacgattggttgggtcttgttggatcctttggttgtttgggttggatccaaaacatataacaaatattttttttggtacagctgataataatactaaaacttcattntatcttagtttcgtcatgcagtaaaataaaaaaaatcttagtttcgtcacatttcattacatcctaatactaaagtanattcatataataattacttgtttctaacattattttctacgaatccctaaaaaaccatgtatgtattttatattctcttccgttcctacaagctatttttgc

SEQ ID NO: 5848 - DNA, 432 bp, Glycine max
gttccaacatccaagcataacaacattcaaacagcataagctatcacagccaagcaaaacagagcaaaggcagaaaactctgctcaacacatcaacccaaatcacagcttttctcacttaaagaccacagtaacaattcctttgatccaattcgttaaccgttggatcgactccaaaattttactggaagtctatagtgcataagcctacattttgaccgttgggatctactagaaaacatccagtactcattctgtactactctttccacagcgaaccacacacaagcattttctgcaccaagctaaaatcctgctgcacctattttgacagcaaaattctgcataagtgcagatttcgaaaatcacactttccctcatccaatcttgctcaaaacagatactacaagtcccaaatcatgtatcatacatg

SEQ ID NO: 5849 - DNA, 383 bp, Glycine max
  unsure at all n locations
agcttctttnggaccttgaacaagcaatcatctcctctntcagaaccatgctatgtgctcgcgactggtccctttcttcccttcgcaacttgagttcattattgctaccccatagaagctccgcgaaattgttccggccatactcttccttgcgagccctcttggtctctttttcaagggctcttgcggtaattgcattctcttcccgtaacccggcgcactccttccgaacgtgtgtagcagccaacttgaacttctccttggcgagttntgcctttcctaactcgctnttgagagcttggacttcctcgtcctcttccggtgcttcaaaattctcttcgctgacgacttttaactnggcgagccaatctaaacctcgtatg

SEQ ID NO: 5850 - DNA, 416 bp, Glycine max
tccattggttgagttttgcttcccttttcacgctctgtttcactccctacaagtaagtgcactctgccttggttatttggctctccattgttgtgttttggtgctttagttgctcatattatgcgaaattcgcgaagcaattcacatatgaaaccatacttgttttcgctaaattaaggggttgtaagggatggccttaggcctatgttgcattctggagtaatggggcatgccacattgcccccattctcttgctattcatgcctaaacatgtgcccaccaagtgctcggtatagggacaacatgtagaggttaaaatgagtgcctgaatgcgaatctaggcctaggaacccaagcttttgatttcaatacaagaaagcgtaaaaatgagggcattatgataggaatttcccttt

SEQ ID NO: 5851 - DNA, 407 bp, Glycine max
  unsure at all n locations
agcttggtctaaaattcctcgaaaattagctttntatgattatatcggaaataatccagcaaaaggggggttatttagagcacgttcaatggacaatggagatggaatagccgtcggttggttaggacatcctgtctttagagataaagaggggcatgaactttntgtacgtcgtatgcctactttntttgaaacatttccggttgttttggtagatggggatggaattgttagggccgatgttccttttcgaagggcagaatctaaatatagtgtggaacaagtaggtgtaattggtgagttctatggtggcgagcttaatggagtcagttatagcgatcccgctactgtgaaaaatatgctagacgtgctcaattgggtgaaatttttgaataaaatcgtgctac

SEQ ID NO: 5852 - DNA, 462 bp, Glycine max
tacttatcttatagtttaggtgctttatctgttattggttctattgcttgatgctttgtctggtttaataataccgcttatcctagtgagttttacgggcccactgggccagaagcttctcaagctcaagcatttacttttctagttagagaccaacgtcttggggctaatgtaggatctgctcaaggacctacaggtttaggtaaatatctaatgcgttccccgacaggagaagttatttttgggggagaaactatgcgcttttgggatttgcgtgctccttggttagaacctctaaggggtccgaatggtttagacttgagtagactgaaaaaagatatacaatcttggcaagaacgccgttctgcggaatatatgactcatgctcctttatgttccttaaattccgtgggtggcgtagctacagagattaatgcaggcaattatgtttctactagaaga

SEQ ID NO: 5853 - DNA, 399 bp, Glycine max
agcttgttcatatagtttcaacctgaggttctttaaagacttagtaaaaatatcagccaagtgctacgagatctatctttatgtgtttagtatgttcatggaagactaaattagatgcaatgtgaagagagcaacttgattttcacaaataagcttagtgtcttgagtgtctccaaactttaattgttggagaagttgcctaagccatgtaatttcgcatgcaacttctgtcatggtatagtattcaacttcagcgctggatctcgcaactatatttttgcttttgcttctccatgagatcaaattccctccaagcagaacacaatagcctgaggtagaactcctgtccaatcagcactagagtaacaaacaattttgacattgtcttcgtcttcatat

SEQ ID NO: 5854 - DNA, 409 bp, Glycine max
tagagagagaaatgcgtagagagagaaacactgtgtgggggagagataggtctagaggaaaggcatttcaaagtgacggagagaatcctatggaggcaacccgacggctttatgccagagacataggaaaagcccatcaacactatgttgtgacgaactggagagataatatggatatcacatactgttattttacccattttggagatgatgttacagaaagggagctatggtatcatttcaagaagtggggagacgcccgggagatcttgataccacatccgtataaactacatgggaagaaggtatggacttgtcctattcaacgggatacgatatactagatacaccgtcaggcagctggataacacattaaatcggcgggctgaagctatatgttaatatccct

SEQ ID NO: 5855 - DNA, 431 bp, Glycine max
agcttataactgacatatgccaatgcatgctctttccacactacgtggtggaacaataatgtgtcatgatgccaactcaacactacatgcattgggaagaagaatgatcgatttgcaagtaattaatagtagtatatatattagggaattgtagtcttctgaaaaatttcttaactttttttatcatcttatttttaaaatattagacttaatttcacttttttcttttaaatattatgatagtataactttaatccttttatttttcattatggtcaataacttggataatttttttccggaaccaatgggattctaagagagtaggagttataaagtttacctgatgattgtgaaaggagattaagcataaagagagaaggagagataataatggatttgaatctctcattaccttctaaaaataatat

SEQ ID NO: 5856 - DNA, 436 bp, Glycine max
  unsure at all n locations
gtctagctnttcattggtgtattttgatctccttttggtgctctaaaatgtgggaatgtgctcaaatatgtggggcaattctggtttgttttcttgcttgtttgggttggattggaggtttgtatgggatggccctatgcctataatgcattttgaagcaatgggacatgccacattgtccccgttctcttgctattgatacctaaacgcgcacccaccaagtgttcggtgaaatgcctcaatggaattagcgcgtgacctttgtaaggaaacaacccatggggcattttggttcgcacatattttctatttttcgggacatgcattcattcccgataaaggttacagtaattgccccacatatatcctaagcttaggaaccagagtgttatgctatagaacacactacgaggtgcatattgtgtaaagttaccct

SEQ ID NO: 5857 - DNA, 442 bp, Glycine max
  unsure at all n locations
catgcaagcttaccaccttcaggaatccagctatgattccaaaattgaatttgagctctatcgcctatcggtccttcataagtttgttgcaccttcacccaactgttacaaatccctttccacaaattagaacccgccctattagtatcaataatgggtaacatgtcatcaccacacttatacttcgctctcatgatttgaacccttaggtcctctctactcaacataatgcccaaccaatcttcatcatatacgaagtgttaaccatcctagatggatctaggaaagtacacagactgcattgcataggagggtaacgcttgaagaacagacgcaacaatttatatacatatttataaagaaaaacaaaaaatctctctctcctacacatttatcacatcataataatgaagtnaaatacactattgtatgtgtatctctt

SEQ ID NO: 5858 - DNA, 548 bp, Glycine max
  unsure at all n locations
ttacatatgatcatcttattatcatcatttattctcctaaataancactactaccctgaacgcngtganctcgtgttcantcctgtctctattgacacacaagctntacacatgggcactaggctcacaatcactgtgttctatacacatagatggacgtgtcgccacagatacttgagagagggcgagtgaggtatagtcgtatagcttttctacaatgcatatagaactctatatgactcatgtctcatgctatcataccgtgacgtttgagagacctctaacatgtaggtcttgacaaactgtcgacataacatcggcttcacatacctctatttcacccatcattcaaggatgatacacaaacgggctatggtagagattaacacattggagattctgggagactctctcccatccgattatccacacgggaaaatgcttggccctgttattcatcggtactatattcaatacactgtaggtcctggtaacccttattgtcggcgtacctatgaaaacccttagttcgcagtacaacaccgacg

SEQ ID NO: 5859 - DNA, 201 bp, Glycine max
agcttgtgggagtactgagactcgcggaaggtttacgttgtgttaccagtctacacatgccgacaagaggagggtcaccctagataggaaggagagaagcctggcccatctaccatggcgaggactacaagtggaatgggtcctcattcgtcaaatcattgaaagctttgtcagtgcatgacggatgtgcgaggatcaagt

SEQ ID NO: 5860 - DNA, 579 bp, Glycine max
  unsure at all n locations
catctcctatatctcttactttctatttatatttcataactcctnaacaacaacatacgacatgaatgagtcctgcggaccctacactactcaagcctccgtcttctatatcgacagtatatatcatgtcgtgcgccttacatcaccactatggcataggcaacacgcatacctctggagagcacacacgtggtgaataaccactcttgccacggagctcttgatcatggatctaatcaccatatgctgctactcaacctgctccttgctaatgtctacgcacctcacgaccggaaagactacagacagcacttagctcgagttcactataacagtaacgcttatgctctctcaaagagccgactagtacacctgtctacatgggcgagacacgatagtgatatcagatattatatatgtcgctaaacatatcagctcacagacagaaagctgaacacctggatgcgtaactgacctgacaattgcacagcctgggctccggagcctatgaccacacagtctcatacctcaagtcgcgactcacatgctaccacatgacaagagatcgacctcatatgg

SEQ ID NO: 5861 - DNA, 248 bp, Glycine max
tatgacgacgctcgtgatgttcatgtgctgaaattgcctatggaaaactggttgagatgaagggtcaaactaaccttaggctagaaagggagaatgtggtgttagaagtggaaaaagagtgaattttgagggctggaaggccaaattctggattggtagtattagacgctagagtgagttaatcttaacttgaaatggcacttaagacttatgacgaaagttatgctgtgctacagagataaaaaatg

SEQ ID NO: 5862 - DNA, 567 bp, Glycine max
  unsure at all n locations
actctattgataattactatctataattcaanttttgtactactactactctaccataccactacagcgcttgaatcgtttctgtaccgtcctatacatgctcatgctggaggcatatacatggaagatgctatgatgccattcggatattcttctggagctctataaagcggaaagagcgtacgctatatgagaggcacatgtggtacgctttgtagcttgtgagggctggagagacggactgtatagatggccctatgccttatatcgcctttagaagcacagggacatgcctcatctctcccgttcattcgctattgacatcaaagctcgcactcatcaattgttatgtgaagcgcctcattggagtagaagcgtgacctttgctgggaaacactctatgggacgatgccgtctgacacatcttctatttatcgtgacgtgcatcctctcccaaaaagttacaatgtatgaccatatatatctcaggaaccaacctctattatgtctcgaaccactacatcggcgagtcggtaagtgaccttttatgccgctacacattgagcc

SEQ ID NO: 5863 - DNA, 406 bp, Glycine max
  unsure at all n locations
agctngtcaccaatgtgagcatcaacaaggacaccagactcactcctgcagctgttggcaagggccctccctacttcactatcatcatctggctggntcaccacaagaggacttccacctttganaacctcaagcttgtttatggcaaatgaaccatcagcttcaaccacctccttgaagtcttgcaggcttggtgcatacactggaatagtgaaactgtctcttttctcactgctaattaatccctgggattaagaatatgaattagtacatgtaccttagacatatcaatacataaaattaacaatatactggatgctttaattggttgaaaaatgcttaaaggagacaggaattgaccattctaaacccaaattgaaaaacagaaaactaatgacctcataac

SEQ ID NO: 5864 - DNA, 244 bp, Glycine max
tgtcttttttggctcacgatcttgatacatattgcatgcgatacttgtcttgacacgctgtatataatgatgatatggatctgcttgggaatgagccgaagagtttgagtcattttagaattgttggtgacagtcctttcaccatgtatgaaattcaggtaaagaacgacttatactgatcaacatactgaattgggaccacaagatccttcaatatgctttctgactcttttactaacactta

SEQ ID NO: 5865 - DNA, 348 bp, Glycine max
  unsure at all n locations
agctctatanacgcgggtctgggagacaaatgtatagtgttcgcgatatgcgaagatgatgttctgagtactttggatttggtacgaccatgccctcctgatttccagctgggaaattggcgagtggaggaacgccccggcatttacgcaatgagcataatgtaaacctttacggttttaaaagctctatagttgggcctaggctttagagattttcctttgataaggctttgtgtcttttgtttttgaacttataatacaaggatctttcttcatctgttcctgggctctacccattctcattcatttgcatgtttacttctttttctgaaatgacagatccgatga

SEQ ID NO: 5866 - DNA, 378 bp, Glycine max
tctatactatatacaagaatgaagctctgataccacttgttggacaagtggcctcagatatcttaagaaggggggggggggatgaataaccacacttcccacatagctcttcataaagttactaatcaccataagcttctattcaacactcctcttgctaatgtttctgacacgacttataggaaagctcacacattgcacatacctcatctcccacataacattctatgtatgcctctaaaattccaggactaagacacctgcctaaaacggagattaacgagacgaatactagatattatattgcttgcattccattacatcattacattcttatatatatgcacatgaatgctgaattgctactctaattcctct

SEQ ID NO: 5867 - DNA, 374 bp, Glycine max
  unsure at all n locations
agcttgtanagtttagtcaacttttagaatttgatttatatttgtatttaattatattttggacctatttttggacttgtaatggtttgcgaccttccattgctatttttaagtcttttaattattatattattagactacgacccttctgtttaactctatgttattctttctgctgcgtacaaatgtgaggtgaagtcccacattgtgtcaaagtataaaggttgagcaccatataagtgaggagaaaacccatatacctgaggcctatgggtttgggatagagcgtggtgtcacgtcaccttatgtggtggctcgtggtccacaggtgtatcccttgaatctttccaataatttgtatcatagtcaatggg

SEQ ID NO: 5868 - DNA, 305 bp, Glycine max
tcgaactgacaatatatatcatctgagcctctttttaccactaggatcgtgaattggatatttctgtgttacacacactaggtgaaatgagattctcgctccggaattactcgccttggattctttccttatctgattgtcccttctctgaatctttctaaactccactcccctcactaccagaaagactacaaacagcacgtagcaagagttatctagtctctagcacttatgctctctccatgatccgaatagtccccttatctacatgaacgtttgaagagagtgatataagatattattta

SEQ ID NO: 5869 - DNA, 292 bp, Glycine max
ggcatattctctgtaatgtccatctagttagcgacctgcgctctagatagatacatgtgtaacactagatagaaatgagagacttgtgagactcgcttcggggtgcagaatatgtgcataagatccttctattaccacgccacttactatttgtctaactcgcagactatgactccagtgaagcctcctctcttagctccctacaccaagaactatatctgtggtgaaactatttactccatgactgattatatattgggtggagatatatctcaacctgttacctgtacct

SEQ ID NO: 5870 - DNA, 403 bp, Glycine max
  unsure at all n locations
agcttgtgagagaaaaactattcggcatttacagnaatgtttgagtagctcaagcctattccaactagtcccattctcccagacaacataacagacattgacatcaaaatctgattccgaaaatgctcaagcctattgtcttactacttccattgaaatgatatttatggactttgttagagtgaattatngtatgattgtattctgatgaattttggattacaaataaataagttagcatgcgtattatagaaaatttatggacctctattatggtctcaaatggttcattcctgtganagctccatgaatgatattatccaggactttctatctgtagtctcttgttgcggattgcagaaagttattatcttggtagatcttaatgtgcaaagctagtttc

SEQ ID NO: 5871 - DNA, 480 bp, Glycine max
  unsure at all n locations
tacggacactatgaatactaagctngacaacatatggactggaaaatggatttgaatcctgtattttgtggctcacgatcttgattcatattgcatgcgataagtttctcgtcacgctgtatattatgatgatctggatttgcaagggtaagagccaaagtgtttgaatcattttgaattgatggtgagagtcctttcaccatgtttgaaatccaggtcatgaacgagttatcctgtttaacatatgatttgggaccagaagattcttcaatatgctttttgactcttttactcccaattatcaactgttgttgaaagttacgtctcttcttacctgttgaaaaaaagccagtactgttacagctctcaacacttgaatggctgtcattctcctcccttgataacattacattcgcatgcccatcggataacgattattccttgcctttgtttattgccatatgaattatgctatgacat

SEQ ID NO: 5872 - DNA, 420 bp, Glycine max
  unsure at all n locations
agcttgtttgtccggtgcagcagtaatgatggctcgagttattgtggngagcggnntacgaacccgaatgggtttaggcaaagacaacgacggcataactagcctgataaatgccaaaggaaatcgtgggaagcatgggttacgctataagcccactcaggcggatataaagaggagcgttgccggaaggaagagcggaagtcaaggctcgcggttgagacaagaaggtgaaggaaacccaccctgccacataagtaagagctntataagcgcgagcctgggggacgaaggtcaagtcgtcgctatatacgaagatgacgttccgaatacgctgganttggtacgaccatgcnnctctgatttccaactgggaaaatggcgagtggaggaacgccccgacatttacgcgacgagcataat

SEQ ID NO: 5873 - DNA, 471 bp, Glycine max
  unsure at all n locations
tcaagaaaaagatggcctcagcanattccttatttccagaagggaattctatcaatagacctccaatctttaatggagagggttaccactactggaaaacccgaatgcaaatttttatcgaggcaatagatctaaatatctgggaagccattgaaatagggccttatatacccaccacagtagaaagagtttcaatagatggtagttcatcaagtgaaagcataaccatagaaaaacctagagatagatggtctgaagaggatagaaaacgagtacaatacaacctaaaagccaaaaacataataacatctgccctaggaatggatgaatatttcagagtttcaaattgcaagagtgctaaggaaatgtgggacactcttcgattaacacatgaaggaactacagatgttaaaagatctangataaatgcactaactcatgagtatngaatatttagaatgaatacaaatg

SEQ ID NO: 5874 - DNA, 418 bp, Glycine max
  unsure at all n locations
agctacagaccaaagcaactcanaatctatgtatctaaaacccctcaatttagtggaatttcaaggtttgagaagtgaaaatgagaatggtgtaaatttggagcaaactctcacctcacacaagtctataaccttaatctaaacttgctcaaactggttntacgcctaanattccaccaaatcaaaatttgactcctcaacacccaaattttaccctagaaatggctcttgccttcactatggtcttttgtttttctcctttgcacatcccaagctntcccacagtcctaaatgacatttcaaactaggattaactcactttaacctccaatttctactgaatccagatttagcctttcaaacgctcaaagcatcacacttttccactcataacactacattctcactttctaaccct

SEQ ID NO: 5875 - DNA, 358 bp, Glycine max
ttggactcggatgttctgccgagtcgattaatcatgctggacgctagagattgtatacagaacctctcacctaatctaaatgacaataacctttctctcacaagtgtgattgtgtcccgtaatatatctagatgctcaagattgtaaacacaagctctgagccaattcaaagcgacaatagcttttgactcggatatccgatggagtcatttaataattctagacgctcaatattgaataccgaagctctgagcaaatgcatatgacaatgacttttgactcatatgtccgattgagtcatttaataatttgagaccctctatagtgaatgcacgagctctcaccaaatttaaatgac

SEQ ID NO: 5876 - DNA, 413 bp, Glycine max
  unsure at all n locations
agcttanggacaggtactagcaggtgctagtattctctaatttcgttgcttaaaattcctgcttttatttattagtttggttccttgaatcttattttaatttgcctagtgtcataccctaatttcatccgtgaaccttcatttgctaacattttgattcttgctagccgaatngagctacttaacaccattataagaaatgggcaagaaactcatagtaagggcaaaatggtcgcctgggcccattataagacttatgggagatgcaaccagcttgcctgggcgagcaagttgcttttggagtaagtcaccggctctgctgggcggcaagctcctccctctatanttgtacaaataggcgtgggaagcagaggggaaggggttcaacaccttactgagctattccactgaaa

SEQ ID NO: 5877 - DNA, 489 bp, Glycine max
  unsure at all n locations
atgaatcattgaatcgctgcatgaccggaccttataatctcagctgcacagtatggcctcatgagactacttctttcccgagggagatactataaatcaacctcctagcttgcgaggagtgtgttaccacgactggaaaacccgcgtagcaatatttatagaggagagacactaacatatttgggcatccataaaagatggagcatatgctctctctatgttagaccgacagtgaaatcatagagtaacctagagcacactggactgaggaacaagaagaatnactactatataatttaaatgctatacatataattacaaacggcctatgaaaggatgaatactttttggctgaaaaagaaaagcgctatgatatggctataccttcaatggccgttacgcacacataagtacaagatctggataccacttaacacggaatacaacccttggaagagataatgaactttcatgaatggccaaggattt

SEQ ID NO: 5878 - DNA, 388 bp, Glycine max
agcttctcaaggaagctacctagtctataaatagaagaatgtgtaacacttgttgtaactttgatgaatgagagtcttgtgagacataactcaaagttcaacttctctctctttttcttccttaaatttcgtgctcccccctctctctttctctccctctttcttttcctccattgaagcatcctctccaagcttcttatcccagactcatctgggtggtgaagctcattcttccaaggcttattccctagtggatggcgccgcctcttacctcttctcctttgtcttccgctgcatctccatggtggaaaatcaccattaaaggacctcattgaagctcaaagatccaccctccatagaagctccacaagccagctttatcatcctc

SEQ ID NO: 5879 - DNA, 459 bp, Glycine max
  unsure at all n locations
tctggtgggacatcttgacttgctntccaatctgacattcatcacagattctgccttcttctattttcagattgggaatgcctctaacagcacctttgtcaatgattttcttcatgcctcttaagtgcagatgtccaaatctttgatgccatattctgacttcatcttctttggaggatagacatgtggaggagtagctggtttcttgaggtgtccataggtagcagttgtcctttgatctgctgcccttcattagaacttcactcttctcatttgtcaccaagcattctgactttgtgaggtttacattgaatccttcatcacacagctgactgatgctgatcaagtttgcagtcagtcccttcaccaccagtactttgtccagactatgaagttcatcatgaactagctttcccattccaatgatctntcctttatagccatctccaaatgtcacat

SEQ ID NO: 5880 - DNA, 443 bp, Glycine max
  unsure at all n locations
agcttatcgtaatcgattagataattattttttagacaatgactggtttttcaggagtctctactttaatcaattaccaggtgatgtaatcgattacttctctcttaaaagtgtgtctgaagtgatcaataacactttatcgattatatcaagaatctaattgattacattgttcttgaaagatggtcagattttgggaagaatactttaatcgattgaaatgataatataatcgattacttctttgaaataattgattacattgtatatttaatcgattacatgcgattataactattttctctataaatagccaccttgtgttctcacttcaatgtggaaaaattaagtgtgaagatatatgagttgaagtaacagataaagagatnagaacaaaagtgcttagatacaatgtgactcacaacttctaatctttgaatatg

SEQ ID NO: 5881 - DNA, 479 bp, Glycine max
  unsure at all n locations
aagcttgtgcaatctanagccagtcagtttccaagatgaaatcntggaaaactggatttcttgttacttgaagggtccatctcagggacaagaacttcagcaattttggggaaaggaacataaggaagttggctcgtggccgatgccaagacgtttccttctaaatcacgacaaactacgcccatgccaattccaataccgttcttgcaagcggcatcaaagtttaattntattaattgctgatggtggacaccatctattctgatgagtcactgttgtggcggctctaaagcactgtgtttcggcaaataacccaaaaggaacgatcaataactaagcttatgggggttttcttttgctgaaagatacaattattccttcttcgccagattgaccataacatcccanacatctgcttgtgcaaagccncctattcttgtgttctaagcatcataccagccaagtattaaacgatgtgc

SEQ ID NO: 5882 - DNA, 374 bp, Glycine max
agcttgtgtacttgaataatagaataaagaatctgaacaaacttattcttaatttttttttctcaccctccatttattctttttacaattggaccatatgtcgaaccatagggctcttgtgaataattgataggaccgctgttgttcaagggagggcttgttgctaggacaatattattgctatctatatcaacattaacaatcaatgatttcttggacaaatatcatgcagactgaaaactaaacagtgttaataaataaaagaggactttaattgatcctcttttaatcttcattatttgtggcactatgcattggacctaaataaatatttatattactatggcctacaagattgtatacatattccattg

SEQ ID NO: 5883 - DNA, 459 bp, Glycine max
  unsure at all n locations
actcaagcttatttaacggccnctacactattattttccaagtttctttattgaaattatgtgttattaatattaaatttaaaaaatggcataaaaaataaaataaaaaactaattgctctttaaaatgctttttttaagttcttaactaaattatgatgtacattcttgcaaaaaaaaaatcctttattgctacctttttaaaatagtgtgttggaggatacccatgatttctaacttgagaccaaaaaatttcatgcaatgataattgtattaacagtatatttttaattatattttgataatttatataattcttaaagaaaaattatgaatatataagcttgcatcatttttaaatatgaagtatattaaattacaacccttagttttttttaggtcttacaactgttagtctttacaaagttgtattttcaggtagtattgagttcaatctttg

SEQ ID NO: 5884 - DNA, 315 bp, Glycine max
ttttttattcatttaatcttgtaatgattgcttccttgaaacggaaattctttattgaacaatattgctacatattggcctatatctgtaaaaccttgctatttccagctatataacaataatcagtctttagcggcactcacctatatcaccggtaaaagcttctacagcctaaattacgccagttcaatttaattgcagctcaactatttagcagccatatatatttgccgctcaccgaaaggtattcttggtgttgggatcatcgagtctgctaatatgggtacatcctagtcttttaacatgcataaaata

SEQ ID NO: 5885 - DNA, 221 bp, Glycine max
atcaatcctattatactttgcaaagacaaccaagtaagatgagtcattctgcctcgtcaaagtttaattataagggatggccataaaacttaaaaaactggagaacaatcaccacatgcattgcacctcatctgcgtatctttttcgctcacgagctgcataagaataacccatgtactattgcaatccttcataagaactgaagaatccatgttagcatc

SEQ ID NO: 5886 - DNA, 373 bp, Glycine max
agcttgtaaggcttggatcttcttcatcaatagagtcatttgcttcttgaagatcaatggcagtagaatggagaaggaggaacggtgattggagatgccactttgttagtcatcttatacgactaacttttgtatagaaaacttttacaaaatgtatatattttccccaatttatggttatttttgtaggattctaaataaattttgctttgtttttatctgtgctcagtagaagccttgtgtatggaattaatgtcaatttctcttcaatttcaggcaaaaaggagttattttgaagaagtgctaaagttaatgtctcgctaagcgagctcaatgcgcttagcgagtgtcatcctctaaccaagtcatcaat

SEQ ID NO: 5887 - DNA, 456 bp, Glycine max
tgtcaattgaacacatcaatagccttgcatcctttctcaccattttctctccaaaaatcaaaacttggaacctcattcttccccattatgcatgagatcttcaaggaggaagaggccacaattttcatcttcttccaagctccatcatattgttttgactttttctctcaaagccttggtaagaagcccttaaacctttcttttccttctaatttctttctcatttttatgaaaaattcttacttgaggttccaaatttatttttcatcctttggaagcttgagacttcaacatctaagctttttttccttaaccattttgtggaagcttcactcaaggtaaggggagtctttccacttcttaaaccctaaccttgttgcctttggaagctaggcttcattacatgttgtgatgtttaaaatttcatatctgcggctggacaacccaatgtgattc

SEQ ID NO: 5888 - DNA, 418 bp, Glycine max
  unsure at all n locations
agctttgagaaaattgaattgacaataactttatacacggatgtccggttgagtattgtaatatatcgagacgctccaaattgaaaacggaagctcgtaagaaattcaaacgacaataactttttactccgatgtccgattgaatcgggtaatatatcgagacgctcaaaattgagactagaagctctgagcaaattgaaatgacaataactttatacacggatgttcggttgagtcccgtaatatatcgagacgctccaaattganaacggaaactcttagaaaattcaaacgacaataactttttactcggatgcccgacatagtgtcataatttatcaagagatgctccatattgaatacggaagctcgtatcanattcaaaccgacaataactcttgactcggatgtatgattg

SEQ ID NO: 5889 - DNA, 378 bp, Glycine max
  unsure at all n locations
ntgggatctcaatttgagcgtctcgatatattgcgagactcaatcagatagtcgtgtataaagttatcgtcgtttggatttgctacgagcttncgttntcaatttgaagcgtctctatatattacgggactcaatcgggcatccttgtataaagatatcgtcgtttgattttgctacgagcttcccgtttcaatttgaagtgtctctatatattacgggactcaatcggacatccctgtataaagttatcgtcgttgaatttgctacgagcttccgttttcaatttgaagcgtctctatatattacgggactcaatccgacatccttgtataaagttatggttgtttgaatttgctacgaagcttcatttccatttcg

SEQ ID NO: 5890 - DNA, 361 bp, Glycine max
agcttaacaaacttagaaatcaagtggtcataaattccgaaatatagggggagtaaacgcacatttttatctatatacaattgtttgttgcttgcttgaatcttgatttcaggtattgtattgtcatcatcaaaaagggggagattgtagatgcaattgcctttggtgttttgatgatgatcatgatgatgaaattgatgcgaatgggcttttcaagattaaattcaagacaatacttcaagattacaagtcacaacatcaagatggtcactagtaaattaggaagggaattcctaattgaattagcaaaaggtttggccaagtaatttaaattaaaaagtgttttcaaaggtttactctc

SEQ ID NO: 5891 - DNA, 352 bp, Glycine max
  unsure at all n locations
ntntggagtagaaacatgggaccaactcattntatttcataaaagaagtcgtatccagtcaaggtctgagagaccatacaagtttcctaacgatttctaattatgtgggccattaagtctatcatatgctgacaatagccgagaagcccatgaatctcttcgggggtggagtaggcgtctgccatcgccttggccttggctaacaagcggggaagttcttgactcccgttcaaggtaagagcaaaccggtccatccacatggttgcctcttggtgtaaagagtcgatcacccttcctctagcctctttttccgcatatacttgagcatactcatccgcgattctatgctcgt

SEQ ID NO: 5892 - DNA, 430 bp, Glycine max
  unsure at all n locations
agctntcataagtgaaattaggtgcaaccatctccctaagagtcctctcacgagttggaggttgagccatgttctcagtatgaaaattagtagttgaatgctcaaaatcagaatatttagaatcaccagcaacataatgctcaaaaatgcatagaacgatcaggatgcacaccattcctaactaatctatgaaaggttctatctatttcaggatcaaagggttgtaaatcacctggatttcccctagtcatgcactatatgccgcanataatgtgttcttaaataagcaccagcggagggttaaaactacaactatagtcaaatgatatccaaatgagctgaaattttgtgaacaacaccctaanatcatgnaaagatagcacaaaaaatttcaaacanaaaataanattctaactatgaaaactactta

SEQ ID NO: 5893 - DNA, 394 bp, Glycine max
  unsure at all n locations
ccttggatcttcttcatcaatggactcctttngcttttgaagatcaatggcagcaaattggagaaggaggaaaggtgattggagatgccacttcaaggagaagatgagtcgagaacaagtttatcaccatatgaagccatagataagagcttgaagattggagaaggtgagtggacggagatggagagaaggggcaaaacatttatgccaaatgaggtctgaactttgaagtgtaatttctcaaatgatcaaagttgaaaaaatacacacataaggcctctatttataacctaagtatcacacaaaattggagggcaatttgactttctattcaaatntcacttgaatttgtggaacccaaattggagccaaaatttcactaattatgattagt

SEQ ID NO: 5894 - DNA, 331 bp, Glycine max
  unsure at all n locations
agcttcaagaaaaagatggcctcagcaaattccttatttccagaagggaattctatcaatagacctccaatctttaatggagagggttaccactactggaaaacccgaatgcaaatttttattgaggcaatagatctaaatatctgggaagccatagaaatagggccttatatacccaccacagtagaaagagtttcaatagatggtagttcatcaagtgaaagcataactatagaaaaacctanagatagatggtctgaagaggatagaaaacgagtacaatacaacttataagccaaaaacataataacatctgccctgggaatggatg

SEQ ID NO: 5895 - DNA, 387 bp, Glycine max
  unsure at all n locations
tctttggaccttgaacaagcaattaactcctctntcagaaccatgctatgtgctcgcgactggtctctttcttcccttcgcaacttgagttcactattgctaccccatagagctccgcgaaatttgttccggccatactcttccttgcgagccctcttggtctcttgttcaaaggctcttgcggtaattgcattctcttcccgtaacccggcacactccttccgaacgtgtgtagcggccaacttgaacttctccttggcaagttttgcctttcctaactcgcttttgagagcttggacttcttcgtcctcttccggtgcttcaaaactctcttcgctgacgacttttaacttggcgagccaatctaaacctcgtatatggactttc

SEQ ID NO: 5896 - DNA, 431 bp, Glycine max
gctttctcggggccattttctgcgaaggcaaacatttggaaagttagttttaccaagaaatgctactcttaaaacaaaaatggcatacaacctcctccaataaacacaaacatcaatgtaaatttagagcaaactcatgcacatacttccttatgaacattcactcgcacaagatattcttctacccaaaaaaatgcacccatgcgcaatcaaggaaccttcgttacctagattatttatatgtacttccaaggtgtatttgctacctacatcacatgcatttccttggctaaatttacatacatgcatactcaaagcatcttggctaccaaaaattgcacacgtgcacattctagtatttctaatacctatgcatatacaaactttgtgatgaatcttggctatctacacaataaagtgctacatttcat

SEQ ID NO: 5897 - DNA, 321 bp, Glycine max
  unsure at all n locations
tcttagtctcagatgatgcagctgagnttgtagctacctcatgcactcctctaatgactatggcatcatttctggcgctaaactgctgagagttggaagccatcttctcaattaaatttctggcttcagcaggagtcatgtttccaagggctccaccactggcagcatctatcatacttctctccatattactgagttcttcataaaaatattggagaagaagctgctccgaaatctgatggtgagggcaactggcacacagttttttaaatcgctcccagtactcatacangctctctccactgagttgtctaatacctg

SEQ ID NO: 5898 - DNA, 436 bp, Glycine max
  unsure at all n locations
agcttcgaatgggcattgtttcatcctagtctccattgattactttactaaatgggttgaaactgcttcatatgctaatgtaactaggaatgtggtggttagattcataaaaaatgagataatttgcatatatgggttgcccagcaaaatcatcgctaacaatgccatcaacctaaataacacgatgatgaaggagttgtgtgaggattttaagattcaacaccataattcgacaccttaccaacccaagattatcaatgtagttgaggccaccaataagaatatcaagaagatcattcaaaagatgatagtgatgtacaaggactatcataagatgttgtcgttctcattgcatggntatcaaacttctgtgtgcacttttactggggcaaacccaatttcgttggtgtatgggatggaagctctccaccctttc

SEQ ID NO: 5899 - DNA, 457 bp, Glycine max
  unsure at all n locations
gatgtcagctctacttactgcattnntattttctgttattacctgatgcatcttgtttctacttacactaagaattgttttactttgtattttgaaattgcatatagttatgagtgaggactatgtgtgccccacactctgtttcctacattctagaattgttagctttgcatcattgtgttggctatcgattttatcgtgcaaagagtcgaggccaatcatgagattcagaaggaaaccatatagaaatgtaagatttattttacatttgtatcaatatgcagttatctgtgcaaattntggttgcattgaaatgaggttgtgattgccaattgtatcaaccacaattaacccatgtcaaatggcaatggttgtaacacaactgccaccacaatctataaccttggctatataagagacttgtaaatgacatgaaagtatttagtagtgtggagta

SEQ ID NO: 5900 - DNA, 378 bp, Glycine max
cgcttggaacggacacgagtatatacgaattatagacagctttatgtgctttctgacctttgcgaatatgacctaccgaggaatattccaccgaggccttatagtctatatctatatttgtaccttttctctgaactcacaatgtgttcttattcactactccattaccagacataaggaattggaacaaaacagcacatgtgcactttacttttctgcgatacgccaagccttgacagactatacacatgaagttatcgtatgacagagagtgatattgatatgaacaagactacatgcttactaactagagacacctgaacgctcatattttatagagcattctctatctagttgcgggcgatattactttaacat

SEQ ID NO: 5901 - DNA, 294 bp, Glycine max
gtgcaccacagagacataacaggctctgtattagcactaaaaggatcaattcaaaatgcttacataacttcaaaagtatatcatattgctagcccatagtaggcacatcgatattccacttggatcatatgtatctaggactcttcttgatcactcttggtttgaacaacgatgtgctgatcaataattcaaacatcttttttgctttcgtagatcttaccttgatgttatgccccttagccaaatcgagttctctctataccaagcccttaatttctgcctagcatgctatga

SEQ ID NO: 5902 - DNA, 214 bp, Glycine max
catgcaagctcgtacctctgggcaatatctttaaaactagtcacttatttagtgatgactttagaaagaatgttcacacacaagttgcttgaataatcgtgacttttggtaaagtatctttcgaaatcactcactggtaatcgattaccattaaagtgttatcgattactcattaacagatgtgactcttcactttgaatcttgaaaaccttaa

SEQ ID NO: 5903 - DNA, 443 bp, Glycine max
  unsure at all n locations
tccttccaaagaaatagganaaggttgctccactaaaattttatgtttgggaagggagagatggatggaaaaaagggttcaagcaaactctacagtacttttgctacaggaagttagaaggtgagatttggaagagcttatttgaactagtcaaaatggcttatgacattcgtataagatatttttattcaataaggttcacaactaagcttatggataagctntcatgttatcagtttattgaataagtgcttaattaagatgttttgtcagttgagcccttaaagactaattacaggtcattcacgtggagctcacaaactggagggctgagttgaattgagacagatgaaataacaggaaaaatatatttgttcaatacttaaggaaacaagtttacanaggcttatcagctaaaatatatgttcaagagttaagatgga

SEQ ID NO: 5904 - DNA, 442 bp, Glycine max
  unsure at all n locations
agcttattcgaagccccttgaattgattgtctgttcatgcatcctcaaccattgagttcggagccccatgaattgattgcctagcgctgttcgtgcatcctccatcatcaaatcttattcggaacctgatgagttgattgccattcatgcatcctccaccattgagtccggagccttacgaattgactgccaagctctgtttataaatcatctatcatcaaatcttattcgaagccccatgaattgattgccattcatgcatcctccaccattgagtccggagcgccccgaattgactgcctagcgctgttcgtgcatcctccagcatcttattcggagccccaggaattgattgtcgtttatgcatcctacaccattgagtccagagccnncacaattgattgcctagctatattcgtgcatcccacatcatcaaatctta

SEQ ID NO: 5905 - DNA, 464 bp, Glycine max
  unsure at all n locations
ntgcagaattggtcttcgccagtgaaaggatcaatgtgggttcgaaaagaggcttatttgatcatcctactangacgactgagaaaactggggcaaataaagagggtgaggatgagggagaaacccatgctgtgactgccattcctgtacggccaagtttcccaccaacccaacaatatctttactcagccaataacaaactttctccttacccaccacccagttatccacaaaggtcatccctaaatctaccacaaagtctgtctaccacacttccaatgacgaacaccacctttagcacaaaccataaacaccaaccaagaagtgaattttgcagcgagaaagcctgtagaattcaccccaattccagtgtcctatgctgacttgctcccatatctacttgataattcaatggtagccataaccctagccaaggttcatcaaccttcatttcttcgagaata

SEQ ID NO: 5906 - DNA, 445 bp, Glycine max
agcttgcacacaagattctccttggctggcacttcaaaaccttctggttgggtcttatagatgtcttcctctaaatccccatgcaagaatgcagttttaacatctagctgctccaagtaaagattctctgcagcaacaatactcaaaataactctgatggtagtcatctttacaactggaaaggagtctctgtgatatcaattccctgtttctactgaaaccctttcaccacaagtctcgccttgtatcttcttctaccgtcagattcttcctttagcctacagacccacctattttgtaacgctttctttccttctggcaatttagttaaagaccacgtcttattcttctgaagggatgtcatcttatctttcatcgctagcttccactcaatagtgtcattcccctgcatagcctcactgaaacattctggctcaccaacatc

SEQ ID NO: 5907 - DNA, 466 bp, Glycine max
  unsure at all n locations
gcatggaagagttagtcttnctacttttatttgntgaccatatagttgtacctggagatatgtcgcgggggtcaggggaccttgnggacgtcaggtggggtgctattgcccaaaaccaagcttgaccaatcctgacccaacccgggcatagtcagttagtgagaacctatgacgtacctaagcaggcgagctcttggcagtccaccaataaaagaacaaagtccacgaagcaaggaggcttgtgtggcggctgaccagctatgtatcttgggtggtttctgaaaattaccctctggtaatcgattaccattcgtgggtaatcgattacaaggtttaaaaatggagacaggatgttaagtagcttctggtaatcgattaccaattgtgtgtaatcgaatacacagtatgatagagcactggtaatcgataccagttgtgtgtatcganacacagtgtacctgtacta

SEQ ID NO: 5908 - DNA, 354 bp, Glycine max
  unsure at all n locations
agcttgtccgcataggttcttcgatctatccaggcctgtttatatgcactttttaggcataatcttataattaattatctaatttctctctttaggatttgttacgtataactcccaaattttgaattcagcttattccgctttttttttttataacgcggattttaaacatctagttatatctgacataaataagagatttttacactgtttatgtaataatataatttgtactacacagagtctatatatcaatggaacacatttaaaggctcatattttggttagtatgttacttttttggtagaaaaacgaaaatcacctganatcaacactaattatactgatatttta

SEQ ID NO: 5909 - DNA, 449 bp, Glycine max
  unsure at all n locations
tatacactttatatgtaagccctcattgtattcaacatattattgatatggaaatgatatgattttgctactgtaaaaaaaaataagcactaatattaattttgactacatcttcaaaaaccaaattatggttgtttttataaatgaagaaactaagactaattttaatcaattcttcgagaaccaaaaattcattttaccatcataataataattacttatacacttgtcgttttttttcttttcatgttgggcccataaacatattttttatatattaatcacatgcatcattcattatataagtaattttactctaattaaaaataaataaattctctgtagatatttaacataattgtatacatccaagactcaaattcaagatgattgggtntactcacataataataataataagaagaatagtgataataataatattgata

SEQ ID NO: 5910 - DNA, 403 bp, Glycine max
  unsure at all n locations
agctgtgaccattngacttatatgctccatcttgagggggaatgttggaattacacacattgtatgggtacttgttccacacattgcatgggtacttgttccaataaagaatagtttttttttatcagtaaaactaaatatattatatatataaatgatcaaaagtaccagaggtactagtacatagggatatacatcctcatatctagacaccaaaactgaggtattctagatattaggagaacatgtgttttgttctaattgtaacacccattacataagaaaaccttggctaatattgcttgaccattggtttagatgggttgagaaatgtttctcanaatgtctaagccaagtccaggtcaagaaaacagcttcatcaaacaatctgttagcatcaaat

SEQ ID NO: 5911 - DNA, 406 bp, Glycine max
  unsure at all n locations
tccagatatagcatacatagttagggtattatgcagatatttaagcaatccaagaatggatcattggaaagaaaccaaaagagttatgaggtatttgaagagaacaaagtattatatgctcacatacaaaaggtcaggtcagttggagatcactgggtattctgacttagattntgcagaatacctagatagtttgagatccacttcaggttacattttcatgttagtcggtggtgcggtttcttggcgcagtgccaggcaaacccttactacttcatccactatggcgacaaaatatgtggcatgctatgaggcatcaaatcatggaatatgattgagaaattttgtcacaggttntcaaattgtggaatgaattgaaagaccacttaagttatattgcgacaat

SEQ ID NO: 5912 - DNA, 407 bp, Glycine max
  unsure at all n locations
agcttaactntggagcttactgaaacaagttaaaacgagtttatttgtataaggttcttcatgaatattattttaataagctaaagaaaacttccaataactaagaaggtcactagtcatttacataaatccatataagctcttcatgaatattattttaataagctaaagaaaacttacaataactaagaaggtcactagtcatttccataaatccatataagctcgtacaaatgctcccttgaagataaatttgaggaacttgcctgtttcttcttttgtgtgattatagtctttatctttgaacttttgtctgaactatataggttatctgcaactcatatatgatatggaaccctatttcagaaaaggatgagagactctgcacctaccgggcacgaacttga

SEQ ID NO: 5913 - DNA, 436 bp, Glycine max
  unsure at all n locations
tatacattcaatggcatggatagccatgctaaggagcttatagagcttcttccaatagtgaataggtcttcattgaaaagggataagcctaacttctgataaaaaaatctactaatatgtttgcttccaattttttggttgtcaataatatgtttatttgtgcatgcttgtagttacctactactttggagcaggttgtttctaaaaaagttcatcttttagaagggaataaatattagcaacacattatttttaatatatatatatatatatatatatatatatatatatagagagagagagagagagagagagaagagatcanattgaattgatgtaactttgataacttgtacaccattctataacttcaatngaataatgttntcttaaaactcatttgtggatagaaagttcctttcacatagataacata

SEQ ID NO: 5914 - DNA, 408 bp, Glycine max
  unsure at all n locations
agctttngggctgganaactatataacaacaccaaggttctagtttaggcccctctctctctctctctctcttctctcctctctctcctctttcgnttggagtttgaggcttctcttcttcttttagacactttttcgttttgcaattccagttgttacttttcattttagcaataaaatttcgttctctattgattaatggaaggctaagtctccagcgttgttttctcttgaggatcaagcacagttctctttgagtttctattattactattaaattttgttcactttttcctcttcactaattactctaaaattgctgctattaattcatgcatgcttagtgcttgattaattgtctctgcgcttaatttacattcatgcttaatgatcgntcatgattaattg

SEQ ID NO: 5915 - DNA, 399 bp, Glycine max
  unsure at all n locations
tagataccaccagcatcaaggaattagggcggttgatggaacctctccaaatgcaagctttccgcaagacttacggaaagatcttagaattgaccttagcagaggtatccatagaagccattgcatcactcacccaatactacgaccagcctttgagatgcttcacattcagagacttccaattagtaccaaccattgaagaatttgaggaaattctaggatgtcctctcgggggaagaaaaccatatctttcatccgggtgtctcccctctntgagcagaattgcaactgtggtcaaggattcagcaagaggtttggacagcataaaacagactcggaacgacatggcgggcataccacggaggtacctagaagacaaggcgagaggtatggccgatc

SEQ ID NO: 5916 - DNA, 383 bp, Glycine max
agcttgttggtgagagcaatgtcaagaatgtcaccaacttcagccctaatagttgggcctggaaactgaccgttgattcccatcagaacgtgttccaagcaatctggttttctgatcatgtactccacatcaaacttgtagggtctcactattcctccgattgacaattctaccaaacccaaccatattatgcacccaacaaaaagagctttcaagctcattcttaattaattttgatcagagaaagcctaattagcaatataacaggaaggtatcaagtagtaaaacgaagctattgatgaacaaattgaaagaatatgtatagaggatcgaggatttggattggtggtaccattgccttatatatataagagagagagaga

SEQ ID NO: 5917 - DNA, 416 bp, Glycine max
  unsure at all n locations
ctttcttcttggttatgattgttggattcttgttatggcagctattggaattatggcaggtaggttatcttggatgtgtttgacattctcatcttatgttccttttgtaaccatatcgcttgaatgtctctcatcattagcctgcagatgatatagaggaggtaccagatttcactcttccatgcagctgtgatgaagagatgttggagaaaaattcagtgaaatgagtaatgtgataaattattntggtgaaccaaaggagtttttgttttgcagaatatcaaaagaatacaagtgctgttaacactaacccaagttcccagatcttgaaatggagataatcatcaatctgttgcataaatatgtgctaatntagtgtaaatattngtgtcaacattactttgttgagtttttta

SEQ ID NO: 5918 - DNA, 293 bp, Glycine max
agcttgtaatgaatatgaacatattcttatgatcacttatttctgggcagatttcactcattgctcaatccaactccttgcggcttgtatttccaaccctgattactgccttgtgcaaggcccgaggagtcacctcagattctcttaccttcgagtcactcagcctagccattaatttggcctatattaagaagaattgttggaacctgtatgacccttctgtcacttttccaaggacccaaaaatccagagctagaaaatctgaagacccatctctctctgtccccctactt

SEQ ID NO: 5919 - DNA, 366 bp, Glycine max
tggacttcttcatcctgtttcggagctttgaagttctcttcattgataatatttaacttggagagccaatctaaacctcgaggacgaactttcggccattcatgataaccaccaatgatgccattacgaatgcccctaagatctttatctattctccgttggatggcccaagagaggggattaagatggaacccacgcatgatgcatatgcgaaaggtacaatacagggatgtacatagtacgacaatattcacacacaaatataagcaaaagggtacatgacacttttatgcatggcacgggaaaaatggcatgcatcgtgtatgctccgtgccccttatttaagggacctatatgggagagagc

SEQ ID NO: 5920 - DNA, 374 bp, Glycine max
  unsure at all n locations
agcttaataaaagaacgcanagcataaactgaatcaacacgcacaggaagttcagaatcctgcattctggatacaacacactgcaaagccctccggaagttgttctggtctgagaagttaatatgggcatattgtcctgcaacccatgctgcctgtttttcacaggaaaattaaagtgtagtctaaataataattccatcgcatggttatattgtattttagaaggagactggaataataataaaaaaattgcagcatgcagatctttgatctctctggttttctccctctctatcctccctgttatgttcttccctctttttactttctgtctatcagttctctctcttcccacctanatcctatatcacatg

SEQ ID NO: 5921 - DNA, 449 bp, Glycine max
  unsure at all n locations
tgcagatgctctanggagaattgctgataaattgtagagcatggaggatccgaatagaatagtgtacataacaatttggagtcaacaatagtgattcccataatttatctcaggatagttcttagaagatgaacatcatactagttacccttttttttttaatcttctgtctgcattttgccacttttttgtggtttactactgcactaaggcattttatacacaaatttggaggttactgcattttatttattttcttctttcagtgaggttatatgaatctttcctcggtcaataatagcggttgtacagataaagttactattactaattaaggtacatttttattagaggtatctctttgcgggctcatgcaatnatttgcttctcttgtataagtcatctctccacacatatataatattttttgttgagttaaccttactatt

SEQ ID NO: 5922 - DNA, 345 bp, Glycine max
  unsure at all n locations
agcttgcttcttttggtgcatagaatgcatgcaaaaaaaaaatagtaagtgtcatgaatctctgacataagcttcaaccaattaacattgtttgtatgacaactgttgtagttggacagcaatcacacagtttgtccaccatggtatgctttatgttcctattggttatagttttagtatgctttatgttcctattggttatagctttggtgctggaatgttcaatttggagtccacaaaaggaggaactccatatggtgttggagttnttgctggagatggtacaagacaagcaagtgaaatggagctggagcttgcacagtatcatggcaagtatatatgaaa

SEQ ID NO: 5923 - DNA, 440 bp, Glycine max
  unsure at all n locations
cagcttgtagggggctganagatatgtaaaatgctaaaactaaactttntagttggatctatacaattcacccaacggttgtaaagagtccagggggctgaaagacgatgattatataatgcagaattttgagaatattgttgtatgattgtgctaatcctaattgtattgagaatattgctacatgattttgctgatcttaattgattctatttgtgttaattctgattgtatgtattaattcttattgtattttaattctattttgtatcttgatctcttgattattgggatcacttatttttaggatagatagttgtatcatatatgtcaggaaaagctataggagaaatcttagttaggtgggtggatgaccttgtatatatatctatcgattgtttctaatacaggcagaacaacacattctatttattgtattc

SEQ ID NO: 5924 - DNA, 351 bp, Glycine max
agcttggagaggatgcttcaatggaggaatttatagagggatagaaagagagagggggagcatgaaattgaatgaagaaaaagggagagaagttgaactttgagttgtgtctcacaagactctcattcatcaaagttacaacaagtgttgcacatgcttctatttatagactaggtagcttccttgagaagctttcttaagaaaacttccttgagaagcttctttgagaaaacttccttgagaagctagagcttatgtacacacacccctctcataactaagttcacctccttgagaagtttccctaagaagattcttatagaagttagagcctaactactcatacctctc

SEQ ID NO: 5925 - DNA, 449 bp, Glycine max
  unsure at all n locations
tgtaagattatggggtacccatcacatgtggtactaagtgtgagtcaggcgattgtgcacaacaagtnttccacatacacaatgcgcgcataaacccaccatcccctgttgcccacctacaacttagctcacgtactcccacgtagcccatatcctcgttactctcaacagcgggtccccatcaatactgccaagctttcacagcatccaagcagaacagcattcaaacagcacaagctatcgcagccaagcgaaacagagcatacgcagaaaactctgctcaacagatcaaccataatcacagtttttctcacttaaagaccacagtagcaattgcttcgatccaattcgttaaccgctggatcgacgacaaaattatactggaagtctatagtgcataaggctacattgtgaccgttgtgatctattagcaacctccaaaactcatg

SEQ ID NO: 5926 - DNA, 389 bp, Glycine max
agcttagaaatagaaagtacttttcagttttccaatgagttgaaaagacatttttgccgagttgttacgcaattctattcattttttgtgtgtttaaagcacttaacacttgatgacatggtatagcagacttggtcacttggattaatgcgttaatgagtacaatttttgggaaatttagcatacgcctattgttgagtgtagtatgatgcaatctggatttcttagtaacacttggctactcaggcctttgtatgacaatgaaagataagaaccttagtagttaatggctggtcttgtgcgttctgatttgcaatttatgcccgatcagtgatccttcacatcacaaaatgtggcttctatttcctcatattacccttgttcatact

SEQ ID NO: 5927 - DNA, 424 bp, Glycine max
gctcgaagacaagactatacgaggtatcttccttgggtataacaatatctctaagggctaccgtgtctacaacttgcaaactaagaaactcgtcatcagtcgagatgttgaagttgatgagtatgcttcttggaattgggatgaagaaaaagtgaagaagaacgttcttatacccgctcaactacctcaagaagaagctgaggaagaagacccaggtgaaccaccttcacctgcaccataacaacaagatcaaaaactatcatcaccagagtctactccaagactagtaagatctttggtggacatatatgagatcagtaacttggccatacttgaacttggaagctttgaagaagcgtcgaagcatgaagtatgggtcacggcaatggaagaagagatacagatgatcgatacaacaacacat

SEQ ID NO: 5928 - DNA, 448 bp, Glycine max
  unsure at all n locations
agctntgccaaaatagcttacatcagctntgaaaaatcaatttttgaagaggataagtcataagtgactggctaatcagcttcacagatatacatgtatatataacaagtagtaacaatgtgctttacctggactttatataatgaaacaacttccacaacaacaccaatggacaaaccaagttcaactacaacaaactaattcagcttcacctggagttgatataatgagtaatggctttagaagaactcaaagccaaaccaagttcaagtacaacaaattaattaatctttttctcaaccaaagtatgtcaaactacttgttggatattaaaagtgttagttattcatgtgacaggcaaagagagttgtaagacaataattcttggttaaaactgtcaatgaagtattgcggcattaatttgatacaaactgatcaagaacaatga

SEQ ID NO: 5929 - DNA, 428 bp, Glycine max
  unsure at all n locations
gttgcgcgtactgatgggtaccatgaggtgtttgctgggttttgacccacgcgggtgttgaagagacggcatgggcatctccctccttcctttntgcccatgttgccccgattcttttggcattcgcgtttgtggaggaaacataatcaaactttcctcttttcaatcctacctcgattctttcctcgacaaacaccagatccgcaaagctggacggcatgtaacctactagcttctcatagtagaacactggcagagtgtctaccatcatggtgatcatctctctctcaaccatgggaggagccacttgtgccgccaaatccctccatcgctgcgcatattctttaaaggtttcaccctctttcttgaacatattctgcagttgagtacggtcaggagccatatcagaattgtactgatactgcctt

SEQ ID NO: 5930 - DNA, 392 bp, Glycine max
  unsure at all n locations
agctttctagcttttcattggtgtattttgatctcctttntgtgctctaaattgtgggagtgtgctcaaatatatggggcaattttgatttgttttcttgcttgattaagttgaattgggggtttgtatgagatggccctaggcctataatgcattttgaaacaataggacatgccacattgtccccgttctcttgctattgatgcctaaacgcgcgcccaccaagtgttcggtgaaatgcctcaatggcattagcgtgtgacttttgtaaggagacaacccatggggtattttggtttgtgcatattttctatttttttggaatatgtattcattcccgaaaaaggctagagtaattgccccacatatatcctagtcctagaaactgaaat

SEQ ID NO: 5931 - DNA, 475 bp, Glycine max
  unsure at all n locations
tgttggacacgcggagattacgtcatcttccacgctcacattatctgtcatactcaaatttgagtcacgctgacgggcggaaatacccgagtggttatccgtataaacattcttttttgttgtctgtaagacgaanagcctgatagcaagcagagactaacgtcgttttctgcgcccttcgtcaatcgcggccgacaagtcccgttgacacgcggagatttacgtcatcttccgcgcacacaagatctgtcatactgacatttgagtcacgttgacgggcggaaatacccaagtggttatccgtataaactttcttttttgctgtctgtaagacgaanagcctgatagcacgcagagactaacgtcgtcttctgtgcccttcgacaatcgcggccgacaagcccattgacacgcggagattacgtcaacttccgcgctcacaagatttgcatactgacattngagtcacgttgac

SEQ ID NO: 5932 - DNA, 308 bp, Glycine max
  unsure at all n locations
agcttgctagtcatctttttaactcttgctcttanagcaggttatatggtttgactagccaagggatagacaatttgatcaaaggactcagatgttttccatccgacggatcggagtttgagtatttttgtgagttgatgataataattgggagttgaactagattagcgacctttgtttgcatgaggaggtggtttagtgaaatcaatctcaactcttttatccttagatatactacttctttatatcgcactccatgtgttcgtaaaactgccaanaatagctggttaattatactcgtggtattt

SEQ ID NO: 5933 - DNA, 411 bp, Glycine max
  unsure at all n locations
tgaagaaggctgagcaaacgggtaggcatataaaaggaagcacgagaactgcatataaaaggaagaaagcgctcctcgtgatggcgcgttgaacctgcaaacgcaagtcgtaggctccaatggcatttccctgcttcctgcagctgcagcagtctgctgcagcactgtgcaccctgtcacctgcatagctaaaacgccagtttgactggcgtttctggcctccatgcacaacgcgccagtggatgttgcacgtcccactccacgtaagtagaaggcgaagccgctgctgctactagcacgtccctctccacgtggcagctccttcacggaagcgccagtggtggtggcgccatgcatggcgttcacgtaccaaaagagcacncgctgagaataaagtttggaagaacccca

SEQ ID NO: 5934 - DNA, 325 bp, Glycine max
  unsure at all n locations
agcttttgttcctttntataaaaagagaagttctgaaactcatcacgttgtctaaaaaggccttgaggtggatctaagtactctgatcattcattagcatattcatgatttggtggcatgctcaccaatatttgtttctttagggaactcaccataactaaaaaaacgcaaaggcacccctataacacccgatccaaaagtaagatggataacgaagagggagtgcaagaacagatgaaggctaacatatcggccttaaaagatcagatggcttctatcacggaagccatgctannaaatcaaaaatcaataaaagacaatgata

SEQ ID NO: 5935 - DNA, 439 bp, Glycine max
  unsure at all n locations
tcaatagcatagcctcgtaagaggacatccaaagntgtcatattgagatgattctctctgtgaagtttgtcagaaagggaaacaagtaaaaagttcttttaaagaaaataaatgttatttccacttcgaggccattaaagcttctacaccttgacttgcttgaaccaaccaggattgcatccctttttggatgcaaatatggtctggtcataatggaatattacactagatggacttgggttaggttcctaacccacaagaatgagtcctttgataccttntataaatnttgtaaaaagattcaaaataaaaaaggcattngtatctctntaatcataagtgatcacagggaagagtttgaaaatgatatntttgaatgaaaagaatggtattcaccatatattttccactganagaataccaaactagaatggagtta

SEQ ID NO: 5936 - DNA, 331 bp, Glycine max
  unsure at all n locations
taacagactcaggaatgtcanaggttgatgcaatntcacctctcagttaccaaagccagacgctcaataccatcaaaatcagcatgttcaatagccaatattcccgcatcagctaagagctcctctggaaaattgcaaatcaactgtctgttaacaaaacagctgataccatgacctattatcttctgcaccttttctctcattatctctttctctgctgtttcaatttgagcaactctagccatagaatcaacacgaacacgtgcaccatatatcttcactttgtctgtgtccatggcaatgtttgccaccagtatctttgcattctcta

SEQ ID NO: 5937 - DNA, 338 bp, Glycine max
  unsure at all n locations
agctntgagcaaattcaaacgacattaactttttactcggatgtctgattcagtcccgtaatatatcgagacgcttgaatttgaatgccgaagctctgagcaaattcaaacgacaataactttttagtcggatgtctgatcgagctccgtactatatcgagacgctcgaaatggaataccgaagctctgagcaaattcaaacgacaataaccttttactcggatgtctgattgagacccgtaatatatcgagacgctcgaaatggaattctgaagctctgagcaaattcaaacgacaataacatttacctcagatgtttgattgagctctgaatatat

SEQ ID NO: 5938 - DNA, 417 bp, Glycine max
  unsure at all n locations
tgcatttggaattgcgaaagccccactccatcattaggattattacctgacatctcanacaaacaaatcaaacgtaacaagacaattatagctgctgtttgaatacctcacccactcaagtgtatcacacaattatggctcttctctaatgaaacactcttgccttttaccactctaattccccttgagttcttaggcaattcaagagattatggccacaacaaagaacaattcaccaatatgtgtaaggtaaggctagagagacaaggaaaaggttaaccaagaaaaggctaacaatgtttttaggcacacatgaaggaaataaaattcagaattaagaattcaagaacaatccttcatcaaccaatatattaccttaaagagattcttttaaagtcttcaacatgaccattcagc

SEQ ID NO: 5939 - DNA, 441 bp, Glycine max
  unsure at all n locations
agctcttgcgtgcaaacttatcgttcacgttcctctcattggaattgaatgaaaccccacacattaacaaagtcactttcaaaaagacactttcgttgtccccccctcactttttttccatacatgaagaaaatgaacggtttataatagattgggcatggaagttgacaggtgaaatcccaaaccccaattctcactatacccctttntttttcttttattctccaaacattacacaaggagttactaccaaattattattttcagtactgagagttggagggtctattttctgtccattaatacctgtctcatangccataccacttccatattttgcaacattntctcctcacttgttgcataacaccaaagaactacatatagttgtcattgcacaggtacaacaacctaactagctagctagctagacacacaccc

SEQ ID NO: 5940 - DNA, 432 bp, Glycine max
  unsure at all n locations
ctgtgtatcattatgggtttagagggccacaaaaagccaccaatgaaggaagaaatagatactttgattcgaagcatatttatttattgaagataatccggacaaaacctttgcacttttcctcacctttttaaattaattactattagaattactattttttattatctaatattatacgagattacgagcttataattactattggctcaaactattgtcaagttatttttttaatccacatttgatattatcttatatatatggntcaactcttaaaaaanaaattgtgtgtactcaactcttgcatatagagatttagtatttcacagggaacaanaattctatattaatatagaaatatataacagaaataaaatatccaaatgtataaagtagcaatttaatcaaatattatcatttcacaaagat

SEQ ID NO: 5941 - DNA, 285 bp, Glycine max
  unsure at all n locations
agctntagctttgtccccaaggcttcatgtatactggtccaaaatcgcgaagtgaacctcggatccctgtcagatacaatactagaaggaattccatgcaaccttattacttccttgatgtacaactccactagcttctccattctatacttcatattcactgggataaaatgagcagatttggtgagtcgatctactataacccacacagcatcatgtccacgactagtcttgggttaactagatacaaaatccatagatatgctctcccatttccattctgga

SEQ ID NO: 5942 - DNA, 397 bp, Glycine max
  unsure at all n locations
agcttcttatccaaggctcatcttggtggtgaagctccttcttccatggcttattccctagtggatggcgcctcctctcacctcttctcctttgttttccgctgcatctccatggtgtaaaatcaccattaaaggacctcattgaagctcaaagatctagcctccatggaagctccagaagcaagcttccatcaagtggtaatcagagcacaagagcttcaagtaggtgctccttaaacctccattaattnttttgctttaccttttcttccattgttgtttcttcatttttttcttcatgcatctcctcacatgtcttgtgccaaattttgttaacatgattctctagagtttcccaccgataaacttgctatagaagctagaattgattttctat

SEQ ID NO: 5943 - DNA, 389 bp, Glycine max
  unsure at all n locations
tcaacacannatgcgaccccggaacccagctgcaacccctgtaaccagccacgacaccccacacccacgcgtgacccgctgcacataacaaccagcagcgacgacccacggcgtgaacggcggcgacgagcacggcgtgaacgacggcgacgacccacacgcagaacatcgcgatccaactctgttgggcatcttgaagctttatttttttttgggtttgtttttgctgtttgacaccccttttttctgtctgtaactttttttccctttttctatttgacaccctctttttactttcgacaattccatttttattttttttttctatttgacaccacaattttttttgttcagtcctcttttaaatggctgaaccatcatccgatgct

SEQ ID NO: 5944 - DNA, 452 bp, Glycine max
  unsure at all n locations
agcttctattttactgtctccgtgtgagggtcgtttctctttctgtggacattatttcacaaatttcaatggtggagatgtgcaaaaatgggttccaaaggtggtatcgaaatttcacgacaatccaacagttgacgagtctgaaatcgtagttttacgaagacaggttttgggtctctgtggaaaaagagaaagctacgatacgaatgacatttctctcacctcagataatatttcgcanattccaacaatgagaatgttcgaaaatgagttctgaaaggtgctcaaatttcatgatgatccaacggttaacgagttcgggatcgttattttactgagacaggtttgagtgtatgtgggacaaagagaggattttaagagaagaagaagggataacattattgagaggaagaggaagcgtaaagatgtattgtcagtctgaaaactaacct

SEQ ID NO: 5945 - DNA, 220 bp, Glycine max
  unsure at all n locations
actaagctttaaataagggcccaaacactgaanagtcgtccatgaatatctcttaatacatttctccaccatgtctgacaaaatggccagcatgcacctctgaaatgcggctggtgcattacataacccaaatggcatctgtctataggcaaagacaccaaaagggcatgtaaaggccatcttctcccgatccttggggtccaccgagatctggttataa

SEQ ID NO: 5946 - DNA, 384 bp, Glycine max
agcttctcgatatattatgcgcctcaatcgtaccttcgtgtgttaagttatgaccatttgagttctggcgtgcttccgtttttcaatttcaagcttctcgatatattatgcgcctgaatcggacttccgtttgaaaagttaggaccatttgaatttctagagagcatttgttgttcaatttcgagcgtgtcgatgtattatgcgcctgaatcggacttccgtgtgacacgttatgaccatatgaatttctagagagctttcgctgttcaatttcgagcatctagatatattatacgcctgaatcggacttccgtgtgacgagttataaccatttgaatctctcgagagcatccgtgtttcatttcaaccttcttgatatattat

SEQ ID NO: 5947 - DNA, 471 bp, Glycine max
tggaaatgaacaacggaagctctcgagaaaaaaaaatggttataacttatcactcggacgtccgattcaggcgcataaaatatcgagacgctcgaaattgaacaacgaatgctcttgagaaattcaaatggtcataacttgtcacacggaagtccgattcaggcgcataatatatcgagaagctcgaaattgaacaacggaagctcttgagaaactcaaatggtcataacttgtcacacggaagtccgattcaggcgcataatatattgagatgctcgaaattgaacaacaaatgctctcgagaaattcaaatggtcataacttgtcacacggaagtccgattcaggcgcataacatatcgagacgctcgaatatgaacaaccaaagctctcgagaaattcaaatggtcataacttatcacacggacgtccgattcaggcgcataatatatcgagacgctcgaaattgaac

SEQ ID NO: 5948 - DNA, 436 bp, Glycine max
agctggtcgcataactctactcgatgttagtttttaaaggtgtgggtgttcgagatattgaaagaagggtgaaaaaagggaaggacatggaacacatctgggatttcgttttcggacataaaataaaaattattgtccccaactagtcagttttttttttcttcaaaaagtaatattaatgttagcctagctgacacttataataacatatttcttcaaaattatcatttaatgtggagtatgactgacacaagtaaaaaactataaaataaaacatcaatgaaaatcaattaatgcctacgtagtgtcagttgatgctatattgtgttagtctcaaaactattcctacagggtcgcattaatttgatctttctttgagcgcataatctcaccaccttctttatttcttcgattgtatcctaatagtttagtatat

SEQ ID NO: 5949 - DNA, 385 bp, Glycine max
aaattggtccaaaacaaaacgtgagccccatagacagcatccaatagatgtcataccttttctgttacatatcgtggtagtgcaattgatgccagattgcacacagcagtctcagttggacttgaatattcaattatctcagtacacaaagctgacgatttaattggacccaaattctggtgattgcttttcctattgcaagtatgctagtagttgtaacaaaaatgctggaattactcatcgggtgagaacaataaatacaaaatctcatgaggaaagtcaaagacatctaagaacaccaccttataaagcatgtacgggggtgcggcttctatctgtgacttcagaatttcgaaccagaggctctgtgcctggacaaccttca

SEQ ID NO: 5950 - DNA, 421 bp, Glycine max
agcttgtaataaccagaaattattttttgttatatgaacccatacaaagtcaattatcaatggcagtgatgcaaaaccacttgtttagatgactgagtatagatctcttccctggtgtatttatatagttacttgtacaatttaattttctttaatgccttctacaagcaatatgtcttgggcaatgcactgtacaaagggatgtttcaaattgtggtggaaatgggttgaataactcatcaatatacttataagtttattaattttatcaatatattacaaaaacattttcaacaaattgtatctcttgaaaaccaaggcttagacctgttggcttttgtaaaagctataatgcaaagtaagccttttaggttaggccaggcacaaaacgaatagcctatttcttataatagactggact

SEQ ID NO: 5951 - DNA, 447 bp, Glycine max
gcagaaaacaagttaaattatacattcaaaaatgttgactttttaaaacttgagagtaaacaattcacatcttaaatctcttcaacatccatgcattgacttaagtaaagataaacataatggttgtcactctaaaggccatacaaaaataaagtaaagtaatttacataaatccataaagaaattctataaatgtatgaccctgccttgatgtcatagctatcaaaccaacgatcctaccttaaaatatatctaaacatatgaagttaagcctgttctctagcattatgttcactactctgatgatccttacctttgtgtggcaatcaacccaaacacatacaacaaaaacagataggggaatgagatacatcttaccacatataacaatataataattaaaggcaacttagaatcatacatcattacacgttgcaacttattcac

SEQ ID NO: 5952 - DNA, 429 bp, Glycine max
  unsure at all n locations
agctntcagtttgtctaccgaagcatggctgtggttgttgngaaaatgttgtgcttgataaatgttaaggtcaattctttcttttattaacagtgcttttgaaccattttgtacttttggtcaacaacctactgtagaaaagtgtgattcgtgcatccctttgttgcatgtgttggctcatacctttgcgccctgggctgttgcatctaatatagggcctttttttaaacagttacaagtcattgagtgcttaaaatatatttgttctggtgctcatcctgatatggaaatgcatgtgagtatattacgagtagtcttttgtttccccttattgaatggngaaattaagttcatttggctacttgggtaaactacccgcttctatatatcttttattcaaaatgccttcatcaaaataccatcttctac

SEQ ID NO: 5953 - DNA, 394 bp, Glycine max
  unsure at all n locations
gaacatatgcttagagataagctaggtgttgtgtctttagtcaatacttaaataattattacaaaagtcaaccattttcccattaataataatntatatttgaatattctttggttatttgctcatgacaactatataatttaaatccaaatcatgtattcctcatcgatgtgtaatctattatcaattgcttactctcgttaagattattgttctcttaactgtagaatgggggcaactttccctcaactctaaacttttgataataaacaataaaaagggaaagaaatgttcttataagttgaagaananaaaagataacactcatatgtcatagaatacaatcacataaattatcatcactgctattcaagcttataccaattatgtatat

SEQ ID NO: 5954 - DNA, 390 bp, Glycine max
agcttgaaacattggaaatcttggcttcattcccatcttccggctggatcttcccacttagagtgaccaagggaaacttcatgaagaagcagaaactaataaattagctttaatatagattttgaattaagatactgtttctgtaaagacattaattgaatggtattgagttgactggtgcagctattttgtactcaaaagaagccaaatagaagtcatcaagttttttgtttggtatgataaactaggcataacacttttggccaatagtagttgattttagttgcttgttagcatataatggattcactataattgcttggaaaatagtctactaatttaaacttatcaaacaaccattatatacgagatctcaatttacacattaaa

SEQ ID NO: 5955 - DNA, 388 bp, Glycine max
  unsure at all n locations
tcggatgtatgatgaaatattaaaatataattctttgaactntctgatgccatgatgagaaaagagtaaattgtataggattctcatatgcaatgcaaaattgggctggccttattgaacttgggtccaatggatctaggagatccatacagtacaagttacttgagaaagtttgcttcagctagatagagagaccaacaagaaagcttcagctagataaataattccctcctatattttctccaagatgtgctctttttgagaaatttattcctgaaaataatacaaagaaggagctttttatccatggtgacgtcatgaaactcaattctatttgctctaatgctgtactcaatcttttgcttgatgtatatatataattatgcat

SEQ ID NO: 5956 - DNA, 318 bp, Glycine max
agcttgtcgggttcaatttcaattaagcgcttggggcatcccacggactgagcaaaagggctcaggttatcaaaatattgcacgtcttttaaagcacaaagcgaggatcagaacctcaaccctacgttcttttttttaaaaagactgcgatgagagatattacaaaggacaggaacccctgtgggaaaccaagaagaacatacaaaaataaaacatgcaacggcttcctcaattgccccagatattaagcgtagtatcgcttgacaacgttggagttcacgggtgaaggtagctcctcgtcattcatgttggcgagca

SEQ ID NO: 5957 - DNA, 434 bp, Glycine max
  unsure at all n locations
tgcctcanagaggtccaggaaggacaatgcggccgaaggatctagttctgctcctgagtatgacagtcaccgctttaggagcgctgtacaccagcagcgcttcgaggccatcaagggatggtcatttctccgggagcgacgtgtccagctcanggacgacgagtatactgatttccaggaggaaatagggcgccggcggtggacatcactggttactcccatggccaagttcgatccagaaatagtccttgagttttatgccaatgcttggccaacagaggagggcgtgcgtgacatgagatcctgngtaaggggtcagtggatctcgtttgatgctgacgctatcagccagctcttgggatatccgttggtgttggaagagggccaggaatgcgagtatggccagaggaggaaccggtctgatgggttcgatg

SEQ ID NO: 5958 - DNA, 400 bp, Glycine max
  unsure at all n locations
agcttgcttgtggngcttctatggaggttgtatctttgagcttcaattgggtcctttaatggtgattttcgaccatgaagatgcagcggaagacaaaggaaaataggtgagaggaggcgccatccattaaggaataagccatggaagaaggagcttcaccaccaaaatgagtcttggataagaagcttggagaggatgcttcaatggaggaaaagaaagagggagagaaagagagaggggggagcacgaaattgaaggaataaaagaggtatagaagtggaactttgaagtatgtctcacaagactctcattcatcaaagttacaacaagtgttacacatgcttctatttatagactaggtagcttccttgagaagctttcttgagaaaacttccttgag

SEQ ID NO: 5959 - DNA, 405 bp, Glycine max
  unsure at all n locations
tctacaagaagagatggccacggggatcaagaatggactactcatcaaaagtaataaaggagaaaatcacaaggagctgaattggagcactttgaagattgttgaatagctcgcttagcggcaccaactcgctaagcacaattccagctcgagaagaaattgtgcttagtgcgaatgccccgcttagcggaaacctttcactagaattttcgaaaaacttgtgtctacttgtgtaccaggcttcaagcttgatgtagataggccttaaatggtgtgtttaaggggttattagagggttagttaccttcttatgcctagccctataaatactcaaaaactcttaattntggaaaattnttgtagaattgaaattaagttgtgcttagagagagctntagcctcttc

SEQ ID NO: 5960 - DNA, 284 bp, Glycine max
  unsure at all n locations
agcttttctttgtgggttgataggttctgtctcgtagaatggcatgatcattggctgacatgttctcaatcagctcagttgcttcttccggngtcttcatttntatctttccccctgcagaagcatctaacagttgctttgtttgtggtctcagcccatctataaacatattcaattggattggatcagaaaacccatgagtggaagttcatctcaacaagcctctgaacctttccaatgcttcacttagagacttattaggacactgatganatgaagagatt

SEQ ID NO: 5961 - DNA, 317 bp, Glycine max
  unsure at all n locations
ggcctcanagaggtccaggaaggacaaggcagcagaaggaactagttccgctccggagtatgatagtcaccgctttatgagcgcggtacaccagcaacgcttcgaagccatcaaggggtggtcgtttctccgggagcgacgcgtccagctcagggacgacgagtatactgatttccaggaggaaatagggcgccggcggtgggcaccactggttactcccatggccaagtttgatctagaaatagtccttgagttttatgccaatgcttggccaatagaggagggcgtgcgtgacatgagatcctggttaggggtca

SEQ ID NO: 5962 - DNA, 372 bp, Glycine max
  unsure at all n locations
agctntaaaggatgattgtattatataacttataaaacggtttcccaattaaaaaggaataaaaatgtgtggcagtataaggataagacataanagctgcgaacagttgaacaagaataggaaccttggaatatggaaatcgaaggaaacagataaaggctgaaggtgccaccgtaatagtctttccctttattcaacgttcaatcataaaggctggtcgaccaacgtgtgctcatccatgtcaaattgaatttggatattttaaattttaatcttataaatcgaaaaatataattaagaataaatactttattacagaaaaatacatatttttgtacgaatataagtattggaaaggtaataaattcttga

SEQ ID NO: 5963 - DNA, 356 bp, Glycine max
tatccacctctcataaatttgaaagtcaatgtcaataaagtccaacgttgctagatatggaaatatacgagtcaaacttgggttaggaccattgaggcattaaattaagtttaatatatcagcgtagtgcttggctaacaaggaatgggaaatcaagatactacctcaaattcttttttatcataagaatctttctgataaaattgtttatttcttcatgtaaggctctttttatattgtatttttttattaactatttttatcaaaatatttctaattacttataactctttagttaacaaatagtagagaaaaaatgttatgcattaaaatgtaaataattatttattatcact

SEQ ID NO: 5964 - DNA, 441 bp, Glycine max
  unsure at all n locations
agcttgctaacccatggaagctcctaatatctcccacacttttttaggtgggccattcttggatggccttgattttctcagggtccacttggaccccatttctaccaactacaaaccctaagaaaactatattatctacacaaaaagtacacttctctatatttgcatagagggtgtttttcctaaggactgaaagaacttgcctgagatgtcctaagtgatcatctaggctcctactgtatactaaaatatcatcaaaataaacaactacaaatatacctatgaaatcccttaagacatgatgcataagcctcataaaggtgcttggtgcattagtgagcccaaaaggcatcactagccattcatacaaaccaaacttggtcttgaaagcggttntccactcatcaccctttttcatcttgatgtggtgatacccacttt

SEQ ID NO: 5965 - DNA, 465 bp, Glycine max
  unsure at all n locations
ctaagctatgcacccctntnttcaatattaatcaacctgaaatcacacacaatcacaagcaatcaactacactcaatgcaaagaaaacaaaattaaaaataaatgactgggtttcctcccagcaagcacttgtttaacgtcattagcttgacgcatcgctctgttatcctagatcaatcttggttctctctttcagaaccttctcatccaactccttcacctgtaagcacacatcctggtccagcagttctcttccttcattaaatagatcaaagctgatttgttggttttcaagactcatttctaactttttcttccctatgtccaccacacagcttgcaatagacataaatggacgttccataatgacaggaatatttgcatcttcctcaatgttcattacaataaaatcagtaggaaaaataagatgttntactcgaaccanaacgtcttcaatcactccat

SEQ ID NO: 5966 - DNA, 414 bp, Glycine max
agcttgagatgaggaagtgtagaagggtgtttcttcctgcttttactcgttgaccacagagtggtacctggagatatgtcgcgggggtcacgagaccttggggacgtcaggtggggtgctattgtccaaaaccaagcttgaccaatcccgacccaacccgggcatagtcagtcagtgagaacctgtgatgtacctaaacaggcgagctcctggcagtcaacagataaaaggaacaaagaccacaaagcaaggaggcttgtggtggctggccagctgtgaactttgattgatatgtgggttatggcctctggtaatcgattaccaagggtgggtaatcgaatacaacgcttaaaaatgaagacaggaggctaagatggtctctggtaatcgattaccaaggagtgtaatcgatta

SEQ ID NO: 5967 - DNA, 228 bp, Glycine max
ctgcacaagactctcaattataagagtgacctggagatcctccagacgtcgaagacactgtccagcacgatgctattccttcatggactgagaggggcaagctgcgggcatgattatcatcttcccataataccttggatcaacagagatcgtgtctccctataccacttcacttgggaatgaacgctacttgtcttatcgagaatgatatgccgtgctattgcgtgt

SEQ ID NO: 5968 - DNA, 433 bp, Glycine max
  unsure at all n locations
agcttctcactttaaaatttagaacatatattaggaaatttattataaactaaagcatcaaagatttttgaaagtccaatttacaatatccatcaagttcatgcttactgatgttttctcatgtgtgcttctgttcggttgtgtatttatttatatatttattattttctcttttaggtctgtgccagcatctggacttgatgcagtgattcctagtgcaaatcagcttaccatcttctataatgggagtgtttgtgtctatgatggaatccctgcagagaaggtatacccatgctgcactttaatcatgaatcaatcttgcagctgctgtgccttcaatccaggctctaactttacatgttatgaacttatgatgcaatcctaatcatacantcgtttatttactaacacgtgcatgacataatgcttattg

SEQ ID NO: 5969 - DNA, 392 bp, Glycine max
  unsure at all n locations
tggcgccaaacataagagctttgcacaaaaatggtgaacatataagtagaaaagaagagatttaagagcttcataagagagatttaagagaaggagtctgaagtcactcactactatggagcttggaagaagataaaaatggtggtgtcttcctcattgaaggtctcatgcaagaagaagaaaatgaaggttcaagttttggtttttggagaggaaatggtaagaaatgatgagaagtgatgcaaagctatgcctaattctattgataagctcacttgatactactacaaaatgtagatttaaatcgctatttaacatcggttnttgataaataccgatgttaacaaaaacatggtggcataatggtaaataatgtgactntcttaacatcg

SEQ ID NO: 5970 - DNA, 360 bp, Glycine max
  unsure at all n locations
agcttgttgggttcagcttcaattaagcgcttgnggcatcctatggattgcgcgaaaaggcccaagtcatcaaatactacgcatcttttaaagcacaaagtgaggatcggaacctcaaccctacattcttttaaaagattgtgatgagaaaattacagaggacaggaatccctgtgggaaaccaagaagaacacacaaaaataaaaacatgtagcgacttccttaattgccccagatcttaagtgtagtatcacttgacaacgtcgaagttcatgggtgaaggtagctccttgtcatctatgttggtgagcaccagggcccttccggagaaagccctttntacaacaaaggcccttcgta

SEQ ID NO: 5971 - DNA, 416 bp, Glycine max
  unsure at all n locations
tgaagcatgagccgttctgagagcttaagatgagnttgtgagtgattgtgagatcctagaggtgcaggagacatcctcaccacttgtattttttcaatctttcatcttgttcttctctttgttgtaaagaaggcttcctagttatcgaaagctaaatcctctgttggatcttccctataggtacctgatgtaaatatatttttatttatttaatgatgttttgtgtgttctctgtgctatctgcttttcactccagtatgcctttaccttgatcacgcagatgcatgctttgttagggtcattcaactatggaaactggtctgattctaaagtccttgagagtacatggctaagttgtcgtactatcacgaggaatcagggtgcgataatttagttgtgtatgtgtttcttaatgc

SEQ ID NO: 5972 - DNA, 362 bp, Glycine max
  unsure at all n locations
agcttttatctagccaagatcatacaaaagtgttacaacagaacctaacggtttctaattatgtgggccatcaaatctatcatgtgtngacaataattgattagcccatgaatttcctctggggctgaacacacttcggcgatggccatcgctntggcttgtagtcgcgggaggtcttgacttccatttaaggtcaaggtgaacctatccatccacatggtcgcttcttgatgcaatgcatcaatcaccctccctcttgcttccttctcggcgtacgcttgtgtgaagtcctctactagcttttgttcatgggtcaaagactggtttaactcttcttgtactgccctatgatagctagcatg

SEQ ID NO: 5973 - DNA, 292 bp, Glycine max
  unsure at all n locations
tctatagaaaggtcattcctaatttctctacaattgcatcacctctcaatgagctagtgaagaagaatgtggcatttacctggggtgaaaaacaagagcaagcctttgctttgctcaaagaaaagcttactaaggcacctgttctagctcttcctgacttttctaaaacttttgagctagaatgtgatgcctctggagtgggagttggagctgttttgttgcaaggtgggcaccctattgcttattttagtgaanaacttcatggtgccacccttaactaccccacctatga

SEQ ID NO: 5974 - DNA, 312 bp, Glycine max
agcttggggctgctgccaatggtggctcccgtaagcttgttgaaggttcttgagctttgggaaagaaatggggtgaaaatggcttcacccccccccccccctttaagttttctcatcaaaccacgctcgcccaagcgagctgatttcaattttttttttgcaaaaatattttttgcaaagctgtgctattcattgttatattttctctctaaaaatcctataattgcatataaacttaggcgaattcaggatataattcaagaaaacgaacaagtatgaaaaaggaaattaaagagcacatttagagatact

SEQ ID NO: 5975 - DNA, 452 bp, Glycine max
  unsure at all n locations
tcaattataagaacttgaggagatatgcttagaagcctatgagaactccaagatttacaaggagaaactgaagaggtttcatgactctaagattcttaagaaggagatccatattggccaaaaagtgatcttgtataactctcgcttcaagcttaattttggtaaacttcgatctatatgggatggacctttttttattactaatgttntccccatggcacaattgagattaaaaatgaagttattagcaaagtcttcaaagtgaacggtcaccaactcaagctttttcatgagagccccaagtggtggagcagtttgtggcggacctctctttgatcttgccaactttatgtgatgatgtcccttgaatggaactngangagtttccatccccttcttttgtatgttgtcacttttgttgcctttcattgcatgctcacattgagaacaat

SEQ ID NO: 5976 - DNA, 398 bp, Glycine max
agcttacagttcaaatcaaaagacatctttttgtaatactgatatactctccagagatttgagtttttcttttttagcttatcaagttcattattagcaatggttcattcttttttaagtaagagtttttgtttaggcatttccttgcacccttcttttgaatcttcaagagttgtagttgattttaccctttcttccaagtcttgaaaatccttaagaagagtttttcgcccactagatgtatttttgtccaatagtgctttgacttcctcacaaatagaggtatctattcactactaggcgaagaagtttccaggacaaaattaactaagtgaacttgatgagctttcttgaaatcctcatgctctctttcaagatgtttaacaccttttatttaa

SEQ ID NO: 5977 - DNA, 468 bp, Glycine max
  unsure at all n locations
tagagaggaagttcaatggaggaagagaataagagagagaggaagggtgtgggaattcaaggagattagggagagaagttgaactttgaagtgagtctcacaagtttcccattcattaaagttatgacaaatgttacacatgtttctatttatagcctagcacatggaaagcttccttgagaagcaaggaaggtatcttcgttgggaagctagaggaagaaagcttccttgagaagttagaggggggctactcacacccctccaatagctatgctcagccccatgccaaaatatatganaatacaatgggaagcttccttaagaagcgaggaaggtagcttccttgggaagcaaggaagaaaacttccttgagaagctagaggaagggagggctactcacaccctccaatagctaagctcacccncgtgtcanaatacatgaaaataccaaaaaagtccttactacaa

SEQ ID NO: 5978 - DNA, 294 bp, Glycine max
  unsure at all n locations
agcttgtccgagcagttgagcaagaccgaataaaatatgtgggccatcaccgactagtacaaggaaaagttaagcctatcagcgactcatgagcaaaggctagaggatgagtacaacaaggtatcaatcctgcaagcgaaaaggaaagcaagggaaagggtgatcgattcattgcacagagaagcaatgatgtggatggaccacttcgtctgggagtcaagaacttccctaactgctagccaaggccanaggaatggcggatgtgtacttagttctcgaggaggttcacgggct

SEQ ID NO: 5979 - DNA, 338 bp, Glycine max
  unsure at all n locations
tanactcanaaagaaaggtggagaataaagtgagtgaacgactagaaaatagcttgtatgcatcacttggtttcaggtttgtcatcatcaaacagggggaaattgtggaagcaaagctacgatgatgattcaccaagagatgatgccaaagctcaaagaggtttttcaagattaaagaatcaagcattcaagattccactcaaagattcaagaatcaaatgaagaaatcaagaagcatcaagccaagtcaaagtaggtagttaaaagtatatttttcanaaaacatcaaatagcacactctttcgtttaaaaaggattctctgaaatgttctaagtta

SEQ ID NO: 5980 - DNA, 370 bp, Glycine max
agcttctagccaaatggacttaccttgaattaattcctttgatagcccctttgagcctatgttcccctttctttgttttgaagctcattacaaaccttaaatgaaaaaccatgatatcaccttacccttaaggaattttggagctttggaattgttttgggaataagttgggaataagtgtgggtggtatgtttcattggaagatataatttttggccatgcttaatgttttattttggccatgcttgatgtatatatatattgcctagttcttgctttaatcttcaaattcatactattaaaaaaaatgaaaaaaaaattcaattggtgcaaattctgcaaattcgtacagttcaaaaaaaaaagagaa

SEQ ID NO: 5981 - DNA, 339 bp, Glycine max
  unsure at all n locations
tcggccccattgtcttcgtcgccctcccttntcgctntaccttaccccagtagaggtcgtgatttagcaattgaagcagaggatgaaagaaagccctggttggtggtgctacgggggcagatctgcaactaccgttcactctttcctcctacgacgtcaataaccttgagaagggtatgccgtaatcgattgaagcttactttataaaggctgaatctctccttaagcttatgttgctatttttatgtgttttttcttcctggtggtggttgtgccattgatctgaatgaagaaacactagctattcatgtatcttttggctcctttttcctttctcca

SEQ ID NO: 5982 - DNA, 429 bp, Glycine max
cctgaggaatgcacgcttgcttctacacttccacttgccaatattttcaaaggactaacctctctgagatatcttttgtttccctttacaaagatttaagggactaactgcctaagaattctttgtcttaacacattggagggtacatcctttgtggtacaagtagagagtacatctacttgggttgtaatacttagaacaagagcgggtacatctcttgtggatcagttcaagtggagggtacatccacttggttgttcaaagagaacaagggagggtacatcccttatggatctttgcttgtaaaggattttacaaggttattggaaatctcaagaaccgatggttgcttggtgactggatgtatgcacatgttgttgcctaaccagtataaatcttgtgttcgcttcttcgccctacactctttac

SEQ ID NO: 5983 - DNA, 442 bp, Glycine max
tgccacccagctcgcccaagcgagcagggttgcttcctctataagcaacagccttctggaggaatcttctggagggcccaagtgggcctggttgctatttgcacccccatttttactaagtacaccccctgccttttttttggtgattcttttttcgtaaagttacggaaacttacgaatttcgtaacgatacttgttttctttccgtaatgttacggaaccttgtgaattacataatcatcccttttttgacttacggaatgttacggaacctcactaattgtgcaacgatgcttccatttgatttccggtgtgtcacggaaccttacggattgtgcatcaatattttcttttgttctccggcatgtcgcggaatttcacaaattgcctaatgatgggtgccaagcacctcacaaggaccaaacagaagtcgcatgtcatc

SEQ ID NO: 5984 - DNA, 450 bp, Glycine max
  unsure at all n locations
agctntaaacttcattgcatccagccactttctcttttcttcattatccatggcctctctaaatcactcaggttctccatcatctgttaggatcacatactcattaggagaatacctcttagaaggttgtctctccctgttggactttctgagttgaacttgaggtggttcggtggcatcaccaagattttcatcttgtgacatgtcatgctcctcttcatcatcatcatcaacatgaacatctacctcatctccaggttgttggacactaacatcattcttaactttagtattcagattctgaataggcgattgaactggttgaaaatcagccacaccattgtcttccttgggtgtaaacttatccaccttatcaatgtcttcaatggtttggtcttccatgaatttcacatcatggcttctaacaagcttcttctcaataggatcata

SEQ ID NO: 5985 - DNA, 455 bp, Glycine max
  unsure at all n locations
ntgatgatgttgagaagaaatcacatgtttgtcatcatcattaagggagagaatgtgaatgtatgtacacatgattttgatgatgtcaaaagaagaatcaaacaaggctcatttgcatcaagattaatacaagattgtttcaacaaacaaagccttgattcaagatttcttcaagatcaagccttgcctcaaaatgaaagatttcaagtcatccaaggcacatgtaatcgattaccaagacacatgtagtcgattaccaatggtttgaaagtgtgtaatcgattacacatcatatgtaatcgattaccagagactttgaacgttgggaattcaaatattaaatgaagagtcacaattgttcaagaaaaataactgtgtaatcgattacactaatgttgtaatcaattaccagagagggatttcaaggaatatcgccaacaatcacatcttatcat

SEQ ID NO: 5986 - DNA, 380 bp, Glycine max
  unsure at all n locations
agcttaggataagggttatggatgttgtggtttctcataggtcaagctacaaattgtgacaatgaagttggctcgagtattttcggtggaaagctccagttatctatttatggtccatggcctactcaatctttaataaatgaccaagttttacaaaaatcaaacttttgtttttctgaaggaaaaatcaacttattattcggctttgattttaacattgttactcttacgtatcttgcaacagcgcaaggggtccagctccaaaatctagttgtggataaatctaaaattcaaatggatcaagtgtcattataaaatagacagttatgattctaggaatccctctctaaattgtcaattttagactttgngtatcacat

SEQ ID NO: 5987 - DNA, 447 bp, Glycine max
  unsure at all n locations
cttgtatcccagggaggggattngagcttaatgttgatgggtctcctttgaagattctgagaaagaacatgaccactctagctcagacatggagcgttctttccttctcgaacctcattcccacctcccatacatatgatgtgaccttggacagagccaagttgatttatggtataattatgaatatggatatgaacttggggtacctcatctcccaccagatctctctgattgcacaacataatacatccaaacttggattccctgccttgatcacagctctatgcaaggccagaagagttcagtcaaactttagatccctagagagcttgagccctgccattagcttggcatatattaagaagaattgtagaatcttgatgattcaacagtgacatttagagggccaaggaaggccagaggtatgagatcagaggcccctactac

SEQ ID NO: 5988 - DNA, 351 bp, Glycine max
  unsure at all n locations
agcttagacatatgccacccacggnggtcctttctcactatattatttcgtcctttgtcctcatttttacattttgaggtaattgtttcctctatcccaattaatatttttcaatttctcagaagtactcgcgggttccgaatattaaaaaataaaaatataatctataactattaatattaaaaaattattctattaataataacaattttatccttaaatcacttcttanattttaaatntttcttctaacttacattaacttttcactatttttatattattagttctttttattcttgtcattttttattaactggtttatttttttattatctaaaaaatttaaag

SEQ ID NO: 5989 - DNA, 472 bp, Glycine max
  unsure at all n locations
gtgtattgctgcattctactaatatatggagttgtccacttctttgcctgagaataacaattgcttgaccacaacaacgctggagacggtaagggacaatggtctttcaaataaacatgttgtacatgaacaaagattatatcatgcggtgaccgtgtcaaatgaaccagcgaagtcattgcataattgttatactaactatattcaatgtacctgaacaaaatgatttccaaacacgtgaccgacacatatcatgcggtgcccagaagaatcaggtggttgttgacttctaagaggaaaaaatgtcatgctttgttgtcgggacaatgatacaaggattacgttataccgtgatgcaatcacatatcccatctccgttatatccatccacttgtccactctaacctgaatcaaccaaacatacacatgtaagtaatntatagtttgtattaaaaaaataacctanaacata

SEQ ID NO: 5990 - DNA, 437 bp, Glycine max
agcttgcataaagaaatgtcagaggatgaaattgcatgtggctgtattagagcacattgaagagaaaggtgtcatgagaagaaaagaggggttgtttccctaattattaactaactgcaaccaccaagtcacaaggtggtaaccttgctgttcgacaatggctcgcccactatccatcagactaatgcaactgttttaacaaattatttggctacatatttcaaaacatataacctaagtttagcttaattaaaaatgaaccttaagaaagtgtttgaccccattgtactgcaaaagaatgagtattctcattgaaatcttgtccaaatgaaggtgcactgaaacaagtacgaaatgaatggattttagaagaatatcataccttttgccttaatgaatagctagcagctctaataccagcaaattcatcaactaac

SEQ ID NO: 5991 - DNA, 458 bp, Glycine max
  unsure at all n locations
tctctttttctattattttatttaagcaatgccacatgtctccatttgagtggagcaagaagggcccactttctctttttgactgtgacccacactcagtcacaaaagtgaggaaaatctaacctttgaaacgctaaaaatcctgcctcggtttgtgtgccgtttctctggttccagtttctcgcgtttctctgcgtccgtcggggccagttttcgaaagtaagcaatatatatatcaaaacgctcataatagaaccctgagcgtggttcagaggttggtttcgttaaattctaagtcgcacacaaaacgatgattnttaaactaattaattaagaattaacccataaccctccagttatggatttctcttccttaattagcctaacccgcgtatcttgcccncactactcctacttctaccaagaacacatatgcatatacactgaataaaacttat

SEQ ID NO: 5992 - DNA, 412 bp, Glycine max
  unsure at all n locations
agcttanacattcaatttctaggctctcgatatattacgggacttaatcaagcatccaagaaaaaatttattgtcgtttgaatttgctcagagattcaacattcaatttcgagcgtctcgatatattacgggactcaatcagacatccgagtaaaaagttattgtcgtttgaattggctccgagcttcaacattcaatttcgagcgtctcgatatgttacgagactcaatcagacatccgagtaaaaagctattgtcgtttgaatttgctcagagattcaacattgaatttcgagggtctcgatatcttacgggactcaatcagacatccgagtgaatagttattgtcgtttgaattggctcagagcttcaacattcaagttcgagggtctcgatatattacgggactcaat

SEQ ID NO: 5993 - DNA, 362 bp, Glycine max
atgagccaattcaaacgacaataactttttactcggatatctgattgagtcccgtaatatatcgagaccctcgaaattgaatgttgaagctcttagcaaattcaaacgtcaataagtatttactcggatgtctgattgtgtcccgtcatatatcgagacactcgaaattgaatgttgaagctctgagccaattcagacgacaataactttttactcggatgtctgattgagtcccgtaatatatcgagacactcgaaattgaatgttgaacctctgagccaattgaaacgacaataactttttactccgatgtctgattgagtcccgtcatatattgagacgctcgaaattgaatgttgagc

SEQ ID NO: 5994 - DNA, 419 bp, Glycine max
  unsure at all n locations
agcttgccgcccagctcgtccaggcgagcatggttgcttcctccagaagcaacagccttctggaggaatcttctggagggcccaagtgggcctggttgctatttgcacccccttttttactaaatgcaccccccttttctatttttttgtaattctttttccgtaacgttacgaaactttacgaatttcgtaacgatacttattttccttctgtaagggtacgaatccttatggattatgtatttactcttttttacctttcgaagaagttacggaaactcacggattgcgcanaaacacctctttccgacttccgccacactacggaatttcacggatcacgcaagcctgcttccttttggatttctgagacatctcgggacttcatttattgcatgtcatcaagtaataatccccgg

SEQ ID NO: 5995 - DNA, 458 bp, Glycine max
  unsure at all n locations
ttannaattgaattanaacgttcaataactgctggtaatcgattaccatatatgtgtaatcgattacacagtgcaaattttgaattcaaattttagtagctgttgtaaatcagttttggccactggtaatcgattacatcctctggtaatcgattaccagagagtaaatctcttgaaaaagactttntaacttaaatttcttggccaaaccttttgctacttcaataggaattcccttcctattttaatatactctttctaagactctagaaactgtcttgatcatccatcttgaatatctttgtcttgaataaagctttgagaaacacgtaaccctttggcaagctttccctttggcaccatcaaaacattcagcttgatcctttgtctacaatctcccnctttttgatgatgacaatcctganatcaagacaagctatatacaagatgatagcacg

SEQ ID NO: 5996 - DNA, 396 bp, Glycine max
agcttgaaattgaacaacttaagctctcgatatactcaaatggtcataacttatcacacgaacgtccgattcacgcgcataatatatcgagacactccaaattgaacaacgtagggtcttgagaaattcaaatgttcataacttgtcacacgaaagttcaattcaggcacataatacatcgagaagctcaaaattgagcaacgaatgctctcgtgaaattcacatggtcataacttgtcacacggaagtctgattcatgcgcataatatatcgagacgctcgaaattgaacaaccaaagctctcgagatattcaaatggtcataacgtgttacacggaagtccgattctgggccataatatatcgagaagctgaaattgacaacgacgctctctag

SEQ ID NO: 5997 - DNA, 429 bp, Glycine max
tgagattgaacaacagaagctctcgatatattcaaatggtcataacttgtcacacgaagtccgattcaggcgcataatatatcgagaagcttgaaattgaacaacagaagctctcgagaaattcaaatggtcataacttgtcacacggaagtccgattcaggcgcataatatatcgagacgctcgaaattgaacaacggatgcactcaagaaattcaaatggtcataacttatcacacggaagttcgattcagacgcataatatatcgagaagctcgaaattgaacaacggaagctgtcgataaattcaaatggtcataacttatcacacggaagtccgattcaggtgcataatatatcgagaagcttggaattgaacaacggaagccgtcgagaaattcaaatggtcataacttatgacacagatgtc

SEQ ID NO: 5998 - DNA, 377 bp, Glycine max
  unsure at all n locations
agcttagcagncacttgttgtcctccatcgttatcctgatcaccgtgaaagtcctcaacaaccactctgtcatgcaccttatacagagcatcctgagccggagacacataattgcctccaccctcaacagcattagtctcatcactgagaccataaatagtaacaacgcgctcttcgcaccccggcacagtctcaccaatcctaatcttagccttagtctccaccctcagttgcttaacaatctcacctcccctaccaataacactgccaatctttcgacccgggcacacataacgatacacggtatcctccgaatcaatcacaaactgctctctatcatcaccatgattcctccttttaattggcccattatcatg

SEQ ID NO: 5999 - DNA, 371 bp, Glycine max
ctaatgagtgctatttttactgggactatctactatcttaagcgggacttggcattctaaatagatgttggaaaggatatattcaccctctacaagagggagtctggtgagcattttcaaaaggtaatctttttggggaattttatcacagaccacaactgtgatagccattattatgctttgagatgctacagttttgacgtcttagttcctttgtcccacatacgttggtttgtaaaatatgtgtctcattagtgttatatatagagacactcgcaagctgtagatgtgcactaataatacagtttttaagtgtaccatggacgtaggccactaatcacagaggctaaatggagatttttaatattgct

SEQ ID NO: 6000 - DNA, 378 bp, Glycine max
agctttggccaaaccccagcagcagttgtttccttagagacttgccttagcaccttgtctttgagactgaggataattacactgtgtgccttttgcagtagtgctttcttatccccatcagccatcatcttttcaagtttggcttctccatcaagtgcttccaccaggccctgctgaacaagaagagctctcatcttcaatcgccataacccaaaatcattttgccctgtgaatttttcaacctcatacttggccgagtccatttcttgaatcgaactcaaaaatcgctccacgctcaccgcaccaatttgttgtgccaagatcagattttagttcacaaaagaatgagtttcttgtatgaacaagaataagcaaaat

SEQ ID NO: 6001 - DNA, 379 bp, Glycine max
tgttgaaattgccatgtttggatgagttagacatacccattctgttttatggtttttgtgatgatgtttgtgatgtttatatgctgaaattgcctatggaaaactgttagagatgaatggtagagttaacctacggttagaaagtgagaatgtgatgttatgagtggaaaaagagtgaggctttgagggttggaaggttaggtctgaattctgtggtaaatggagattaaggtgagttaatactagcttgaaatgtcatttatgacttatgagaaagcttggactgtgctagagagaaaaacaaatgaccaaagtgaaccaagagccatttctagggcaaaattgggtgttgaggagtcaaactttgattcggtagaaa

SEQ ID NO: 6002 - DNA, 399 bp, Glycine max
agcttgcccagtctagctaggttgcttcctccaaaacaaccgccttctggaggaacatcctggaaggcccaagtgggcctggtttctatttgcacccctttttttactaaatacaccccatttgcttttttggtgattctttttccgtaaagatacggaaacttatgaatttcgtaacgatacttgttctcttttcgtaatgttgtggaaccttacagattacataatcatcccttttttgccttccgaaacgttatggaactttacggattgtgcattaacacttccttttaattttcggcatgtcacggaacttcacggattgcgctcaacgcttttcttttgtcttccgcatgtctcgaatcttcacaattgcctaaccatgggtgccaatacctc

SEQ ID NO: 6003 - DNA, 337 bp, Glycine max
tgtatgtgaaaggatgtgactcttcacatttgaatttgaatttcaacatccaaaggcactggttatcgattaccaaaatattgtaatcgattacaactttttgaaattaattggatcgttgataattcaatttgaaaaagttttcaaaacaactttactactggtaatcgattacaacaatctggtaatcgattaccagagagtaaaaactctctggtaaacatgtattgagaataatcatgtgctactcaattattgagacaaactcttcatacttatcttgattaagccttttcttgattcttgaatcctgatcttgattcttgagatcttgaac

SEQ ID NO: 6004 - DNA, 410 bp, Glycine max
  unsure at all n locations
agctntgccgatttagttttcatcggcgaaaggatcgaagtgggtttgagaagaggaaaatctgattatcctgctttgatgaatgggaagcctatggcaaatggagagaataagaatgagggaggaacccatgctgtgactatcgttcctatatggccaaatttcccaccagctcaacaatatcaatactcagccaatatcagcccttctcattacccaccaccctatcagccaagaacactcaatcatccataaaggccacccctatatcagccacaaagcctgcctgctgacatccgatccaaacaccacccttacacaaatanaacaccaactaggaggaatttctagaaataacctaagaattacnccattccatgtatatgctgcttactccctattactcatat

SEQ ID NO: 6005 - DNA, 338 bp, Glycine max
tcgtgctcagatccctcttggtggactaggcttaatttatacagccctcctaggtttagactaacttaaactaagcttcatcctcagatccctcttgttggactagacttagcataaatagcttacgaaagtttagactaatttagcctaagctttgtcctcagatccctcttgttggactagacttagaccaaacaacattattgtaacaacacatttaaaaccaaaacttaatccacagatccctcttgaagactaagtttcaattatgcttcattcaagttctaaggaaacaatacattttccaatgctaaaatcacctaaccagacacacaaat

SEQ ID NO: 6006 - DNA, 351 bp, Glycine max
agcttgaacctcacagacccaatatcaattatcttctacaggacttgttgtttccatggaggactgaaccaccaacttgtttgacaagatcctcacaccacgacttgtttggagtcatatgaaacgaacacccacagtccaagatctatttgtctcagtgttcttatgagacaccattaaagcctcagctgaatcatatccatcttcaactagagtagcatttccaggctctttagatcgatcttgctcgattcctttctgtctattacgacagaactcttcggtatggcctggtcttttacacgtggtacatctaatgtttgtacattacatccataccgagttggtgac

SEQ ID NO: 6007 - DNA, 403 bp, Glycine max
tcagcttgcacgccagagtgctcttcggctggccgattgctgaatcataatcatctgccggaataagtgggcaccaccattccataccattatagagaatcaaataatatatatatcctcagaatctcattaagtcatttttattgatacgaactgtatataagtattaacaaatttatcagacttccgcgccatacttgactaagttataagataacctataggatgctattactttggagataggaaatccgatgctgaactttagatgataaagagataaactttctcatattatcggttccgaaaattagcgcgttgagttttactaaatgacgacatcctagaacatatccattcaagcacattggtggaattatatcatacgctgatataagcaaat

SEQ ID NO: 6008 - DNA, 449 bp, Glycine max
  unsure at all n locations
tgcacacaagcaagtcccatttgattaagatcagtaccaaatattgcagatttcttctccccagtagcacgaagcttcgacacagcattcttgaaagtattgtaagattcagtgtagttctccaacacgtagtacatgactcccatctgagcttcaataccagctattgtgttttgctgaccagaggcttcattaagtatctctagtgccttgtgaagtaacttaagtgcctgttctagctcattcattgactcataaatggctgagacattcataaaaccactagcaacctcctctggagggaccccaggcatgggattctcatagatnntaagtgcactctcacaatatgattttgattcccttatcttccatgtcctgcaatacaagtcagcaaggcgtacaaagactgatcccacagaaggatgattctcacctttgtgagtcct

SEQ ID NO: 6009 - DNA, 464 bp, Glycine max
  unsure at all n locations
ccgattcggatcgatgaatgaaatcctctcatgcaagtacaatattggagctaaatcttcctcggaatgattagtcgtttatgaattataagatgagaaaataaaattatcaaatgtaaaaagttttacgtaattattcaattgtaagattttatatatattaaatttattaatttttaaaataattatcttaaaataatttaaataataatttataattaaataataatataaaattattttattctgttataataattacacttagggcatcttgacatatgcttcaaactttcaactcctaatttaattntgcttgaactttaactgccagccatacacgattcttagtacggctaagggatatattctgtaccgccaaaagcccaaaccccccttgaattattgattatntatttgcgccaatttttgttggacttttatgcaagattactggttgagcc

SEQ ID NO: 6010 - DNA, 302 bp, Glycine max
gcttgcttctacacttccacttgccaatagtttataggactaaccgcctgagatatcttttgtttccctttacaaagatttaagggactaactgcctaagaattctttgtcttaacacattggagggtacatcctttgtggtacaagtagagggtacatctacttgggttgtaatacttagaacaagagcgggtacatctctttgggatcagttcaagtggagggtacattcacttggttgttcaaagagaacaagggagggtacatcccttatggatttttgctttgaaaggaatttacaa

SEQ ID NO: 6011 - DNA, 134 bp, Glycine max
tgccacccagctcgcccaagcgagcagggttgcttcctccataagcaacagccttctggaggaatcttctggagggcccaagtgggcctggttgctatttgcacccccatttttactaaggacaccccctgcct

SEQ ID NO: 6012 - DNA, 432 bp, Glycine max
  unsure at all n locations
agcttttgcctcanaacgcattgtttccaacatccaaggctctggtaatcgattaccagaagagaattttgaagcaaagggtttaaaaagggttttgaatttgaattttgagtcatgtaatcgattactagatgtttataatcgattaccagtaatgacactttagaaaacactttggaaagacatgacccttcaaaatataattgtgtaattgattaccagaaatctgtaatcgattaccagtgaataattttagaaaaatctttttgaaaagacacatctcttcaaaccattttgaaaaggcacgaagggcctatatatatgtgtgtctgacttagaaaagcaagagagagatattctaagagaacataattgccaaattctctctcaacaactcctgggcaaacacttganaatctattgataattcat

SEQ ID NO: 6013 - DNA, 450 bp, Glycine max
  unsure at all n locations
ngaagaggatgctntaatggaggagaagaaagagagaagcatggagcacgaaattgaaggaataaaagagggaaagaagtggaactttgaagtgtatctcataagactttcattcatccaaagttacaacaagtgttacacatgcttctatttatagactaggtagcttccttgagaagctttcttaagaaaacttccttgagaagcttctttgagaaaacttccttgagaagctagagtttagctacacacacccatctaaaaactaagctcacctccttgagaagcttccttgagaggctagagcttagctacacacccctataatagctaagctcacccccatgacaaaaaaacatganaatacaaaaaaaatcctactacaaagactactcanaatgccctgaaatacaaggctaaaaccctatactactagaatggccaaaatac

SEQ ID NO: 6014 - DNA, 431 bp, Glycine max
  unsure at all n locations
agctntaaggctaagtcttcatgttgctcatgttgtttccctatctctaacagtccatcatcaatcactttcaagatcccttggatttataaaggtgcataataatatcatggacccttccttattataacatctcctcatttttgtctcttcctctcccaacgcccttaatggaagctctaatgacgactccaatgacacctccaacatgagcaatccccaactgccaccgcacacttctccttcctcctccgtccaaaaacaaagttaacacaaaagcatagtgacattgctaaactcaccaaaccaacaaatccacaatgcatgataacaaatagaatatattaaatttcaaaacgcatgaacacatgaaggttgggcattaatggagtacaaagttgttcacaataccataaaccaaatttatctga

SEQ ID NO: 6015 - DNA, 451 bp, Glycine max
  unsure at all n locations
ctcaagctgtcgtattaaggcatacttcanaaagtgtttgttgtctctaaacaatttctttttctttgtaagggattacatttgaagatgtattcattggtgcattaaatgtgagcatttaatgcacattctctccatgttgaaacgccactctctttagctgtcttgaaccacacttcagcaaaggtcaacatgttgtcgcttagaacagttctaatcacaacaggtgtagaccacgttgtttgagatgaagaaagatgttgttcttttaagacttgaatatcctcttactttcttggacttcgaaaaatcttagaaaaaaaatttcaagacattctcagcagaatagatctcagacacaaagcattaatgaagtcttaaatgcttatcatagcttaacatttgttngcttctttctaatctttcaaacgcatatgcaaaacaacaattc

SEQ ID NO: 6016 - DNA, 433 bp, Glycine max
agcttgccacccagctcgtcctggcgagcatggttgcttcctccagaagcaacagccttctggaggaatcttctggagggcccaagtgggcctgattgctatttgcacccccattttttactaaatacaccccctgcctttttttggtgattcttttttcgtaaagttacagaaacttacgaatttcgtaacgatacttgttttctttccgtaatgttacggaaccttgcggattacataatcatccccttttttgacttacggaatgttatggaacctcactaattgtgcaacgatgcttccatttgatttccggtgtgtcacggaaccttacggattgtgcatcaatattttcttttgatttccgcatgtcccggaatttacaaattgcctaatgatgggtgccaagcacctcacaaggaccaaacaaaag

SEQ ID NO: 6017 - DNA, 387 bp, Glycine max
  unsure at all n locations
taactatgctagtataattattttgtgtcattaatctttctccttttaaactccattcgtgcaactagatatatgtgcgattcaatccttgttcaattaatcttgcattacataatttaaaagggtttttcaagttgtttctcaatataattactttgataaatggttctaaatttatcctatataaagaaaggtgtgaaaagtttgtttttgaaaaagagataaagattttgaaaatatatattcacctccctctctaaatcaatctacatggatcaacatagttgctatcgagttgtcaaactagaatcttgaanatttgaaggttgagtggtacatcctatttttcgtaataaattaaaaagctttttagtaaaaaataaataa

SEQ ID NO: 6018 - DNA, 416 bp, Glycine max
  unsure at all n locations
agcttacaaatatgtgctatatccaagcccataagttatatcaaatcacatctagataagataagatacgataagatctaattttatagaataaattagtctgccctcttcaagtccaagcccaattctagattcaagcccaatgctagattcaagcccaatgcttcattaattcctgaaattagattaaaaacatcaaattggctgaatgggcccaaataataaaactgcctaattaattgacaattaagaccaatcaataattaaaatggtgcaaaaagggtttagaaaatagaagatnatgatggcacatcaaaaccccccatacttagccttttgcactcctgtgcgaaatgaaacatagaacaagaactaaatccaaggatatcagagggagacaaacaaatacattcaca

SEQ ID NO: 6019 - DNA, 400 bp, Glycine max
tctgagtgaaacaatgcgactattcactattcaattagaatttcaacgttcaaggacactggtaatcgattaccataacattgtgatcgattacagccttttgaagatatttggaacgacgcacatttagtttgaaaactttttcacactcattgtgctactggtaatctattacaacaatatggtaatcgattaccagagagtaaaaactctttggtaaacgctttgtcaaaaactcatgtgctattcaaggatatgaaaaaactttataatacttatcttgaatgagtcttttcttcattcttgaatcttgaggcttgagacttgaacttgattcttgagatcttgagacctgatgcttgagtctaggctttcttcttgagtcttcgaatctccttga

SEQ ID NO: 6020 - DNA, 355 bp, Glycine max
agcttgcaatgaaagatattgtgtatgtaggagtctggtgtcaatctagacacacaaaccaaggccataattcaaaataggtaagatagaaatgatgatagtcattggcacaaatattgacttctgcaactgctactaagcttgcaatcaaagatattgtatatatagtaatgaactttccattcagtaacacaaatttgttttatttgtacgcttaaatctgctagattgtctgttcaacttgaaatctcaaatttctatcttacatcttttatttggcaatatgtaacaaaagatgcaacacataagtttactaaatgttacatcagagatgggcattagttgtttatatatt

SEQ ID NO: 6021 - DNA, 437 bp, Glycine max
  unsure at all n locations
gggttagaggtacttacccgttgaatactgaagacaacgatgaacgaacgatgaatcttgaagaacggtcgagaatcttcgcgtaattactcacggaaacgttacagaagcgcctcagcttggattttcttcacggaactaattatcctcaacaatttcgagagagagagaagtgcctaaggggctgaacctttttcttcttcacttctccccctatttatagcanaataggggagaagcttgccgcccagctcgcccaggcgagcaaggttgcttcctccagaagcaacagccttctagaggaatcttctggagggcccaagtgggcctggttgctatttgcaccccttttttactaagtgcacccnccttctatttttntggtaatctttttccgtaacgttacgaaactttacgaatttcgtaacgatacttat

SEQ ID NO: 6022 - DNA, 354 bp, Glycine max
  unsure at all n locations
agcttacagctttgtcgagctattctgctattgcacagatatgtatatctatatccaaacgcgatatataggaacatgaaatacaacttagcaggattaacttaagtataataacatgttcttttacttttatataattagaaattattttgtacatcgattaataattacttataaatacagataaaatataccaaaatatagatttgaaaagcattttaagaaaatactagcttatttactaaacatatgtgagaagatccataattacatgagaagagtatttntcactctcaagaacatgaagagacggacttattaaatagataaacaagttttaatatatctatgttg

SEQ ID NO: 6023 - DNA, 375 bp, Glycine max
  unsure at all n locations
ntagcgaaacaccattgtgagcgaggagggaatgcaacattattttggatttggaacacgcaattgtgaccaccaacgaggcattntaaaataccagggatgcctgtttcgcatatactgctggcgaaaccagcatggctcatttcgccactactgctggcggcaccctgttgctcctgccccctctgcgtgcctagactgcagcctctacgcccctacactggcctactgcaatgtattgctagtttgactggcgaaataactgaggttactttgcaagtgccagtggcgatttcactgccacgtggcgcgtcgcatgcatgtttcgccaacatgcatggcgagttacgttaaacacggaccctcgcgtaattt

SEQ ID NO: 6024 - DNA, 436 bp, Glycine max
  unsure at all n locations
agcttcacaatatttcagaagtctaaacatgcactgttgcgtaatttataaagttttgtagcattccggaagtcaaaacaagcattgttgtgtaatctgtaaagtttcacaacattccgaaaggaaaagcaagaatcgttacgtaatccataaaccatagaacctgtaaagtttcggcaggttttagaaagaaatcggcagaataacacaaaagggggtgtatttagtaaaatgggggtgtaaataacaattttcaaatctgggcccttctagaggattctagaccttttctttctccttggctaagcaaccagcttgcctgggcgagctgtgcggcaagcacctccacgttntgntgaanaatggtttctgggacttccgtaatgcttccgtaaaatttctgaaaaacttgggtacgcatgtttcacttaataat

SEQ ID NO: 6025 - DNA, 246 bp, Glycine max
accattatcgactccctttttgcacatgttctgtagttgcatcctatccagaaccatattagaatagtactgatactgcctaacgaaagcaaccattaagtccttccaagtatggactcgggaaggttccaagctagtgtaccaggtaacaactaccccagtaagactttcttggaagaaatgtattagcagatcctcatctttgcgtatgcccccatcttctgacaatacatctttatatggttc

SEQ ID NO: 6026 - DNA, 417 bp, Glycine max
  unsure at all n locations
agctntctaatctataaatagaagcatgtgtaatacttggtgaactttgatgaatgaaagtcttatgagacacacttcaaagttccacttctctccctcttttattccttcaatttcgtgctcccaccttctctctttcttttcctccattaaagcatcctcttcaagcttcttatccatggtacattcttggtggtgaagctccttcttccatggcttattccctagtggatggtgcctcccctctcccattctccattgccttccactgcatctccatggtggaaaatcaccattgaaggacctcattgaagctcanagatccagcctcgttagaagctccacaagcatgcttncatcaaggctccctccaccttggaaagggattggccttcaatccgaggttcttcatactct

SEQ ID NO: 6027 - DNA, 428 bp, Glycine max
  unsure at all n locations
agcttgaacctcacagacccaattccaattatcttttacaggacttgttgtttccatggaggactgaaccaccaacttgtttgtcaagatcctcaaaccaagacttgtttggagtcatatgaaatgaacacccagagtccaagatctatttgtctcagtgttcttatgagacaccattaaagcctcagctgaatcataaccatcttcaactagagtagcatttccaggttctttagatcgatcttgcttgtttcctttctgtctattaggacagaatcttcgagtatggccttctcttttacagtggtaacatctaatgtttagtacattagatccaaatcgagtttgtgacttggatcttttcccttctgtcttatcatccttcttgtattggcttccacgaactaggagtccnttcccatgtagag

SEQ ID NO: 6028 - DNA, 461 bp, Glycine max
  unsure at all n locations
gactcttcggctggccgattgctgaatcataatcagctgccggaataagtaggcaccaccattcaataccattatagagaatcaaataatatatatatcatcagaataaaattaaatattttttattgataggaattgtatatgagtattaagaaatttataagacttccgcaccatacttaactaagttataagaaaacctattggatgctttttttttggtgataggaaatctgatgttgaagtttagatgaaaaaaagtaaaactttctcatattatcggctaggaaatttaatggtttaaattgtaataaatgacgacatacaagaacataaataataaaaaacattgcaaaaattatatcatacgctgagataattaaatntgttgagataactaatanaacatagattattccaaaatacacacattgctaagaatattatatgctaatagaaaa

SEQ ID NO: 6029 - DNA, 402 bp, Glycine max
agcttcaatgtccctgttcacatcttcaacctctttatcaagcttatctgacaaaatcctcatgcagtcaaggcatgaaggctgttcaacctgtaaccacaaacagaaaacatagattatgacccaatcacctaaaaacctatcaaatacattacataatacatatttacatgtttcctccatccacaaacctgcatctgcgtcgtggcaatctcaaatgctcgagtcaggacagtaatagtagaattaaacccagagttatgaggtggcaaatggccaccagaatcagcccctgtgcccgacgaatgcaccgcgtttccatcggtccccgattcggacttgtacacaaccacaaacgactcctccatggccttccctggctgtgcagcagcatcgccgcgt

SEQ ID NO: 6030 - DNA, 412 bp, Glycine max
  unsure at all n locations
actaaccttctgaacgggatcatatattcattggcatagattaatgtatgaagatgtggtacgtgatatcttttggtgtcaccctgatgcagtgaagttagtcaatgcatgtaatttggtgtttttcgtagacagtacctacaaaacaaacaagtacagactcccactacttgattntgttggggtgacaccaacaaggatgacattctctactggttttgcatatctggagagtgaacgtcttaataatgtggtatgggctttagtgttggatcaagtggcctcggaataattaagaagggggggttgaattaattattattgaaactttactaattaaaaatctacccttcttaggcttttactatgttgttaagaaagttaagaacagaaatattaacttaaccaaaag

SEQ ID NO: 6031 - DNA, 433 bp, Glycine max
agcttataagaacaaaattgccttaatcatttccaaatatgcatgtgaattaggacgcatcaacaagaatcaagccaaggctattgtgcaagcaatcaatggggcaaaacacaccaaatgattataatgatggatggctcaaattctcacaaaggtaaaatcatcactttcaaattgagctttcaaaactatcatgacatgtagagaagaatcaaggatttcaagtcacaaaatgtcaagaacttttatttcgaaacaattacccatttcttgaacatatcctataattcaaagaaaaacatgcaaagtcgtacgtgcacacaaaattgacccaaaatattaaactgaaaatccgacgaaactaacaacattaacaaattaacacaactaacaaattaacaaaaccaacaaaactagcaaaaccaaagaacac

SEQ ID NO: 6032 - DNA, 345 bp, Glycine max
agctttcgttttcaattacgagcgactcgatatcctacgggactcaatcggacatccgagtgaaaagttattgtcgtttgaatttactcagagcttccgttttaaattacgagcgtctcgatattctacgggacacaatcggacattcgagtcaaaagttattgtcgtttgaatttgcttagagctttagttctcattttcgagcgtcttgatatattacagggctcgatcagacatccgagttaaaagctattgctgttagagttttctcagagcatttggtttgaattacgagcgcctcgatatcctacgggacacaatcggacatccgagataaatgtattg

SEQ ID NO: 6033 - DNA, 379 bp, Glycine max
tgcatttggaattgcgaaagccccactccatcattaggattagtacctgacatctcaaacaaacaaatcaaacgtaacaagacaattatagttgctgtttgaatctcacccactcaagtgtatcacacaattatggcttttctctaatgaaacactcttgccttttaccactctaattccccttgagttcttatgtaattcaagagattatggccacaacaaagaacaattcaccaatatgtgtaaggtaaggctagagagacaaggaaaaggttaaccaagataaaggctaacaatgtttttaggcacaaatgaaggagataaaattcagaatttatgaattcaagtaacaatccttcatgccaccaatatattacct

SEQ ID NO: 6034 - DNA, 401 bp, Glycine max
  unsure at all n locations
agcttataagaacaaaattgccttaatcatttccaaatatgcatgtgaattaggacgcatcaacaagaatcaagccaaggctattgtgcaagcaatcaatggggcaaaacacaccaaatgattataatgatggatggctcanattctcacaaaggtaaaatcatcactttcaaattgagctttcaaaactatcatgacatgtagagaagaatcaaggatttcgggtcacaaaatgtcaagaacttttattttcaaaacaattacccatttcttgaacatatcctataattcaaagaanaacatgcaaagtcgtacgtgcacacgaaattgacccanaatattaaactgaanatccgacgaaactaacaacattaacaaattaacacaactaacaaattaac

SEQ ID NO: 6035 - DNA, 414 bp, Glycine max
  unsure at all n locations
ggtacccatcacatgtggtactatgtggtggtcgggcgatggtgcacaacaagttttccacatccacaatgcgcgcataaacccaccatcccctgttgcccacctccaactgagctcacgtactcccacgtagcccatatcctcgtttctctcaacaccgggtccccatcaatcctcccaagcnttcccaacatcaaagtaatacaacattcaaacagcacaaactatcacagccaagaaaacagaacaaaggcagaaaactctgccaaaacaccaaccaaaaatcacagcttttcccactcaaagaccccagtaacaattccttcgatccaattcgtaaaccgttggatcgactncaaaattttactggaagtctatagtgcataagcctacattttgaccgtgggatctact

SEQ ID NO: 6036 - DNA, 429 bp, Glycine max
  unsure at all n locations
agcttcccttatcgatattgccgtatgcattacttaacatcagtataaacaagagatgtcagtggatcttaggtattccacctttccatcaagcattaatgccttttttggagcacatgcattaatatctgattaacatgtgttcatgctatttgtagaaaattgtatatcattgtacattgtatcaatatttttctcaagattctctagatacttttctcaagacatcacgattgacaagtcacaagtatacacaatttataaaaaaaatggtgaaaggcatcggaggaaaccgaanaagttacctaatagatggacattntatacagtcttcaggtctaggagttggtggcactcgacaatataaaaaacctgttaatgtcaaagcatatgcagccacttttcccagaagtagcaaaacatttgtag

SEQ ID NO: 6037 - DNA, 401 bp, Glycine max
  unsure at all n locations
ngaacttgcctgctaagcgagagtgcgcactgagactggattacacgctgagcgagctgtccaattcttccaactcttcttcaattcttgcatcaatattcctctgaagcactagaattcttcttcttttgacttctgctaataaaaaattgcacagatgttaatctcttccttatttcgttctcaacaatagtaaagtgaagaaatttcaatcattattagtcgaaactgactatcaagttaactcagatttcgcagttatcaactgctccaaattaaaacatttgtttgtcctcatgcataagacaagttctgagtgtgccggcacatgagataactatgaatccattaaacatctgtttgatctcgtgaggagcctgacgaatcacatggagatgaaa

SEQ ID NO: 6038 - DNA, 385 bp, Glycine max
agcttagaaatgagaattattaatagttacttatgggatcaatgaactgcgtgataaagtgaacaacaaagtttgatgcccaaaaacacatgtatacttataactaaggttgaaatagaatatgtgataatgctaataaactttaaatgaacgacaaagacgcgtttattttattttgtagcgtgatacattttcttaatttagacgtaccacagcagtgaattatttatatgctaaataccaatcgtattgttaataagaataatcatgagaccgatagttattagatattaaccagcgcgcccaacatataagattcataaaatgtaatagcatgtccctcaagagagcactgtagctaacacctgaagagctatacctttcc

SEQ ID NO: 6039 - DNA, 360 bp, Glycine max
agcttatagccacaagcctagtttgctattataaaaacctacctaatacaaacatcaaagtcagcaatatgattgtgtgaaaataaatagctgcatagccagccattatgtttgcttaacactagagtgttttatatatgtagtagtacattagtactgaactttgccatgtatgaactattaatgaagcatatacatcagtataactacaacatattttaattatagcatgctatggttaattacttcattattgttttttttttatctatatcgaagaggttacaacaattcagataacttacaaaactaattaagcgagattccctcagttattattgtttatttcagcctaccttc

SEQ ID NO: 6040 - DNA, 156 bp, Glycine max
tatttgtgattattgagatttttagaaggagctaatagtgaatattcttcacctttatttttaaattaaatagaagccaaaaacaattaaattaataattatgttgaaactcactggaaaataattattaagtaaagataacccaacttaaaactc

SEQ ID NO: 6041 - DNA, 352 bp, Glycine max
agctttgagataattcaaacgacattaaattttttcttggatctccgattgtgtcctgcagtatatcgacatgcttgaaattaaaagcagacgctatgagcaaaatcaaacgacaataatttttaattcggatgtccgattgagtcgtgtaatatatcgagacgctcgaaactgaaaacagaagctctgtgcaaattcaaacgacaataactttttactcggatgttcgattgtgtcccgtggtatatcgagacgctcgtaactgagaacatatgctcgtagcaaattcaaatgacacataactttaactcagatgccgattgattcccgtaatatatcgagacactcaaaa

SEQ ID NO: 6042 - DNA, 394 bp, Glycine max
tggatttcctgttgtatggaatctttccttcctaagatggagccaaacccagtccccctcattaagaactagctcatttcttcctctattgcccttaattgaatacacctttgtttggttctctatttgggtcttaaccctctcatgcaacttctttacaaactctgacctagattccccttctttatgtataaaagaagtgtcaagtgggaggggaatgatgtctaagggtgttaagggattgaacccatagacaacctcaaaaggggattgcttggtggttctatgaacccctctattgaggcaaattctacatgaggaagatactcatcccaagacttatggttgccttttagaagagcccttataagagtggatgaagacctattcacta

SEQ ID NO: 6043 - DNA, 222 bp, Glycine max
  unsure at all n locations
agcttgctaacccatggaagctcctaatatctcccacactntntggggtgggccattcttggatggccttgattttctcagggtccacttggaccccatttcttccaactacaaaacctaagaagactatattatctacacaaaaggtacacttctctatatttgcatagagggtgtttttgttggatcgagtggcctcaaaataattaagaaggggggggg

SEQ ID NO: 6044 - DNA, 353 bp, Glycine max
tatgaactagatctgttaagatcgataactatattcaatttataactattattattttacatattttttatttacttattttatacaaaaagcaactgatgtgaaactaataagaacttaattatatgaatttaataacataaaatacatcattaaatcttatacattaattgcatttttgtaataaattaaataatacattaatggaagaaaagttgttcgagcaaaagttttaaatcaatcactcctttcatattaaagtttcaactcgtgtaggtttgggacaggtatatgtattggttttatcgcatgaatgggaatggatactattatacccatcctacacatgccca

SEQ ID NO: 6045 - DNA, 378 bp, Glycine max
  unsure at all n locations
agctntgagccaaaatcctgactcaccatataccttgacccagggtgagaatgtcaatccttaccctcggaagcaaagaaaanaggagagaaggaaaatttccaatcaaaggaaaaaaggagaggaaaggaaattcccaatcaaagagtgggagaaagcaaaaagaaaagaaagaaaattcccaatcaaagaatgggagaaagaaaaagagaaggagaagaaggaaggaaagctcctgatcaaggatcgaaagaaaacagaagatatgtgcagaggggatctctggaccagacaatatctaaacaaatacagaattgtcaccaaatgaacaaaagaaagaanaggaaaccataacctaanagtggtcttctccctttg

SEQ ID NO: 6046 - DNA, 437 bp, Glycine max
  unsure at all n locations
gcttagcgcgagtttggcgttgagcgaatattcacttactcgcgctaagcgcgacatcgaggtaagtgagccctttttaagcctggaatagcagaaaagaaaggggcactgggagatagaaaagagagcgctgaatagccataagagcttcaagagtgaaatacacagaggcaaagaacagagcaaagaagccaacttttgatcttttaggaagagttttgagtgattgtgagattcctagaggtggaggagacatccccactcctttgtaagcaagcaatttctcttaattcctcttcttcagtgtaaaaggagcttccttgctatggaaggctaaaccctgagttggggattcttgctgagtaattgatgtaaactctntccctatctaattaagggtgttntatgcattcattgtttctatcagtactatatta

SEQ ID NO: 6047 - DNA, 546 bp, Glycine max
  unsure at all n locations
aggctttgtaccatcattacctgcactatatatactcaagcccgcttctacaccctacctatattgtggagcccttaataccatgcccacaaataatgaaaccttaatctaatatgtacaaagattagcgggctcatacttaacccatgggcctgaaatctaccctaaggctcataagaaccctatggccttctcttgcatctctagcccaatcttcttggagtcttctatcaaattcccttgtggggtaagaatgcatcattcccccccccccttgaaaaggatttgacctcaaatcccaagggtcttgaaactctgggcttttttcctcaacacctgtaaaaagaacaaaaacatatgtattagtggtgtttggtatgttaaagtaanggaaggtctgaaaacccatttcctgggcaatcttccatgaaggaacatggntnctcaccaactcaatgagtggtgccacagtatagaanaatatgggacaaaccttcttgtaaaagttgtaagcatggaagccccacatttttctacactttgtgn

SEQ ID NO: 6048 - DNA, 387 bp, Glycine max
  unsure at all n locations
gaattacattatcctgaagcatccattgttgaaagatacattgcagaaaaagatatggaattntgtttagagtacattgaaaatgccaaaccagataggctttcggagtctcgatatgatgagtgggaggcaagggtttgcgagggctacatgttataactttgggtctaaaggaattacaacaagcttatttgtatatactaaataatagtaatgaagttctgtcatacatagttcattatgaagcttttgttagggaaagtaaaccataaatgaccaagaatatggtgttgaaagaacataataagactttcctaaattggtttaaagatacaatctttggtggtgataaattggtttaaagatacaatcttttgcaatgataat

SEQ ID NO: 6049 - DNA, 443 bp, Glycine max
  unsure at all n locations
gctgctaagagcaacaaataactacaatatgagcaggtttcttggtcaaggtggctatggcacagtgtacaagggaatgttaccagatggaaccatagttgcagttaaaaagtcaaaagagattgaaaggaaccatagttntataatactagtacttaattaatgcacatgtacattaaagtctaattgaataacattatttgaatagtcttgttggccatactgattagttgtgttgtattatacatattagctggggattccaatgcttttcgtccttcaaatcaactatctttttcttctttgttcccattattnttttcttataaaatctaagaagaagaatattntacttttaaatactttcaagacatattgcttacagcagcaacatacctacacaactgttgttgggatcaccattacgtgttctgttgtgtctt

SEQ ID NO: 6050 - DNA, 447 bp, Glycine max
agcttgtgattgattgtggaacaagaaatgcgtgaattaattagtataaaattgtgataatttaactaattgagttcgaattttggatatataattattttaaagaaaaaaaatcgactataataatcttacatgacttaagtagatttatttttaagaaaagatacatgtaatctttactgtaaaaatatataaataatgtattccagtcaatttgatcagactaattaaaaaaaaaaaagatttctgatcaaattataaattacaatcacgattaggatcataaaaaattatgtcacgcgaagatattcctattaatttcatcctcagaaatatacatatgctgtaaaggcaaaagaaatacattatggaaaagaatgaagcattattctaatgaacataacaagaacaaagtaaaatcttgcattaatgatgatattgattatg

SEQ ID NO: 6051 - DNA, 443 bp, Glycine max
  unsure at all n locations
cctcacactataggacagctcataattcatagagtaatacaccctataagcaagcgctacaaaatttcagattactcaaactttatccaaaataggaaaaaacctcacgacacgcatagtcaaccaaactcctctttatcaagtaaagaccaaataaaaaattcgcaatagtgataataataacaataactaatattaatatcaattaataagataaatacattacatcaataaaagaaagaaagaaatcaagtagcaatagcgtgatgagctacttaacacgttctgaactanagcagaanataaaaattattatttatacaaagaataacctcaacaaaaggaagatttgagacatggcaaaaaccagagaggaacaacttgcatcttgaacctanagactcattcttttcttcatttcttcatctcaaagcaagttcatt

SEQ ID NO: 6052 - DNA, 418 bp, Glycine max
  unsure at all n locations
atttggtctgtgcactatatttgacattgtggcattgagagattangcctaatacttagaaatagtccaaaaggtgattgttatcttttataaaattgacttatatttatttaaaaaaacattgtttatcatcataaaaataaaatttactaacttagatcttaaggagtttataacaaataacgcacagtatttaactaactcacttaaattccttgatgttgaatttaagtatagtcgataatataaaattttagataacttttctattactaatagatgttaaaataattaaataatattgaatttaatattatacttaaattttatcttcttttttattaaaccatcttgtaataattatatattgtctttaaaaaagntactanattaatcttatttttatctactcttatta

SEQ ID NO: 6053 - DNA, 399 bp, Glycine max
acccgtcatatgtggtactaggtggcgatcgggcgatggcgcatatcaactctaccacttccacaaatcaaacatgaacccaccatccccagttgcccacctgtgactgagctcacgtactcctacgtagcccttatcctcgctcctctcagcaccgggtgcccattaaccactccaagcttccacaatatccaagcaattcaattccaattaccatgaactaccctaaaccaagaaaacagggcagaggcagaaaactctgcccaaaacacattcacacattacagctttccttactcatatatcccagcaacattctcttcgcttcgaatcgttaaccatagaatcaacttgataattatactggaggttcctagtacataagtctacatcttgacc

SEQ ID NO: 6054 - DNA, 361 bp, Glycine max
  unsure at all n locations
agcttgngagcagtctaatagattggctntgaacttgatgagatttactatagccgcaaatgtgaagctatgtatgcccaaaataaataatggaaaggaattcatgaaattggtcaaatattacttgcaatttgatattactgacaagccaattgtggagaatttatcaagtgagctaacaaacttggtcttaaccaattcatgatcatctgacatagatggttaatctggaagcaaagttgaattccatggagatggaagtgagtgagttctttctagtacaatttattttgaattctcttccaactgaatttggccaatttcaagtgaaatataacactcttatggaaaaatggaattt

SEQ ID NO: 6055 - DNA, 479 bp, Glycine max
  unsure at all n locations
tctctntgttntccttcttcttctttgtgccaaaagctctccaaagttntctggttntctaaaccttgaaaacttgtgctattcattcttttcatctcttctccctttgccaaaaagaattcgccaaggactaaccttctgaattctttttgtgtctctcttctcccttttctaaaagaacaaaggactaaccgcctgaattattttgtgtctcccttctcccttgtcaaagaattcaaaatgacacagtctgataattcttttgattcttccttttcccatatacaaaagacttcaaaggactaaccgcctgagaattcttttgtatccccattcacaaagtatcaaaggtttaaccgcctgagatctttgtcttaacacattggagggtacatcctttgtggtacaagtagagggtacatctacttgggtttgactgagaacaagaaagggtacatctcttgtggatcagttctagt

SEQ ID NO: 6056 - DNA, 404 bp, Glycine max
  unsure at all n locations
agacaaaatataacatttgtattcagtgcactctctaatggtcaaaaaagggaacagttgtgaaatacagagacctcccctatctggcgcgtcagaccttgcctgtaaaccaaaatcatagtcgccctggacaacctaaccaaagaaatccggaccccacttgtctaggcttgggggccttgacagcttgacaaaactccaaatctcacacctgtcaatcttaccactcttaacactggacaataattttccatgcttgggggctcgacaaactcacgaccctnctacttgtcaaggctactacctcggacatcagacaatctccattgtgcactatctagggtccacaaaatacatgtgtcaaaaaatacacgtgtcaagctatgtggattatgagcacacat

SEQ ID NO: 6057 - DNA, 113 bp, Glycine max
tcatacaactcatatgcgtccgcttcatagagtgtaatactaaatctatgaacaatcgccatatcatgtgagtctactactatatcattcctatctaataaaagggagacctg

SEQ ID NO: 6058 - DNA, 382 bp, Glycine max
agcttcaggttgttcaattgctcaagaatgatgcacagaagggtaaaggtctgtatggtggtcggcagaggagcataaaccacagagtcttgcaacaggtacatattttttattcatggccagttgggttactaggttaaccaaggtgtctagtttaccttcaagcttcttagtttcagatgatgcagatgagtttgtggctacctcatgcactcctctaattactatagcattatttttggcgctaaactattgggagttggaagccatcttctcaattaaattcctagcttcagcaggggtcatgtctccaagggctccaccactggcagcatctatcatacttctctccatgttactgagtccttcataaaaatattga

SEQ ID NO: 6059 - DNA, 367 bp, Glycine max
  unsure at all n locations
tcnggctgctgaattgctcncggntgctgcatggaagggcaaaggtctgtatggtggtcancaaaggagcacaaaccacagacccttgcgacaggtacagatttctggttcaaggccagttgggttaccaagttaaccaatgcatccagtttgccttcaagcttcttacgttcagatgatgcagctgagtttgtagctacctcatgcactcctctaatgactatagcatcatttcttgcgctacactgatgggagttggaagccatcttctcaattaaatgtctggcttcagcaggagtcatgtcttcaagggctacaccactggcagcatctatcatacatctctccatattactgagtccttcat

SEQ ID NO: 6060 - DNA, 413 bp, Glycine max
  unsure at all n locations
agctagacantgtcacatgataaatggttaataaaaacattcgaacaaatcaaagtattgttttaaaatttagaaaacaacattaaacccaacaaataaaaaaaaataatcatatgttcatatataattatttttaaaaaaaatatataaatgatagttaagataaacatgacaataaagcaccacgagattgtatgttatttcttattcttgttccctaacatcgtctccatcatcccgtcccttattctagacgacgatactaaacaaatatcgaaaagaaaaaatgaatattaataacaataatagttaccatagatacttataaagtataattgtaattgtgtagaacttattagatgagaaccaaaactaatatgattgaaatatataatatatgttataaaataaca

SEQ ID NO: 6061 - DNA, 391 bp, Glycine max
cgtatggttaaagtctcatgaatgtcacgtgctcatgctacaattgttaggcgtggctatacgagacatcttgcccaacatagtcatgataacgataactcgcctatgctttctcttacatgctatatgtagcaaagccattgatccaataatgtttgatgagttggaaaatgacgccgaaattatactgtgccagtcggagatgtattttccccctgggttctttgacgtcatgatccacttgattgtgcatctagttagagaaatcaactgttgcggacctgtttatctatggcggatgtacccacttgagcgatacatgaagatcttattagggtgtacaaagaatctatatcgtccacaagcatctattgttgagaggtacattgca

SEQ ID NO: 6062 - DNA, 328 bp, Glycine max
  unsure at all n locations
agcttatgtagcctatgttgataactggtgaaagtttttcaggttaaagcagcataacttanattggatcatcaaatatataaagatttggcatgcatgtttactctttcattntacttctttcaaggctttgtataggaatgtgaaaagcacgtgatgtccaacttgaattgaacaatgctgcaatctgtcaattttagattaatttcatatgttttgttgtagttgtgtagtgtcttatcatggtgctttaatgctttataggctaaacaatgaacaagtaatgggttatcaaaaagagacttgtgggttgacaattggagaaact

SEQ ID NO: 6063 - DNA, 350 bp, Glycine max
  unsure at all n locations
tctccgtgtaatatccgagtttagaactctcttgtaatcttcaaattatnttacacagataataaaatgatctcttacccctctctagatcttctctaaattccttacggcatcagaatctatcctagatccaataaaaaaggtaacctaccatattatccatgcactgaacccaaaagtgatgggcatgacgggtgtattgtgaaaaacccaagtcccatatcggctagagatagtgccaagatagaaagtataaggggcagacaacccttgccctatgatctaacttttaagggtaagttagaccacaaccttgtgaactatattgttgcagatgattgcagatcatt

SEQ ID NO: 6064 - DNA, 419 bp, Glycine max
  unsure at all n locations
agcttcgcaacanattctactctccgatcctcaacatcgacaagctgtggtccctggtcccgcaagaagtgaaggacaacgcctccaaggagaacaaggcgccgctcatcgacgtcacgcagttcgggtactttaaggttctcggaaagggcgttttgccgcagaaccagcccgttgtggtcaaggccaagcttatttccaagatcgctgagaagaagatcaaagaggctggcggcgccgttgttctcaccgcttgaatttgacggtatcacttttttgaacgatttangttttgttctgatacgttttgttttggattatgttgntgnttagtctctgctatatttcangagtaaattgaaggtttattattttaatttgcgcgaataactatgccagcctgatgacattagaatcta

SEQ ID NO: 6065 - DNA, 342 bp, Glycine max
  unsure at all n locations
agctngcctcanagaggtccaggaatgatatggcggccgaagggactagttccgctcctgagtatgacagtcaccgctttaggagcgctgtacaccagcagcgcttcgaggccatcaagggatggtcgcttctccgggagcgacgcgtccagctcatggacgacgagtatactgatttccacgaggaaataaggcgtcgacggtggacatcactggttactcccatggccaagttcgatccagaaatagtccttgagttttatgccaatgcttggccaacagaggagggcgtgcgtgacatgagatcctgggtaaggggtcagtggatccccgttgatgccg

SEQ ID NO: 6066 - DNA, 489 bp, Glycine max
  unsure at all n locations
tccatcaatctatctctctaaccatcaaggccgatatatgtatggatatcctactcaaggcgtcagccactacattggctgtgccggggtggcaactaagctcaaaatcataatctttaagaaactctaaccatctcttttgacgcatgttcagctctttctgactaaacaagtacttaaggctcttatgatcactaaacacctcaaacttggagccaaacaggtaatgcctccacatcttaagggcaaaaactacagcagctaactccaagtcgtgagtgggataattcctctcatgagtctttagttgtctagaagcataggctattacttggccattatgcatcaacactcctcctatacccatctttgatgcatcacaatacacctcanatggttccctcgggttaggaaaaactagcactagagcggtcgtcaatctttccttaagggtcgtgaaactatgctcacactaggtgtcccacccat

SEQ ID NO: 6067 - DNA, 203 bp, Glycine max
tgccccaagagactcagcataaggatgcacagaccatagttgcgtatgtagaacaattgtatgaccaagtgaatgtgcaaattgcaaagaagaatgatagctatgccttgcacgcccaaaagaaaaggaaggaagtggtacttgaacccggagatgatcttggacatttgaggacaaatgttttccaagaaggagggaatgat

SEQ ID NO: 6068 - DNA, 298 bp, Glycine max
gagcggctcgatatattacgagactcaatcggacattcgagttaaacgttattattgtttgaatttgctcacagcttgtgtattcaattgttagtgtctcaatatgttacgggacttaatcggacatcggagctaaaagttattgtcgatggcattggctacgagcttacattgtcaattacgagcgtctcgatatattacgggactcaatccaccctccgaggtaaaagttattagtcgttgcattcctctacgagcttgcgttttccattacgagcgtcttgatatattactggac

SEQ ID NO: 6069 - DNA, 452 bp, Glycine max
  unsure at all n locations
agcttgcttctacagtaagtgttgatagtcaattagcacttagtcttaggaaaaaggtaactgtgttttaaaatttgcagatacgaaaaaccaacttgcagacatcttcacaaaaccactaaccaaagattctttctacaccattagaagataattaggacttctagatgcaagtgacttagacaaatgatttatgttttgatgacttatttgttatttatgcacatatgcttctattataatgtgaggataatttattatcttgtttgatttctataagcttctctcttttcttgtttaattattatattttttttaacccttgtatttggctatgttnttatgacatttgaatacttagtatttcttttattatttgattagtatgactggacatgatgattatatttacttgcttttgggtgttatggtatgaagtttaaacttatttt

SEQ ID NO: 6070 - DNA, 487 bp, Glycine max
  unsure at all n locations
tagatgaagatgaatccgtggccacctcatggactcctctaaggacaatagcatcatttcttgcactgaattgttgggagttggaagccatcttctcaatcaaattcctagcctcagcaggggtcatatcaccaagagctccaccattgacagcatcaatcatactcctctccatgttgctaagtccctcatagaaatattgaagaaggagttgctcagaaatctggtggtgaggacagcttgcacacaatttcttgaatcttccacaatactcatacaagctctctccactaagttgcctgatgcctgaaatgtcttttttgatggcagtggtcctagatgtagggaagaatttctccaagaacaccctcttaaggtcatcccagctganaatggacctgngagcaaggtagtatatccaatcttttgtcacttccttcaaagaatgangaacagcctttagaaagatatgatcttcttggacatc

SEQ ID NO: 6071 - DNA, 436 bp, Glycine max
  unsure at all n locations
agcttgacaagagggtctgtntaactaacaataataataataactttattttatcaaatcttatcttatccagattttattccatccagattttattccgtctagattttatttcgtccagattttattttatccatcttatcttatcttgtccagattttattttatttcgtttatgggcttggacttaaaatagatttgtaagctttgtggctaagaacctcatccatacattttttaatagtatgctctttttattttcttttgatatactttgtgttttaacgacttgaattcaatatgattttgtttatcaattatttttggatttgtacattacttatatgaaattttataagtttatttttttagttagatttcactaggttttaaaataataaattaattaaaggcgtctttaaacaaacttttaaat

SEQ ID NO: 6072 - DNA, 434 bp, Glycine max
ctcagctgagtatctattttggttatggtgtgaaaactctatatggtgtgaaagcttgccctgctaaaggattgcttgtaactagcatgcactggtgcatgtgcgcatcatatgctttggtttggtctgtgaaatgaaattatggatgagccatgttggttctctggtttaggaagtgtcaaatgaaatttgctagtagttgtctgctcaggtgttggagcttttatgcaggctttggagcaatttctgctagcaatttcctttgcatctatacaattttcatgacagtaaggaactattgatatggactaggaccactgttaaatcttatagcagtttgtagagtttgaaaaataatcacatgatttaatgtcctgtttcttctctttctcttataaacttattataaatttacacattgttttggagctgga

SEQ ID NO: 6073 - DNA, 400 bp, Glycine max
  unsure at all n locations
taaaacctatgaagaacagacactcctgaattagacacacaaaaactggcatgtgtgttctagctagtttttaaaagatagtagttgcttttattttctaaccttcgcagatttattcattttaaaataggtcgtgggtaaatatgttttgcatgtaatgaactaacgttgaagttgggtcagagtgagaggaatagtcaaataaggaggccgagtattggagtgtgaattcagtgcatggagagagaaaagattaaccctatgatagtttgcagcgaaagaaaaatgaaagagtgaaataaacaatataatgatcgatgagatttatatttttacattntattttagttcanaacttttatctcaatttagtttcattttatttcattccatctcactg

SEQ ID NO: 6074 - DNA, 487 bp, Glycine max
  unsure at all n locations
gagtagcattctgctctggagtctcttatgtaaaatntaagtgggaaagacaaataaacagaaatacagaaaggaaggggaacagagaagaacagagagatcaaagaagctgtgcactgcacttctgttattattattccagcctgtctaaaatgcaacagccctactttatttataggcagctacccgacaactaagaaataacagtagctgactaactaactgacatccttttcttttacatatcagtctcctttcgcttataacagctcatcatggagctgatttcagtaaataatacaagcagttttctggaatttaatcgctagttcctaacttcatttatgggccttttcatcaatatttgcagaaattggcttcaaaggatctctcaagaatggctgagccaataaaggagctagatattctggtgagtcaggttcatttcattagcttgggtcttatantttagntcttggttttctaa

SEQ ID NO: 6075 - DNA, 404 bp, Glycine max
agcttcagaattcaatttcgagcgtctcaatagattacgggactcaatcagacatccgagcaaaacattattgtcgtttgaattagctcagagcttcagaattcaatttcgatcgtctcgatatattacgggtctcaatcagacatctgagtaaaaaagttattatcgttcgaatttgctgagagcttcaacattcaatttcgagcgtctcgatgttttatgggacttaatcagacatccgagtaaaaagttattgccgtttgaatttgctgagagcttcaacattcaatttcgagcatctcgatatattacgggactcaatcagacatccgagtaaaaagttatcgtcgtttgaatttgtcagagcttcaacattcatttggagcgatacatatatacggact

SEQ ID NO: 6076 - DNA, 310 bp, Glycine max
gatcggctaggtttcttcgagcgagctcaaccgaagatgtatttctgccgacaccggcattgtgtcggtcagaagaacattagaccgcctcggcaaagaaacatgattcaccgatattgacagagaaaaatgctagccctattcggcaatgaaagatgaccgatcgaggtctaaaaaagaagcatgaccggattacgccgatcgaacattctctaatagatatcctgcaagtattattcagggattgaatggagaaaacagtagccggcatctgtagtaaacaggcgtgactgatatttttcagccaaca

SEQ ID NO: 6077 - DNA, 403 bp, Glycine max
  unsure at all n locations
agcttctatgttgagcaaggtggtcaggtaccaagccttatacataacttatacatgttatttttcattatagtaattatagcattaaacatttttgtgttatttataatagaattgtacactcaaagtaaaagtgattctatctatctatccatccatttatatataatctgattttgaaaaataacactttctaagacgtttctttaaaaaaacgtttatgaaagtgaactttctaagatggttcttcagaaaaccgttttagaaagtctactttctaagataattttttcagaagtacactntataagacgtttctttagaaaatcatgtttcagaaaactgtcttagaaagtagagtttctaagatggttntttcataaaactatcttagtaagactac

SEQ ID NO: 6078 - DNA, 335 bp, Glycine max
  unsure at all n locations
tatgattcagatgctatcttctttttcctcatgtgcatctgctacatctgctctgtctctttgtcctttntcatagaagggcactttattccttggtttgacttgttttctacatttcacttgatactacaggtagttatgatatcttcgctggccatggttatgtcatttgtaataaatgaactgatgtatattgatattctcagcagcaacttatagcccttggaacattcgtgatctctaaccagaattcagaaataaaaatgattatattctactttaaaatgtgctaactgtcttctgtttgaagtatggntntatttctgactctctca

SEQ ID NO: 6079 - DNA, 386 bp, Glycine max
  unsure at all n locations
agctttgcttctacacttaagagggggcgggggtgaatntaagtttcaaaatttcccactaacaaacttttaacccccttctaaatgataggctcagaatgcaaaaaaagaagcatcaatcaatttaacaatgttctttaaacatgcaagacaaaattgattgtaataacataaatgagataagggaagagagaaatgcaaaatcgatttatactggttcgaccacttcccgtgcctacatccagtcctgaagcaacccacttgagattttccactatctctgtaaatcctttatagactttgaacacaccttgggatccctcacccttgtgttgaaagattctccaagagacaacccgtctcttgattacaattgtcataatcca

SEQ ID NO: 6080 - DNA, 414 bp, Glycine max
tcgcgctaagcacaaagacccctgattgattggctgaagggttcagcgaagcacacatcactgcgttaagcccaacatcttcactataagttgcaccttaagtagtgggcttagtgtggatgatgcactaagcgtcacttcctctctgtgaaaatttattatagctacactaagcgcgccatcctgcgctaaaccccagattcattctgtaagttgagctttcaagctgggcttagtgggaaaggatgcactaagcaccaacatcattatgttttgaaatcattaaaagtgcgcttagcgcaggtagtggcgctaagcctgaatcactctctataagttgaagcctgggtgcacgctaagccaaactttgtaggctaagcgcattttgcaggaccaatcagagctactatcatc

SEQ ID NO: 6081 - DNA, 361 bp, Glycine max
agcttaataaatctatatatggtttaattcatgcttctcgtcagtggtaccttaagtttcatgggataatttcttcatttggctttgatgaaaaccccatggatcaatgcatataccacaaggttagtgggagtaaaatatgctttcttggtttatatgtagatgatattttacttgcagccaatgatcggggtttgctacatgaggtgaaacaatttctctctaagaattttgacatgaaggatatgggtgatgcatcttatgtcatcggcattaagattcatagagatagatctcgaggtattttgggtctatcacaggaaacctatattaacaaaattctagagagatttcggatgaa

SEQ ID NO: 6082 - DNA, 418 bp, Glycine max
agctcttgagaaaacttccttgagaagctagagcttagctacacacacccctctaataactaagctcacctccttgagaagcttcattgagaagattcctaaagaagttagagcttagctacacacatcccctataatagctaagctcacccccatgccaaaatacatgaaaatataaaaaaagtccctatttcaaagactactcaaaatgccctgaaatacaaggctaaaaccctatactactagaatggccaaaatacaaggcccaaaagaaggaaaaaccaattctaacatttacaaagaagaatggatccaaccttgacccatgggctcaaaaatctaccctaaggttcatgagaaccctatggccttctttagtagctctagcccaagcctcttggagtcttctatccaatac

SEQ ID NO: 6083 - DNA, 123 bp, Glycine max
atctgatgatcttcaacatgaccgatgttaacgaagtgacgctcacatcggatcttaagataactgatgttctcggatacacattatttacaaatttgccaccatgtttatgcttacatccgc

SEQ ID NO: 6084 - DNA, 300 bp, Glycine max
  unsure at all n locations
agcttcttgtgcgttcaccacaggtgggctgtctcttgngcaagggaggtcttgttatatctgaaatgcgaagggccacaggtgctagtattcgcattttttcaaaggaacagattaaatacatttcccaaaatgaagaagttgtacaggtaactttcagtgtaccttgagaaagagcaagctatgttttttcattggcttatccaaactttgtatcctactattcagctctagtttcaatcctaggattatgaatatgcattatgaattntgtaaaattttacaatttgtgatttttac

SEQ ID NO: 6085 - DNA, 357 bp, Glycine max
  unsure at all n locations
ctgtagaggaatccatcggagttgtgtttggtcgacatcccatcatacccgaatcagataatatgtccaaagtatactttctttgcgacaaatggattcccttagaggaacgcgcgatttccaggccaaggaagtactttaagtttccaagatccttgatcctaaaagcttgatcaagcaatgtgagcatctcctgtatttcagtgttgctgttgcctgttaaaataatgtcgtccacatatactaagagtatcgtggtgactgaaccattaaagcggagaanaagggaatggtctgagtgagactgttggaacccatgcattggtaggatacccgatagcttcacgaaccattgac

SEQ ID NO: 6086 - DNA, 385 bp, Glycine max
  unsure at all n locations
agcttaaggcctgctttcatattcaaatcaaatcagtgtttcaaaagttgttcttttatcaagtccatgcaaaaatatctgagttcatttggtttttgggaaagtccttcattgtttttcattctcaaatgttttcaaaagaaatccttttgttgtcttctgatccaaaaataagtttcaaaaatactagttgttgattttttccaaaggatgttacattcaagacaaaaaaaatttaagtcccaaaaagagttataatctataactatactaatagaatataaaagcacgcacaaattagtcaaaataaactcgtgtaagtttttcaaaaaattcaaaacaagntcaaatcatggttgaagagctcaatctccttgacgatcat

SEQ ID NO: 6087 - DNA, 533 bp, Glycine max
  unsure at all n locations
cgcttgatgcttgatcccctgattacggacctatgcaactgaagctgatgtgaacatgattaangatacattnaattaatatatgaacattgactcccttattcatacatatgcgaggggcagagggtgatacangtctgcttaatcttaattgactccacacaagtcttaagggcttctacatctggagcattgaatacctcatgtcttgctaaccatttaatcctctcaatggagatatgctctaatcttagatgacgctcatagaggaagtctcattaataatacaccgtttacactagttcgaacgtgcgttacactattaaagggcttactttggtaaccactagtagacgagccgtgatacattgatccacttccagcacacttcgatcttcaatattacaagtgactctcaagctgtgtctttagaatggaaggacatccatatggaacatactggaataacaagagaggtcaagaacacttggcacataataagtcgttctaatatgagatagagtattatttaa

SEQ ID NO: 6088 - DNA, 388 bp, Glycine max
  unsure at all n locations
agcttctatagaaggttcgttcctaatttctctacaattgcatcacctctcaatgagctggtgaagaagaatgtggcatttacctgnggtgaaaaacaagagcaagcctttgctttgctcaaagaaaagcttactaaggcacctgttctagctcttcctgacttttctaaaacttttgagctagaatgtgatgcctctggagtgggagttggagctgtattgttacaaggtgggcaccctattgcttattttagtgaaaaacttcatagtgccaccctcaactaccccacctatgataaagagctttatgccttaataagagccctccaaacttgggaacattatcctctgttcaaagaatttgtcattcatagtgatcatcaatcac

SEQ ID NO: 6089 - DNA, 429 bp, Glycine max
  unsure at all n locations
agaaagagggagagaaagagagaggcgggagcacgaaattgaaggaagaaaaagggagagaagttgaactttgagttgtgtctcacaagactctcattcatcaaagttacaacaagtgttacacatgcttctatttatagactaggtagcttccttgagaagctttcttgagaaaacttccttgagaagcttctttgagaaaacttccttgagaagctagagcttagctacacacacccctctcataactaagctcacctccttgagaagcttccttaagaagattcctaaagaagctagagcttagctacacatacctctctaatagctaagctcacctccttgagatgagaagctagaacttagctgcacaccccctataatagctaagctcacccccatgacacanaaaacatgaaataccaaaaa

SEQ ID NO: 6090 - DNA, 452 bp, Glycine max
  unsure at all n locations
ctgcagcttgatttanatattatggtgtgcgcttgttgtaacatgttatgtttgctactgatttttaattctttgaccctttgaatgaccaaattggctttcgatgtcttcatgagacttgtagagaattttatcctttacattcaagcactggtatcatgttatttggaccattacaacataatcaatccttaaagcattgcagttttgttatattgtgaggacaaactgacatctctatcttcatggtcagtttcttccaagatccaagccttatttgcccatgacttctccataaaagatatatatatctttctcttagctttctacaaccactgagatcatcccaaattcacttttgtagctcaagtagttttcaaattattgcacacatatgaaactgtcaaggcaaaccagcgtctttaacttcaggctcagttntgtccatgatc

SEQ ID NO: 6091 - DNA, 416 bp, Glycine max
  unsure at all n locations
tttagtaatgatccactaacctagaattaaaagaacttaattccattaacctagggaattaaaagaacttaatggctgagtgtaattgaaattgtggcaaccaaaagtcacccccaacagccatcaagtcagccaccatttggtctcctaaaaggcttatgcctaggttgccaattaggcccttattacaacttgaactaaaccaaactaaagcccttttagttgattgacccaaaacatatttttgatcagccaactttacaaggattgggccattatttagaanaactaaacactctaaaattgagacaaagtggtgccatttagtcctcctccatttgggccatgatacaactcacaaccttggactnttctccttgaaacttgngcttgtattcaaatagtatggacaacac

SEQ ID NO: 6092 - DNA, 454 bp, Glycine max
  unsure at all n locations
agcttctgtgagacacatgttntataatccgtatgatgttaaatggtttaaggtgaaaatatattaccctgtccggattctttaaactatacttggatggtagagaagtttattcgctgatacctaatgatatttttcatgtgggtggtgattgcagcctgtcgagctttataccaaacgtggtcttcgtggtcgaataaaagaacctgttggtacacatggtatgttggttgttagaaacctttgccatcaattttactaattaacattctgacagctagttattttagggagaaaacagattatatgttgcttggtcaaagatttacatgtgcattccatgattcttatagtgacccattggtttgagctgttttctgcaatttcctgcttgttttgctatcaatgttcaaatatgtgtggngtatatgatattctgatcatattctattta

SEQ ID NO: 6093 - DNA, 463 bp, Glycine max
  unsure at all n locations
atattgtatatcatatcatataaatatgattaaacatgtaggaaaagatattaaaactaaaaagataacctacgacgtcccctcctcccacactgtcctctgccactcaaacattgcaccacaaggtcacaatcacgtgtctttgtccttcttcagaaagaatataatgttcatttttaacatttcttacatattatttatttttgctcagaacattntttaaacatgagaatactttcctttttagtgtacattcagataataattataatatatgaaagagcagcaggctagatctagaacaacgtgcacacattcctcggtccagcacatagcatatttcagtgtttccactgtccagccggagacgaatcatgtgacttaacaaacatccaaagtagagaagtgtctatagcaattaataatgtgcaaccgactcagtgtggatcaacaatatcaatct

SEQ ID NO: 6094 - DNA, 421 bp, Glycine max
acttgagtaacacacttgtagtgttcaaaattctagaatttgatattaattatgtttaagaaaatatgtatctaaaatatttaaataaactcaacatgaagcaactaagacaaaaagttataaatatctgcaaaatgttatcaaacttaaaatttgacgacctttaagactaaattataaaaaaaaaaattagtattgatgaatagaaacaaaattagaagttgaagaccaatcaattaatttcaatagaggaattcttgaaaggaaataatgtgattctccaaatacgagtagtcttgcaacaaaggccatcacaaagcctttcattgcttgaatgaaattaattattgatgcaaacattatagcaaacataagatccatactatgcctacaatgatcgaaaaaaaaagagtaacaattg

SEQ ID NO: 6095 - DNA, 486 bp, Glycine max
  unsure at all n locations
ctcagcttgaggattatggggtacccatcacatgtggtactangtggctgtcgtgcgatggtgcacaacagagttttcacatgcacgatgcgcgcataaacccaccatcccctgttgcccacctccaactgagctcacgtactcccacgtagcccatattctcgattctctcaacaccgggtccccataaatcctcccaagcttccacaacatccaagctaaacaacattcaacccgcacaagctatcacagtcaagcaaaacagagcatatgcagaaactctgccgaaacaccaaccacaacacagctaattccacttaaagaccccagtaacaattccttcgttccaatatgttaaccggtggatcgactcgaaaattctactggaagtctctagtacttaagcctacattttgaccgctgggatctactagcnaacatccagaactcattctacattactcttttcacaaccagcacatacat

SEQ ID NO: 6096 - DNA, 372 bp, Glycine max
  unsure at all n locations
tgcagcttcgttgtcaatttcgagcgtctggatatattatgtcccaaaattggacatccgtgtgaaaagttatgaccattcgaatttctcgagagcttccgtagttcaatttcgagcgtctcgatatattatctccccgaatcggacatctgtgttaaaagttatgaccattttaatttctcgaatgcttccgtttttcaatttcgagcatctcgatatattatgtccagaaatcaaacatcagtgtgaaaagttatgaccattcgaatttctcgatagcttccgctggtcaatttcgagcgtcttgatatattatgtccccgaatcggacatctgtgtgaaaagttatgaccattcgaatntcttgagagc

SEQ ID NO: 6097 - DNA, 408 bp, Glycine max
  unsure at all n locations
ntngacggactataccaagctctaggaaccagggacggagaaagatctatatatatgcttgctaatggtagagagaggaagactagagatttggatcaagtaaagtgtgttaaggatgaagaaggcaaagtcttagtgcatgaaaaagatatcaaggaaaggtggaaggcgtatttccacaacttatttaatgatggatatggatatgactctagcagtctagacacaagagaagaggaccggaactataagtactatcgtcggattcagaaacaggaagtaaaggaagcgttgaaaagaatgagtaatggtaaggcggtggggccagacaacatacctattgaagtgtggaaaactcttggagatagaggtcttgagtggctcaccgaactctctaacgaaattatg

SEQ ID NO: 6098 - DNA, 388 bp, Glycine max
  unsure at all n locations
agcttatggngaaggacacaggtcttgactgggatggtgagaagaaaaccattgcagctagtgatgaatggtgggaagccaaaattcaggtatgtattattcaacgaaaatagagtttttgtgtaggccactcttttgttttttatgtgtgattcttgactttgcggcaaaaattgaagttgcagactgttttttagaaacttgtgtctaaaattttagttgataattaggttggttattactctgttacttgttgcaattgaggtagtttacatgcaaagaaatgaatgtgttgatatagtgatgtttcttttaaaacctaatgaaatggaaatttattggcatgttntttattactctacttttattggctgctgcatgtttatct

SEQ ID NO: 6099 - DNA, 430 bp, Glycine max
  unsure at all n locations
ngtcgtgccatcaccattctggcctaaacccatttcgggctcatacccatccctcagcataactcgggcaaccatcaagaaggcaccagatagacgcggttgcaccagaggagccttcccataagcattgttcataatttctagcgcttgaaaagatgtttccaatgactcttctgtagcttccacatagggtgtagagcatggacaactcactagtatatcttcttccccagacactataatcagctatccttccaccacgaactttaatttctgatgcagcgttgacgggaccaccccaacagaatggatccaaggccgacctagcaggtaattgtaggcgagggttatatccattacatggaaggttatctgacacgtatgtggcccaatttgaatcgggagatcgatctctnctctcacgtcacag

SEQ ID NO: 6100 - DNA, 368 bp, Glycine max
gctttatatagacttcagagctttgattctttagagatcccaactagctgctgtctaatagctcgagcgttctacataaggcgcattactctgcacagagagaatagggaccacaaatatcttcagggaagtataccttgctagtgtcgccttgtgcttagagctgactttcagcgtacaattcgaatacaacgttaacaacataggtcaaaaggaataaagaatgtcaagacaagacaatgtaagactttcctcttgtgcactattgcacaaattgcttactaaaccatatatggacgttactttatgatgattactttcagtacttgaggattgagtaactcttgctaaacttgtagcttaagcat

SEQ ID NO: 6101 - DNA, 370 bp, Glycine max
agcttatagaattacttgaaattcaatttctgatcatacttaaaaatgattccttagcacaagcactacgtaattttttatcatactgctaattctatttgaagcatttctttctatgtgagacgatgccgcaagcagagctggaaatgaggtaagactttctagagatagccttcctaactaaatcttttgatgggatcttctttagctgaacctgagttcgattaaagttggcctgcacctaagaataaccatttttgacctctcccattgttcgagctacttcgtaacctctccttcaaggatagaagctagaagcagatagcagccatatggataggtattcaatcgcttgctttaaaaggtatga

SEQ ID NO: 6102 - DNA, 443 bp, Glycine max
  unsure at all n locations
tgcctgtccgatgcagcagtaatgattgcccgagttatgttggggaacggttacgaacccggaatgggtttaggcaaagacaacggcggcataactagcttgataaatgccaaaggaaatcgtgggaggtatggtttaggctataagcccactcangaagatgtaaagagaagcatcgcgggaaggaagagcggtggtcaaagctcgcggttgagacaagaaagtgaaggaagcccgccctgccacataagtagaagctttataagcgcgggtctgggagacgaaggtcaagtggtcgcgatatatgaagatgatgttccgagtacattggatttggtacgaccatgcccttctgatttccagctgggaaattggcgagtggaggaacgccccggcatttacgcaacgagcataatgtanacctttacggttntaaagctcta

SEQ ID NO: 6103 - DNA, 393 bp, Glycine max
tgccagcttaaagctcatgtcatgcatcttcttaatctccaacaaaaagatagggctatatatgaatagtaatggaagatcagactacacactacagaaaagaagaagattgaatcatgatagttagtcgaagaggatgttgccaaggttctacaagtcctagttgaccttgagcaatctagcactaaagaaaatgaacaagaactgaatgcatccattcctaatattgctgccaaggcaccaatctaggagtccacttatgcaaagcagtctcaagaagtcacctctgtccaacaagaggtcattgtatactccagcaatccaaaagatgttcttccaatcaactaccgtgctcccagtgcgatcactgaggaacacattcaagagatgatg

SEQ ID NO: 6104 - DNA, 413 bp, Glycine max
tctcccacgagggctttgatgttgtctccttcaacacatgttttatcttaagagcaagggctaatcgaatcgtgctcataatccttctttggatcttagtccactcggtctcatttatagaaaccaacctttcatcttctaatgtctgatcaagacctaactgcatcaaaatgtattgaatagtactctgtcaaatcataaaatttatttttccatcaaacaatggtatctcgaacctttgtgtgctctcgatcatagctttgataccactgttgggtaatcaacgctctcacaaacaaaaattactcacacccacaaaggaccgtgagaacacaataaagattacaccatatgaaaaataataacaaacacaagaacataacatggttcggcacctcttgcctatgtccaca

SEQ ID NO: 6105 - DNA, 382 bp, Glycine max
  unsure at all n locations
atatgtacattactactattttataccttatcaaagggataaatgggagttatttatgttgtaggagtatcagaacaatctgtttctgcagtgtggcaagcagaatgatggtaatgccctgtaaaattaaaattatatgcctttgggtatttaagggagtttcttctaggtggtgcaatgaagcctactacacatggccagtgggctcatttagcttgtgccatgtggatacctagtttggttgtgtatgactttattcactctttnttacccagtttggntatttttaccaagtgtcaagatcatggacatgacaggtatagtagcattcttacaccataaggggagggcaaaacattcttaacangataatttaagaatg

SEQ ID NO: 6106 - DNA, 401 bp, Glycine max
  unsure at all n locations
tctacttatgtggcagggcgggcttccttcaccttcttgtctccaacgcgaactttgaccattgttcttccttcccgcgatgcttcttttcatgtctgcctgagtgggcttatagcctaaaccatacttcccacgattaccttgggtatttatcagtctagttatgccgccgttgttttttcctaaacccatcccgggctcataaccgttccccaacataactcgggccatcattaccgctgcatcggacagactaggctgcccaaagagggagtccacggaggaaatgctgaccacctcaaaagactgganagcagtttctaacgattcttctgcggcttccacataaggcatggaggatgggcagcttaccaagatatcnttctcgcctgacacaatga

SEQ ID NO: 6107 - DNA, 557 bp, Glycine max
  unsure at all n locations
caccgcgccncccgcgcccctacctncnctctctcttcaacgnncnccnnncccccaagtcatgtgctctgagcgcctgaactcgctgagacaganaagatccgatccgatcagatattttttcctatagtatgacgggactcttcataacggagcagcacaacgctgtttgctccaacagagcttacacaagagcattgactctctggtaaacgactaccaaaatagtgtcatcgaatacctctatcacaaaggagttgagagagtttcctgaagaatttcctacggtcccatttgtcgcagacagttgtaaacgattatcatgcgcttcggaatctattaccagaggctctgaacgctggaactcccaatccaagggaagagacgccctcctttcctgtaaacgttgcgaagctaatacccngacctgggaatgcaatcacgcggatggngctcgatatagataagatgaacatcttccatgggtgtcgaatttctacatggtagcgcttcttcaagaataaacctctagaggagctctgacggacatgataccg

SEQ ID NO: 6108 - DNA, 499 bp, Glycine max
  unsure at all n locations
accttgcttagtctcttgagaactgtgtttctagatgagtgacagtccttgttaaaacctanacccaagtcctgaaggattaaactgcttaaccaaacccaagttgtttggacaagaaaaacatgttcccaccaggtttaatccattttgacgtatttatcaattttgtagtatctcaatagttaaattaaaactaattcaatattattataaacgttgacctggttatgggattaatccttgatcaaagtttaatcagacttgtcactctttcttaagaatgtattttgcgagaattaaacttaagggtgggtaagtaggccggcccatcccgcgtaaaacccgtccacataagttcgtattggcaatagattggaccagtctgtcccgtactcttacacggatntaaaagaatggcctattnntttcttaaaaattgtaatttaaaataaatatatttttcctcttaaaaaaaatagtaattacactcaattatata

SEQ ID NO: 6109 - DNA, 288 bp, Glycine max
  unsure at all n locations
agcttcttggcaatcctcattccagcgatcagtttggttnttgcgtaagagcttgaacaacggctcacaaatggcggtgagctgcgatatgaatctggcaatataattcaagcgtcccaggaaacctcggacttgcctctctgtacggngttctggcatctcaaggatagccttcaccttttcggngtctacctctatccctttctggcttacaatgaaaccaagcaatttcccttatttgaccccaaaagtacacttggcggngttcaaccttaattgatatttctt

SEQ ID NO: 6110 - DNA, 300 bp, Glycine max
tactaagcttgtacctctcctgtctttgacactgacaatgacctttaattttgtattttcaaattgccttagtacgatccagcgcgccttttaattggatacacattggctagtagtgtttaaaagatgaaaacaatttattttgttgcaatgccatagttgcaagttttttgttcatcatgctttgcctgagagtagcctattctgatgttgctactctgttggcgctggtgagccacttgattggatcccactctttctctgcacctagactgaccactgctttgaccacattggatt

SEQ ID NO: 6111 - DNA, 440 bp, Glycine max
  unsure at all n locations
gcttcatcangtcgtacccgaatcanatatacattaaaaatgcagtatctaggaagtgatcctaggtcatctcccaacgagcaatggtcaaccaaacgttcataacagatagtaataaaacagtaatgaattgggggttgtttgtttttgtaaattaaacagcaagtaaatttgaattagaaaataatagaattaaaacatgttgtttccccttgattcacaagcaagtctcttatgctaggttacgagaatttatccttaatcagttcaaccacttactccaaccctaaattaaattactaagcaaaatttaacatgaggctgtcattatgtgattaagcaacacatacaccaattaatcatgaacgaaacttatcattaagcatgaacataaattaagcgcagagacaattaatcaagcactaagcatgcatggatta

SEQ ID NO: 6112 - DNA, 388 bp, Glycine max
tacgacacactaacgacatctattcttctaaaccaatgtggtataacaagcggtggcaatttcgtaattataaagttagaaaacgaagacggtgatgtacaaacccatctttgaattgcgaaaacaattcttcgacgatgttgttttggtgaacaccatggtggttggcgcggcattatagtcacgtgactcgaacaacactcccatgacctcaaaagactgagttgtgcgccctaagtacgtgaagactcgaacaagagtcaattgaccccttcgttactcagtttgcatcgtcactcagctctcccttcctcagtcatcgtcactcggatcgcatcttctatcgtgactcatgccacaccttccgcggtggacacccctagtctat

SEQ ID NO: 6113 - DNA, 477 bp, Glycine max
  unsure at all n locations
tcatgcaagaattattaatcttcttggccaactaataaccattgtgaggnggaggcatatgacgaaagttaagaatctttntatttgacttccaatttaggtaaacaaaatgggtagtcaaagttatgaaacccttagtattaatagatgtccataaatcagaagttaaacagatcctgccaggaatagcacacaacagttctttactgatggttttcttcctctcatatattctcaacatattagtcttaaaagtatttctagaaattggttaattgaggacacaaataacttatcaaagcctgaaactctggatacttaacaaaaatgaagggcaaattacgcctaatcattagattacacaacaattcgcgtgccatcattngatctatctctttggccttaaactttccttgcatgtctaagatcatttgactcatatcttcanagttttttatctcacatctgccattatga

SEQ ID NO: 6114 - DNA, 325 bp, Glycine max
caatttcgagcgtctcgatatcttatgcgcctgaatctgacctccgagtgaaaagtgatgagcatctgaatttctcgagagcttccggtgttcaattgcgagtgcctggagataatatacgcctgaatcagacctccgagtgaaacattatgaccattttaatttctcgagagcttccgctgctcaatttccagcgtctctatatgtgatgcgcctcaatctgacctccgcgagaaaagtcatgaccatttgaatgtctcgagagctctcgttgttcaatttcgagcggtttgatgtatcatgcgcctgaatgcgacctccgagt

SEQ ID NO: 6115 - DNA, 492 bp, Glycine max
atagatactcacgcttgaaggagacacatgagagggagtcgccacttcattatgggtaacttagccacttgtatatgcgcaaggcaatgccctattgcactatccactactgaagttaactatatttcagctactactcgatgctctcatatactagtggatgcagatacttctcgagaggaccttcacatccatgagagtcacattcttaactattttgacatacaagaactgctctatcaatctttccaacaatactcacttgcgtctcacggagagcactacctaatcacatactaggccatacaagaccatgttctatatcaacatgctaatatttctctgcgcacctttcgacaattacacgagcattgactttactcggatgcccgaatatgccataatatatcagacactcaaattgacactgaagctttgagaattcaatggcatacttttactcgaggtcgatcagctctatatacagacctt

SEQ ID NO: 6116 - DNA, 333 bp, Glycine max
atagaacaagcttaactcacttccaaaagctagcttcaaagaggaggattgtttcccgagtcttataaggagtaggcatgttaacagtttttttgggcttgagtgtcatactgacaattctgatggggttgaagtgtgttttaacaacccctccaaaaaaaaaagcaaccaccagtaagcctcttatacaatcctattgcttcttaatcttcaacctttaacacagacattcgtgagaatggttaaaattctcattccatcttaatcttgaaaactcttaattttgccaattgagaagtacctatactaaagaacttgcacccaatggtttta

SEQ ID NO: 6117 - DNA, 302 bp, Glycine max
  unsure at all n locations
aagaatgagtatcatatttatatggttgataataataataatatttttattttttttcttgatacatgtnaaagacaacaacataacataagttaaaaagatttaatttcagttgattgagttggatatatgagttattataagttttttaattctcacggataacaaataaaaagagaactaacacaaacttttatatatgcatatcaaatngaaacggtaacataatgactcctttttcttttaattgcttctttcaggagagatcatcatcaatggacatggaatcatgtgtgcctcca

SEQ ID NO: 6118 - DNA, 422 bp, Glycine max
  unsure at all n locations
gctntgataagacaggacacactgctgtcttctactataagctaaaacagatacaataatctattctaaagatacacataattataacataatcaacactgatcctatttgctcattataaataaaggcttagtgtggtcatccaagacgcgacattacacagtaaaacactattataataaatgaagactaattgtgatcatcctcaacaacacattacagcaaacccttccaacatccataatgtgcaatgaatggtatttaatgcatataaggcaagaactagtaacatgtttgctttgacatctcaccatgcttcatgtgtgtttcaccgaaacaaacattcacggcttctacatatattaagctatgactcatggatatgaacagacctaactatgtgatttttgaacagtaggatg

SEQ ID NO: 6119 - DNA, 451 bp, Glycine max
  unsure at all n locations
attctaattgcaagttcacattcttggtctttctttggctaacatacatacttgctcaaacttgtgaaaagaaacacaaactccatcacaatcatgcattcaatccaaaatcaaatcataacactaattttcacaaaaagataaaagtgtttaactgcaatatcatcaaagtcaagtttaactgtttcatatgcttcaaaataagcatactagctaaccacaaacacaatagaagtgtatataaacattaaccaaaataactgacacaatgtactgaaactataatcattgtaataataatccanaaagatgtagaaacaagcttcatgatgatgaatcaagttgattcaagtagttgtgatgatgacaaanagcccatagaatgatttcaagattgagtcaacaagttcaagatcaagattaatttcangtttcatgagaagaaatcaag

SEQ ID NO: 6120 - DNA, 432 bp, Glycine max
  unsure at all n locations
agcttgtaggattatggngtacccatcttatgtggtactaggtggcggttaggcgatggtgcgcaacaagttttccacatccacaaagcgcgcataaacccaccatcccctgttgcccacctccaactaagctcacgtactcccacgtagcccatatcctcgtttctctcaacaccgggtccccatcaatcctcccaagctttcccaacatccaagtaatacaacattccaacagcacaaaccatcatagccaagaaaacatagcgaaggcagaaaactctgcccaaaacacaaaccaaaatcacagcttttctcacttaaagaccccagtaacaattccttcgttccaattcgttaaccggtggattgactccaaaatattactggaagtctctagtacttaagcctacattgtgaccngtgggatctact

SEQ ID NO: 6121 - DNA, 396 bp, Glycine max
actcagcttacagttccgtcactttggataatacacaaagaaggctgttcgatgttagaagacaatctcaacaggttagggatacagtggtggaaatgcaatctaaaattggtagtaatcgagtgacgtgcatggagttacaagtagaacttgagaaagaaaggtatttagtctgtaataatgtgtacaaaatttttcttcgaatgatttggtacacagaagttgtgaaccttcttgtctttctatatctaggtttgccaagaaaagagtggaagaggatctggaggtcgctaggagaaagtttacgcgccttatagagcagaatgagggctcttcagtaactgaaaagcttcaagaggaacttgaagagtacagggacattatcaagtgcagtat

SEQ ID NO: 6122 - DNA, 285 bp, Glycine max
  unsure at all n locations
agcttatgagcganacaatgcgactattatatgttaagtcgaatttcagcgttcaaggactctggtaatcgagtaccaacacatcggaatagatgacagcctgttgaagatatgaggaacgttgcatgatcaggttgaaagcattttctagctcattctgctactagcgatcgattacaacaatatgggagtcgatgaccaaagtaactgctctctggcaaaggttgtgtgaaaaactcatgagctattcaaagtgtggaataatgaagaaatacttatcatgat

SEQ ID NO: 6123 - DNA, 124 bp, Glycine max
atgccccacgttatctacatgagacatgtgccaaaccgattattgtgaacctgtacgcataacatgtcatgcgtgcacctatgatgacactccattgtcgaagattgatggtcatgtgatgcta

SEQ ID NO: 6124 - DNA, 315 bp, Glycine max
  unsure at all n locations
agctngaagacaagactatacgaggtatctttcttgggtatagcaatatctctaagggctaccgtgtctacaacttgcaaactaagaaactcgtcatcagtcgagatgttgaagttgatgaatatgcttcatggaattgggatgaagaaaaagtggagaagaacgttcttatactcgttcaactacctcaagaagaagatgaggaaganaacccaggtgaaccaccttcacctccatcacaacaacaagaagagatggagtatccatacagaannaattgcaccagtagctcgtcttaataagacaaagctcaac

SEQ ID NO: 6125 - DNA, 317 bp, Glycine max
ggaagaatcataggaaattactacaaatgccgctatcactgttggactacacacatgagcccacttaaaggtaaggggtgagtttaccgcaattgtggttagaatgaacgtgtaaggatccttataagatcaaattgaggtttattttggaatgttttgtaacatcccattcttctgtaagataaatttaataggatttatttaaaattgaatagagttttaggaaaataatgagatttctgtaattaaataaatcaggagaaataattctattgattaaaataatggcttcagggaaatacataaatatatgttct

SEQ ID NO: 6126 - DNA, 408 bp, Glycine max
  unsure at all n locations
agcttaatcttaatgatcaatcattaattcacgagacatcttctgtttgtctcctgatcatgcactgcagaaaatctagaagttgctgcaagaggttcaaaataaatggngaaagctataatgaactggccatccaccttgtcctcaggctccttttcttcattttcattagcaggactgtccttgtttccttctgctgcatcttcctctcctacaggcttctcatcagcaagaaccttttcagtttcattcaccacttcctcagtcaccctatgaaattaacatcaaaaggaacaaataattaataactgccaattaaaaacatgagactcttggatgaaaattctaatctgaacttcattattattaanattaagaattaanantatgaatacaaacaattactta

SEQ ID NO: 6127 - DNA, 404 bp, Glycine max
  unsure at all n locations
ttgattcaagatntcttcaagatcaagccttgcctcataacgaaaggtttcaagtcatccaaggcacatgtaatcgattaccaatacgtgtaattgattaccaatgatttgaaagtgtgtaatcgattactagagactctgaatgttgggaattcaaattttaaatgaagagtcacagctgttcaagataaataactatgtaatcgattacactaatgctgtaatcgattagtggagaggattttcaaggaatatcgccaatagtcacatcttatcatttggattttgaatggccatcaaaggcctatatatatgtgtgacttgtgacaaaattggaagagagttntgctggtccagaatgtcttatcctctcacaagaaaatgagagagattccaagagaact

SEQ ID NO: 6128 - DNA, 413 bp, Glycine max
  unsure at all n locations
agcttaactctcaaattccncttcatcccattctcttttgatataggcattccttcattagggacaacaacctcagcaccaggtttgacaatatctgtcaatgggatcatgagactccttccgtccaaggtggtgagatccaacgttttaccagtaagggcctcaagaagggttatctcttggttgatcaccaaatcattaccatcccttctataaagagcatgcggcttctcatctatcacaaaaatgagatctgctgggatgacaccaggctcacggttacctttctctgggaaggtaatttttgttcctttcttccagccaggttttatctcgatagtcaaaatctcctccacatccccacatttgctgaaatggaattgcatgtgtcaaatattgtcaaaaaacacaaa

SEQ ID NO: 6129 - DNA, 431 bp, Glycine max
  unsure at all n locations
tgcagcntgagatctcctgttctgtctgactaccttccacagtttatcaaccataaatngtaagagatgcttatcatggaattgtgccaccttgttatactccactgctaaaaaaatttaccacataaagagtagtagcatgctgcaaccacaagaaaacttattcaaatgattttaaatgtacaggttcttaactttcatagtaaataatacttaattgtgtcagaattttttaacaacgtanaatggaagaatttctcctatcaaggaatatctaatgccaaacagcgaataacatgttcagaagtgaacaataacaaatgatcaatagaaggcgcgagagaatatcatttacacgtttcagattgtaattgttcacgcaacctttgacaaagaagcatgtggggattaccctttaactgatatttaat

SEQ ID NO: 6130 - DNA, 425 bp, Glycine max
  unsure at all n locations
agcttgtgcaaatcanatcactctcacatctcatctctagcatgcattttctttctttacccactcctcacgtttggttttttagggaaaacaccataactaaacgcgccgcaagggatccctatcgcaccagatccaaatctagaacgatgggtgatcaagaggagacgcaggaacagatgaaagccgacatgtcggctctgaaagaacaaatggcctccatgatggaggccatgttaagtatgaagcagctcatagagaagaacgcggccaccgccgccgctgtcagttcggctgccgaagcagacccgactcccttggcaactacgcaccatcctccctcaaacatagtangacggngaagggacgcactgnngcacgatggcagccctcacctgggatacaaccgagcggcttacccttat

SEQ ID NO: 6131 - DNA, 450 bp, Glycine max
  unsure at all n locations
atatgcatgtgaattatgaagcatcaacaagaatcaagccaaggctattgtgcaagcaatcaatggggcaaaacacaccaaatgattatgatgatggatggctcaaattctcacaaaggtaaactcatcactttcaaattgagctttcaaaactatcatgacatgtagaggagaatcaaggatttcaagtcacaaagtgtcaagaacttttattntcaaaacaattacccatttcttgaacatatcctataattcaaagaanaacatgcaaagtcgtacatgcatacaaaattgacccanaatattaaactaagaatccgacgaaactagcaacattaacaaattaacacaactaacagattaacagaaccaacaaaactagcanaaccaaagaacactgccccccccccccccatacttaaacaacacattttgtctcatgagcacaat

SEQ ID NO: 6132 - DNA, 440 bp, Glycine max
  unsure at all n locations
agcttgagatgaggaagtgttgaagggtgaaacttcctgcttttattgttgaccacagagtggtacctggagatatgtcgcggnggtcaggagaccttggggacgtcaggtggggtgctattgcccaaaaccaagcttgaccaatcccgacccaacccgggcatagtcggtcagtgagaacctgtgatgtacctaaacaggcgagctcctggcagtcaacagataaaaggaacaaagaccacaaagcaaggaggcttgtggtggctggccagttgtgaattntgtgtgatatgtaaagtaatggcctctggtaatcgattaccaagggtgggtaatcgattacaaggcttataaatgaagacaggaggctaagatggtctctggtaatcgattaccaaggggtgtaatcgattaccaggcttgaaaacgaagtcaggaag

SEQ ID NO: 6133 - DNA, 395 bp, Glycine max
  unsure at all n locations
ctaagcttttatccaggctcatcttggtggtgaagctccttcttccatggcttattccttaatggatggcgcctcctctcacctattttcctttgtcttccgctgcatctccatggtggaaaatcaccattaaaggaccccattgaagctcaaagatccagcctccatagaagccccacaagcaagcttccatcaagtggtaatcagagcacaagagcttcaagtaggtgctccttaacctccattaattttttttctttaccttctcttccattggtggttcttcattattctccatgtatctcctcacatgtcttgttctaaatgttgttaacatgattctttagagtttccaccgattaaacttgctatagaagttagatttgattntctat

SEQ ID NO: 6134 - DNA, 359 bp, Glycine max
  unsure at all n locations
gagtgacacgccgagaaaagtttccatccgtgccggtgatggttntcacaacttgaaggtaaatttttatttattggtttgggtttgattgggatgattatgcttaattatttggtgttgactttgggaacattnttaggagattaagactgtggaactcatgaaggcaactgggtgggtttatctatccttgtctggagctcatcctangtaagtacagtgttctttctgtatccagtttttgttggtttaagtttgtatccaatttttgttgtttggaggcctggatttttgttttcaacgaaattttgtgtgcatgttttggtagatttctagcatagagtaaaaattaaaagaat

SEQ ID NO: 6135 - DNA, 439 bp, Glycine max
  unsure at all n locations
ctcgcccaggcaagcagggntgcttcctccagaagcaacagccttctggaggaatcttctggagggcccaagtgggcctggttgctatttgcacccccatttttactaagtactcccccctgcctttattttggtgattcttttttcgtacagttacggaaacttacgaatttcgtaacgatacttgttttctttccgtaatgttacggaaccttgtggattacataatcatccccttacgaattgtgacttacggaatgttacggaacctcactaattgtgcaacgatgcttccatttgatttccggcgtgtcacggaaccttacggattgtgcatcaatattttcttttgttttctggcacgtccctgaatttcacanatggcctaatgatgggtgccaagcaccttacaaggaccaaataatagtcgcatgtcatc

SEQ ID NO: 6136 - DNA, 436 bp, Glycine max
  unsure at all n locations
agcttcccgagtgtcccattgaaaacctttattcaacctttcanagttagtgataaggctaaacgaaaaattagggaacttagaaaaactaaatccttaattgaaggcgtaggtgacaatcatagcgaattactaaacaagattagtagtttgcttaaggtcattccagatactccccaagcttcggaaaatacttccaaaatggtaacaagaagtacctccaaattaattaatgttattaatgaagatagtgaccaaaacttagataacacaactgagataggatcagtgtcagaaaagaatataaatccattaaactccaaacactggaaaaccccctccaaattatattatcaacgtccaactgcccctgaccttctattagaagaaagagggtgaaaacaatttaaaatttttagtgcaaataacatctatg

SEQ ID NO: 6137 - DNA, 510 bp, Glycine max
  unsure at all n locations
agggatgtgcctcgtgttgcgacctatagatactcagcttgtcacctcatagctaggttcttcattgtaatcagcctatgctgtggnagctagntgatgagcactgcggccttagattattaccatgtggatgaatggtggactctgagcattctgcagtgacaaagattcattacctgtgaattgcacaaatgatcacttgggctaaccgcatatacaccgtctaggagaaacagacagagcatcacacatcatgagctcttntagcaacatgtgccttcctgcaagctaactgcaatactggcgctcagctatgttagattactcacgctgagcacgagggtggaggtatgccactgcttgatttcataccaatatagagactgtctgtgcagataacggtacactctaccgaataccagggccactatactcgcactccagtgctattttggtatgactctagatgacgcatatgacatcgattgttcgagctagttatctcattaa

SEQ ID NO: 6138 - DNA, 441 bp, Glycine max
  unsure at all n locations
agcttatgcgcatatttccttacgaacgttcacttgcacaagacatcctattaactaagaaaaatgcacccatatacaatcaaggcagcttcattacctagattatttacatgtacttccaaggtgtatttgttatttacatcacacacgtctccttggttaaatttacatacatgcatactcaaagcattttggggtaccaaaaattgcacgtgtgcacatcttggtatttctaatacctatacatacacaaacttcatgatgaatcttgactatctacacaataaggtgctacgtttcatgctcttttcaaatttttgctacctaaagtcgcatgcaaattcaagtatattttcctttgctgactaanantgtattaaaagggatacattatttttggaatgtattttctttacataacatgcaacatatttatatata

SEQ ID NO: 6139 - DNA, 441 bp, Glycine max
  unsure at all n locations
gctcatattttagaagttatcacttctgtcaactctatgatgccttntttgaaaaaggaaaagagctattatttcccttagattgttccaaacattgtctagttatccttttagaagntaatatgtgaactaaagcttttattgtagtccaaatttcataataagggcatagccttggcatctattctccgtaaatgatgctttaacaaattaaagaagcattttcttttgacctgtattatttgtttttctgttcagtgttcatttagcagaatgttatctgtaataataattaataaattattctggtgcaatatatgctcacaatcaaatgagaatctgatacataatgcattctaaatagtataagacatcaaatagtctgtgcttacagatccctttggttacctaagtaaattagtgaaaaattatatttgtcac

SEQ ID NO: 6140 - DNA, 376 bp, Glycine max
  unsure at all n locations
agcttggattgattcagcctgactagggatctaggtttagtaatttagactacagtatagaacacaaaagcatgattgattagagaaacatctttacatacatcagctggttcgttagaaagacccaacatatttacctactactgttaattttacttacttgcatttttattgtttttagcctagacttagtttaattctattttaaaccatcaattatcaatgtctcttttaaaaatgccttatttctgaatttaactctgtctaagactagttccctgagttcgatactcggattcatccgctttaattntaaatacttgaggatccggtgcgctttccggcaaaccaaatttcccttaaacatatttgcata

SEQ ID NO: 6141 - DNA, 412 bp, Glycine max
tgtccgatgcagcagtaatgatggcccgagttatgttgtggaacggttacgaacccggaatgggtttaggcaaagacaacggcggcataactagcctgataaatgccaaaggaaatcgtgggaagtatggtttatgctataagcccactcatgcggatatgaagagaagcatcgcgggaaggaagagcggtggtcaaagctcgcgttggagacaagaaagtgaaggaagcccgccctgccacataagtagaagctttataagcgcgggtctgggagacaaaggtcaagtggtcgcaatatgcgaagatgatgttccgagtacattgtgattggtacgaccatgccctcctgatttccagctgggaaattggcgagtggaggaaacgccccgcatttatgcaacgagcataat

SEQ ID NO: 6142 - DNA, 343 bp, Glycine max
agcttgcttaagtccgtatattgaattctttattgtgcacaccacgtgttcttttccttcaactgagaatcccattgggctggtccatgtacacattctcctctaaatctccattaagaaagatatttttcacatgcatttgatgtagctctaagtcataataggctactagcgccatgataattctgaaggaatcctttcgtgacactgcgaaaaatgtctctttataatcaacatcatctgtctgagtaaaagtcttagtaacaacagttggcctagtaatgttcaaggttgccatgagagtcacatttagtcttacagacccatgtacaaccaactctat

SEQ ID NO: 6143 - DNA, 334 bp, Glycine max
  unsure at all n locations
acgtgcacgtgattaagcgcattgctgtgttatcttgaaaaccaatccggatatagatcaagttacactgaattatgacgtaatttcactgttcaaacagtgctcatatatataataacacacccatggaattcttccgtcttgattcaacaaacaggcatcccttgacatagatatataaaaaaacatcacactttaattaattaactgggcatataaaacccgnggtacagaataactcgaataaccaagacacagatgatagtatgcatcagtgtgatcatggttcaagttcgaaacattgatgatcgaaactttcatctccatggaatac

SEQ ID NO: 6144 - DNA, 374 bp, Glycine max
  unsure at all n locations
aacacaatcaatatatcccaaagagaaagcaaacaatggagatgaacttcataataaaatgcaaatgatatatgagcttcaagagaatatgaaagaacagagagagaaacttcaagtctcaaacatatatatatgtggctttttctttgacaccctccccaatacacacacacacacaaaaaaaaaaaatcttaaattgaggttatctgcatggctgcacaggacatctgaaagcaagttttttgccctctcaccctctccaattttggcaggtgcattagagatttactaactatgtctagtacaacaaaaaacaaatatgtcactggatgaacaaacattacagatgtgttngagaagagcaaacactatca

SEQ ID NO: 6145 - DNA, 345 bp, Glycine max
  unsure at all n locations
agctnttaactaanggctatttaaggtggttttatattttactttntaaaaaaaaaatccaataataattaatcacgttaagaagggctactatgagggaggtaaggaattgngtggaagggcaatggtttatagtgttggagatgaagagaaatttttgtatggaaaaagggatctgttgggtaggatgttacatgagttataggaagtgaggttgaaggagaggatttgataaatggacgtggaagaaggatcatataaaatactatagaggacaggtgaggaaggagtgacatggngtggcacttatcagcacatgaggaataaatatgttcctctaaagat

SEQ ID NO: 6146 - DNA, 418 bp, Glycine max
  unsure at all n locations
tgtatacttccnncaatttatggttattntgagagtaaatttgttaataaatcttggtctatgggtaatgttgtctttagaatatttccattggatttaatgatgatatctgtgcattttcaggtgaaaaagaagctaagttttgaattgcaaaaagtagcagttgggctaagcgcatatccaccgctaaggagaatctggcaaagcatcagcatcagtgcgctaagcgtagcaggtgccttcggccaagctaagtgcaagattggcgctaagctcaatttcacttactcacgctaagcgcgagggtggcgctaagcgcaacgtcatgatttcagagcctatttaaagcctgtcttgtgcagaattatggtacactttacagaatacccagggcacaaaattccacagcagccacagt

SEQ ID NO: 6147 - DNA, 343 bp, Glycine max
  unsure at all n locations
agctataggatcaaaatcttttttctctctttntctctcaaatattgttcattcttctcccacttttcacttatgttctttgttagtcatcatttacgactaacttttgtattgaaaagtttcatgaaatttatatctttttcatgaaacttttgtattgaaaagtttcatgaaatttacatctgctaagcgaggcactcagctcacttaacgagttgcgagaatctggaagagaatctgtcattcatgcatgcgctcagcgtgccatcagctccctcagcgagtcatttgtctcttcttgtgctaagcgcgctagattgctaagcanaaattcactaactca

SEQ ID NO: 6148 - DNA, 506 bp, Glycine max
  unsure at all n locations
gccctggttatgctctgactccagagaaaacccctcggcccagagtagaaggtgcatttacacttttctttttctatgtacattgtatgcggacattataaatagcaactactactgcgtcatctctggcggactacgggtattaaatattttatgatcctttcaatccacatattgagaccttgtggacgattgtgcacgaaaaagtctttttaattagaagaaaccaacgatgatttcatccttatttgtggtgaaagaagcctacttttaactctctactactaaatctgataacaagaagaaagactttctgttactgtcacaaaacaaaaagactctttcgatctactgcataagatattaaaggcctactccgccaccactgcatatctgagatatgcgcacttcttattattgggtgcttcatctcatggggtataataaataatgacttgtttcatcctgacaagactttgcgacataaaggatctgaagtgatcccn

SEQ ID NO: 6149 - DNA, 388 bp, Glycine max
  unsure at all n locations
agctntcccacaagtcctaaatgacattntatactaggattaactcactntagactccaatttacactagccccaaatttagcttctctaaccctcaaaatctcacttttctacctacaacattgtcattctcacatttaaccctaagttaactttccccttcatctctaccagttttctatcagcaatttcagcacacaaacatcaccaagcatcatcataaaaccctaaaacagaatgggtaaatttggctcacatcaaacatgacaagtttagcatgctttcaacaaattccttcacaaataactaccataaggcataaacttagtagaactacccatcatatctcccanaaacccaatacccacgaaattcatgtgagaataag

SEQ ID NO: 6150 - DNA, 426 bp, Glycine max
  unsure at all n locations
atgcccgagtcattcatccctatgagatgttgttgaagtattggcgaccagaattgccattccttggattatatggttgaaccaagctcatgtttttacaaaaaggttcatcaagtcaagttgaaatatggaagtaaccgtcttgcacaattggggcaaaagatgaatcgagtcacatcactgcttcgtctactgccaaacatatttaggattattgatgtccttgttacttccagtttcaccttgacaaagatgtcatggaccatgttgaaaatctaaattgattcaaccccatatcctgcgtaaaaattcgcaatacttcaactgtacatcattcgcatacatccatgcttttcattggntgcattgctcattgcattctttccttgaaaaataaaatanaataaaataaaatgaacttaatca

SEQ ID NO: 6151 - DNA, 370 bp, Glycine max
  unsure at all n locations
agcttctatataagctgaaccattntatcaataaacacaagttgagttttattcagaaaattagagtttatctcttttatcttagtgagagtgattctcctaaattcttgagtgattcaagaacaccctggctgtatcaaaggactttcacaacctttgtgtgttgccctcgctggaaagagtgattctttccttcctttcatcttcacccttgttctttcaaaccacaattccagaaaatccacctctgcccagaattatctcgtggccataactcccattttacgcactcaaattaagtgattcttgagcctaaattgaatttcaaaacgagacctttcacctcgttntggaatcacctcatttggag

SEQ ID NO: 6152 - DNA, 255 bp, Glycine max
  unsure at all n locations
tctcgatatattatgcacctgaatcagacttccgtttganaagttatgaccatttgaatttctcgagagcttctgctgttcaatttcaagcttctcgatatattatgcgcctgaattggacttccgtgtgacaagttatgaccatattaatttctcgagagcattcgctcttcaatttcgagtgtctcgatatattatgcgtctgaatcggacttgcgcgtgataagatatgaccatttgaatgtctcgagagct

SEQ ID NO: 6153 - DNA, 433 bp, Glycine max
cattgacaggacatgcctattatattcttgttaaacagagctcatacatctgtgagcattattaagctcgatgcaagatctttcatatgccccctagatccttcttaccaattgaagttttgaacaacatggattgagaaggtataatcatgaagaggagatacttaattcactacagagcaaaatggtgtaccataagatgatttttttttttcacgcaattatgaaaactactaaataacaaactagaagaataaaatgaaggcaaatagtacacagtacacacccatcttgccgtgattcgctccctgagttcaaattttggttcaatggggcgtcttcctgtgacaagttcaacaagcaaaactccaaatgaatacacgtcactcttttcagttagttgataagttttcacgtattcagggtccaagta

SEQ ID NO: 6154 - DNA, 333 bp, Glycine max
  unsure at all n locations
ctaagctaagctggtatntagcttattatagcatgattactatgtcttatatatcaaatatattctcgaagagttgctgaacttatttattcagaagtaatagacattgtcatgtctagaaatgagataaatgtaagagacagataataaaatactgtttgcacataaagtatgtaattataatttttaatacacgcacgatttaccacggatatgcctattttatataatagtaacacttgtctaccattacatatatacacttgagatgtcatgggctattaatatcaaacctatcgaggctgagcttaactcagtcatataattgagctt

SEQ ID NO: 6155 - DNA, 420 bp, Glycine max
  unsure at all n locations
ataacacgcagagactaacgtcgtcttctgcgaccttcctcaatcgcggccgacaagcttgttgacatgttgagatttacgtcatcttccgcgctcacaagatctgtcatactgacttttgagtctcgccgacggccgaaaatacccgagtggttatccgtataaactttttgttgtctataagacgaaaagcctgatagcacgcagagactaacgtcgtcttctgcgcccttcgtcaatcgcggccgacaagcccgttgacacgtggagatttacgttatcttccgcgctcacaagatctgtcatactgacttttgagtcacgctgacgggcgaaaatacccgagtggttatccgtataaactttttgctgtctgtaagacgaanagcctgatagaacgcagagactaacgtcgtcttt

SEQ ID NO: 6156 - DNA, 432 bp, Glycine max
  unsure at all n locations
gtcagcgtgactcanaagtcagtatgacagatcttttgagcacggaagatgacgtaaatcaccgcgtgtaaacgggcttgttggccgcaattgacgaatggcgcagaagacgacgttagtctctacgtgctatcaggcttttcgtcttacagacagcaaaaagtttatacggataaccacttgggtattttcgcccgtcagcgtgactcanaagttagtatgacagatcttgtgagcgcggaagatgacgtaaatctccacgtgtcaacgagcttgtcggccgcgattggcgaatggcgcagaagacgacgttagtctctgcgtgctatcaggcttttcggcttacagacatcanaaagtttatacggataaccactcagctatttcccgccgtcagcgtgactcanaagtcagtatgacagatcttgtgag

SEQ ID NO: 6157 - DNA, 402 bp, Glycine max
  unsure at all n locations
gttatgatagggaagggtcactatgtacttcagctgttgccatcacaaaaatatatgatacttggataagacatcttggaacttgaaatcatgcatgcattctctgtatacaacaacagactagggttntctaattcctcaaccaacaatataaagttgtggtcatctgataatttggtgaacgtgtattagttagcccgcaatggtttatggatataaaagaggttttaggacggatttatccattatatattgtggtaatggatgttggcaaagtgaatgatagttctgtatgggttccacctatcataaatttggatgtcagctcttcatagaatagttngaaaacaggaccgcatgatacatcatatatattgtattaaaagaatttcaatgaatagt

SEQ ID NO: 6158 - DNA, 485 bp, Glycine max
  unsure at all n locations
ctcagcttgctttaaacttctacaatcgccgaccgccgaagtagcaattatgtttggaatttcgaatgtgccccatattgaaattaattcacatgattgttacatgataaaaacatgcttctaaattctcagtttcgcttgaatatcacatatagttgaattattttttattctattataagagatattccattcaattgttttgagccggcaaacttatttttcaactatgcacctaaattcgaacttcaaaatcattgtacccaaatataaggcgtttaaataataagatatttctagatgaattaggcttgatagttcaacatgattagtataaatactacgtataaaatagaanaaaaatctatacaacgttggaaacctttggtgcttcctacattntaaggaagtacttttcacacgtgtggtaaacanaacgataganataaaatagagatcatgtgatagagtanaaacatcatata

SEQ ID NO: 6159 - DNA, 399 bp, Glycine max
  unsure at all n locations
tcactaatatttgaaatttgttgttctatcttctctaagctctttntctgtaaatttttaagttgtaaagctctttaaacaccttgtaaatcctgagagaaaaatattcagtgcttaacttgtatatccttctataagacgcttaagctattttgtgtgcaaaatatacccccaacaaatttgttgatttttttaagagctagaagtggcttttttgagaaaaaatactttatggtgtaaatcttaggcataagctatgttgtaagagccataagtggcaaggaaaaatacttgtaactttntttaaaggtactagaacttggtgggttgaaaaaccaggacatagtctcaatggtagagatgaaccaatataaaactctttatgtcttacatatttat

SEQ ID NO: 6160 - DNA, 247 bp, Glycine max
acagccttctggaggaatcttctggagggcccaagtgggcctggttgctatttgcaccctcctttttactaaatacaccccctagctttttttggtgattcttttttcgtaaaggtacggaaacttacgaatttcgtaacgatacttggtttctttccgtaatgttacggaaccttgcggattacataatcatccccttttttgacttacggaatgttacggaacctcaataattgtgcaacgatgc

SEQ ID NO: 6161 - DNA, 346 bp, Glycine max
  unsure at all n locations
agcttggcaataaaaaatgaacccgttggtacctgttcaaccccaccctgattntccttgacttggagaagcaggtttgagtttgggtttaggtatgtcacttcaccccatatgtgtcccgctaaaatccaatggggataggatttggtttcattnttccactcatgttttgtaaatctgaatccaccttgttgtgattcctaccccctacggatatcataacataacgtctgaagaagttaatatgaatgaagacaatgaagaaaaaccaggtgtgtttgaaaaaattgattattttgatgtcttcaatacttctcaggtattaatataattntgtattttatta

SEQ ID NO: 6162 - DNA, 394 bp, Glycine max
  unsure at all n locations
cggaccttaaccctaaccctattgtccaatttcccatcatatagttctctaaattagatttcaagcctacaatccaaacaaacacggatactaacctcgccaagctgcggcgccaagtcaagaaagcttgtgtttcgctggcgttcagctcgtcggcggacatgtcgggagtccatggcgggcggcgaggaacgcggaggctgctggcgtggagcgcctcctcttgcttctgctgcttcctcgcttctttcggcgtcgtcgcttcaccgggcacaaaatctggatcgctactctcanataacagcaacaaaaacaacatatattacagaacaattgccgaaagaagagcgcgggcacgtgaatgcgaataagagaaagaaggctcacaggctga

SEQ ID NO: 6163 - DNA, 433 bp, Glycine max
  unsure at all n locations
agcttcttttctagaccatgatcagtcatgttttctggccgatgtccactgtcattnttttcgatcaatatcggagaataatattttttttgccgagatggtctaatgttttcctggccgaataagtcgaaacatgccagtttctgaacaaacaaaaggtcggttgagctcacacaaaaaacctagccgacctacgttgtaaattttttatgcaacaccaaaacaagaaaacttcctctgtcgtaaaatacaaaacattattggctagcgagtgtttttttaaagaaaattgtgcaatgtcggtcgaaaaatatcagtcggagctatttcaagttcgatgtcggctattgagttttcaattcaatccgtgaacgaaatttgcatgatgtctgtaacgaaatgttcgataggcctcatcctgtgaagcttcatt

SEQ ID NO: 6164 - DNA, 427 bp, Glycine max
  unsure at all n locations
ctcagcttctttgtagacctcgatcggtcatctttccaggccgtggtctaccgtcanttttttcgatccatttcggggaataatattattttgccgagatgggctaatgttttcctggccgaataaatgggaaaatgccagtttcggccgaaacgaagagtcggttgagctcgcacaaaaaaacctagccgacctacattttaatatttttatgcaacaccaaaacaagaaaacttcctgtgccgtataaaaaaaaaaaaaacattacatgacagcgagcgttttgaaaaacaaaattgcgcaacgtcggctgaaaaatatcagtcggcgctctttcacgaccgatgtcggctattgagttctcaattcaatccgtgaacgaaatttgcatgatgtcggttaggaaatgttcgatcggcatcatcct

SEQ ID NO: 6165 - DNA, 404 bp, Glycine max
  unsure at all n locations
agcttgatgaggtaattgtaatcagcacactcacacacactanaagccacaaaactagggtcttcctccccaaaacccatgtactgctgctcccagntttccatttccccttcacctgttttgcatgttatctactctaatttctatccatcataaaagccatcacgacacatccaaaaccgcttcttatcctaacaagttaaacaaacaaaacatttccatgttcctttatcttcttaccaaactaactacggcaacacatcagcacatacatttatttaaacacagcagaaaccactctcacacaaaatatcattataacccaacaagggaagcaaataggggaatcaaatattagttgccaatacaatgtcattttctaactgtagtgagatgttctttta

SEQ ID NO: 6166 - DNA, 378 bp, Glycine max
  unsure at all n locations
atttcttttatgcaagtgaaatgatgggtgctgctagtgtcactaatttagaggaatgattaacatttatttgttgaacaatttaagttgtttctttcttttattatgtaattcgaaagaatgaaacatgtttaagttgctaaacaaaatgaaacatgttgaaggacaaccaacatagtatattaatatctccttttttgctaaatagaatcatatgctacttattgttgggacaacatatatttagatggtaatgttttttttgtgggaaaataaatatgcatgtcttaattcctcatgcacatacccacatttatgattntaattgaatagattgatttgttntagtaatnttttaaattatgataatgatcctat

SEQ ID NO: 6167 - DNA, 362 bp, Glycine max
agcttgtatagttccccaatttatggttattttggagtaaattttgtaaataaatattgttctatggttaatgttgtctctagaacatttccattggatttaatgatgaaatctatgcattttcaggtgaaaaagaggctaagttttgaattgcaaaaagtaacagttaggctaagctcagcagttgggctaagcgcatatccaccactaagcgtagcttcagcgcgcttagcgcaaaagagaatctggcagagcatcatcatcaaagtcgcacgcttagcgcaagatcagtgcgctaagcccagcaggtgccttcagccaggctaagcgcgagactggcgctaagtccaatttcacttact

SEQ ID NO: 6168 - DNA, 366 bp, Glycine max
  unsure at all n locations
ntatagaaattcaaatggtcatgactcttcacacgaatgtccgattcggtgaaataataaatcgagacattcgaaatataacaacgaaagctctcaagaaattcaaatggtcataacctttcacgcggatgtctgattccgacacataacatatcgagacgctcgaaattgaacaatggaaactttcaagaaattcaaatgatcataacatttcacacggatgtccgattaaggcgcataatatatcgagacgctcgatattgaacaatggtcgatattgaacaatggtagctctcgagagactcacatggtcataacttttcactcgaatgtgcgattcggagacataatatatcgagacgctcg

SEQ ID NO: 6169 - DNA, 359 bp, Glycine max
  unsure at all n locations
agctatagagttgagtcttgtatcggtttaatcgattacaactatctcataatcgattacattgttgtttgagagaatgactgatttattcaggagtcttggctntaattgattaccaagatcgattacttaaggcatctaatcgattgcattgttcttgagttatttccagatgttgggatgaactctttaatcgattacttagataatctaatcgattaggtcattgaattaatcgactatgctataaatttaatcgattacaagcagttataattgttttctctataaataaccagcttgagttcacatctaagaatcaagagatcaatagaggatcctccatacatctcaaaaat

SEQ ID NO: 6170 - DNA, 332 bp, Glycine max
  unsure at all n locations
ttacattgatgtttgtattgatgggaggaggttacatgccattgttgctttaagagtaacgtcccactggtaaaactaactttccaaatgtttgccttcgcaggaatggccccgaggaatcttgcctcatagaggtccacgaaggacaaggtggccgaatgaactattttcgccccggagtacgacagtcaccgctttangagcgttgtacaccagcagcgcttcgaagccattaatggatggtcatttctccgggagcgacgcgtccagctcaacgacgacgagtatactgatttccaggaataaatagggcgccggcggtgggcaccact

SEQ ID NO: 6171 - DNA, 441 bp, Glycine max
  unsure at all n locations
agcttgcgctggccgctaagtgaggcgatgcactgggtctgtcttgtgcgctaagcgagttctcctaatcttcatttttttcttcaagtttttgcatcaattttcctccaaagcacttgtaattntcttcttttgaatcttgctggtaaaatattaacatgatattaaatttctcattatctcattaaaaacaatagtaaagtaaaggaattctaatcattgttagtcaaaattaactgtcaattaaacttaaatttcacagttatcagtgccagcaaatttaaatttgacactatgcaccttgtaaggttacttcaaccatgcccattcctcatgcagtatgggaggatctctccttggattnttcattgcctttgcttcttcccaaggctataccatgatcctgaaagccctcgtatacaatgttcaaaggtactactc

SEQ ID NO: 6172 - DNA, 380 bp, Glycine max
  unsure at all n locations
gcatgagagggagtcgccacttcattatgggtaacttagccacttgtatatgcgcatggcaatgcactattgcactatccactactgaagttgactatatttcagctactactcgatgctctcaaatactatggatccagatgcttctcgagaggactacaacatccatgagagtaacattgttatctattctgatttacatgaagcgctactatcacgctttctaaaaatactaccttgcttctcatggacagcatctcctaattacagactaggtcatacgataccatgttctaaagcaccatgctaatatctttattacacccgttactaacagataancttggaatggactgtataaaggaatgattcattatcta

SEQ ID NO: 6173 - DNA, 372 bp, Glycine max
  unsure at all n locations
agcttattctcgatttgttgctntggatttatcttganaaaatcgctgcttgagaagtgcctgttagtgttttataagatggttagtaagggactgttgcctgacgtcaagaattgcaatagggttcttagattgcttagggatagggataataacatcgacgttgcgagggaggtttataatgtgatggtggagtgtggaatttgccctaccgttgttacttataacacaatgttggattccttttgcaagacagggatggttcangaagctctgcagcttttgtttcagatgcaggcgatggtgtgttcgcccaacgatgtcacgtataatgttntggtgaatggtttgtctcacagtggggagatggag

SEQ ID NO: 6174 - DNA, 371 bp, Glycine max
tatcctagatgacacttcttataccactaagttcctaactctatcacttttaaagtcctactgagtgagtacaaagtgaattgcagcagtttaatgagtaattaaacactcctttgtcgctagaattataaaatcatgtacatatctaatatcaattcaatattaatttcaggatgtgtcgagcaccatgtacttatttatgaaagctgcagaagtcactcggctgaacttggaagggattacgaactgtatgattatttataatcatttgatgaagattacaaacattgcaactggatggaaaacttttacacaatcacaaaatttgaagctgaaactcatatatatttgagttccagatgacactctaa

SEQ ID NO: 6175 - DNA, 352 bp, Glycine max
  unsure at all n locations
agctntatttggtaaacttcaatctagatgggatggtccttttgttattactaatgtttttttcccatggtgcagttgagattaaaaatgaagttagcgacaaagtcttcaaagtgaacttaagccttttcatgaaagccccacaagcagaggaggaatttatggcggatctctctttggttntgccaattttatgtgatgatgtgccttgaatggcacttgagaagtttccttccattttcttttatatgttgngtctttgtttgcatttcaagtgtggggggaaggtttagaanaatctgttttttggtttctgatattattggttttgttttggctggatttggttttt

SEQ ID NO: 6176 - DNA, 399 bp, Glycine max
  unsure at all n locations
tgcatcacatagtctgatgtcgcataagacacgaattttaacctttgtatttattagcatttaatcaaacattgtaggctcctgattcatcttaagacataaatgtcttttgacttaacatgcatgctagtatttctagctctccaagccattattctcatttatgaaactctatcagttaaaactaagtattctcaacttgccaggcgatgatactatcttgcatagactttgagaatttttaactaggttactaaattatttgtcatacttaaatatgcccctataccatatttttaattggatcttgaagttgcatgtgttntttaaattaagtccatagttgggtcttaaaacttgtatttgttttttaattagatcccaccagggacctaatta

SEQ ID NO: 6177 - DNA, 429 bp, Glycine max
  unsure at all n locations
agctataagtgaggccttgngagaggatntgtccaaaccctccaacaccagtacttgtagtaataaagctgacactactactactaaggcaaggataagatgcagcatcgaccaaagctttctgaagaacaaatctgtaaagggtaccacggaacttcttgaacagcatgtgtggaggccccagagagggttgccagagcgtgcagtggcaattcttaaagcctggttatttgagcattttcttcatccgtatgtttgtctctatctatgtctcttattaataattttcttgctccgtgactctcttttctgcattctaaagagacatttggattgaattgtggcctttttttgctgttgttgaatttcttttcagttaccctacagacactgataaacacatgctggctagtcaaacaggtctttcac

SEQ ID NO: 6178 - DNA, 432 bp, Glycine max
  unsure at all n locations
tcatagcctgaatagtggcttaaggagttgaggctgacaagtcccaatttctgcgttttagcgatgacctagctaagctagtcctgcccgctaagcaagttcatccattttgttaaatttctgggttttaggatgaactcgctaagcgcaccctgttcgactaagcgagttcatcaagtttgtttatatttctgcaatttcgtatgaactcgctaagccactgcactacggcttagctagtcattgaatttatgctntatatttctaggtttgcatgaactcgctaagccgaccatccgcgcttagcgagtacacttagttagttctgcaacttggaggctgtttgcattcctttcgtggctaagcgagtcatgctcgctaagtccaaaagtgcctctggaataaaattgggctaagcgagtctgtctcact

SEQ ID NO: 6179 - DNA, 407 bp, Glycine max
  unsure at all n locations
tgggaccttgcttagtctcttgagaactgtgtttctagatgagtgacagtccttgttaaaacctanacccaagtcctgaaggattaaactgcttaaccaaacccaagttgtttggacaagaaaaacatgttcccaccaggtttaatccattttgacgtatttatcaattttgtagtatctcaatagttaaattaaaactaattcaatattattataaacgttgacctggttatgggattaatccttgatcaaagtttaatcagacttgtcactctttcttaagaatgtattttgcgagaattaaacttaagggtgggtaagtaggccggcccatcccgcgtaaaacccgtccacataagttcgtattggcaatagattggaccagtctgtcccgtactcttacacgg

SEQ ID NO: 6180 - DNA, 387 bp, Glycine max
  unsure at all n locations
gaaaaaaagaagtcgtatccagtcaaggtctgagagaccatacaattttcctaacgatttctaattatgtgggccattaagtctatcatatgctgacaatagccgagaagcccatgaatctcttcgggggcggagtaggtgtctgccatcgccttggccttggctaacaatcggngaagttcttgactcccgttcaaggtaagagcaaaccgatccatccacatggttgcctcttggtgtaaagagtcgatcacccttcctctagcctctttttccgcatacacttgagcatactcatccgtgattctatgctcgtgggcccgggctagacctaactcttcttggtacttggcgatgatagctaacatgttggtctctgtctcgcat

SEQ ID NO: 6181 - DNA, 277 bp, Glycine max
  unsure at all n locations
ttctctttcccatgtcaactatgcagcttgcggtcaacatgaacggccttcccaagattacaaggatgtcagtatcttcagagatatccataaccacaaagtctgctgggaagataaaatgttntaccctgaccaacacttcaatcactccacatgacctggtaatggagcggtcagctaattgcaaagtcattcgagtgggcataatctccaactctcccagccttctgcacatggagagtggcatcaaattaatagtggcttccagatcaatcat

SEQ ID NO: 6182 - DNA, 443 bp, Glycine max
  unsure at all n locations
agcttgcgctgcccgctaagtgaggcgatgcactgtgtctgtcttgtgcgctaagcgagttctcctaatcttcattnttttcttcaagtttttgcatcaattttcctccaaagcacttgtaattttcttcttttgaatcttgctggtaaaatattaacatgatattaaatttctcattatctcattaaaaacaatagtaaagtaaaggaattctaatcattgttagtcaaaattaactgtcaattaaacttaaatttcacagttatcagtgccagcaaatttaaatttgacactatgcaccttgtaaggttacttcaaccatgcccattcctcatgcagtatgggaggatctctccttggatttttcattgccttgccttcttcccaaggctataccatgatcctgaaagcctcgttatacaatggtcaagggtactactctc

SEQ ID NO: 6183 - DNA, 407 bp, Glycine max
agtcgccacttcattatgggtaacttgaccacttggatatgcgcatggcattgccctattgcactgtccactactgaacgtgactctattccagctactactcgatgctctcatatactatggatccagatgcttctcgagacgagctacacatccatgagagtaacattgttaactatctgacttacatgatgcgctactatccagctttctaaaaatcctacattgcatctcatggacagcatctcctaattacagactaggtcatacagaaaccatgttcaaaagcaccatgctaatagttttattacacccgttactaacgaatctccttggaatggactgtataaaggaatgattcattatctataggtgcgtcacattagctttatgtcacaggacatatc

SEQ ID NO: 6184 - DNA, 337 bp, Glycine max
  unsure at all n locations
agaacgcatgaacganaatgcttttcatggtgctccgaanaagggttgaggatggagaatcgcactaagaaatcactacgcatggctccaaactcgtgggtggaggacgcatgaacgaaaacgcaattcatggggctccgaaaaagggttgaggatggagaatcacactaagcaatcactacgcatggctccaaactcgtgggtggaggacgcatgaacaaaaacgcatttcatggggctccgaanaagggttgagaatggagaattacactaagcaatcactacgcatggctccaaactcgtgggtggagggcgcatgaacgaaaacgcaattcat

SEQ ID NO: 6185 - DNA, 362 bp, Glycine max
aagattcaagattcaagaatcaagagaagacttaatcaagataagtatgaaaaggttttttcaaaaactgagtagcacatggctatttctcaaaacatgtttaccaaagagattttactctctggtaatcgattaccaaattgctgtaatcgattaccaatagcataaatgatatgaacaagttttcaaatgaatttccaacgttacaattgattgccaaaagttgtaatcgattataatgtttttggtaatcgattaccagtgcctttgaacgttgaaattcaaattcaaaagtgaagagtcacatcctttcacataaaagctatgtgtaatcgattacactgatttggtagtcgattacc

SEQ ID NO: 6186 - DNA, 400 bp, Glycine max
  unsure at all n locations
agcttatggagtagataaacaaaagcttgttgaggagattactcgtgcctatgcccaccaaatatatattgatggattnttcaatggtgatcctcatccaggtactctctctctctctccctctacgtttgtgcttatgtatgcatgtgcatatgatgtaacacttccgattgttccatgtgctcatgaactattttggctctcttactggaatcatcataggaaattttcttgtgagcaaggaatctccacatcgtcctattttacttgactttggccttacaaagaaactatcaagcaccattaagcaagcacttgcaaagatgtttttggcttctgctgaggtntggtttggcttttgtgcttttcatgattatgtggatactaataacatcatata

SEQ ID NO: 6187 - DNA, 373 bp, Glycine max
  unsure at all n locations
ctcagcttcagtgaactanggagcagataagaaggtctcacccggtatgtcgaaagctagaaagaggagcctaggcaaaagttagggaaataaaataggaaaaacaaaatatgggcgtgttatcaaaggttttgtccaaaatctaaattgtaaaagtctctaatcaatatttgaaatgacacatggtcatgcttcattatcccaaacactaatttatcccttgttaccccttctgagccaaagcatatttgttttcttttaaaacaacaacaacaacaacaaaaacccgtagtagcaaccaccgctgagccggcgggaagagcaaggcacacatcatatgcatgaggtaagctctacgttgggcaacaatgat

SEQ ID NO: 6188 - DNA, 270 bp, Glycine max
  unsure at all n locations
catgagcaactangtgtgtcctactatgacttgagaaacaaaggtgatcaaataacaagcagagatttaaaagttactaggttgcctcctagtagcgcttctttaacgtcttgagctggacgcttgatggcttgtcggtcacggacctagtaccttgcttacctttggctctggacttggtcgcctattgctcggccatgggtcgtaagcaacgctctaacctttttgtggagagctgaggtgaactctagaggtgatggcggtgcgtct

SEQ ID NO: 6189 - DNA, 395 bp, Glycine max
  unsure at all n locations
ntgtgtggagcttcaatggtgaatgagggaggaagaaaagcaacgtgagggagagggagagagagcttctgaaaatgtggggctgagtgaagagagagagagttgctttttggttntaaataaaagggttttctctttttccattattttattcaagctctgccacatgtccctatatgattggagcaaaaagggcccactttctctttttgactgtgacccatacttagtcacaaaagtgagaaaaatctgacctttgaaacgctaaaatcctgcctcggtttgcgcgccgtttctctgattccagtttctcgcgtttctctgcgtccgccggggccagttttcaaaagcaagcaatatatatatcaaaacgctcagaataaaaccccgagcgt

SEQ ID NO: 6190 - DNA, 252 bp, Glycine max
tcccggcaacattgtttgtattaatgaattcaacattatccttgaatatcagtaaacgtttttgcttctctgcagcatccttatataccttcccatatttcttcatccactgctcatgtctttcggacatggatgcctcatggaggttgcgggacattacttgggaagtgcacattgagagaaggagcacaagagctaaaatgtgctgctttttgcccatggaacccatgtcttttctcaacaatgtatcaa

SEQ ID NO: 6191 - DNA, 382 bp, Glycine max
  unsure at all n locations
tatagaatatataatataagaacagtgactattgaagagtctatacatgtttcctttgatgagcctaatgccattcttgcaaggaaggattatttagatgatatttcagattccttagaagatacacatattcatggaaatgactctaaagaaaaagatgaacgaagcaatgaggattctcaagataatggggctagaggaaataatgaacttccaagagaatggaaagcctcaagagatcatccnctcgacaacattattggtgatatatcagaaggggtcacaactagacattctcttatagatttatgcaagaatatggctcttgtatctatgattgaacctaacaatatgggagaagtcatagtagatgataactgga

SEQ ID NO: 6192 - DNA, 260 bp, Glycine max
  unsure at all n locations
acttgtaggattcaatntgggaaaaattggatgagggcaagtgtgatttcgaaaatctgcactttatgcagaattttgctgtcaaatatgtgcagcagaattttggctttgtgcagaaaatgttgtgtatttgttggttctggaaagagtagtacagattgggttctggacgttttcttgcagatcccaacggtcacaatgtaaacttatgtgctagagactttcagaaaaattttcaagtcgatccaacggttaacgaa

SEQ ID NO: 6193 - DNA, 414 bp, Glycine max
  unsure at all n locations
tcacccttcgtcccaaacttagtccanacttatcttcttttaacttctcatcctctagccttcaccacttctctcgcacctctatttcccatctccttcctttctttttcgattccagttgctagtcattataggatctccattggagctcatgcttccaagaagatataacatatgtcaacctatatctaaacatgcaatccaacttcatataaattttttcataaaattagtaaatactcaacaaaatatcatggtggattattcgtacttccattatgatggttcgcttatcctctacgaccaccaaaatgggtagtgagtcatataccacctacatcttcctcactacctnctctctttgatgatcagtaacttatggcgtatgtggtatggttaagggtgtcatcattg

SEQ ID NO: 6194 - DNA, 633 bp, Glycine max
  unsure at all n locations
tcaccacttctccacnaacatcttcctgtttgtnnnngcanttcatatctctccactacactcctnntactcacaccccccccgacaactggggntgagttcctgtcgttgcagcgacnctnnanagtngacctgcaagcatgcnaagcttctacccctatntgtggctatagaatgaggggttatgatgtgtatataagaaaagcggcgctcaacgctttccttagggcgacatcctctcttcctctcctgcgaanacttgctggagcgaaataataccttcctatgatagaaaaatatcatagcgcgagggcgcttgccgtaaccggtttcgtgagttattacgcaaaaattctcgaccgttcttcaagattcatcggtcggtcttcgtttgtttgagtcttcaacgggtaaagacctccaaccgagcttttcaatttattctatgtacccgtggtcggccacattttcgttcatgtattgttattctcggtgtcattctctatatatacccccctttgacgaggtaagccatcatttaaggatttctcgcttaacggaaaatacaataacttcacccatcgctgaatggatcacccgtaatccggtacaaagaatccgaccgtcgcctcc

SEQ ID NO: 6195 - DNA, 451 bp, Glycine max
  unsure at all n locations
agcttgtaattttcttattgcctttgcttgttattacatggttnttatagaattcctaatatggaataatcctaggaatattacaataaccgttttattgataagaattgctcagcaggatcacaattccaagcaaggcgatctgggaaaggatttgcagaagcttctgttttggcaggattcttcaaacgaagtcgtgaaggtaagtgggcctcttcaccttacgtttgggctttacttcgttatgcaccccctgttttgtaattcccacctccgagctcatctaagagctcatctattgtgggaattgngaactggtcttggaccatgacagcattgagggccctgtagtccatacagaaccttcagctcccatcatgtttccttacaaggaggacgagtgaggagaaagggcttgtactangttggatcaatcctttttgaagcatga

SEQ ID NO: 6196 - DNA, 312 bp, Glycine max
  unsure at all n locations
acactatgatactcagcttaccactgtccggttactccttgcccttgttgctcttcataactggcaccttcaacaattggatgtaaacaatgctttccttcatggngatcttaacgaagaggtttatatgaagcttcctccaggacttattgtggataatcccaaccttgtttgtcgcctttagcattccttatatgggctcaaacaagccagtcgctaatggttcacacggctctcgtcatttcttctctcccacagattccgacgatcttcagcagatcactcgtttatatatactctgataatgaccat

SEQ ID NO: 6197 - DNA, 371 bp, Glycine max
  unsure at all n locations
aatagggggagaagtgaagaagaaaggggttcagcttcttaggcacttctctctctctcgaaattgctgaggaaaattagttccatgaagaaaattcaagccgaggcgcttccgtaacgtttccgtgagtaattacgcgaagattctcgaccgttcttcaagattcatcgttcgttcttcgttttcttgagtcttcaacgggtaagtacctcaaaccgagcttttcaattcattctatgtacccgtggtggtccacattntgtttcatgtatttttattctcngtttcattctctttntatacccccttttgacgtgtttaagccatttatttaagtcatttctcgcttaatcntaaaaataaaataaatt

SEQ ID NO: 6198 - DNA, 307 bp, Glycine max
tattggcgatcagaatagccattccttggattatagggttgaacccaactcatgcttttaccacaaggttcatcaagtcaagttgaaatatggaagtaaccgtcttgctaaattggggcgaaagatgaatcgagtcacatcactgcttcgtctactgccaaacatatttaggattgttgatgtccttggtacttccaggttcaccttgacaaaacggatcatgttgaaaatctaaattgattcagccccatatcctgcgtaaaaattcgcaatacttcaactgtacatcattcgcatgcatccatgc

SEQ ID NO: 6199 - DNA, 428 bp, Glycine max
  unsure at all n locations
gctatgctgcntatattacaatagaacttccttcacctcagcagcanaatcaaccacagcagaacaattatgacctctccagcaacaaatacaaccctggatggaggaatcaccctaatctcagatggtctagccctcagcaataacaacagcagcctgctccttccttccaaaatgttgctggcccaagcagaccatacattcctccaccaatccaacaacagcaacagcccctgaaacagccaacagttgaggctcctccacaaccttccctcgaagaacttgtgaggcaaatgactatgcagaacatgcagtttcaacaagagaccagagcttccatttagagcttgactaatcagatgggacaattagctacacaattgaatcaacaacagtcccagaattctgacaagctaccttctcaagct

SEQ ID NO: 6200 - DNA, 423 bp, Glycine max
  unsure at all n locations
gtgtctttcatatggctatgaataggaatagcactaatctcttccatgaaagccactgctactccatcctcatagtcaaataggcgcctgctccacttcagatcccagctccaagtattctgagaaaagctgcccatcctggaaataagatcattctgctgcttgctgatcagaaaaagctgattatatgtctgctgaaggttgcagtcctcccccagccaattatctttccaaaacctaattntttccccacatccaaccttccatcccatattctgatggatagtactgaagtcattgcgctgatttaactttctaagatccctccaccatttagaatcccagcaatggactctaccattttgtagagctgaccacccttcatggttggaatttacaaccctgacccacagttgattctga

SEQ ID NO: 6201 - DNA, 311 bp, Glycine max
  unsure at all n locations
agcttcttatccaaggctcatcttggtggtgaagctccttcttccatggcttattccctagtggatggcgcctcccttctcctcttctcctttgccttccgctgcatctccatggtgaaaaatcaccattgaaggacctcattgaagctcaaagatccagcctccatagaagctccacaagcaagcttccatcatgtacccctgccaagcactttggagggccctcagttntgcccacaaccacaacccttgcatgttgcaatgggaagaatccctcctgctatggcagagaagggaaagttggatcatat

SEQ ID NO: 6202 - DNA, 85 bp, Glycine max
agcatgagagggagtcgccacttcattatgggtaacttagccacttggatatgcgcaaggcaatgtcctattgcactatccacta

SEQ ID NO: 6203 - DNA, 450 bp, Glycine max
  unsure at all n locations
agcttctatggaagctgaatctttgaacttattgaggtccttcaatggtgattntcaaccatggagttgctgcgaaagataaaggagaagaggtgagcggaggtgccatccactagggaataagccatggaagaaggagcttcaccaccaagagtgtcttggataagaagctttgagaggaagcttcaatggaggaggagaatgagagagaaagaggggggcacgaaattgaaagagaaaaaaagggagagaagttgaactttgaagtgtgtctcataagtttcacattcatcaaagttgtaacaagtgttacaaatatttctatttatagcctaggtcactaactaaatgaaattcactttcatttcatgtgaatctaagaggaatattccaaggatatgccanaggcatattagcatattccaaanatatgccaaagacatcttaaca

SEQ ID NO: 6204 - DNA, 375 bp, Glycine max
  unsure at all n locations
cataaacaaaaaagaattgtgtggttgattacacaatgactaacattatatcatcttacagacgaataaacaatttatgcacttagtcttttctctcaagaagaacaaagtgttntgtgagtttttttaaactttacaagaatttacacaaagaacttttacacaaagaatgaaataatgagcgcttcanattgtacttcatatcttcaaatcttttgttttatataggtctctttcaatcaagtatttgttgtctctaaatagacatatttcctcttttaagctcgcatctgaagaanatggtcattgggcattcgatgcacgtacttcttcatgttgagaaaccaattntcatcgttggtgtgtgaacactat

SEQ ID NO: 6205 - DNA, 386 bp, Glycine max
agcttgccaccattccagaaaatgacaatctttctacagaggaaaacactactaatgaaggtggcgcagcttttgttgatgctaataatcaaaacatttccaatgaagcccaagcaaacactgagcaagaaatggagaggaagtttaggcggtatgtatatgttattttaacatgcaggcataattaatatacacatatcaagaaaaattaaaattaggggcaaaatcatttatgtatatttttttaaaacaattgtctttaaatattttgtgatttcaatattaataatgaaaattaatgttcgtctgtaaatttagtctctaatcgtttgtttttctgtagctacaactatgaaaattattgcatgtgtgtgtatctaatataa

SEQ ID NO: 6206 - DNA, 297 bp, Glycine max
acagcagaataattatgaccgttcgagctactgatacgggccatgatggaggaattatcctaaactaagatggactagttctttacaacaacatcaacctgtccctccgttccagaatgttgctagtacaagcaagccttatgttcctcctacaatgcagcaacaacagctgtctcctcatagactacaggcaactgaggctcctactcaaccttacttataagagtgagcgaggcaagtgaccatccataatatgcaattttagcgagagacatgagcctccgttcagagactgac

SEQ ID NO: 6207 - DNA, 317 bp, Glycine max
agctctgagggtgcgtagcccaccatcttttcatagtagagtatcgataatgtgtctaccatcacgattatcgtctccctttccatcattgggggtaccacctgtgacgccagatccctccacctttggggtgtgttcttcgaaagatccgtccccttgtttgcacatgttctgtagttgcatcctatccggaaccatatcagaatagtactgatactgcctaacgaaggcaaccattaggtccttccaagtatggactcgcgaaggttcctcgttaatgtaccaaggaacagctaccccagtaagactttcttgga

SEQ ID NO: 6208 - DNA, 416 bp, Glycine max
  unsure at all n locations
ctcagcttgcttctacatatgatgttctagaataattgagtatcaaatgtggtaatcgattatttcgtcacagagagcttctaaatgttccaagcgcaatctaatcgattactaaatgtggtaattgattatctagagccacaaagccttccttcttctaaaatgggttatattatcgattactaaaactggtaatcaattaattcaatgactttagtcaaatttcagaaagaagttagttttgttgcttgttctaacactgtgtaattgattaaataaccttgtaattgattatactatgttgaactcattatttctaagaaactttgagatcnatccatctatctatctatcatgtttgattcatgttgaaacttttggcaagcgtaccaattgttgtataggtttacatttat

SEQ ID NO: 6209 - DNA, 350 bp, Glycine max
  unsure at all n locations
gctaagcgagcttaactntatctattttcttcataattcctgccgctcaagcactaanaatgactcgctngagaaaggcatggcaatgtctcttcattctgattatgacttagcttgcttaagcgcacaacatgccacacttaagcgagaaggctcagtttctttagctgacttaaattcctataagagaactccatataaacatcaaaaagtctaanaaacttcaaatcctaaggttcttatgtaattaattattcatacttcaacctaatcttaaggtagaacaaagctatatgtatcataaatgtcagataattacctcaaatcatatgtgaaattaagttctattt

SEQ ID NO: 6210 - DNA, 379 bp, Glycine max
  unsure at all n locations
tgctacccagctcgcccaggcgagctcagctctaccaagcgaggtangttgcttcctccagaagcaaccgccttctggaggaatattctggaaggcctaagtgggcctgattgctatttgcacccccattatttttaaatacaccccctcgctttttttggtgattctttttccgtaacgttacgaaactttacgaatttcgtaacaatgcttttttttctttccgtaatgttatgaaaccttacggattacgtagtcatccctttgtaacctttcagaaggtacagaaatttatgaattgtgcactaacactttcttttaatttccggcatgtcacagaacttcacgaatggcctaacgatggatgccaagtaccttg

SEQ ID NO: 6211 - DNA, 398 bp, Glycine max
  unsure at all n locations
agctnttcaaagccaatttcatcagagaagtcaggtactctacttgactcgccatcgtcgtcatggtcaaaatggccaatggcaagtggcgaatgtgcaccaactacacgtatcttaacaagctagttgatggagcgtccgagttccaagtactgagcttcctggatgcctacacatgatacaattagatccggatgcatgccctacatgaagagaaaatgacattcatctttgaagatgccaacttctgttatagggtcatgccctttggcctataacatgtaagcactacatactagagagtgatggaccatantattcaatagcaaattggatgaaatgtcgaggtctgcgtcaatgacatggtcatcaaatcacataccactagcccacatgtg

SEQ ID NO: 6212 - DNA, 327 bp, Glycine max
  unsure at all n locations
agcttatgctcggatatcanaagtttcgttatgagcaaggataacttcttatgtacttggatgtagaanaaataacaataaagtaaatccatgtttatgctatgagaaacttctcttataattgtaaggttccatgaatctaaggtttttataaacactttggtgaatggagaaaggttagctctaatctatagcgttttggctaaggaagactattcaaaatctggggtattattcttaagagactcaactcttctaatcttccatctattggtggcttctcttccttgcaaggggctccttcaaatgaagatccttaaatatacc

SEQ ID NO: 6213 - DNA, 390 bp, Glycine max
tctccactttacatccaacgcatgagttctagtcaggataagagcaggacatcacaatcaggacggatttctttcaaggggtatttattttctttatagtttagacaaaattcagctctcatttttgaactatacttacttaactgactgctaaaaaatatattttgaattgaaagcttctgtgttttgcatacatttgattcacaagatatatctcctattgatttattgaagaatgtttcccttacacatttaaactcattatttgtgcgtgaaatgttttccattctattatagtttaaaagggagatctctgagttctgcagaggagaagtccatagttgaacctgaggttttgatgaccaaggaaatagagtggtctaacaattt

SEQ ID NO: 6214 - DNA, 383 bp, Glycine max
agcttccttgctagcctctgactaccatgttctctgctttagtcattgacattgccacagaagactaaattatggacatccaacaaacagacccaccttcaaaagtaaagacataccttattgtagacctattgtaccctttaggtaccttaagatctacttcaatgctttacaatgttgctttcatgggtcaaacataaacttgcatacttgacttacaatgtgtcaaatctgatttggtgcacactataacatacatcaagcaaccagctgtactgacatataagaaacctatgacatgtactccaccttagtatctgtcttcagacgttgatctaaaaaaacttaaaagtgttttatttcaaaatcacaagtggagttat

SEQ ID NO: 6215 - DNA, 443 bp, Glycine max
  unsure at all n locations
ntagatacaaatacagcgtgtattcttataccagcagaattttctgccactgaaactcacaagaattgttaattagaaattcccacaatatgaagtaggtgtgtggaaacatatacaattattatattcaagataacaagaaaagtattcaaggataagttatctatctttaatagccattcttttactatataattcatatgctggacaagtgtctattttttgctcatacattctgtataggttggcatcctttccaaaagttctaccttgataatatattccatcaactacacataaacccctaatacatcataagtttgtccaaagtctcagactggtgttcaatcattgctgacataccaatttcaatggtcacaaagaagattgccactatggagaacaatggacacaacttgttcttcagcattccatttaacata

SEQ ID NO: 6216 - DNA, 399 bp, Glycine max
  unsure at all n locations
tacttatgtggcagggcgggccttcttcactctcttgtctccaacgcgagctntgaccatcgctcttctttgccgcgatgcttctcttcatatccgcctgagcgggcttatagcctaaaccatacttcccactatttcctttggcatttatcaggctagttatgccgtcgttgtctttgcctaaacccattccgggttcgtaaccgttccccaacataactcgggccatcattactgctgcatcggacaggcaaggctgcccaaagaaggagtccacggaggaaatgctgaccacctcaaaagactggaaagcgggttctaatgattcttctgcggcttctacataaggcatagaggatgggcagctcaccaagatgtctctctcgcctgacacgatga

SEQ ID NO: 6217 - DNA, 429 bp, Glycine max
tatacagatatacatattttccagcaacatcttgatggctctattcaatacaacatacatcacatggaaatattagattacagccagacacaatgcatagatgctactgtgttgggtgctttgctacattgccacatgattttctggtacaagaactgtttggaggggatcaaattcaataaagaatgtccgaatcttcatcggagcaagttcaaccaccaacttcgtaggatcaacaggtcctcctctcaccaccttcggctcttcagaggagccttctaccttccaatctagcttcctcttttccatttgagctctttcttgattagcagacaaactcatctctgtcactttattgatctgaaaagattgagtagtcaaaaggaaactatacatgagtacatgatgtgtgaaaaatactaacttgga

SEQ ID NO: 6218 - DNA, 440 bp, Glycine max
atcttcttgctaagccaatctgctatcttagtgagcgtccgctaagcacaacactcatgggctaagcgcgaggaagactctggaagaagatgagttgtacaggttcactaagcacattgctttatctcactaagcgcaccacttcagtccatccactaagtgagaaaggcacgcgctaagccaaaattcactaatgtgcgctaagtggttcataattgcgcagagcgcacgagcacgaacaaggccacctatttaaaccagaaatcagattttgtgaagggagtttgggctgggattcagagctttgcatgtctagagattctagagagataaaggtccaagttctagagagttctgagagattttgctgtgtgaagatctgtagagactaaagctggaagcatgagcccggttgagagcttgagatgagcttgtgagtg

SEQ ID NO: 6219 - DNA, 396 bp, Glycine max
tcaatggagctggcatcatttactcagccccctcacgcctatttatagcttaaaagggcacttggtggacttgcaactcgcccaggtgagttgttgcttcactctaaagtaacttggctcgcccaagagagctggttacttcaaccctaagccatttgggggcccaggccagccagaggctatccaaggcgagccaaggtccaaaaaattgcttggaatgacccttttacccctccctttgggtattatctgcatccttaaccaaaacgtcgaacgatctttcgtcttgcatggtaaccgatgtcgaacggcttaattcggctagcgagaatcaaaatatccacgaatgatagtccctggacgaaattagggtctgacagtagcaaaggatatata

SEQ ID NO: 6220 - DNA, 130 bp, Glycine max
agaaactacgctgctaccatggagctcctaaatctcccacactgttgttgtgtccattcttggatgaccttgatgttgtcagggtccacttggaccccatttctaccaacgacaaaccctaagaaaaata

SEQ ID NO: 6221 - DNA, 162 bp, Glycine max
aggctacacaatcggagaagaacttgacgcctgcacaaggtgagagcataccgatccatgcacacggccgactccaggtgggaagagtcgagcacccttacactagccactctttacgcagatactcgagcatactcatacgtgattctatgctcgcgggcc

SEQ ID NO: 6222 - DNA, 352 bp, Glycine max
  unsure at all n locations
tcacgtactgtctcgtggggggtatgaactgctngacaaganacttatggaggagaagagcaagcgtggacatgaggaacattcgtgtactgaaagcccaacactcaacgtcgacccaccatccccagttgcaagacacttgaagtggaagatcgcccgcactaagcggcatggccaaatgacgtctgaagtggcacaagaaattgtagacaaaattgtcagttcatatatttttttggttactgtcattggcaaataatggttagctaacctagtcaaatttgttttattcaaattcaacaattgtatatgcatgcaggattcattacaggaacaagcaacacaggggagt

SEQ ID NO: 6223 - DNA, 443 bp, Glycine max
  unsure at all n locations
aaaggtgttttgatgataacatatgatgacaacanaagatgatcacaaaggtgatgaacaaaaagctcaaaagatcaaagaacaactcaagtgaatcaaagaacatctcaagtgaatcaagaacaagtcaagagttcaagaatcaagaagaattcaagactcaataagaaagcctagaatcaagaatcaagaagaattcaagactcaagaagaaaacctagaatcaagaatcaagattcaagatctcaagaatcaagatcaagattcaagactcaagattcaagaataaagaaaagactcaatcaagataagtattaaaattttttttaaaactttgaatagcacttgagttttttacaaaacctttaccaaagagtttttactctctggcaatcgattaccatattgttgtaatcgattaccagtagcaaaatgacgttgag

SEQ ID NO: 6224 - DNA, 307 bp, Glycine max
cctaaagaagctagagcttagctacacacacttctctaatagctaagctcacctccttgagatgagaagctagaacttagctacacccccccctataatagctaagctcaccgccatggcaaaatacatgataatacaaaaaaaaaagcccctactacaaagactactcacaatgcctcgaaagacaaggctaaaaccctatactactagaatggccaaaatacaaggcctaaacagagtgaaaaacccatactaatatcgacaaagataagcgggctgatacttaggccaaggcggtaaaatctac

SEQ ID NO: 6225 - DNA, 370 bp, Glycine max
gagaacaatatctgtatgaacagagaagagctgtgtatccacgaaaagctgtttagcacaagacaacaaaggagaaatccgcattagtaatatgagaataaatacctaagaacatgaaggcaatgcaaagatagaaatgtgtcaataaattacacagataagcatgcctaaattatttaatcacgctgacaaataagtactgtactacatttaatccgagtataggtataaactactgctaattatacaaattcatttggcttcctacacagatatgcagtagagaaatcaacaattacatccgtctacacgtcagaaaaagttaattaccctagcaagaactacatggaaatccagctgagcaagtagc

SEQ ID NO: 6226 - DNA, 180 bp, Glycine max
  unsure at all n locations
gaggttntgattgatcaaaaagaagaanctacttcataccgatatgcccttaggcacggcaatacataacatagaaatcacanctcgaaagggtggaccaatagctagagcagcaggtgctgtagcgaaactaattgcaaaagaggggaaatcggccacattagaattaccttctgggga

SEQ ID NO: 6227 - DNA, 477 bp, Glycine max
  unsure at all n locations
nggtgtgtaatgatcatgagcattgaaactaagcttgccttggttagacatgattgtgtacatgattcgcgacnggtagtattcaatttgcgaaaaattggatgagggaaagagtggttttcgtaatccgcctccaggcagacaactatcttgaataaagcggtggaataaacctattgggcgaggcggcccaccgcgctcatgaatcataccccgggatggccgccccaatctactcgtgaatttnagaaggggacatatttagatcaacgtcttcatctcctctctaaacctctcgtatacattcactctccctacacctctcccatttatccttccacacccccctactcacctcattccactctaacatagctcctcgcttgcgctaatccccaccctcttcctcctctcccacctattctcctctgatctctctctccactcctcctccactaactccacgctggcgctgac

SEQ ID NO: 6228 - DNA, 440 bp, Glycine max
  unsure at all n locations
cttgtgtgtaaagagtcacaacttanaattcttttttcaagtctaaagagtcacaactctttagaaaaataattttgtaatcaattacaccattttaataatcaattatcagtaaggaattttcaaaaataactcccaacagtcacatctattcaaatgtttttgaatggccatcaaaggcttatatataggtgacttgggacacaaaatttctcaagagtttttactgcacaaagagtctcatcctctcaaaaactaaattatcttatcctctaaaacattctttggccaaacacttgcaaattcaataaggaatcttgagtgatcttcaattgttatatctttatcttanaagagagaattcttcttcttcctcttcttattcaaagagattgattaagggaccgagagtctcttgaagttgtaaaaattcttgacac

SEQ ID NO: 6229 - DNA, 357 bp, Glycine max
  unsure at all n locations
gctacacaaatccngtctaatagctaagctcacccccatgcgcaaaaatacatgaaaataaaaaaaaagctcctactacaaagactacccaaaatgccctgaaatacaaggcttaaaccctataatacaagaatggccaaaatacaaggcctaaaagaaggaaaaacctattctaatatttacaaagataagtgggctcatacttagcccatgggctcgaaatctaccctaaggctcatgagaaccctagggccttcccttggatctctggcccaatttacttagagtcttctatccaatgcccttacaaggtagaattgcatcagtagggtcggtgctgcttaccctcaacgatca

SEQ ID NO: 6230 - DNA, 317 bp, Glycine max
  unsure at all n locations
agtaccaagaagagatacgnctagcgacgtgttatgagcatataatcgccgacgaatatgcccaagtatactcggaaaaagaggctagaggaacggtgattgactctttacaccaagaggcaaccatgtggatggatcggtttgctcttaccttgaacgggagtcaagaactttcccgatagttagccaaggccaaggcgatggcagacacctactacgccccgaagagattcatgggcttctcggctattgtcagcatatgatagacttaatggcccacataattagcaattcgtaggatacctgtatggtctctc

SEQ ID NO: 6231 - DNA, 329 bp, Glycine max
  unsure at all n locations
taatatcaccaggaactatcacattaacaaaatcacagcctctaagatttcgacanattattaggtagccttgaagcattatgtttttatgattctaatctaccattctctntatatataatacataactatattttttaatttgtaatttatttataatattcaattatgttatgtaaaaaaatagttaaaataattaacattataatgattttagactatctaataatttctagtaagattttaatgtataacanacctggaagcacagaaggctaccacataatccgtcccagaacaagtgaaaatactagttggatcatcataag

SEQ ID NO: 6232 - DNA, 472 bp, Glycine max
  unsure at all n locations
ctacattcanatgcaaggataaaaagacttgattgaatggacctctcatggtctcaagtgtgtttacaactcaataatcatataaccttcagataaactttgcttaagaaacaaaaactgaggtttgtaagttgtaaaagttcattcaaacatttattggatctgagaacacaaggtgggtatatatagagaaaatagttataaccatctgtaattgattaaattggcaatgtaattgattattacgtgaaagtaatcaattatattttccaattaatcgattaaagtgttcttccccaattctagaaaatataattgattattttcacataataattgattacattgccaatttaattgattaaagtgttcttccccaattttggaaaacattcaagaacaatgtaattggttaaagttttcttaatcacttctaggaacactntcaagaatgatgtaatcaattactata

SEQ ID NO: 6233 - DNA, 469 bp, Glycine max
  unsure at all n locations
ggtctctgccagtgaaaggatcggtgtgggtcttatataaggcaaatttagtcatcctgcttggacgaatgagaaaactggggcaaatgaagagggtgaggatgaaggaaaaacccatgctgtgactgccattcctatacagccaagtttcccaccaacccaaaaatgtcattactcaacccttctccttacctaccgcccatttatccacaaaggccatccctaaatcaaccacaaagtatgtctaccgcacttccaatgacgaacaccacctttagcacaaaccaaaaacaccaaccaaaaaatataatttgcagcgaagagcctgtaggattcaccccaaattctggtgtcatatgctaacttgctcccatatctacttgataatgcaatggtagccataacccctgctaggttccctcanacccccatttttctgaggatacgactcgaacgcaacatgtgcata

SEQ ID NO: 6234 - DNA, 385 bp, Glycine max
  unsure at all n locations
tgtctcagcgtttatgcgagacagagaccaacatgttagctattatcgccaagtaccaagaagagttangtctagccacggcccacgagcatagaatcgcggacgaatatgcccaagtatacgcggaaaaagaggctagaggaagggtgattgactctntacaccaagaggcaaccatgtggatggatcggtttgctcttaccttgaacgggagtcaagaacttccccgattgttagccaaggccaaggcgatggcagacacctactccgccccgaagagattcatgggcttctcggctattgtcagcatatgatagacttaatggcccacataattagaaatcgttaggaaacttgtatggtctctcagaccttgactagatac

SEQ ID NO: 6235 - DNA, 215 bp, Glycine max
  unsure at all n locations
catatcgncacttaagcatcggagtactttgctctacacagcccttcacctcgtcgtaacagagacatccatgcgagctcacgagtaaagtctgataccccataaaggtctgacaccccatgttggtatagtcaatacggatctgccgagatctcatatttaggtatgaacaacgtgtaagttatttgcgagctgcagcgagaagcctacattat

SEQ ID NO: 6236 - DNA, 449 bp, Glycine max
  unsure at all n locations
caatagtgatggtctaattgtcacttacatctaanaatatttatttcatgttggcgtagtgaacaatctaccgctattttggcattttgtcgtagcgagaaataaattcaagttctatgttaaggtaaatagagacaaaataataccctaatttatgtcatgtcttatttcttatttaagatatttatgttttttttacatacatattttgttttctttcctttcaatttcttcataatcaaattagagaaaagaaaaaatccaataattttcttatatcattgaatttatacattaaaatatcaattatgtgaatattgtgacacccatttactacatagttaataattaaataaacaatttatctaanaatgaattattgaatttaagactttcataaacatgtgacaaatgtcatcacatatgtaactcagatatatactaaaact

SEQ ID NO: 6237 - DNA, 479 bp, Glycine max
  unsure at all n locations
tataaagtttccagacacaatctaatcgattactaaatgtggttattgttatctcgagccacanagtcttccttcttctanaactggctttataatcaattactaaattgataattgattaattcgatgactttagccaaatttgaaatagaagtgactttagccaaattaagcaacacatacaccaattaaccccttgttcattaagcacaaacataatttaagcacataggcaattaattgaacacgaagtgtgcacagattaacagaatgcatgtgggttaattggtgaagggaaaaccgataggagagcaacattaaaaatagaacctcanagagagttacgcttcttcctcagagggaaacaacactagaaatttagccttccataagttcaatgaaagcaganaacataaatgaaactaaaggcagaaaacataaatgaagctaaaggcagaanacaaaaatgaaactaaagg

SEQ ID NO: 6238 - DNA, 438 bp, Glycine max
atgttatctatatttgttgaatgtggtgctccataattataatcgtacttcatagtggagatattttgctggacttggtcccgtgggggttttccacgttaaaaatatcttggtgttattcttcttctcttactctccgaatttatttttcttattgcccatctaaatcacatagagagggaaatttattcttggtattctccaacacttatggtatgtagagtataataccctagtgaaagcaaatatatgtaacaaaaaaattatacaacaaacagatagatggtcatttgaactacttagcagtatataatattctcctgtgtacccatagcaagcacttgcctcctactacttctcacatgtcgcacataacattgtctaaacacatttatagagccactctttcttataccacactgccttaatgaagaagca

SEQ ID NO: 6239 - DNA, 230 bp, Glycine max
  unsure at all n locations
tctaactntctaagttgtaattgcagttcagttatgatgacatcngattattgcctattggtaatgactaatgaatggtatgcgccatgttttctttcgcggcggtggngagtgttcaaacggcgccacttataaagaaggggctaatgggctatatatgcatcagtgcctgcatctgctggatccaaattctatcatatcatttttgctggcacctttctttctcgtac

SEQ ID NO: 6240 - DNA, 399 bp, Glycine max
  unsure at all n locations
agtatgtctgatcattaatgatacactatttttcatacacattgtttcaagcaatgactaatttattcaggtgtctctgctttaatcgattaccatgtgatataatcaattatttctctttctttaagtaattcagatgtggacaaaaacactntaatcgattactatcagtatttaatcaattacattgttcttgagttggttccagatattgggaagaatacttaaatcgattaacaagataatttaatcaattacttcattgaattaatcgattacctcgtagatttaatcgattgcaggcggttataacagtggtttctataaataactagcttttgttacttaaaaaagaattggagggcttcaaataacaaatatggtctaatgagcaagatc

SEQ ID NO: 6241 - DNA, 400 bp, Glycine max
  unsure at all n locations
acttaagtgattattttataattttaatagataaatgactaaattatcagttaanaataaaagttaaagaaccaaatgagtaatntaatcaaataattgtgatgtttgacaacactcacaagacttatatattgtaattntgataattcattaagatataatggataatattaattcttctcactttttgcattaaaacattctcactaattatttaatcttttctttttaacataaaaggcaaaacctcgctagatagagagagaggacttaaatttgtgttgataaaatttactgtgaagcttattaaaatatttataaaaatcataaatcattttaacaagcttaacaaaatacatactcattattactataatcaaataagtttcatacaaactcc

SEQ ID NO: 6242 - DNA, 459 bp, Glycine max
gagagatcttcattctggtttaattgattactgattatttgtttatcgattacactattcagttgagaccatgtctcattttcatgagtctctactttaatcaattaccaagtgattgtaatcgattacatcgttcttgaaagtgttcccagtagtgatcaagaaaactttgatcgattaaatcaagagtctaatcgattacattgttcttgaaagctttctaggtgttgggaagaacactttcatcgattaaaaatgataatctaattgattacttctttaaaataatcgattaatgtggcaatttaatcgattacatgcaattatgattgttttctctatatatagccaccttgtgttctcagctcttacgactccacattctagtcttcattcctgaagcattcatggttaaagtgagtcattaacatcttgtgagatcaagaagagatccattca

SEQ ID NO: 6243 - DNA, 405 bp, Glycine max
  unsure at all n locations
agctcgcccaggcgagctcagctagcccaggcgagtatggttgcttcctccagaagtaacagccttctggagggcccaagtgggcctggttgctatttgcacccccatttttactaagtacaccccattgcctttttttttgtgattcttttttcgtaaagttacggaaacttatgaatttcgtaacgatacttgttttctttccgtaatgttacggaaccttgcggattacataatcatcccctttttgacttacggaatgttacggaacctcactaatcatccncttttttgatttccggtgtgtcacggaaccttacggattgtgcatcaatattttcttttgttttccggcatgtcccggaatttcacaaattgcctaatgatgggtgccaagcacctcac

SEQ ID NO: 6244 - DNA, 473 bp, Glycine max
  unsure at all n locations
tttatccctataaacanactctatntttgtattattaatcctttanataaatcttattatagttatatttgaaaagaaatttcatctaatctctaactttttttcctaactgaacaactcatttgtcatttttaatagtttttaacatttttttaaacactacttgaaataatatttttaaaatattagtttctaacttttttatattttctttcttttcatccttaatatatttatcagtttttctacttatcatttttaaataaatcataattttattattatttaattatttcaacaattaattttactaaacacttgtaatttaataagtagaattttcaattttcaactaattgttaatttacaaattaaattttaactaaaattattgaacataatttatattatcaggcacatcatcatcaaaaaatttgacatganaataacaaataagttttttttgaaatttg

SEQ ID NO: 6245 - DNA, 277 bp, Glycine max
atggacttaccttgaataattcctttgtagtctctttgagccttgcttacctttccttgttttgaagctcactacaagccttaagtgaaaaaccatgatatcaccatatacttaaggaattttggagctttggaattgctttgggaatagagcgtggggggtttttgttttattggacaatttgttttgttggctatgcttcatgatgtattctgcgccatacttgatgtacattgtatattggttaaatgctggacatgctgaatgaaatgttgat

SEQ ID NO: 6246 - DNA, 393 bp, Glycine max
caccgaatgacgccgattgaacatttcctattagatatcgtcttattattattcagggattgaaaagaaaatacaataactcgacatcggtcgttgtaaagtcgcgactcagattttcctcccgacattgagcaattttttttacaaacgctggccgataaaatttttttacggtagatgatgctttctagttcggtgttgcccgaaaaatttacaatgtacgtcgactaggttttttcgttcgagctcaaccgaagttgtggttcgaccgacaccagcatgtattcattctctcggcaacgaatacattagccctcctcggaagaaaacttgattcaccaatactgataaaaaaaatgcttgccgacgtctacgagggacaatcaacgaccg

SEQ ID NO: 6247 - DNA, 458 bp, Glycine max
  unsure at all n locations
gaggtaccaatcgttgtctttcgtcatgaccttgtaggatgtatcctattgngtgagaacttctaatctgcccctaggttcacttgaggctcatgcacgatgcccctcattgccccagtgtaaggctttgaggtaccaatcgttgtcttgttttcatagcctcgtagtgaggaagaatgaaagaaggagttgattcttgcaaaaagaattttttcaaggacgagaaatagttgaaggatttttcgatggattaagtcaaatgactcctatgtagaagcaagatgttttgatgttntgattatgccaaaggatcaagtgcttccaagttttattcaagacaagaatccaagaatccaagaaaatcaagatatatgatcaagttgatctctagaatcttaggaagaagtttccaaattgaaaaagcaaaaggtttggccaaagaattctatctaaatcat

SEQ ID NO: 6248 - DNA, 390 bp, Glycine max
agcgcgtgcatggtcttttatattgtaaggctgcttgctcaaggagcaagagaatgtaggctcactgaagatgggagacaaagaccaacatgttagccatcatcagcaagtaccatgacgaattgtgtctatctcctgaccgtgagcacagagtggcagacgattatgcccgagtgtactcggtatatgatgcttgaggaagggtgatcgactctgtacatcaataggcaataatgtggatggacacgattcactcttacttagaatgggagataagagcttactctagtgctagccaatgcctatgcaatggcggactcctactcggacggcgaggagattcacagacttcttatctgttgtcagcatatgatagacgttgtgacccat

SEQ ID NO: 6249 - DNA, 269 bp, Glycine max
ataataaccggaagtgcaacgatataaggacctagagcagattggactgaggaagacagaagattactacaatataatttaaaggccaaaaatattattacatctgccttaggaatagatgaatactttagggtttcaaattgtaaaagtgctaaggatatgtgggatacaatacaagtaacacatgaaggcacaacagatgttaaaagatctacggataacactctaacttcgtgatatgaacttttacgatgaatgtaataaaagta

SEQ ID NO: 6250 - DNA, 400 bp, Glycine max
  unsure at all n locations
agaggattgatggngacccggtgttgagagaaacgatgagttggtctacgtgggagtacgtgagctcagttggaggtgggcaacaggggatgcgcggtttatgcgcgcattgtggatgtggaaagcttgttgtgcaccatcgcccgaccgccacctagtaccacatgtgatgggtgccccataattctacaagcttgagatgaagaagtgttgaagggtgaaacttcctgctcttattgttgaccacatagtgcgacctggagatatgtcgcggtggtcaggataccttggggaccttacgtggggagctattgcctcaaaccaagcttgaccaatcgagacccaacccgggcatagttggtcactgagaacctgtgatgtacctatacatgcgagcttc

SEQ ID NO: 6251 - DNA, 601 bp, Glycine max
  unsure at all n locations
cattttaccttcacttcactctctcacactctattttttntcttnaatnattttntacnnntnnncccnnnncnnacgcaccccctctgcgagtgaaccctgtanacacncacacttanganactactcagcctgaggaactatggaccgataagatacgtgagtgncctgtttaattcctgaacagaccgaccatcatgaggggagtggattaccactactggaaaacccctatgcagaacattatagaagcaatagatctaagtctttgggaagccgcaaaacaaggaccatatgtgccctctataatagccggaagcgcaacaatagaaaaacctatagcagattggactgaggaagacagaagaccaggacaatataatttaaaggcccgaaaaattattacacctgccttaggaatagatgaatactttaaggattcaaattagtcaactgcataagatatgtgggatacaataccagttacacatgaacgcacaacagatgctacagatctaggaataacactccacctccgaatataaactttgtcgatgaatgtgaacaaactctcaagacatccgagacgttccacacatcg

SEQ ID NO: 6252 - DNA, 314 bp, Glycine max
gctcgcgactggtacctttcttgcttgcgcaacttgagttcactattgctaccccatagagcttcgcgaaatttgatccggtcatactcttccttgcgagccctcttggtctcttgttcaagggctcttgcggtaattgcattctcttcccgtaacccggcacactccttaccaacgtgtgtagcggccaacttgaacttctccttggaagttgtgccttttctaactcgcttctgagagcttggacttcttcgaccaattccggtgcttcacaactctctatgctgacgacttttaacttggcgagccaatct

SEQ ID NO: 6253 - DNA, 417 bp, Glycine max
  unsure at all n locations
agctgatttagaggtttaaggggtcaaaatcgagctacanagtctctatcctacactttgaaaatttcaattgtggcatttgagctctagttntgtgtttagtggcccaatggtagttttaattggtttttagttaactaaagtctcgttcggngtggttgtgagtttctggttttcagttaactaagttttaatctttaccctaacatttactttcccttcccctttgacgttgactatttctttcatggtgctcacacttgctgctatttccctctctttgttgatatactctggtcatcatcgttgtcgctagccaatcggtgacggtcatcatggttgttggttgttgggatcttgtcttgctcctcacctcactattttccctcacgttcttacttttccttcatgtttcta

SEQ ID NO: 6254 - DNA, 387 bp, Glycine max
  unsure at all n locations
tctctattatgctgtcaaggattctattattacactgctcagaagttcttaaatggataatataaaaatgcaaaatattgtacaaggtagaacttcttatttaacacataatgttaagaattaagctggattcttactgcagattatttcatcttcctttcctggtatttttataactagaactgattcttcttttttataatattgcaagctaggttgttgaaaatggaacaggtttgcacactagaagtttggccaaaaagagagccagtcctttnttatctaccatggtccatggcaactttgttaatgtttctagaatggacattccgatcaaagcattggaccatacatngctagaattgttgaatgacagataatactagt

SEQ ID NO: 6255 - DNA, 442 bp, Glycine max
cttagaggtccaagaaagatgaatggaagtgtgagtgtgactcataaagacgagattggtatgatctgcatgacatggaaggatgtgtgggtgacagcttccaatagaaagaatggcagcaaatcaattcttcaagggctaactggttatgctaagccagggcaactcttggcaataatgggtgcctctggctgtggcaaatcaactctacttgatactttagcaagtatatacatcatcacaagttctgaagcttctgaggtctgaataatctcctgcatgatagtggatcccttataagcttcaaacaactttgttattcaactatattattaaatgttagctttttttctttctatagagtagcctaaatattttactatttattaacatatgagatacgacctcaccaatctattaaagaagataaatttgaactaac

SEQ ID NO: 6256 - DNA, 145 bp, Glycine max
aactacgctgaatcggcctagtggaaaagtgcgaccattgaatttctatgagcttccgccttcaacttcgtgcggtttatatgtgagtcgcccgaaccgcacacccgagataaaagcgaagtgcatttcagaaagactagagcat

SEQ ID NO: 6257 - DNA, 390 bp, Glycine max
cacaagcagaggcagatagaagttgattggatcctttatttaattattctctagatttgaatatcaccttttcaccatcagagttgacagtgtcattgttcgacggttggcaagtgcaccggatctcgcaagtagtataaaacggtaagaactgagtatcgaactctcggggaacttgttttacttggtaaagatgtggttcagtaagtaagcgtcttgttataaaaggtttatgtgtagtatggacacatgtgtaaactaactaaacaaaggtaaataaaaggtgagcagtggtgggtgcgaaggtagatggtcaacatgttggtcttcctactaggcgactgatgctactaaagatgttctctacctaacagtgttcttgtgttctat

SEQ ID NO: 6258 - DNA, 378 bp, Glycine max
  unsure at all n locations
aactaagctgaaccaaaccgatgagagtgtgaacttaaactgcgagtgtatgattagctgtgagtaataatctttgcatgaatctctgaattttagaatgaactgtataaatgaggacatgatgaaggccatgattgcacatacacaagccttntgaccaaaaagcttaccttgaatgataattatatcctttgcaccctttttgagctgaatgatattgtcaaanaattgaaccctgaacttaaataattatctcaagataccttgtttagattctaggagagcatatggttcaaggaaaatataccccagatttgggggagtggaactaattgggatgcacagaataagattaagcatcggcacacacaacacata

SEQ ID NO: 6259 - DNA, 228 bp, Glycine max
  unsure at all n locations
aacttcctgctnttaaatantatcacagagaggnacctgcagataggacgcgttttataggagacctcgcccacgccaggtggcgtgctattgcccaaaaccaagcttgaccaatcccgacccaacccgggcatagtcggtcagtgagaacctgtgatgtacctaagcaggcgagctcctgntagncaacatattaaaggaaatcacgaccacacagcacgtacgctt

SEQ ID NO: 6260 - DNA, 385 bp, Glycine max
  unsure at all n locations
tggaaaatctgggacttagccatggtagaangtccttcttttccattgcctccctcgcccagtaggatgatcatccgttgaggtgcttcactctcggngacttccagctatcacccatggtggaagaattcgaagaaatcctaggatgtcctctagggggaaggaaaccatacctcttctcagggttctatccctcattagctagaatttctaaaatagtncaaatctcaacgcangaattagaccgccaaaagcaagtcgaaaatggggtggtcgggataccgagaaaatgtttggaggcaaaagcaagaatactggcaggtagaaacgaataggccccgttcatagaacgtctcgcactgttgatctttggaggagtcccttt

SEQ ID NO: 6261 - DNA, 230 bp, Glycine max
agctattttatgatgtgtccagcactagaactaggtccctaacataaagggcatgtgtgtgttgagtttatgaattcttcctaaagaggcttgcctggattgaatctcctttctataggaagatagcttcattatgagttttggcccataatctgatagttcccaataagagaaatttggactagcttcaggatcatccaacaaaatatctttagtctgaaaggtcacgt

SEQ ID NO: 6262 - DNA, 418 bp, Glycine max
  unsure at all n locations
ggtctatatcgacgactgctatgagcaggagacttggcgctatgactcagaggacctgaagttggtgctggatgtgttaccgttctattattactttaacgattcggtgcacttttcgataaagttcgggactaccctagatctcgaacaactcccaactatacaccacccatgattgtaccggtgcctgccgagaacattactaatcctatccctgtttgtactaagaatcatccaactcaacccaatcaaactcaaacctataactccaattctagggaggaggcacaaaaaactcccgtagaccacacgataattggttntgggccccatccaggatataccttngaagggcatgcattntttagtgtncctatgttgaacgctcctaaagcctctcaatagcacccgttatcac

SEQ ID NO: 6263 - DNA, 479 bp, Glycine max
  unsure at all n locations
tctcgctgatacggcactatagaactcagctgacaactatgctcaagtagattgcgaagctaaactcaatgnngatanaaccactccaagtccagaaacttgtgtattctcacattctgcatagggcacatcatcatgcaggggcagctgggataccaagtttaccaaggcatctagtctaccttcaagcctcctaagttcagatgatgctgatgattttatggctacttcatgccgtcctctaatgaccacaggaacaataactgccctgaaccgctctgccaaactccctccttctccgccccaaccatcgacctggcccccggcacttcaagacccccccctccgcccaccccaaacaacccccttgctcacagcgctccctcgctacattgcgcttgccctctcgcacccctccactccgcgttgtctccttttcacacatcctccctccccctctctaccccttggcggcagcg

SEQ ID NO: 6264 - DNA, 384 bp, Glycine max
  unsure at all n locations
tacttctcaccagcatttctttggttaacaccaattatattttcattctagcattttaatagatttgtatttagaattgtgtatttatattgattggaacagatatagtgttccttttgtttttcttcgttgagtttgtgttaattaactccacgttgttattaatttttcttgattgtattctcaaaatttcttagatttggttctatctaattatcctggacccattgattgtagaaagatattcatagggggtttagcgagagaaacgccgattgatgagtggtttctatttgtattgcattnggttttctttccgggtttaccaatgagatttcgtgaattaactaattttttaaaataattttgtggagcgcaattcat

SEQ ID NO: 6265 - DNA, 270 bp, Glycine max
gagagggccactaagcactaggttgtcaaagaaactatctcacacaagcttctcaacgaagacctctaatagagaatctgacagaagctacctagtctatacatagaagcatgtgtaacacttgctggaactttgatgacatgagagtcttgagagacacaactcatagctcaacttctctccctttttcttccttcaatttcgtgctcccccctctctctatctctccctctttcttttcctccattgaaacatcctctccaagcttct

SEQ ID NO: 6266 - DNA, 340 bp, Glycine max
  unsure at all n locations
tcatgaattgagaggattagcattacgccttgcanatcatggagagttgactcggctaagtgtaggcagcctttacttaatattgcatatgttaatttagctattactcgttattcctctgctttttggccatgatcatccagtactgttggtttaaaggtagcacatagatggaataaaaaggactaatttttgtttctttgatattttaaatttccaattctcttattgaacttaacaccttcaatttatgttaaaataataaaatgactgtttgagatggcatacatctgtctttctttgggataacttgtcttcttcaactcttttattttaatat

SEQ ID NO: 6267 - DNA, 445 bp, Glycine max
  unsure at all n locations
cttagctctgcaattntntagccatgaccacattgtcaacaaattatataaatgaatacatatgatctgtatgtctatcaaattgatataatgtatcaaattttaaaattcaaaattcaaatttaaattgagatagactaattttaaacaatagggggaaataaaaaacttaaaaataaattagtgtgacatacttgatacgggagaagttatgtagcttatcatgaaagagagtgagtagttcctaatattctcttgttcaagagtgaatacttttataagggtgaatttatgcatccaaatataacatgttggtcccgagtaaaattttaaagtgaagcttcatcatctttgcattccaacattgaaacggttgggctggcccatgcattccagctttaatagaagtacatatgtgatattataaagttggaaagcctacact

SEQ ID NO: 6268 - DNA, 454 bp, Glycine max
catctaacgcgctttacccccccagaccccggtggacacaaatttgtttaccaaccacactctcagagctctcaacagctcccacgaacttctcaggaagcgccctattaatagaggagagagggacctgagctctatctcgacaggaacacttctcacggaaccttctgcaagaagtcttctaataagagatctcaacgacaccacctatactataaattcgcggcatgggttacactagcttgaactatgatgaacgatagtcttgtgagacaccactcagagtgcaacatcatctccttattgctcctaccaagacgagctcccccctctctctgtctctccctctgtacttgactgcattgaaacacccgcctcaagcttctaaatcaggctcatccggttgtaaaacaccatcttcctggctgatcccaaaagaacgccctccataacg

SEQ ID NO: 6269 - DNA, 235 bp, Glycine max
tgctataagagtaatgtcccactggtaaaactaactttccaaatgtttgccttcgcaagaatggccccgaggaagcttgcctcaaagaggtccaggaaggacaaggcggccgaaggaactagttccgccccggagtacgacagtcaccgctttaagagcattgtgcaccagcagggcttcgaagccatcaagggatgggcagttctcctggagcgacgcgtccagctcacggacg

SEQ ID NO: 6270 - DNA, 472 bp, Glycine max
  unsure at all n locations
cgtgccatcaccatttggcctanacccattccgggctcatacctatccctcaacataactcgggccaccatcaaggaggcactagataaacgtggttgcactggaggagcttcaacataagcattgttcacaatttctagcgcttgaaaagatgtttccaacaactcttctacagcttccacatagggtgtagaggatggacaactcactagtatatcttcttcccctgacactataaccagttgtccttccaccacaaacttcaatttcttctgcaacattgacgggaccaccccaacagaatggatccaaggccgacctagtaggaaactataggcgaggtttatgtccattacttggaaggttatttggcagcgtgtggcccaatttgaatagggagatcgatctctcctctcatgtcacaccggctaccatcaaaagcccttaccaccatggagcttggcctcatgtg

SEQ ID NO: 6271 - DNA, 288 bp, Glycine max
  unsure at all n locations
actgagatgtctgcttggagtactngcattatatgacataagctgnaacttaggggagagatggttaggtatctcaatgtgtcactacactgttctattttataggactgacaggggttggatagttgctctacccacgcctacattgctaccatgcagttatgtggctggtgtctttattgtcatgctattatgagagacttgtgtgtaaggcttataacagccattttcggatgattgaatactatgagcactctcttcacatattaagcgagatacacgtgcata

SEQ ID NO: 6272 - DNA, 269 bp, Glycine max
  unsure at all n locations
caacttattnttaattcttttanaagatttttcaagttggggttagttttagttttctccaatttttaattntaatataaactcattttgaaagtttcatatcctatgaaattagtttaagattgtttttgtgtggtggtgacaccaatgttgtaggtgattacaacatggtgatggtggtgccgatgtcgactgtggcagtggtggtgtcaatattgatgacaattgtggttttggggaggatggtagtccctgcatacgtggtgatt

SEQ ID NO: 6273 - DNA, 325 bp, Glycine max
ctaaagaaagcatggatccaatagcatcagggatttgacttagattgcagaaacttagatcaaggtcatgcaaacaagagaagctaggcaaggaaggcaacaaacaaccacctgaatttttagaccctctagagtaggagaaatggaaaggtatgaatctcttgatgatggaggaggatgttgactgggattgcatggcagtttccctgatattaggaatcatggaatactccttcattattgggttctctaacagttgattactaaatatttttggacaaccagagatatttagatattccagagaacttagacccaaaatatt

SEQ ID NO: 6274 - DNA, 420 bp, Glycine max
  unsure at all n locations
tgtganaacgtacactccatattctaataaaaatgtctaattttattgtttgaaaatgtattgatagcacttttcaaattcaatactaaaaccagaacatacttggtcttaaatgcatattgtattgtttggtaagacgttagctaagagtgaagagttgaaagaatggagaaagtgacggaaggaggaacgcggngttgaccccaaatattggttcaagtacaatttctctaacgcaaaaatcaacattctttgtttcaaaaaataaataaaaaaatcaacagtctttaacacactacaatttgctttgttaaaggcttatttatttataaatatttttaagattctcattntatgtcatagacaatccacataaccaaattaactactattgtttcttccggttggggagagctggaa

SEQ ID NO: 6275 - DNA, 411 bp, Glycine max
  unsure at all n locations
ataagataagattggatganataaaatctagatgaaataaaatctggataagataatataagataacattggatgaaataaaatctagatgaaataatatctagatgaaataaaatctggataagataagatttgataaaataaaattgtttgttctcttcaagtccaagcccaattccggattcaagcccaattgcttataattctcctgaaattaaattaaaaacacaaaattagtccagtaggcccaaatgataaaattgcataattaatttgacaattaaggctaataagtaattaaaatggtgacaaaaagggttaagaaataggagaaaatattgacacatcaccgtcgctctggccaaactatcttgaaagaagtgcatcaaagattctcgtctctggaatatg

SEQ ID NO: 6276 - DNA, 471 bp, Glycine max
  unsure at all n locations
cgcgctntcatatctaatattacaacttggtctaagaactctattacctatcttgtcctgacaacaggttgggatttttgagatagccccatccaagcagtcattgcagtctttctcagacaagtcaggggtgcactctgccataccatatatggtctgaaaacttgaagcagttacattatccgtggcatacttacgacgagagtcacccgatgcggctacacctttgaggtttctcattaagttcgccagagcttgactgaacttatccggttccgttacattgtttatgttcatcaaggattggctaggttcaatttccatgatgccaaatatcgagcggggtgagtagcgcaacatgcatttgctagtgttcaaccacagaagtgcctctttctggtttggacaaaactgtttaattgtgactctggaatcattgaggcaactgcggcactcatgtggctcaacatc

SEQ ID NO: 6277 - DNA, 582 bp, Glycine max
  unsure at all n locations
ctatgacgctcacgtctagcatanagacacacngtaccgcaaccgattntactcaaagacancacacaanagccgacactaacatgaaacgcgccacanatactacagctncccggccaggggagagcctcttcaaccacaaagacatacatatttatattcatgatgatacccggagcacagagggcggacgttggaagccgacacaagccaagaatgcgacgactagtggaacatgcaaagctgagccaacaaaaggctccagcgattatccccaccaaagatagactaagagaagtggcgacaacaagaacgcggcccaacataacaacaacgagcgaccgtaaccaaaaagacccacctaaccaccaagggtgcggggaagaaaacatcggcaaacacgatccacagtacaacaacccaaaccgaacagggggaagagcggaacagaaaatcgtaaaccgatcacagtgcggaacaaatacccagacccaaacaactcacatcgcgagcggaccataggatagagccgcaaaattaaataaacctacactaccattggaactgagacacgggcccccc

SEQ ID NO: 6278 - DNA, 450 bp, Glycine max
ctcagctcgggatgtatactgatgccaatgtttacaaccatttataccatattcttgttgcaatatgacacaggaagagtaagtggctgttagattcctcaactgtattacataaaggacactaattatcctttggagataacatgattcctctgacttgaaggttatctctagtagttgctctattaatagacgcactccatacgaagaatttcacttgaggaagaaccttaagtgcttaaacagatttgaagaacgatgactcttgagatgcctcatctgtcatgatagtgagcttgtgataggccgaattcgcagaataattccctaagggtctagccaaccaaatacacctgtacatgctagagggttagctgtataaccaagtttagaagaaggaccatcgattcatccactagcttctattcccaaactaaccagtcctttctc

SEQ ID NO: 6279 - DNA, 584 bp, Glycine max
  unsure at all n locations
acccaggcactactactatatcgcatctctctataactnttaaattaaanacctacgannaacnncccnnnnccccgtgtcatgatacgcgccacttatacacagcccccggctacgcaagaccagccatagcggccaagaagcttttctcgaacgagaagagtgcaccagatgagggctagatgaaatagacactggaccacacaatgtacgatgacagaggatgagacaaagcccacatgacacaatctctagatgaaatacaacctggatcggagaacgattgagcagcaaacaaaggatgacctctacaagaccaagcccaactccggatgcaagcccgagagctcagcagacgctcagcacatcggagacaaacacaccagcatcgtcagggagcccgaaggagaacactgcgtcattaatccgacaactcaggctaaacacggagtgaaaagcggacatagcagggtcagaagtcagaccaacatatgacacatcaccgtcgctgcgcccacctatcgatggcgacgtgcgaagaagatacgcgcctctggactatgcgcccaacttgccacctcccg

SEQ ID NO: 6280 - DNA, 497 bp, Glycine max
  unsure at all n locations
agtgtcctgatcgcggccttagactccgacgctcgactattatgtggctgaatcggactggcgtgcgaacagttataatctatctagcactgacgacagcgttgggtgtttgatatagacccattcaagcagttattcgcgcttatctcacacccgtcaagggtgcgctctgccataccatatgtggtcagaacactccgtgcacactcattatcctgggcatactcactgccatagatacgcatatcggcgacaccattgatgctgatcattgagacctgcaaagcttcgcagaacttagacagngtcgtaacatatgtcatgtccgtcaatgatcggctatgtgtaaattccctgatcctcgattcctacggagtgacgaggctccttgattatctctccttagccatgaagtgcgtctttcttgcgtgacagagtgtgaactttgacgatgaatcattgtggatccgagactcatagggttgcagacactctcg

SEQ ID NO: 6281 - DNA, 448 bp, Glycine max
  unsure at all n locations
acctgtctgagcaatcttatgttctggttctcaccttcatatcctctngaccttctcccattacctgcaagcaaacattgtgttctggagtaggcttgtcttccacagacaagtcgaaatcaatttttgggtcttcaaaacctaactccagctttctcttccccatgtcaactatgcagcttgcggtcaacatgaacggccttcccaagattacaaggatgtcagtatcttcagagatatccataaccacaaagtctgctgggaagataaaatgttttaccctgaccaacacttcaatcactccacatgacctggtgatggagcggtcagctaattgcaaagtcattcgagtgggcataatctncaactactccagccttctgcacatggagagtggcatcaaattaatgttggctcccagatcaatcatagcctcttccacatttac

SEQ ID NO: 6282 - DNA, 326 bp, Glycine max
  unsure at all n locations
tcaccattagtgacgggaaccttactctttcttatggaggccactataacctgacacatgcgagtgagggggctaccaccgggcttctgaatccgatacagactcgtaccggataagaagctcaccacagcaattgccatggccactgctggaaagacaaatccccacccccaacttacagtagtaaggacccacaccaccaaagaagcagcaacgcgaccaccactatttattgacaagcagaaccactngaagaaagagctcttgtgctcnctctcagcttcatcagcatcacaaattgagtgcaccaaagaagagacacaagc

SEQ ID NO: 6283 - DNA, 342 bp, Glycine max
tttccattgcactcaatgatgagatgtgtgcattatcacgtgaaaaagaggctaagctttgaattgcagaaagtagccgttgggctaagctcatcagttgggctaagcgcataaccaccactaagtgtagcattagcacgcttagcacacaggagaatctagcagagcatcagcatcagaggcgtgcgctaagcgtgagatcagtgagctaatcacagaaggtgccttcagtctagctaagctagagactggcgctaaacccaatttcacttactcgcactaaacgcaagggtggcgctaagtgcaacggcgcgatatcaaagcctatctaagcctattttg

SEQ ID NO: 6284 - DNA, 465 bp, Glycine max
  unsure at all n locations
actaagctttacctttagtttaacccttagaacttcccggccaaattgttatatataaagcaatgttgatgttcaaaggacactttacatgcctttntaatcaactgacctacgcttagcaagttctggtcaatgttaggtacataaagaacatctgatattaatttgatacctgaacacgttgaaattgcaacagttccttttccttttataggaatatagccaccattcccaattctgacctttgagacattagttggcttcaaatccttgaataaagtcttatcatatgtcatgtggttcgtacaaccactatcaatcaaccaactttcacttgattcactactcaaggttgataatttttctttttatccttacctttgatatggatgattgcactattttcgctgcttgctggctggatcttctagaanaaatgctttntgctttcatcaacttcatgat

SEQ ID NO: 6285 - DNA, 424 bp, Glycine max
  unsure at all n locations
cttggggttgttagttcatgacatggttttggagcctatttgatcagtgtgtcgacagtttgatccacatcacccaccccttatttttctaaggcttaaatatatttttttatccctgcaagataacacttttttcattttcgtccttgcaaatatattttttttcgtcttagtctttgcaaaatgtgtttgtttgtttttcatccctaaagtactttagataccgctttgaacagtaaaaaagtgctttgaacacacacaaaaaatgctatctaaagcactttaaggacggaaaacaaaacaatcatattttgtaaggactaaaacgattttttttttatgtgaacganaatgaaaaaagcgctaaactgcaaggaccaaaaatgtagttaagccttcttctaatacaaaagttggatttgag

SEQ ID NO: 6286 - DNA, 101 bp, Glycine max
cagcttgctttctccgaaccggcactatatgtttcgccctccatcaattcaactcgacatgacaggaaccttcccgtgggcgcattgagtgcaacattgat

SEQ ID NO: 6287 - DNA, 367 bp, Glycine max
tgtctgaacgtttatgccagacaaagaccaacatgttatccattattggctagtaccaagaagaatttaatctatccatggcccatgagcacaaagaggcggatgagtatgccctagtgtctgcggaaaatgaggctataagaagggtgatcgactcgttacatcaagaggctacaatgtggatggaccgagaagctcttactttgaacgggagtcaagaactatcccgattgctggccagggccaaagcaatggtgaacacctacttcgccctttaggagatgcactgacttctcatgtatagtcagcatatgatagacttaatggcccatataattatgaaccggtaggaagtgtgtattgtcac

SEQ ID NO: 6288 - DNA, 423 bp, Glycine max
agcttagaacatgcaatgtgagcagagactaattcgagcttaagctgggtccttttctttctaggttgcatctttctcctcttccctgcttgactctttacagtgcttgtgtgtgggtgaatcactctgtatagctcctatggtatatgtatatgtattgtttctgtagttggaaatcataacttacagaaagaaaagaagaatactagtagatcaacagtgtcatatactcatattcactggctaggagaaaaactgaaaaagctttctccatatgttgcttttggcagacaatccgatccttgcccagaaccgctgcagtgttataaccaattttttttaccttagaataatacaataaatacaatatgaacattacagtcagtgcttctgtgagtgtttttacccgttttactgatctcc

SEQ ID NO: 6289 - DNA, 613 bp, Glycine max
  unsure at all n locations
tctattgactaccaaaattacgagtttaataatcttcaggttcaaatacgtggtactataattccgctagttatcaaactcattaaataatatagcaatataatattgaactaactagggtggaaaattttcttactataaaattgcgttaaactttaactctaaactaacaagtatataaataaactaacgagtatatatattatggtgtcaatatttttaattttaagtaaaatttaaaaggtataaataaaaataaaaatgtttaaatttataaatagaacatgtttcacactatataaaaaataaaacaattaatttgagcattttaaaaaaattacttttcaacagtaaagccacatgttgaagaaagagatcatcacttttaataccatacatttattttattatacaaaggacaatagaaatacaacacgaagaaaaatcattaaagcaaacaattgctatatattgtatggttatgccttgtgggtgtggtatcgctcaagtatttaagagtgattgattatatgatagataacatcatttagaaaaaatactttttnttttctaagccaattagaaaaatacttgacaacctacaactaagtgg

SEQ ID NO: 6290 - DNA, 423 bp, Glycine max
agcttctcaaggaagccacctagtctataaatagaagcatgcgtaacacttgttgtaactttgatgaatgggagtcttgtgagacaaaactcaaagttcaacttttctccctttttcttccttcagtttcgtgcttgcccctctctctttctctccctctttcttttcctccattgaagcatcctctccaagcttcttatccaaggttcatcttggtggtgaagctccttcttccatggcttattccctagtggatggcgcctcctctcacctcttctcctttgtcttccgctgcatctccatggtggaaaatcaccattaaaggacctcattgaagctcaaagatccagcctccataaaagccccacaagcaaactttcatcaactacgtccactaaagaagggtttgtgaggaatggctta

SEQ ID NO: 6291 - DNA, 624 bp, Glycine max
  unsure at all n locations
ttctccactaagttgcctgatgcctgaaatgtcttttctgatggcagcggtcctagatgcagggaagaatttctccatgaacaccctcttaaggtcattccagctgaaaatggacctaggagcaaggtagtatagccaatcttttgtcactccctctagagaatgaggaaaatcctttagaaagatatgatcttcctggacattagggggcttcatggtggaacaaaaaatatggaactccttaagatgcttataaggatcttcacctgcaagaccacgaaacttgggcagcaaatgtattagtccagtcttgagaacatatggaacaccctcatcaggatattgaatgcacaagctttcataagtgaaatcaagtgcatccatctctctaagagtcctttcacgaggtggaggttgagccatgttctcagtatgaaaattagcagcggaatgttcaaaatcacaatattcagaatcaccctcaacagaatgctcaaaatgcacataatgaccaggatgcacactatgcctaactaatctatgaaagggtctatctattntatgatcaaagggttgtaaatcacctagattgcccctagtcatgcactatatgcagcaaatagt

SEQ ID NO: 6292 - DNA, 402 bp, Glycine max
agcttgaatcggacctgagtgtgaaaagttatgaccatttgaatttctcgaaagctttcgttgttcaatgtcgagcatctcgacatattatgcgctcgaatcgaacatccgagtgaaaagatatgaccatttgagtttctcgagagcttccgtggttcaattccgagcatctcgacatattatgtgcccgaatctgaccttcgtgtgaaaagttatgaccatttgaatttctcgagagcttccgatgtttaatttcgagcgtctcaatatattgaaagcctgaatcggacctcagtgtgaaaagttatgaccatttgtatttctcgaaagccttccttggttaaattccgagcatctcgacaatatatgtgcccgaatctgcctttgggtgaaaagtatgac

SEQ ID NO: 6293 - DNA, 563 bp, Glycine max
  unsure at all n locations
tcttatccaaggcaattcttggtggtgaagctccttcttccttggcttattccctagtggatggtgcctcccctatcctcttctcctttgccttccgctgcatctccatggtgaaaaatcaccattgaaggacctcattgaagctcaaagatccagcctccatagaagctccacaagcaagcttccatcacttttcacacagaggtcagattcgggcacataatatgtcgagatgctcggaattgaaccacggaagctctcgagtaattcaaatggtcataacttttcacacagatgtccgattcgggcgcataatatgtcgagtagctcgaaattgaacaacggaagctgtcgagaaattcaaatgggcatactttttcacacctgcctcacattcnggcacataatatgttgagatgctcggaagtgaaccacgaaagctctcgagaaactcaaatggtcataacttttcacacggatgtccgattcaggcgtatcacatatacagacgctcgaaattgaacaacgaaagctctcgagaaatacaaatggtcataactttt

SEQ ID NO: 6294 - DNA, 360 bp, Glycine max
  unsure at all n locations
agcttttctctttcacttctcatataacctgtttgctccgaaagtaagagtaggtcaccattcccacttttatgaacctctagacttctgtcaatcctccctattttatctatattgtcttcattgcttagtatctcgacaccttttcttttcttcccagaagaaatattaatacctgatttggtaagagggctctgagctacttggagtgctgaatggtagctattatcaagaccatgaccatctaagttacctttgggagacaagtcttgcatattgngtgggtcttgcagtttcttcccagaagaaatattaatacctgatttggtaagagggctctgagctacttggcttgctgaa

SEQ ID NO: 6295 - DNA, 678 bp, Glycine max
  unsure at all n locations
ttggggttgagaactatataacaacaccaaggtcctagttttagccttctctttcgttttaggcctcttttcgttttagttacttttttgttttggagagaaagaataaatttaagttttgcgattctagtttttacaattcatatagcaataaagtttcgttttctgcttcaatctgcaatctcgttttttgttgattaatggaaggctaagtctccaacgttgttttctcttgaggaggatcaagcacaactctctttgaggttttattattactattaaattctgatcaatttttcctcttcaccaattactctgtatttgttgctattaatccatgcatgcttagtgcttgattaattatctttgcgcttaatttagttcatgcttaattattagtttcgttcatgattaattggtgtatgtgttgcttaatcacataataacaacctcatgttaaatttcgcttagtaatttaatttaaggttggagtaagtggttgaactgattaatgataaattctcgtaacctaggataagagacttacttgtgaatcaaggggaaacaacgtaatttaattctgatattttctaattaaaaattactcgctgtntaatttacaaaaacaaacaacccccccaattcgntattggtttattactatctggtatgaacgtt

SEQ ID NO: 6296 - DNA, 482 bp, Glycine max
cttcaagccaaggccagattctcgtgcatgcagaggcttctgaagaagaaaaatgccaaactccccttaaaaaatttgatttcaagcttaaatacgtgggttggtccgtgctcacgtgcttagcgcaaatataaatcgcttagcgcgcataagtggatttcggcttaacgtgcttctctcgcttagcggatgagctgaagtggtgcgcttgatgacctggagcggtgcactcagcgaacctgacagctcatcttcttctggatgattcctcgcgcttagccactgagtgtcgcacatagcgaatgatcgctaagctagaagattggcttatcgagaaagtaaaaaatagcatttttgcccaatttgcctaattaaccccgaaattgaaaagaaattgattatttaaccccaccaaaaccaaaagttttaaattatctattacctatatttaatagaaaagtcttataatattacaaaacaac

SEQ ID NO: 6297 - DNA, 596 bp, Glycine max
tattattatttatacatactaacaataaggtacattaacttggtaaattaaattatcggcgtaaatgtacatcaatataaatataatataataaaatattaacaatgttgttaatggcggaaagccaaaaattcactataaaaatatggcggatgacgtaacagaaaatgacggatgtcatggcgaacaaaaaaaaaatacatatttataaagtcactgaaattgaaaaaaacaatggattgcattcaaataaactaaaaatgtttcatgagttcatacaataatcaattatcaataccaaataaactcattaaagagttcaaaataagaaaatgataaaaaataaaaggggtgtcaaatatcaaaaggaaaaaaaagctgcatacaaagaaaggggtgtcaaacagcaaaaacaaaattgaaaaaaaaaaataaaagctaaagggcaccacttcacccgcgatgctgtttgccttcatgaaggtagtggtcaccattccaggctcgtgctcgcgccgccgttccaagcttgtgctcgcgtcgtcgttcctgtcggtggttgcatcgccgttcgtgccgacattggctgcggtcta

SEQ ID NO: 6298 - DNA, 641 bp, Glycine max
agctttgtttttattttatatattatatttatataatcttatgtgtttttatcatattattcaaaacttattttatactttaaatatataatatgaatttttatctttaatttatattttttatataaattataatttcataaaatgacaatattgtattatcttttaaaatatttagatatgtgatttaatggcggtattgtttttacctatattaagatattatcattatttattataataatatttttatttatatttaaatttatttaatcaagtacataattttaaaaaaaaaataaattatatactaaagataagtaattaaataaaataataatattttctatttttaaaaacatttatatatgtgatttattgacattatttttttatctatattacaataaataacaccaatatcttaatatagacaaaaaaatgttgtcactaaatcacaagtattattttaaaagataaatattatatattaaataaaaaaacttatataaatatacctattctaatttatatgaaaataagaatttaatatttatatatttatatttttaaacatattatataagatttttaaaattttattaatttaaaaaagaaaaaatttggattttaaactattt

SEQ ID NO: 6299 - DNA, 544 bp, Glycine max
ttatgtaaccgagtaaattaggatggctatacatgtgttgtgtatgcaatgaccatttgtcctgatatcaatacatttccaagtacaaaattgattgatgtataaagaaagaactaacacatatactataatttccatacattcatgctacctcgagccatgtttttttttctataaccacttgaaataaattgtcacttttctttttcaatatcaaagtcttcaattaggaagttttccaaataaatcataagttatgtaaaagtgtcatattaatgtcctgcattgacccaaacttattacaaagttattttcacattaattttttacacactcaaataatgcgcaatcaacacaaaatcgctatcgacccatacgaattgcatattataatgactttacggattcgtaatatgtattagattcagcaaaggacaattatgtaattgtccaaaatggcttgggtgtccaagtatattggtgggtgcagtaagcaaaattggttttgtgatgaatgcttcattttaaaactgcaaactctgta

SEQ ID NO: 6300 - DNA, 521 bp, Glycine max
agcttttcaacacaaaagttagtcgtaaatgacgactaacaggatcccaaccatttcttacacactcagaacgacatatagaggggtggttagccaacgtaactccgagtatgatgcaacctccttaacgtcaaacgtgtatatatagacccagaggaaatacctccaggtaagttttactcttccagatatagacacataattgggaaatatttattacttattagtgtactttaattttctttttgcatcagtaaactaatgaaatgattggggaatgggagataatatcaaatgtctaatgtctactagccacacatggagtataagaataataaaaagtaggttcatgttgtaaaataaaaaaaaaaagtatcatttcttttttacaagtgtgggttgtagtcactaatcagtccacgttcatacaaaactaccacagctctatcattgaccaattcaaatctacacttgctttctattcttctttttctaggttggactggctacaacatgtcaat

SEQ ID NO: 6301 - DNA, 599 bp, Glycine max
  unsure at all n locations
taagaatatggaattgaacaaagttaacaaaaatggtagcatgcagcaagcttcatgtgcttaggatacagtagaacatgaaagtttgtattagagtcaagttgcgaactcaactcatttctagacttttttttttctgaattctcatttagtgtcaactatccctactctaattttatttattatgttttaatatttaatgttctatacttttgtagatttaatttattgttttaaatatactatagcaatgtgtgtgcgcacacgaatttatgcatttttaggtttggtgtatattttttatcaacaattattaatatacctcctctaattgtttactttttttttaatcccaaattcaaaagctagcctccataattctatattgggttatccgattttaacctttgcaatcatattttattgtattctcaatgtcccttggtccatatgtctctcaattgaacacgagagtaagaatgtgttattctcgtaaagttatgatcattgattcttttatacttgagtgaaagagtaaacacaaatatgtcanatatcacatattggtatgcatggtcacacatatttcatgttctact

SEQ ID NO: 6302 - DNA, 344 bp, Glycine max
agcttataagaaattcaaatggtcataacttttaactcggatgtccgactctggcgcataatatatcgagacgctcgaaattgagcaacggaagcagttgagaaattcagatggtcataacttttcacacggacgtcaaattcaggcgcataatatctagagacgctaaaaattgaacaacggatgccttcgaggaatacaaatggtgatagcttttaactccgatgttaaagtcatgcgcataatatattgagacgctcgaaattgaacaacggaggctctccataaattcaaatggtcatgacttttcactcggaggtcagaatcgaggacataatttatgg

SEQ ID NO: 6303 - DNA, 359 bp, Glycine max
tccattgttcaatttcgagcgtctcgatatattatgcgcctgaatctgactttggagttgaaagttatgaccatttgaatttctcgagagcttccgttgttgaattaggagcgtatcgatatattatgtgccggaatcggacatccgagttaaaagttatgaccgtttgaatttcttattagcttccgttgttcaatgtcgaccatctcgatgtattatgcgcctgaatctgacatccgagttaaaagggatgaccatttgaatttcacgagcgcttccattgtgcaatttatagcgtctctatatattatgcgcgtgagtctgacattcgagtttaaagtgatgaccatctgaatttg

SEQ ID NO: 6304 - DNA, 567 bp, Glycine max
agcttcggctaaattagtctaaacttttgtaagctatttaagctaagtctagtccaacaagagggatctgaagactaagcttagtttaagttagtctaaacctaggagggttgtctaaattaagcctagtccaacaagagggatatgaggatgaagcttggattgattcattctaactagggatcgaggtttagtaatttaggctagaacctagaaaacaaaagcatgattgattagagaaacatctttatatacatcagctggtttgttagaaagacccaacatctttacgtactgttgtcaatcttacttacttgcatttttactgtttttagcgtagacttagtttaattctattctaaatcatcaattatcaatgtttctttcaacaatgccttatttatgaatttaaccctgtctaagactagttccctgagttccatactcagattcatccattttaattttaaatacttgacgatccggtgcgctttctcgcaaaccgaatttcccttgaacatatttgtataaagaaaaagtggaccaaaaagtaactgcaggggaaag

SEQ ID NO: 6305 - DNA, 616 bp, Glycine max
  unsure at all n locations
tcttatccaaggctcatcttggtggtgaagttccttcttccatggcttattccctagtggatggcgcctcctctcacctcttctcctttgtcttccactgcatctccatggtggaaaatcaccattaaaggacctcattgaagctcaaagatccagcctccatagaagcttcacaagcaagcttccatcaagtggtaatcagagcacaagagctttaagtaggtgctccttaaacctccattaatcttttactttaccttctcttccattgttgtttcttcatttttctccatgtatctcctcacatgtcttgtgctaaatgttgttagcatgattctttagagtttccaccgattaaacttgctatagaagctagatttgatttttatggttcagatttcttggtcttgttcttgaaccatgaattgtgttaagtttaggttcctttgagttttgtcttgttattttttgtggctgaaacctaaaccatanaattcttacaaatatattaaagtagaagaaaacctcaaaaatctagagtgacttgttcacctattgtagttctttcatagaagtcatgtctagtcatgaaacttgtcacataagaattcttatg

SEQ ID NO: 6306 - DNA, 504 bp, Glycine max
agcttatagatgaactacatctgtatgattcttacggatgaagttcatccgtatgaagcatacagatgtattacatccatatgcattgttttttttccagaatatttattaaattttgaaaaatttagatttaataacattattaatatgtttaatttttattacatatttttgaaattgtggataatttatttattacaaattatttatagtgtaagtaaaagattaaattatttaggtacaataattgaatttattttaactagtaaaatgttaaattagttgttagttatagttttctatatttttttttgataattagggtgcaaaatttttatttatttgaagtattttttatgttaaatgagatgttttctaaaaaactttattattggggttttggaggccctggcgggaaattttttgtagaatttataattatttagttattgcaaattaattaagttaaggtaaaattgaatttttaagggcaaatttgtatta

SEQ ID NO: 6307 - DNA, 523 bp, Glycine max
  unsure at all n locations
tgtttgaaggacagattctcattatacaaagcttgctggaactagttcagcaaaggccagttatgagtgtagatcagttcattgacaatgtggcctggcctggagcctgaccttcttttgtgggagataatgaaagttttacagcccagtcacctcaacaacatgagccataaccagaaacgatcactcatttgaagccaccatccctcgagctgttgatttcgcaaaaagaagattagagacgagatctaatgaggctgctcatcctataccagtgccaccatcagctgacgcaccatttccaggagtggatccatcttcaccttagcatgcatcagactcttccactcctatcttagagatacatgagggccattgtttattatcatgcngccttttcttgaccacttcgaggaacttgacacccatcgttaagcaatccgtgaagttctgcgacatgtcgggagtcgaaatgaaacatttattgcgcaatccataaagtttcgtaacattccagatgccg

SEQ ID NO: 6308 - DNA, 345 bp, Glycine max
agctttttgtccttaagtgaaagacaatttttatattttggctttatttctaagctttcttgttgtttctaagtttgtctttaattattacttcatacaccgtgcaagtcatgaaatgaaacacaagacataatacactgattacaagttattaggttatctggtcatttgggtcaagggttgtttgttttaaattaaaaatagaggtgtgcgcaaggtttgaagcaaatgcagaagtaaccattgtagctagttgctagtgtcatgttagttatgcattacgtatgcatgcttgatcattatgtcttaaattcacatgaagccaatttccattttggatatgta

SEQ ID NO: 6309 - DNA, 749 bp, Glycine max
  unsure at all n locations
tgtattgctgcatcccactaatatatggagttgtccaccgctttgcctgagaataacaatggcttgaccacgacaactctggaggcggttaggggcaatggtgtatccaataaacctgttgttcataaataaagaatatatcataccgagaccgacataaatgaactcacgtaatcattgcataattgttatactatatacattgaatgtacctgttcaaaatgattaacaccattttaccgacatatatttgcggtgcctataaaattaagaggtggttaacttctacgagaaataaaacacagcattgttcttggtaaaccgaacaaagtttaacttttacagagactccataagagttcatgattatataaatatacagcccnanggacctatttgcctgttatgatctagcataaagatctagtatatttaaacccctgaattatcaaaaacatctgtacaatactatgtattaaacttactataagtcaggtcacactttaatttatcaaaatctttgtgcaaccattagaggatgtacttcttagccaccagcttgaccattacaagtttttcaccagtacggccacaaatcttcccctacttatataaacgcagatgaccacctactatattttcgacccttgtcaatgcaccgcccaactgcgctcttcataaggtcacagcaaatcaccttctaacttcttacacgtctagcacgctcaactttataactattctgcccg

SEQ ID NO: 6310 - DNA, 506 bp, Glycine max
agcttctcaaggaagttttctcaagaaagcttctcaaggaagctacctagtctataaatagaagcatatgtaacacttgttgtaactttgatgaatgagagtcttgtaagacacaactcaaagttcaacttctctccatttttcttccttcaatttcgtgctcccccctctctctttttctccctctttcttttcctccattgaagcatcctctccaagcttcttatacaaggctcatcttggtggtgaagcaccttcttccatggcttattccctagtggatggcgcctcctctcacctcttctcctttgtcttcctctgcatctccatggtggaaaatcaccattagaggacctcatttaagctcttcatccagcctccatagaagccccacacgcaagcttccatcaagtggtatagagcacaagagcttcaagtaagggctccttaaacctctggtaattttttgtttaccctctcttctattggtggttcttcatttttct

SEQ ID NO: 6311 - DNA, 594 bp, Glycine max
  unsure at all n locations
ttaacctcatcgtctctcacagtctttagatttgggagccaatccaatccttgtgttcggactctcagccacttatgatagccgccaatgatcccattactgcttcccctaagctctctgtcctttcttcacgctgcatcccatgccttgcgaactccttgaagtaccctcgtgttgtggtcactgaaaccccgtgcgatgaaaggcgtgatgcattcgtctgatggcacttctctcatggggtagccaagctgtcttatggcgaggacgggattataattaatacaacaccttgttcccatcaagagaacatttggacatccttcgcatgaagatagaatcttgattcttccttccttctagcgagggaaccaattaacagacgcctctccatgctgccaaaagttggtcccaattcgcctttcctttttcgatgcacgagcggtgaccttgtagcggatagacgggcctaccttcttggagaaaaaaggtgtgaaaccagccacacatagagagccagtgcacaacaaacaattcttgcgctgctcttttcacatnctccgtcgaacgtgtcatacatggccaaaatggcga

SEQ ID NO: 6312 - DNA, 498 bp, Glycine max
agcttgtaacagttgtgaatcatgccgaaagtatgtaaaagtagttcatctctgttttcttccataactacacaagtaatgccaagattcacgcccgtgacctgcataaaaaatgggaaataaggtcagtcattaaaagaaatgcctaaactagtggaggagactgcagtgactaaagagagcacacggctctacggacttgcaattgcaatatatcagcctacttataattatatttttctaatatgattccaagttgcaagaattcttcattgagtaacctcattgagtagctatatatgcatatagctacattgttgacatttttggcaagaatacatcttggaacctctaagctaatcaacatacaaacaagagctagaagagaaaaaaccatttttcacataacctagaatgataaagaggttcatatagccttacattaaatatcagtcccttaatactatataatacttgtacaccattgaatgaaatatg

SEQ ID NO: 6313 - DNA, 602 bp, Glycine max
  unsure at all n locations
tacccgcactattacccacaccatacatcaaacctatcaatgttaagaaaatgacatcgacagaaatgcagttgagaagggaaaggggcctaagctttacttgtgatgacaagttttcccctagccatcgttgtcctaataagcaacattttgttctacagtgggaagaagaggatgatcctgcatttcaaccagatccaccagacgaggttgagacagctggtgaccccagtttgcaagatcatcatttgtcttataatgctttaaaaggctcatcaggtcttggaataatgaagtttcaaggatcaataaatggattgggagtgcagattctactagatagtgggagttcagataacttgctccagcctagactatctcaatgccctggagttcctgtagaaccaattcctaatttgcaggttttggttggaaaaggaaatgccttgattgctgatagattaattcaagacttggaggtgaagattcaaggtcatacactgaagctaccagtttacctacttccaatttctggtgctgatctantgcttgaggctgcatggttggcaacaattgggcctgatctttttgattatagtact

SEQ ID NO: 6314 - DNA, 582 bp, Glycine max
agcttgttactggtttgcttctctgcaatggggttgtataaatgatgaaatgcttatagaaggcttttcttgcttttttgtccttgatacataattaggttggcaagaatcttcatgttctcagtcagatagagggtgttgacctagatatgtacaaagatgttgtgcttcccagagtactggagcaggtctaattgctttattgtttctatttctaatcatcaaagacatggttaactttctaaccataaaaaaaaacgattccttttcctcaattatcatgggcaggttgtgaattgcaaagatgagttagctcagttctacttgatggattgtataattcaagtcttccctgatgagtatcacttgcaaactcttgatgttttgttgggtgcttacccccaacttcaagtcagtgaacttgcacatttttttgtattacttctggaggatgccttaatgtatatatgttttttctcactccgaaacatgaaaattcaggttagtgaacttgcacagttttgttttactaatataataatattatattttattgggaaaaagcccaaattaaatattgaa

SEQ ID NO: 6315 - DNA, 845 bp, Glycine max
  unsure at all n locations
ggatgatacctgctttacggacacttaaaactaagcttccacaatgctaatctgaactcagcctttttccccatattaagcttttgtcgttccttgctttattgcatgattatgcaagacggaatcactgtttattaaagtttataatgcatgcactcgatcggtatgtattatatcagcaaagcgtacatttaggtttgattattatgggagccttgactaatttgactttttcggcatatatccttgtgtttggcatatttaaaatgaaaaaaagtattttatatgtaaataattgttgtatgaaaatgtggtattagttgaattaaaattagacatgataaataaattcatatttatgggtattatcttgaattgactccgactttgacagagataccgctttgataggatataaatatatgatatactcgaactatttaagtggggatgaggatatggatgaatatcaaattatgtctgtacccatatcatattatattttttttcacaatatatatatatatatatatatatatatatatatatatatatatatatatatatatatataaaacgtgttatggctataattttntaaatataaatcacttaacttaatatcttaataattaaataacaaacttaaaaatatacatgtaactaaaaatatagatgaattcttaattttttaactctccttttatttgtgatctgggaatatttaatatatcggggtggagctacaaatatgattatattacgaaacttcattatattaattttattgttaaacaatattttacactaactttaagatttttataaaaacgaagtggtggtcg

SEQ ID NO: 6316 - DNA, 747 bp, Glycine max
cagctactgatttccatcttttgcacacagaattcaggcgaaagaatgtggaagttggaagccatgaaagtatcctttcaaagagatcttcattaaggtcatcaagagaaaaggtgttgaagagtacacgttctccattttctggtgattttctcttcaagtttacacttacatgctgatcattacattccattgttgaacaatctgtggagaaccacaaagaaatcagatgttaccaagcaatcagctttttttccatttccaaagcctacggtactaaattactaatctcaaaagccaaaccaaagggaatgaaaatttccaattcgacccttatatatatatatatatatatatatatatatatatatatatatatatatatatatatatatatatatatatttatatatataaaaaaaaaagaggggccctgaataataaaactctaaagggaaccctctcgggcaaaaataaaaaacatcccgcctttttttttcccaaaacttcttcctccctctctttttagacatatttcttaccataacgatttgtccaccttcttaacaaaataagccccctctgccggtcctgagaaagaattttttttattgtgtgacccctctttaaaaaaaccctctttttttgaaaaacccctctttgatcaaacaaaaccccctccttccaggtggtttttgcacttaaaaaaaaaaaaaatattcttccccttttccccggggattaaat

SEQ ID NO: 6317 - DNA, 614 bp, Glycine max
  unsure at all n locations
tgtaaacactcagttttgtttatattttattttaatcagaattcttaagtgaagaaaaaccaaattgggctcctttgagcccatcagacaaaatctaattgaaataaattaggctacttgaactcacttcacacaaataatgttcggtctaagtccaatttacaaacgttcagacaaaaacaaaaagaagaacaaaaaaaaaagaaatacgttaaagttaaaataaatgatagaaaaaaaaaaagagtctactttctcggcaaaattgtcaagtcttgggttggtctcctctgcaccttcatcaccatttttcaaacttgcactccaagatactgttgtcaaaaaaatagctaagcaattgaatcagagactagtgactggtcacaaatgaanaatggctataaatattgatactgaaagtaggttacgggttcaaaaataaataatactgtatttgaaagataaaaagagagagcaattttgtgagtggatgttagtgtgatgaaagagattgaggcaagcaagtgctgcccggctgggactgcgagtactattattcctaacacggtcaacaaatatatgcctcggaattataaatactatgggttaaatat

SEQ ID NO: 6318 - DNA, 451 bp, Glycine max
agctttattcaagacaagaatccaagaaagtcaagatatatgatcaagtttgatctcttagaatctttaggaagaagtttccaaattgaaacaaacaaaaggtttgaccaaagaattctatcatttcaaattgagatttgctctctggtaattgattaccagtagttgaaaatgttttaatacaattttttaaaacctgtaatcgattacataagtcttgtaatttgattaccagaggggattttcagaaaataatttccaagagacatatctattcaaatgttttatgaacgaccacttaaatgttttaaagagagtttttattgcccaaacaagtttatcctctcgaaagatcaagagtttttctgaactggaatgtcttatcctctcaaaaagattcttgggcaaccacttgcttatttataaggaatttttgattgatctttatttt

SEQ ID NO: 6319 - DNA, 616 bp, Glycine max
  unsure at all n locations
tgatttgtgagttgattttagccttaatttcactttgtttattaatcaattgatccaaggaaacttccaaagaaaaacgtccgattgatttttttttattattttattcaaagatattttgattattttattattatttttcaagatattttgattattttattattatttttgctttttttggtttaaccgaggttaaaacgtgaacgatcgattagattttgttttaacagtgattaaaccaaattacaacgcaaatgatcgattgaaattcattttatcatttattaagtgagaaaacggcttaaacaatcggttaaagctcgttacaaacggaagaaaagaaaccgaaagtgaacaaaataaagatgaaagcttaaaaaataagaaatgaattgaaagtctcggattcaaaaacttacccgttgaagaacgaagaacggatgaagaacaatgaagaacgacggaaaaccttcacggattcgctcatggaaacgtctcggaagcgttacggaagcaactcggcttggattttcttcacggaaacaatttttttcacccaaaatagctgaaatgcatagccagngggatganggatcattggaacagtcccatt

SEQ ID NO: 6320 - DNA, 663 bp, Glycine max
  unsure at all n locations
agcttcttcttcttctccgcgagccaagcgccaagcttcttcttcttctccgcgaacgagggttnnaggttagtctccctaactccccctcgcttgtaatatncaacattgttgtagcagtgaaagcttaggatagtaaccttagggtagaagacgagagtagaagacgccagaaaaaatggggaaagggggcttacgacggcggcttccggaagatccgttaggggttcttccggaacttccggaagaagctgttccgaaaacattctggaagaagtattcttccggaagaaaccaaaggtcttccggaagaattccggaagaagggtttttccggaagaattccggaagaagggttcttccggatgacctttgagaattccgaaagaactttctggaagaaagtggtttttccgaataaatccggaaaaaacacttctttcgaaagtttttttataaaaaaatatgcttggccccctttaaaagaacgaataaataattggtattgattgtcccggttttgagagttaaaaaaaaaagaaggtttgaaatttggttttgaaaataaaagggccgccgccccccccccccccaccccccccccttaaataattgaatttttttaaaaaaaaatcggcaaccccccacaagaaagggttcccc

SEQ ID NO: 6321 - DNA, 653 bp, Glycine max
  unsure at all n locations
tgcttctacatccatatcatttttatcccatgtaatgtaggccttcttagctttcttatcattaaaagctttcttttcagatttctccattcttttcttgaaaattggacaatcaaccctcagatgtcctggttgattgcattcataacattttggagtagaggatgaatcttttgcccttttctttgatttgaaatttgttcttctttgatttcctctaactcttagaaatttgttgaatcaatttacaaaaagactgagatcatcatcttcgtctattttatttgaatcctctttatcacgtccttcttggattgaagatgaagctttaagagcaattcctttctttttcttaccattctcctcatgctgattcaatctcattaattccatttcatgtcctgcaacttcccaaacaaagtagcaagagacatgttagaaagatcccttgattcagtaatggtcgatacctttggttgccattccctgcttaagcatctcaaaactttattaataagatcttcatttggaaagatttttcctaaggatgccagatgattaattatgtgtgtgaatctctcttgcatgtcctgtatgngttcattaggatttcatctaaataattcatattcatgagttaaagtatctatcct

SEQ ID NO: 6322 - DNA, 398 bp, Glycine max
agcttcatgtagctttttctagaagcttcattaagaggcttcctccagaagcttcctcgtggcttctttgagaagctttctcaagaggcttctttgagaagctagatccttatctatccacacccctctattaactaaattaacttccttaaaaataattaccgatgaaaataacgcaacaaatattcaaacatcaaacataattactaatagtatatagatatatatatatcagggtgttacaactctcccacccttttagaaatttcgtcctcgaaatttaccttactcaaacaaggatgggtgagcttctcacatctgactttctaattcccatgtggcatcttctcctgatgcacctccccagatcaccttgaccaacagaatctctttccctc

SEQ ID NO: 6323 - DNA, 632 bp, Glycine max
  unsure at all n locations
tgtaggattatggggtacccatcacatgtggtactaggtggcggtcgagcgatggtgcacaacaagttttccacatccacaaagcgcgcataaacccaccatcccctgttgcccacctccaactgagctcacgtactcccacgtagcccataacctcgtttctctcaacaccgggtccccatcaatcctcccaagcttccccaacatcaaagtaaatcaacattcaaacagcacaaattaccacagccaagaaaacagggcaaaggcagaaaactctgcccaaaacaccaaccaaaatcacagcttttctcacttaaagaccccagtaacaattccttcgatccaattcgttaaccgttggatcgactccaaaattttactggaagtctatagtacataagcctacattttgaccgttgggatctactagcaaacatccagaactcattctgcactactctttccacagccaaccacacacaagcatttttctgcacaaagccaaaatcctgctgcacctattttgacagcanaattctgcataagtgcagaattcgaannatcacccttctctcatccaatcttgcccaaatcanatcctacaagtcccaaatcatgtatcaatcatgtct

SEQ ID NO: 6324 - DNA, 577 bp, Glycine max
  unsure at all n locations
agcttcttcctcaacacttacaaaaacgatgtaagagaaactaataaagataaccggaaaaacaaaataaaattctctctctaaattctgaaactttctctctctccttctctttgctgaacagaacctaagcaaaacaaaagctagaaaatttaaaataagcaaggaatgaggcacaatgggtttgagtatttaaattttgagtgttgaatacatactcaatttttgaagttttatttgctaacattgcctaaaccttacatagaaataatgataaattgacccactacaagaaaaatgtttatttccgacgaaatttttcccacggaaaatatttcatcggaaatgctgaattttcgcatggaatttaccgaaggaataatttccatgggaaattagcaaaaaatcgatgaatgtttttgacggtcaattattctgttggaaagttgacaattccgacggattatacgaacgaaatgtgtatctgtcgaaaagtaaatttcccaaacatatgatgcgaaccatagcccattgagtcactatgtntttttgcaagcttggtatgttgatatgaata

SEQ ID NO: 6325 - DNA, 702 bp, Glycine max
tgactttaaaccttgacattggatccttcaactcatgaagtgtttctaggtccttatgctctttggatagttctatattagatatatccctgacatatcatcatatatctaaccaatgatatactacatatttatatatatattttttaaaccaacaaataatttatatattatgggtattagagataccatcagttacataaaataatcctcattgattaattggtattgcttctagtgattgaataatgatatctattaactagtagtttaaattataataattcgcataaaaaatctctctactctaccacagctttgcatatatgcacactttcaccaatatttcataggcccaccttgtttgtttctaaattatccacatttattcacagacacttccactatttcattgctagaaatactcaaaggccgactttgcacatgcatagcgttatactaataccacgtgttagacagtgttgtgagttaggtacctatgtgttggatgataatttctgaatcacgttattattttttgttaaaagttctttaacttttttctctcagcctctatttttgtccttgcattcaattatatcattgttatttaactctgttaattgaatgtggggctaaaagtagaatttttaagaaaaaaattggaagaaaatgataataatcattggactaattttatct

SEQ ID NO: 6326 - DNA, 505 bp, Glycine max
agcttcaagatgagcagtcatccttgcagcccataattcgtactcctcaccatcaaaaattggtggtgaacctgctgtgtatgatgtttctccctccattgtgatttctctcaactcacagatcccttaatgataagagctctagatacctatttgttgttttttttaataacagcaggcagaaatattaaagaatgaaagggagcataaagtaagaaattgagactgcaaaagcttgttttattctgatatgaagcaacgtatttaaaatcatggaaaagatagtaactgctaacaaaaagataacaccactaacagatcatgactagagaataggatcaaaactgctttatcctatcagtcaacatgacttttatttttcctaaaaaatagcaaaagaatcttatctactatagtttgttaaacagtttcaacagtcacatcttaacaattcaaaacaaaattgtgataaactcatcccttacatctaagtgactcccatgtg

SEQ ID NO: 6327 - DNA, 506 bp, Glycine max
tattctacttacaaaatcgagtgtcaattcttgaagaaagtataaagaccacctctctgatattaccaatttgataattgagaacaaaggctcaagattcttcaatgtactctaaaatttttttgctaagtaaacaaaaattagattaactacaaaagctaactagtaatctgttaaaaaaaaaaaacctcttctcaaccttgcattttgtaatggaagaaaacaaattaaaatatgcaatgataaagaaaaagttgcagacaataatataaaagaagacaggagatcatcaatgtaattgtggttaagttctggtgtttctgcttttatttcttagcataccaagcccatccattatattcaaaataaattttttagttgttatctaagaactttctaattattgaaaagtatgtatggacacatattttttcaacagatctacttggcatttttttgaaggagttcattacgttactactgcactcttaattttttgtagtttt

SEQ ID NO: 6328 - DNA, 546 bp, Glycine max
  unsure at all n locations
agcttgtttgaaggacaaattcttattatgcaaagcttgcaggaactagctcagcaaaggccaattatgagtgtagagcaattcattgagaaggtggcctagcctggaacccgaccttcttttgtagggaataatgaaagttttacagcccaggcacctcaacagcatgagctagaactagaaaatgatcactcatctgaagccatcatccctggagctgttgatttttcaaaaagaaaattagagacgagatccaatgaggctgctcatcctggaccagtgcccataccagctaactcttccactcctatcttagaaatacttgagggccagaccatactagtcctggttctgggcacttctcctccaactactccagtattgcaccaaacagataaagaggatgttcaggcatangacatctaggactagtaacaggaattttgatttctgatgatactttttgctttttaatttattattattattattttgggtttcgtacagatttcctttaggtctacatacactactagttttatttat

SEQ ID NO: 6329 - DNA, 665 bp, Glycine max
  unsure at all n locations
tcctcggggccattcctgcgaaggcaaacatttggaaagttaattttaccagtgggacactactcttaaagcaaaaatggcatataacctcctcccataaatacaaacatcaatgtaaatttagagcaagcttatgcgcatatttccttacgaacgttctcttgcacaagacattctattaactaagaaaaatgcacccatacacaatcaaggcagcttcgttacctagattatttacacgtacttccaaggtgtatttgttacttacatcacacacatctccttggctaaatttacatacaggcatactcaaagcattttggggtaccaaaaattgcacatgtgcacatcttggtatttctaatacctatacatacgcaaacttcatgatgaatcttgactatcttcacaaaaaggtgctacatttcatgctttttttttttcaagtttttgctacttaaagccgcatgcaaattcaagcatattttcctttgctgactaaaatcgtattcaaattaaaaggtatattttttgtaatatgttttcttcacataacatgcaacacatttatatacatttcttgtgagacatntttgactaccaaaaattggatatgcatacattcaatatttttgtattcatacccaaagtgcaaattgccaaag

SEQ ID NO: 6330 - DNA, 303 bp, Glycine max
agcttgaaggcaaactggatgcattggttaacttggtaacccacctggccttgaatcagaaatctgtacctgtcccaagggtttgtggtttgtgctcctttgctgaccaccatacagacctttgcccttccatgcagcaacctggagcaattgagcaccctgaagcttatgctgcaaatatttacaatagacctcctcaacctcagcagctaaatcaaccacaacagagcaattatgacctcttcagcaacagatacaacccttggatggaggaaataccctaacctcagatggtccagccct

SEQ ID NO: 6331 - DNA, 515 bp, Glycine max
tctatagttatggaataatcgattatcaaatgtggttattgattactacgatacacgaagaactcctaaggtttcctaacacaatataaatgattactaaacgggggaatcaattatctggaaccaccacgacttccttctgttggaactatcttatgtaatcggctactaaaaatggtaatcatataatttgatgattcttatcaaatttcaagagaagtgagttttgttgcttgctctaacactatgtaattaattaccaaacttggtaatcacttacactatgccgaattcattgcttctaagaaactatgagattaatacatttatcttatcatgttggattcctactaaacctatatgataaaactaacgtctagagcacttgacctgcctagtctaaaaacatttgatagaaatgtcacatcttaaaacacttgtttggcgtcgtaaacttattaaaaccaacagatcctaacactattcttcaagtcttcaatcactttgattcaaca

SEQ ID NO: 6332 - DNA, 528 bp, Glycine max
agcttgaagtgaaaaatgttaactggagcaacccaatttttacatcaaagcctaatcagcatcaacactactattttaatctttttctcataaaggattcaatcctactgatgttgtggtgcaacagagtaatgcaaggtctatttgatgccagtaagtaatccttttatttccaaattcagagcaattccaacaaaaggttccatgaccaaccctaattattaaagaactcagttcactgatatgtatgaataaatgatgcaagaaagcatgcaaactatagaacaacaaagaaattgtttcttctgcagattctagataatgccaaagcctaaagaaacaagctaaagtattatggttcacttgaaatattaaagtggaagaaatgtaacaagtaatattgttttttgatgcatcagaacaaatgcaacaagtaatatgatgctattatacatcacggatatagcttaaaataaaaagcaaaagggaggaaaaggaaaactccatttattggactaaaccataaaa

SEQ ID NO: 6333 - DNA, 362 bp, Glycine max
tgtaatttccttctttttcgatattttgaggtgacaaaaagatttgtatcaatggtgggtacataaaattcagaagaaaaatattattgtttaagtgtggttatgtagtggctaagtggagacatgatctgaataatccttctactagttcataagtggattgtctctggagtaaaatagggacaacggaatgcacaaagatgggggttggtggctagaaaccataatggaaatacgagaggctttaggtttccaatgaccccttcaaagcagtttttgaagaccaatggcgtagatgaagtcccttatcagttggacattcatatttctaaagatgcagttgaataatactagcattctat

SEQ ID NO: 6334 - DNA, 458 bp, Glycine max
agcttcatgatgaatcaagattgattcaaagaagttttgatgataacaaaggtgatgacaaaaagttcaaagatcaagaaaaacttcatgataacaaagatgatgatctcaagaatgaaagaatgagttcaagatgttcaagattgaatcaagaacacttcaaggttcaagaggaaatttgatttcaagaatcaagaatcaagattcaaggttcaagcttccaagaatcaagatcaagattcaagactcaagattcaagaatcaagataagtatgaaaaagttttttcaaaaactaagtagcacatggatttttctcaaaacttgtttaccaaagagtttttactctctggtaatcgattaccagattgatgtaatcgattactattagcaaaatgtttttgaaaaagatttcaactgaatttacaacgtttcaattgatttcaaaatgttgtgatcg

SEQ ID NO: 6335 - DNA, 600 bp, Glycine max
tgttggccatggatgagatcaactttgttgggggaggaagcatttcttataatcaataacctaggcaaaatcagaggcttagaaaagaagagagaaaaccaactcttcaagagaccatgcttcaatatatggcctagaatgaccaaagaatgaagttgttgtcccaattgaccaacatacaatccctcttatcacaaagaaagtcaagcaaccttcacaacctaaaccaaatcctaagaaggaggatgtcaatgctgtgatgactagaagcaagatgattcaaaaggactccgaggagaatgaaggttctttcccaaaaactgtagatgacatccttctaagaagaaccaagcaactaggaaagttaaggttcctactgatgggaatcctatggcaagcaagaagggtgagaaggaggtactgacacctcctcagataagtgttcctttccttctcaaatgaagaccattgtgactgagcctcacccaagtgtggggaaggaagatcctccaaggaagacagtcattccaaaagaccctagatggagtaagaaaaatggagatagcatcaccattcaaactcttggctatggagtagatg

SEQ ID NO: 6336 - DNA, 397 bp, Glycine max
agcttggataaggtagcttcggcagtgtgtactggggtcaactttgggatggatcacaaggacgactataatttttatttagttagttattgttgtgattgttattgttaccgttacgcatcttgtgaaatcagctggatttctgagtcttctaaggttattcttgctcattttacccgtggatggggggatctagtgatccatttgctttaataatatatttgggtggctttagatgttaactaaactgcatattcgtaagatgatgaaccatatagatgagttttctcagacacatgttcttttcaataatggcatacattgacagatctagtaagtcacgtgattattccccttccttgttattttctttacagttcccatacttgcctaaact

SEQ ID NO: 6337 - DNA, 557 bp, Glycine max
tgtaatgcacctgatgacatacctaagactgtcgtacgaactcttaatcagggttcatctcctatgagcatggactttcatccaattcaacaatactttgcttcttggtctgctgctcttctaaaggctttttaataacattgatttgatttatcacttgcatgtttttgctatcaagtttcaatttgacttttatttgatgcaatatgtcagttggtacaaatgtgggggacattgctttgtgggaggtgggttctatggagcggttggcctcaaggaatatcaaagttcgggatcttagggcatgtccaatgccatttcaggttttctctttaccttaatgtatgaatgatctttatatgaatttgtgcttacctctgagactgtcatgttgtcatgactgaagaacactaattatgatcaatgcacgcggctcttgtcaaagatccgggcgtttctgtgaatcgagtgatatggagtcctgatggagcattgtttggtaaactgagaatttataattcttcaatgtttaaatgatatgatatagaataccttga

SEQ ID NO: 6338 - DNA, 465 bp, Glycine max
agcttagtaaagtttagcttgagtgcaagtgttagaatcagtgttgtaaattgcacaaggccaaaatccgccataaacatatggcggatggcatggtggacaggaaaaaaatacacacacacataaatactaaaaaaacatcagtgtgggggaatttaactcttgggtcaaggaagcaagagtcgtgcattgtaggcctgtggacaacttcactcagcacttctctttggctgcttcgagggctactaatagaaagtggaagatttggtggatagcagccacagtttctatttggaactataggaatgatatgatttttaaaaatcaacagtttgtcatctctaagttggtggataatgcaatttttctcacctggtcttggttgagggggtgggaaaaggactttgccgtttcgtttcaacaatggtcctcaactatgtcttttgccttcacctaatgtgggaa

SEQ ID NO: 6339 - DNA, 651 bp, Glycine max
taggaaagtataaagttgaagtggtctaggcaatgaaaatagatcttatttgaaaatgggttgaatattgagttgcccaaaattgttttgttataattctggacacatcatgcagctaacaaagataaacaagagtgaatgaaaagcaaaggtccacgagttctgtcatgtaagtggtcaaaattgaaactacatcaaaaagccaatgcctttttgagaaacaagataactcattgctgaatcttatcattcagtattcacctctaataaagtcgttatgattacttcctcttacaagagagatgaacacatttgaatgtgaccatgtcatcataaaatttgcattagaggatccatttccctctcactcctttcatgcaacattgtccgtttatgcaccaatttttaaggttgaagtttaatgctggccaaattaaactcaaccatattgacacaggatatgacaaaaaaaccaataaagcagttaataaacaatatatgtataaatcatactgatgatggcaattcttgtcgagtagttttttccttgctgtagatatccacatgctttgaaaagtaattcttaggattttgtaatttatccttgatttttgcacagaaagaaaacctttcactacctgagattacaaa

SEQ ID NO: 6340 - DNA, 606 bp, Glycine max
agcttttattaataaaatcatggtcaaggcaggctgagaaggcagagatgatgcgattatgaaaagaaaacaatcaaatattatttcatgagatctagtaaaacaaaagcatttaacatctatgcaacaacattggtggcaacaggttcctagaccatatgaagacagatccatcaccatgctgagaaatacaataggtggcatcctcagtattgaaaaatgtgtcaaagaaaaaaagctgctaagctaactaacaaggcacagcacacagccaattgtaaaggagaacatgaagcagcctaaactgacatcaaactgccacttgacatcaagattaaatttgaaacaatcagacgcaagtggttgaaacttcacaaggcaaagataaagtgttgtaatcctagccacaccttcatcaacatcagtgcacaaagctcaacctatttatgaaagacttttttccatacactgctgtttgcccttagtatcatgaaatccaaccaacaaatttgaggcaacccagaagagcacaacctaacgaaacccacttagttttttgtaattgtagatatgatgcaagccataatgccatactgagaaatccaa

SEQ ID NO: 6341 - DNA, 674 bp, Glycine max
  unsure at all n locations
tgttattattttactcctccactacttattttctggatatgttcatgttaattaatgcctattaaatattttaatccccaacatatgaacacggaagattccagccaaaagatataattgaacacagagaataccacttttttttttggtctagaagaataccacctgtttaagagaacatgcatttacaagttattggtggttttttcttcttcttatgatagcatagaagaatattattgtgaaaattctgaagataatttgtcttatcacatgaaagtttgaggacacaatttctgcccaaaacataagctcccatcactatctacttcatcaacagactacatatatgtgatatgattctaaaaacaaaacacttataaacagccagttcagttaaatccaagcaatacttttccaagtctgccaacccttaaaatatgggttagaaaattaagctcgcccgccaatcacatcaaaaaggaaaattaaaacacgtccacaaaaatatttaaatcaaaagaaactcacgctgatacattagtttgtggaaaaattctgtcttcactttttccatactnagggtccgtgactgattcatcagctaatcgctatcaagtttcaaatatatcaaccaaatattgagataaatgccacaaaataaaaaataaaaa

SEQ ID NO: 6342 - DNA, 534 bp, Glycine max
agcttgagttcctatgactaagtcacaattgagcatttaccctaacttccacaagctacccacacatccaataatggcacccatgtatgcacaaaccaattctataagcaaaattcacaaatttatgcgcaaatgccattaaggcatttcaccgaacacttggtgggtgcacttttgggtataaacaggaaaggaatgagggcaatgcggcttgcccaatcatttcagaacacaacctaggcctaaggccatcccctacaaccccccaattcaacgaatcaaagcatgaattttccctaaaatgtctcacgaaattggtcaactatgtacaatttagagcataaaaaggcatcaatggaaagctagagaccaaaggatagtgtacttacttgcatggagtgatcaaggacactaaaatggaagcaaaaagcacaaaatgggggcctagggtcagaaaaaaccctcaatcccgcgggtgctgcgttcttgagtgaaggggagaaatttttggtgaaaaaaactgcacaccccccc

SEQ ID NO: 6343 - DNA, 580 bp, Glycine max
tctcccccattttctataaatagggggagaagtgaagtagaaaagggttcagccccttaggcacttctctctctttcgaatttgcttaggaaaattgtttccgtgaagaaaatccaagccgaggcgcttccgtaacgcttccgagatgtttccgtaagcaaatccgtgaaggttttcgtccgttcttcaccgttcttcatccgttcttcgttcttcaacgggtaagttttcgaatccgagactttcaattcatttcttatttttttaagctttcatctttatttcgttcattttcgatttcttttctttcgtctataacgcgcttttactgtttatttaagccgttttctcacctaataaatgataaaatgaacttcaaccgatcattggtgtcgtaatctcatttaatcactcttaaaacgaaatctaaccgatcggtcatgctataacctcggttaaaccaaaaaaagtaaaataatcaaaatatcttgaaaaataataataaaataatcaaaatatctttgaacaaaataaccaaaaaaatcaatcggacgtttttctttgaaagtttccttgaatg

SEQ ID NO: 6344 - DNA, 445 bp, Glycine max
agcttttgaaggtggtatgctttggggaagaaattaggtgaaaatggcttcacctctccccccttttaaatttttacatcagacacactcacccaggcgagctaaatttttttttttttttttacaaaattgggttattcattgttatatttcttctaaaaatcctataattgcatataagcttaggagaattcaggatataattcaaggaaacaaacaagcataaaacaggaaattaaagagcaaagttagagatactagactgcctcataggagcacttctttaacatctttagccggacgcaggttgatgatcaatcgatcatgggcctagcacctgttcgtacctaccccaaagattgaacaaagaaagtggcatcatgcaaatgtgaaacaatactacacgatgcatgcattacctttcacttacccctattggttatct

SEQ ID NO: 6345 - DNA, 585 bp, Glycine max
tgagatgaggaagtgttgaagggtgaaactttttgcttttattgttgaccacagagtggtacctggagatatgtcgcgggggtcaggagaccttggggacgtcaagtggggtgctattgcccaaaaccaagcttgaccaatcccgacccaacccgggcatagtcggtcagtgagaacctgtgatgtacctaagcaggcgagctcctggcagtcaacagataaaaggaacaaacaccacaaagcaaggaggcttgtggtggctggccagctgtgaattttgtgtgatatgtggattatggcctctggtaatcgattaccaagggtgggtaatcgattacaaggcttaaaaatgaagacaggaggctgagatggtctctggtaatcgattaccaagggggtgtaatcgattaccaggcttgaaaacgaagttaggaaattaagggagcctttggtaatcgattaccagcctgtgtaatcgattacacagagggatgggtcactggtaatcgattaccaggtatgtgtaatcgattacacagtgcatttttgcatattccatgttctgacgctgtgtaattcgagttt

SEQ ID NO: 6346 - DNA, 452 bp, Glycine max
agcttcagatcactaaggcggattcctatatttggttttatctgcacttcctccatatccttttccacctgaattgactcattgactgccatgtgtgttttttttcaaaggaatatcatcatatacccaaaaaatattaactagttgcctagaatagacctatatcacaaaaaaaagctaatctttcataataaaaggaaataaaacaacaaacttgtacttgtacagagaattttttttggaaatagcatcctaaagtagtgctatttacaataagactcaacagaaataaacctgttctacaaatctgttctaataataaaaaaataaaaagtagtaagtagtaacataattattccttttatatttaaaacataaaaaatgtaactatcctctaattttttttaatcaactctttcctcggcctacataaaatttcattggatcccttt

SEQ ID NO: 6347 - DNA, 616 bp, Glycine max
  unsure at all n locations
tttgtcctgttgacttcatgttgtttttttttattatccatacaatgcgcaggccgaaaatatgttatctgatatatatccaggaggatctcccaaagttggctccacgtattgggatcagatccttgaagtgggagtcatctctgtgtcagggcgtcttctgaagcgcttacagaagttcttggagcaggtgaggacttgaatattatttaatggtgtaagaatcactttcaagaaaaccagaatgtcccttacaatttgcaagctatagttccttattctgattttaagcagtggcacaagccaactatattactatgttagcttttgttatttccattatggtgattgtatatgcagatacaaaacactttctttggcctccgttaacagttttagtgtttgaagttatgtgattgcctgacacggtatcataggttctctgagcgattaatttagagttcaatactctctcactgagcaatgcacaattagttccctctgtcatctgcagtttattaacattttcaatttcctttttattgtgattttcgccttacattttctggagaattgcgccaaattccacctatacttntatgctcctatcctattg

SEQ ID NO: 6348 - DNA, 386 bp, Glycine max
agcttatcattcaagaatttcgaaaatcttttgtgttattcacattccacccaaagattatgtttactcattttgaggtcttcataatctttgtgtgcttgtgaactttctctccatagatcatatctttattctttctgataattgaagatcattcagctccctcagatccttttgaagatcttttaggtttttttccaactcctgaaagttattaagaaaagtagattttatttttggcaatcgtctcatttttaaaacaaagcttggactctttttccttgagaggtacacaagctccacatgtctgagtatactcattcagtgaaacatttacttgatcttgaagattttctcaagtttaaaagatctttggatagtttttt

SEQ ID NO: 6349 - DNA, 314 bp, Glycine max
ctgataggaacgttgatgttggctacgtccgagtacgtgagctcagtcgaaagtgggcaactggggatggtgggttcatgtttgatttgtgaaagcgggagaattcgattgcgccattcgccgatctcctcctagtaccacatatgacgcgtgccccataatccactatgcttgaggtgagaaagcgtggaggagttagtcttactacttttgtttgttgaccatagagtgagacttggagatatgtcgcgggggtcagagacaccttgtggacgtcacgtggggttctattgccctctaccttatttgaccac

SEQ ID NO: 6350 - DNA, 401 bp, Glycine max
agctttcttaagatagatctagcgcgtccttttctcttagagacctccccccatgtggaggttgtttcatgttctccaactgtgcaaaatcttaatgctcataatctgaatgctcaagattataatagctctagatcaagatgttcaaaatgacacgcaccagattgcactaattctccacttatgctatgctcctaatgatccatatgtataaattgatgcctacctaatctatgaaaaggcccatctatttcaggatcgaatggttgataacctaaagaatagccccttcttcatacactacattcaacctgcacacaaacttatgccctgtcctgctaataaaagtgttaggaatagctacagtttccctcaattgacatccaactgacttgtaattt

SEQ ID NO: 6351 - DNA, 352 bp, Glycine max
tgggaagtccaatggatctcgcatggatgatcgattcactatgcagacaagagacccccttatatgcgatgaaacatacgtgtctgcagagcgcaaacctcatggaaattgtgattacaggggaattgctactataataagctacatgtgatgaattatgtctctacttttacatgactatgattaagattttaatacatgggaataccactatgttgagttgttagacgcatcaaatggctttgttgcacaaatacactattcttatgtgcagcatatctcaatagcatgcgttgactactgtgatgaccagtcccgacatgggctatgacatagaatgtgaatttgaaga

SEQ ID NO: 6352 - DNA, 626 bp, Glycine max
agctggacgagcttcaacatatgacgtcaccgttgacgcatttattgggcctgatgcaaagccctgttggttgaaaactacttgacctctaactgttttaagatgtttctcacaaacggtgctcgtcccaacaagctatctatgcatggattttatgcaagacttgtctgataaaccttacctatcgtacggccttgcactggcctattcctaattccccgaccctatgcacactgcatattgtttgcgctcacttcagacaaatggtccaacaatgcccttacttgatgactctatgcatgtctactacttttgctactataacatcttgatcctgacgcatgatgaggatttatggatcatgggcctaggatgagatggccctcgtgcctatttggtttaccaacatggaatgaagccgcacagtagacgtgactgcgctaccacttaccttggtttatcttttccttgaattcggcgttgtattgaccattatttcaaacaaatcttctcttgtcgttcgatgcataggatgataaatatgcctatgcctgcatgctcatgatcaaggcagtcaagtgttacaaatttaaccaaatgtttattatgttcaattttacttaaac

SEQ ID NO: 6353 - DNA, 293 bp, Glycine max
tatctgctgctttagttacgatgcactacggtggctagccttagcgtcactcacatgcatgtggtgatctttgacttactacaagaacaatgtgatagtggacgcgatacttgggaagctcccgccctctagcatatgcacattcatgggcctgatgcgtcttagagcagcttctaacaacttgctatttatagcacactcttactgataaaagcttctgaatatagatagatatatatatagatatatatgtattgagaagaacaacctgtgctaccataatggtgtgaaaa

SEQ ID NO: 6354 - DNA, 480 bp, Glycine max
agcttttttgtaatggatatgattttcactaacaaatatggttaaacattagactttgaatgtatcatccaacgagtgcaaaaaccaacttatttaaaatcaaatgtggactatcgtccaatgctagtaaaacagagttttcaaaaaggttttcaagtgcagacttgtgcaacaaagtgtatcaaaatcaacacaaaagaatactaatcaagtagctttagagagaagtagaaacacttggatttataccaattcactcaaacaaagctatgtctagttttcctttgcaaatcaataaagggttctactaatcaaaacttgattacaacaagtctatgtaccaaaagcgagtatttttcagcctctatgcattggcgagtattttcccccaatactcagcttttttcaccaaagtatatgtaccaaaagcaacttttttgcccttcgggccttccatcactcggaaaatcttctcaattt

SEQ ID NO: 6355 - DNA, 663 bp, Glycine max
  unsure at all n locations
tgaaggtaggagaagatgagtggagggagagggagtgaagaggcacgaaattttatgcctcaaatgaggtctgaactttgaagtgtaattctcaaatgatcaaagttacaacaagtgttacacatgcttccatttatagcctaggtagcttccttgagaagcttccttgagaaacttccttgagaagcttctttgagaagcttccttgagaagctagagcttagctacaaacacccctcaaataactaagctcgcctccttgagaaaattcctagagaagctagagcttagctacacacacccctctaatagctaagctcacctccttgagatgagaagctagagcttagctacacacactttctataatagctaagtcgtcatattcccacatggnttcttcttctccaattntcaacaaatatattcaagggaaatgaaacaccggaaagcataccgggtcatcaagtatttaaaattaaaacagagtgatccgagtatcgaacttagggaacttgcttattagacaaagttttattaacgagtaaggcattgttggaacacacattgacaattgatgggtaaaaacagaaataaactaattctatggtaagaataataaatgcaagtaagttaaagttgacaacaacaggtaaaaagtgt

SEQ ID NO: 6356 - DNA, 713 bp, Glycine max
tcatacctcacaaaatatatatatatatatatatatatatatatatatatatatatatatatacatatatatatatatatatatatatatatatatgtttaggtagaaagataccttggatatgcatgtatgtagcaaaaaaaatttcacaaaatatatatatgtatgtttaggtagcaagataccttggatatgcatgtatatagcaaaaatatctcacaaaacatatatacgtatgtttaggtagcaagatacctgggacacacatgtatatagcaaaatacctcacaaaaatatacgtatgtttatgtagaaaaatacctcatgaaaaaaaagagagcgagccagaaaagaattataagaaaaaaaaatgaaagagaaattattaaaaatattaaaaattattggggtgggtagctaaaaaaaacatggttgtgaaagagataactccagttttttttgaaaaatgcgcttgtcataaccagttttgaaaaaaatgtgtgtacacatttgaggggaaatgctttaaaaagtttttcaaacacccaaatagactgggtgaatgcccaaattatagaaaacatttttgggaaaactaggtgacttaaaaagggaaatgaaatccgagcccaatgggacaggaacataaaaacttgtggttgagggtccaagggtgcatgcatgaacattttgcaaaaatatcctaaacatat

SEQ ID NO: 6357 - DNA, 557 bp, Glycine max
  unsure at all n locations
ttggagtttccaagtgccaattcgtcttcttctttagtccagtcttcttctggcttcaattcattagagggctttccttctgtgtccagcatcttgggatgttcccagcctttgatgacagctttccaggttctgctatccagtgatttgaggaaggccaccatccttgctttccagtattcatagttggttccatccagaataggtggtctgttcactggtcctccttctttctccatgttcatcagaatttatctccctagatctcactcagtgatttcgagtgccagctctgataccaattgaaattctgatactggggacagatgtcgtacaggatgtcacgacatcacgcttcagaacatgcagattatagttgacagtgtggacagtttaaacaagaagataacacaagagattngttaacccagttcggtgcaaccttacctacatctgggggctaccaagccagggaggaaatccactaaaatagtgttagttcaaggtctaacagccactgtttacaaccttctcacctaaccactacccgtgcgatc

SEQ ID NO: 6358 - DNA, 746 bp, Glycine max
gtgttgagtgatcgatgttgtgccctctttgcgaaacacaaattgaaaatgcttttaatacgtttatcacatgcaacacgagtgaaggatcctggaagaatctacatctaaagaaaactatttttcaagcctgatatttaagctcttccattatctaagtgtaatgttgatgcctttcgggattcattgaatgtgactggtatgggagcttacacccgagatgacaaggggagggtagctgctgtgaagacagatttcgtgaatccatgtttgcaggttccaaaaggagaagcatgagctcttgcaagagctattcagtttgtccaatcgctgggtatcaataatggatgagtctttttacttaacaataaacaagacttaaagtaaattttaatagcaattttttactttaaatagttgagtctttttactatcatatatatatatatatatgtatatatatatacatatatctttatatatatattatttctactaaggtgtgggacctttttttcttataaaataatatttaaaactcagcctgcgcccaagttgtctaaattctatatttaaatattttcatttaaccctctaatatgcccctaaaggaaatttttaatttacaccattgttttaaagttcaaacgagactgcaaacccttaattttttgttgagcggccattttattttaccgaggttacgtttcattttaatttttcttggggcgttaaaatatctatcg

SEQ ID NO: 6359 - DNA, 611 bp, Glycine max
  unsure at all n locations
gacactatgaaactcagcttctcaggaagttttctcaagaaagcttctcaaggaagctacctagtctattaatagaagcatgtgtaacacttattgtaactttgatgaatgagagtcttgtgagacatacttcaaagctccacttctctacctcttttattccttcaatttcgtgctcccccctctctctttctctccctctttcttttcctccattgaagcatccttcccagcttcttatccaaggctcatcttggtggtgaagctccttcttccatggcttattccctaatggatggtgcctactctcacctcttctcctttgtcttccgctgcatctccatggcggaaaatcaccattaaaggacctcattgaagctcaaagatcccgcctgcatagaagctccacgggccagcttncatcgagtggtaatcacagcacaagagcttcaagtaggtgctccttaaacctccattaatattttgctttaccttctcttccattgtgtgtcttcattattttccatgtatctcctcaaatgtcttgtgctaaatgttggtaacatgattctttagagtttcactgcataaacttgtatataagttagata

SEQ ID NO: 6360 - DNA, 594 bp, Glycine max
agcttgcttgtatagcctttttctttttacagtatagtttctatgattgtgttagcaactaaactatcaacccacatggaatattccccaacccaacagttcagtgttccctatgcacaaactcatcactctgtattggtgactcttcccacaagacatcaccaaagccaacctcattgctttatgcactttataccgaatacttcagatgcaacaaccctcctatttgctcactgcccaccttgttttcctatactagaaatttccaataacacatccagcacatgtgattcctatttgatgtatgaaatcaactttgtataagagaatccataacattttgtgactacctctaagttttacttaattgctttgcttatagtttttctcgatatccctctacctctagtggctacattatcccccatctgatctactcttctttttagggcttctaccagactttgccatacatgacccaaccacctaaagagaaattttaccatctttttgcaatatgaactacacagactttacccctaaatgcatccactcctaatctatcttgactagtatgtctataaacaatgatta

SEQ ID NO: 6361 - DNA, 646 bp, Glycine max
tgtaggttgaagaggtgagatctaaatatggttatggtgaatgtgttttgagagatttataacttaatacaattatagagagtaagcttgaatatgagagctttacaacttaagataattacaaagagtaagaagtgccctaagtgcaattctaacctgagagaaattgcggtaagcgtgaaaagttgtgcttaatgccaaaagtggactccatcttaacgagacacgctcgtcaagcgagatctgcagattataaatatgtttttcagcctgaaaaatacaatttcacgcctctctctctcaaaactctgtccaaccaccctagaaactcctcctccaccacccacgaccaccggtggccaccacgagctgccattgtttgccgctgaaccaccacactgagaggaacattttaatcggagcggaatcctcataatccacctcaaggattcggtggagaaaaatccctcaatcctttcttttgtagcttctttgaggtaatcttgacttctaagtctttctcttaattagttggagtttctcttagtgtctcttgtgtggttggatattgaaatacgatggttttacacttcctttgaaaacccttgaaaatgagacattgtaaaaagtaatcttttataaaatt

SEQ ID NO: 6362 - DNA, 440 bp, Glycine max
agctttaagactattcacataagttaacaagaagcaataaaggatcaactgtgaaaatgaattgcattcccatacctagatcttctccacaattccttcgaatttatatatgcttagatgcatgcaagaaaggattcaaggctaactgcaaaccttttattggtcttgatggttgtttcgtaaaagggtactatggcggtcatttgcttgcaacagtgggacaagatgcaaacaatgccttttttgtgattgcatatgcggcagtaaatattgaagataaagataactggaagtggttcctcactttgttacctgaagacataggagactacaagcaatatggctggaatttcatgtcagacatccaaaaggtgccattaaatataaaaagttgatttcatgcctgcatgggataattttgttgtcatgctagcaatatg

SEQ ID NO: 6363 - DNA, 624 bp, Glycine max
tagaacaatatacttggccttcatttaactgtctttgggcttggcggccacgatcaacaaagtactttcgacacctactatatgttgatttgaccaacgctgttatcggaatgttgcgacaatccttctaaaccttatttttacattctgagaggttcattgtcatgtggccataccgacgtccttctctatcataagccatcgtccatttctcctttgaaatgcgatcaatccatgttgctatggctggacttagttgacggaatttttctaaattttgataaaaaatgtgtttgcaaggagtgtagcctgcatgaaattagttagcaacaacaattttaactataaatcaaacttaaattaatgtgaccatgataaatgaaatgttacccaatttcttcaacatttctttttgtttggcattattgaatttgcgattgaagttgcttgctatgtgtcgcacgcagtaaacatgataaccatggggaggttgtcaaccaagtgtttcgttggccacaacagactttatactcgcgtgacgatcagatatgagacaaataccatgtttatttgtgatgtgttcacgccagtgtgccaaaaaccatgaccacgcagtttacgtct

SEQ ID NO: 6364 - DNA, 553 bp, Glycine max
  unsure at all n locations
agctttaaggataagtcttcctgttgctccctctatctctaacactttaatgttgcaaattgtatggaaacatcgagcgcaatacagttcccaccccaaaccctgaaccaataccttatcaatcacaatattatctttagtcccattattcacaattatcccatgcaacctatgacactttagctttatcccaacaaaaaaaatatttgaaccaaaaaaatgttttacctaacttctttttgcatcattttccacctatttttttgagtcccatcttggggatcatactcacacgtacttcagtacccctacagtggagccttcctcatcaatccgaccaaacgagcttcagttcacagcaaatccaggcttacctaacgaagaacacggtccctttagtgaggatgaagacaaatttattcacaattaacctangagggagatgacgaggaagaagcctggtctgtttcaccaatcacaaccatattgccatgctacataccaccccatatccaaaaatttgaaaaattctattttcaagattttgaacatg

SEQ ID NO: 6365 - DNA, 709 bp, Glycine max
  unsure at all n locations
ttgagccaaaatcctgactcaccataaaccttgacccagggtgagaatgtcaatccttaccctcggaagcaaaaaaggaatagaagggaaatttccaatcaaagaaaaagagaaggaaaatttccaatgaaagcaaaaaaagaaaggaagggaaatttccaatcaaagaaaaaaagaaggaaaattccccaatcaaagagtgggagaaagcaaaaagaaaagaaaggaaattcccaatcaaagaatgggagaaagtaaaaaaggaagaagaagaaggaaagaaagccctgatcggggatcgaaggaaaaaacagaagaaatatgcagagaggtctttggaccggacaatatctgaacaatacagaattgtcaccaaatgaacaaaaaagaaggaaaggaaaccacgacctaaaatggtcttctccctttaattaccaaccaaaatcccgtgcgctagcgaccctttttttttctcgccccgcactagacaaaaaaaaacggaaaaaagaaaaaaagccagaaaaatcaaaagccaaaaacacacaaaagccgaaaaacccaccaaaagaacccattcccaagggaagccctattgatccatgatcacgcatgtaatntttgatttgataggaagtaatttgcanagtcaagtcatgacatatctatggntcngaattangatgaaacacttacctgtgcgagattgata

SEQ ID NO: 6366 - DNA, 409 bp, Glycine max
agcttgccttgccccttgatatatttgagggactcatggtcactatgaatgacaaattccttgggataaaggtagtgatggcatgttttcaaagcccgtactaacgcatacaactccttatcataaattgaatagttaaaggtaggaccacttaacttttcactaaaataagcaattggatggccttcttgcatcaacacagccccaatcccaacattagaagcatcacactcaatttcaaaagatttttgaaagtttggcaacgcaagtatgggggcattagttagcttttgcttaaaaacattgaaagcttcttcttgtttctctccccatttgaaaccaacatttttcttgagcacttcattgagaggtgctgcccatgtgctaaaatccctctattaaaacttgc

SEQ ID NO: 6367 - DNA, 685 bp, Glycine max
  unsure at all n locations
tctacttatgtggcagggcgggcttccttcactttcttgtctcccacgcgagctttgaccactgctcttccttcccgcgatgcttcttttcatgtccgcctgagtgggcttatagcctaaaccatacttcccacgatttccttgggcatttatcaggctagttatgccgccgttgtctttgcctaaacccattccgggttcataaccgttccccaacataactcgggccatcattactgctgcatcggacagacaaggctgcccagagaaggagtccacggaggaaatgctgaccacctcaaaagactggaaagtggtttctaacgattcttttgcggcttccacataaggcatagaggatgggcagcttaccaagatgtcttcctcgactgacacgatgaccaagtgcccctccactacgaatttcaacttttggtgaagtgtagagggcacaactcccattgagtggatccacgggcgccccaacagacagctgtaaggggggttcatatccattatttggaaggtgactngacaggtgtgagggtctanttgtactgggagatcgatctctcacctaacctctncgcgagtgctgtcgaatgcacgaaccaccatctgactaagctttaagtgggaagcattgaatggtaatttctccaagtgctcttcggcatcacgttta

SEQ ID NO: 6368 - DNA, 441 bp, Glycine max
agcttcttgaagcgtaagaaacaaattcacttttatgggatgttttccaaacatataattttaaaggaaaaaatatgtttactccgtttgcaaaattcttgattttagatgctggctctatattttaccattgaacattttgatcccgaacaaaataagtattattagtccattgagacaatactgtacaaattagattaaccgcatgtttgtttttcagtttcaaaccgatgtttggagtaaaatgaattttacaaaagcatttaaatccttccttttacaaaactaattttgcggaacattacatttattttgaaaattgggcactacatttttaactaaaaatcaaacatgcactctaaagactttcttatgagaaatggtacactttgagcaacagtgcttcatatttctatgataattataaactacaatttttac

SEQ ID NO: 6369 - DNA, 584 bp, Glycine max
  unsure at all n locations
ttttgagagattaaatttaccttatagagagtattttgtgaatttgactgcataacaaattaaaagtaaaacaataaatattttaatgatatgagacacttaaagaattaaaattaatcaaaatatttaacaagaataaaagtgtattttattaatgttaggagtaattttacaaaaatgcgttaatttttttatcttaataaattagttaattgggtcttaaaaattcagcaagagtaaaaataataataattnatacttcttccttctctttttctatttataagacatttcttaaaaagactatttgtacttttatataatacttttttcaaaaaaaattattaattattttttaacccanatatatttattcattttctcctgaacgccatanagtaactaaatacattcttttttcttctctcgtaaaaaccacacaacatgactgaaacatattaattccttacgcaaaaattaagatttgctctgcattatatatttgagtgtagattttagtgaacatatccaattttgggacgaacacatcatacgtcaagaattataaaaaaaataatgtattt

SEQ ID NO: 6370 - DNA, 514 bp, Glycine max
agcttgagcttggttcaaccccgtaatccaaggaatggcaattctgatcgccaatacttcaacaacatctcatagggatgaatgactcgggcatactttaagcttatgcatggaaaatgtaattatgaaattgagatgcccgaagaaacaccatttcctagttaaccatgcattaggtaccatgttcaattattttgtttttaagtgaaatgggtttatgatcccaacatggttggctcatggtgcctaacacatgaaactaagaatgtagtgtgaagtttcacgcttcccctttttttgtttttgttttgtagaggaaaacgcaaggatgagcaaacatgaaaacaaatggtatgcaattttgcagatcaaaaagtttgttgaacgcatatgcatgataatgccatgactcatgcaaaatgtgaggctggaatatgataacggacaaatgcacgatatgtccattatgatgttatgaaaagatgcttatgcgatgcatgatatgaatgcattt

SEQ ID NO: 6371 - DNA, 586 bp, Glycine max
tccacaatatccaagcaattcaattccaaatatcatgaaactaccctaagccaagaaaacagagtagaggcagaaaactctgcccaaaacacattcaaataccacagctttccttattgatataccccagtaacattctcttcgttccgatttgttaaccgttggatctccttgaaagtttttgtggagattcctagtacataaataaacattttgaccgttgggatctgctagaaaatgtctggaacccgatatgtactactcttccaatgactagcaatgcacaagcattattccgcacatttggtcaagttggttgcacaatttgacagcattttgctgcacaatttggcagatttcgaaatccaacttgcccacatccagtgttgctcaaattggatcctacaagtcctaaatcatgtatgaatcatatttgaaccaaaaacaagcttcagatcaaggtaaatcaaaatctatgtatccaaaacccatcaatttagtggattttaaagtttgaaaagtgaaaatgagacttgcgtaattttagggtaaactctcatctcaatcaagtctataacatttgatt

SEQ ID NO: 6372 - DNA, 552 bp, Glycine max
agcttccattttcaattgcgagcatctcgatatattacgggactcaatcgtacattcgagtaaaaagttattgttgtttgaatatgctcacatcttcagtattcaatttcgagcgtctcaatatattaagggacttaatcggacatccgagttaaaagttattgtcgtttgcatttgctacgagcttccgttttcaattacgagcgtctcgatatattacgggactcaatgcaacctccgacttcaaagttattgtcatttgaatttgctacgggctttcgttttaaatttctagtgtcttgatatattacgggacttaatcgaacattctagttaaaagttattgtcgtcagcatttgctcagagctttcgtttcaaagacgagtgtttcgatatgttacgggactcatccgaattaaaaagtattggcgtttgaatttgctacgagcttttgtattcaacttaaagcgtcttgattatgttacgggactcaatcgaacatccgagtaaaaggtatattgggttggatttgctacaagcttccattttcaa

SEQ ID NO: 6373 - DNA, 559 bp, Glycine max
tcattgcctaacaagccaacttacaacagcaagccccaagagactcagcataaggatgcacagaccaaagttgcgtatgtaaaaaaattgtatgaccaagtgaaggtgcaaattgcaaagaagaatgaaagctatgccaagcaagcccaaaagaaaaggaaggaagtggtacttgaacccggtgatgatcttggacatttgaggacaaatgttttccaagaaggagggaatgatgagaatcatgaaacaggccaaatacagtctaaaggcccaagtggagaaggacgaaggcccaagtggagaaggacaaagcccccgagtggagaaggatgaaggcccaagtggagaaggatgaaggcccagaggcagagacactatcaagactattaattgatgctgaaggccaagattaatttgaaggcccataataaatatgttctatttagttataatttttatttattgtaattctggcccatactggttagaaggcccatgtctatatttatctctttgtttagctacactataagtatgggtttttgttatgaataaaaaa

SEQ ID NO: 6374 - DNA, 481 bp, Glycine max
agcttgttaactgttagatcattgtcaaatttgaacaccaggtttggaacttatttttgcacattcccacagttgggatttgtgaaataatattttctgtaagagaaatgtccctcacacgtaactttcttttctcgcatatattcaaatttgtcccattagaactatgatcgcagactctttaactgttcaatcatcgtgaaatttgaacaccaggtttggaacttatttcctcatattctcatcgttggaatttgtgaaataatatctaggagagataaatgtccctagcacaaagacattgaaatagaggcttcaatcccttctccttctctctaacgcttggaaaccttagcagagcaaccagagaaaaagcatgaggaatcttatgaattgctagagactctccatattgtgagaatcatttttgtataatttggttgtggtcttggacaagatttactagattatcgcgataaat

SEQ ID NO: 6375 - DNA, 640 bp, Glycine max
  unsure at all n locations
ttaattcaagatcaagaaactaagatcaagagtcagataaagacttagtttatttgttaaaagaatctcacattggttaataaggtttggcctcaaaagcttgattttaaaatgattatataaagctttaaaagatgttttaccagcacaaaaataagtttttttgcactggtaatcgattaccaagtattgtaatcggttaccagagacaaattacataaaaatatttctagaaggattttgaaatttgaatttcaaatgttgtaatcgattaccacttgtctgtaattgattatcagtgacaaaacttcataagttaactttgaaaagtcatgaccttcaaaacataactgtgtaatcgattatcaagacattgtaatcgattaccagtgagagaatttttgtaaaatattctgaaaagtcacatctcttcaaaagtttttgaaaagccaccaaggacatataaatatgtgacttgtctatgaaaatatntagagttttctgatgcaatcctacccccacaagggcattagatagaagactccaagtagatcgggctagagatgcaagagaagccctatggttctcatgagccttanggtagaattcaagcccatgggctaagtatgactccacttta

SEQ ID NO: 6376 - DNA, 443 bp, Glycine max
agcttgtggctgaattattacggactaactaataaagtttataatttataaggctttggatttgctattaatgttggaggtcttatatatgcttcagccaccttctctctttcctcgctcaaactattgtaaaccaaaaactccaccttctttcccaacttcatgatcatgtggcagtttatattataacaatgttttagtaacataatgatactatttttagaataatcacacaggaaactaagctaaattttgtcccagagtgatttgtttctcggggatttgaaaatcactatcattttatgtgtgtgtctgtgctgctatacgttattcatctgctactattgggttggatctgttgaataaaaaaaaatatatctggtaaaagtttgaaatctctgttggaacagaagtattttcaaagaaaaatacctattgaaaaa

SEQ ID NO: 6377 - DNA, 649 bp, Glycine max
tgaagtgtccagttgtgatttttgttttccagttataattataaatttgactttattttctaactatctaaattcttattttatattatcagatagtctttttggggatagacaacatccatgcgatgagagagagctttgttcggctccgagaatacatggacactcatggaagaacgtcatcagatggaatgtcctcttttttggttagtccgtgaatgttaaaacaaaatgtaattatcatttttcaggtagtgtaaatttatttggttcctatatagacctgcacaatatttatgttttagtccttacaccttaaaattaaaaactacttgttttagtcccaatacatacactttttaagtcgcttaatccctatagcttctgcgtgacagggattaaaacgggttaaaaaatgtatgtgtagggactacaacgagtagcttctaggtgtaggaactaaaacatacatatggtgcataggtataaggacccaatgagtaattaaatcatttatttttaatagtatatatttgatatttgaagagtgatactactattagctgtataatgacacttgtagattagatatttaatctttcttcatgatgcttaatatatatcttaatattatttaatacttttttct

SEQ ID NO: 6378 - DNA, 362 bp, Glycine max
agctttgatgcaacatttggagaggttaatgaaacaacgagatgatgcgctccatgagaggttggatcaaatggagaatagagatcataatgaagaagaaaggaggagaagagggaatgatagtgttcctaaacaaaaccgaattgatggtattaaactcaacattcctccatttaaaggaaagaatgatccggaagcctacgttgagtgggagatgaaaatagagcatgttttctcatgcaacaactatgaggaggaccagaaggtgaagcttgccgccacggagttttccgactatgctcttgtgtggtggaacaagcttccaaaggagagagccagaaatgaagagccaatggttgata

SEQ ID NO: 6379 - DNA, 583 bp, Glycine max
tatgaccattcgaatttctcaagagtttccgttgttcaatttcgagcgtgtagatgagttatgtccccgaatcggacatctgtgtgaaaagttatgaccattcgattttctcgagagcttccgttgttcaatttcgagcgtctcgatatattatgaccccgaatcggacatctgtgtgaaaacgtatgaccattcgattttctcgagagcttccgttgttcaatttcgagcgtctagatgagttatgtccccgaatcggacattcgagtgaaaacttatgaccattcgaatttctcgagagcttccgttgttcaatttcgagcgtctcgatatattatgtccccgaatcgggcatccgagtgaaaagttatgaccatgcgattttctcgagagcttccgctgttcaatttcgagcgtctcgatatattatgtccccgaatcggacattcgtgtgaaaacttatgaccattcggatttctcgagagctcttcttgttcaatatcgagcgtgtagatgagttatgtcctcgaatcggacatctgtgtgaaaagttatgaccttctattttatcgagagcttccgc

SEQ ID NO: 6380 - DNA, 407 bp, Glycine max
agcttttcaaatgggtaaaaggctcacattcactttcttctacattatattcaaacttgtccaaataaataataaagtcatctcgactcaaagaaagtcatataagtctcatacaattaatatagaacctatatcctaatgtcacatcctatcagagcgtggtgttcccgtgtcctctagcatgaggttcttcatagtcatccacctattcatctgctcccccgaacacaagttcaagatcatcacaggatccaaacacaacaacacacagggagtgagttatcacattcctagctaatagagaaacaagacaattaaatatacatattatataaatgagataccacttgcttaaacataactcacgtaacttcaccacttcgtcattcaaaattcactttttaatt

SEQ ID NO: 6381 - DNA, 605 bp, Glycine max
  unsure at all n locations
tggccatattcctaattctcctctcctttaactaaacatcttgttaatatttgggttattgtatatttcttaatactcataaaattctggctcaagtttcaattctcactttcacggaggtaagatcctaaattccaaatcaatttatggattatttgattttaattgaatcattgtgcttatacaaacacccactcatattatgggttaataatttgattcatttttacgggtgttgtaagtagattatggatgcaaggaaggtgttctatgaaatgcctgaaagaactattgtttcttagaactcggttatgactgcttgtgttgagagtctttcattgngtgatgggattgagtatttttttaggatgtggggttgtgcgtttgagcctaatgagacttccatggttgtgttgttgctctctacttgtgttcttcaagctccatccatttctatttcttttttattaattactaataatactatatatgctattgtaattgtattaataatgagtcattaataatactatatantgtatggctactatatatggctattactngtagttgaattcaatgacttattttctgatctccgatgc

SEQ ID NO: 6382 - DNA, 429 bp, Glycine max
agcttattaatttgaactcgtggttgtacataagttcaatgaatttaattttaaaagctacagtgcttatttttccacccacatactacagatactgcagaatttctgccttaaataagctgcagtgcttgtacataacttcaattaatttgaatctgctctgcaaatgctgcagaatttctgccttaaccaaattaggattttccacccagataccatcaatcagcatcccccacaagtgaagaacaaatgggatgcaaactcaggcttgttgtggcagaaagggcataagtcactgtcagtttgaatttgcctcttcgctaggttatccttagtaggaagtctatcccataacaacctccaagcaaaggacaaggctatcggggggaatttaatatcccagagttgctggaatgccaagtactgaac

SEQ ID NO: 6383 - DNA, 335 bp, Glycine max
tattggcactaattggctatgaatgtaaataaggcttctgacactactgactaacctatcctgtcactacattctgcgtggacctaatcttcatacgactacactatgtcacatcaatactgaacttgaaaattcactgaatcttttggactgactcacttagtgttttgctaatacatcataattctattccaaaagtgaaatatttaacaaaggctaacaattatatacttacgtaattattatgcaatataatatacgtaatggctaacaattatatctaagatagtactatagaaacgtcactctattgaacgaagtgtctactgtgtact

SEQ ID NO: 6384 - DNA, 479 bp, Glycine max
agctttcataggtgaaatcaggtgcagccatttcccttagagtcctctcacgaggtggaggttgtgtcatgttctcagactgtgcaaaatcagaatgctcagaatcagaatgctcaaaattataatgctcaagatcaggatgttcaaaatgaccaataacagaatgcacaaattcaccagttatggaatgctcagaatgatcaaaaggtataaaatgatgcctaactaatctatgaaatgtcctatctatctcaggatcaaagggtttgaaatcagatggaatgcctctagtcatacactacattcagcatgcacacaactagttgccttgtcatgtaaataaaggtgtaggtttgagctacagctaccctcaaatgatatccaaatgacttgaaattttgtgagccaccttataaaatgatgagaagatagcccaaaaaatttcagacaaaaatcaaagtctaactatgaaagctaaa

SEQ ID NO: 6385 - DNA, 695 bp, Glycine max
  unsure at all n locations
tgggaactccaatgtagctcgcaaagatgttagtaacaaaaagcagacaaaaaagtcccttatatggatgaatttcccgttctgttgatgtaagacctgatggaaattgttattacagggaaattgcaactttaatatgttagaggtgaggaatcatggctctacttcaacaagacttgatttaagatcttcaaacatggaattctcaatatgttgagttttttggcacataagatggtcttgttaaattattagactctttgtatgtccagcatagcccaatagcatccgttgacaagtggatgaccattcctgacatgggttatgtcattgtaattgaatttgtaaacaggaatcactttgtgttggtatacaacatattcttaagagattttttagtattgtaaccattaattgatttgtttgctaacactatatgtttttctttaataacctatatgtatttgaaggatgattgttccctttgtaacaccctgaaatattactaattataaatcgatgtttaattgtatttatcatggttattgactatatggctgactctaatgagttgacgtatgtctcgaattantcatgtgtgaatttcttgatgtggatgttgagttatgtggacgtttgttgagctaagttgaaattatgagaattcaaaaattacctaaacctatttgagtaaa

SEQ ID NO: 6386 - DNA, 548 bp, Glycine max
agcttttcaaatgggtaaaaggctcacattcactttcttctacattatattcaaacttgtccaaataaataataaagtcatctcgactcaaagaaagtcatataagtctcatacaattaatatagaacctatatcctaatgtcacatcctatcagagcgtggtgttcccgtgtcctctagcatgaggttcttcatagtcatccacctattcatctgctcccccgaacacaagttcaagatcatcacaggatccaaacacaacaacacacagggagtgagttatcacattcctagctaatagagaaacaagacaattaaatatacatattatataaatgagataccacttgcttaaacatagctcacgtaacttcaccacttcgtcattcaaaattcactttttaattatcaatcacattacacaagaatcccacacttcgatcaagatataataacacatcaattagcaagcatatgcaatagttatgctaagactccaatttatatgccatgtggaaccatgtcagtgaaaaaccaccctggggcgc

SEQ ID NO: 6387 - DNA, 675 bp, Glycine max
tggccatattcctaattctcctctcctttaactaaacatcttgttaatatttgggttattgtatatttcttaatactcataaaattctggctcaagtttcaattctcactttcacggaggtaagatcctaaattccaaatcaatttatggattatttgattttaattgaatcattgtgcttatacaaacacccactcatattatgggttaataatttgattcatttttacgggtgttgtaagtggattatggatgcaaggaaggtgttctatgaaatgcctgaaagaactattgtttcttagaactcggttatgactgcttgtgttgagagtctttcattgggtgatgggattgagtatttttttaggatgtggggttgtgggtttgagcctaatgagacttccatggttgtgttgttgctctctacttgtgttcttcaagctccatccatttctatttcttttttattatttactaataatactatatatgctattgtaattgtatttaataatgagtcattaataatactatatatgttattgctatattatattgctattacttgtagttgaattcaatgacttatttctgatctccgatgcttatcataatggtagagatacaatgtatttgtcctataaacctttggttatattactctatggattttaa

SEQ ID NO: 6388 - DNA, 529 bp, Glycine max
agcttataataacatggccatcattcacaaactttgtatacatgcatctattagcatcactactagaaaaaccatcaacaagtaaagtctcattaaacttttcatgccattgtttaggaacttgttttaaaccatatagggatttcaaaagtttgcacattttgttctcttgaccatccaccacacaccccttaggttgagtcatatatatctcttccgctaaatcaccattcaagaaagttgtcttaacacccatctgatgaatcactaacttatggattgtagctaaggctatcaaaatcctaatggaggaaatccttgtaataggtgcaaaggtataaaaaaaatctatgttaggtttctaagtaaaccctttagcaatcaaccttgctatgtatttatctataaaatcatcacgattatacttcctcttaaagatccatttacatccaataagatttgcaccctcaaatagatatactaaattccatgtattattctttttaataaaatcaatttcaatcctaat

SEQ ID NO: 6389 - DNA, 722 bp, Glycine max
  unsure at all n locations
tgataagaaagaagaaagtattatgcaataacaagataaattaggtgtggctagtaaagaaaataaactatgaaagtaagcaagaaattaaagtgaaagaaatgtaaactaggcggatcctaagagtgtttggatgacctcatttaaggtttccaacaaaatactcactatcctaaagaaaaattgcctaaaagtattacacacaaatggaagtagggtgacctattggaggctcccaacttacttccaatgaaaggcctttttgttataaaatttgaaagcaatgaaggtaagtaaattctcaattaaaaaaattacaaaaaggttctcaatttttggtgattgttctctctttggtgattcactcaatttggagtgcttcttagtccaatagctcttaaggttgttttccccttgcttcttgactcaaattcttcaagggatgacaccaatcctcctttccaattccctatatggcaactcacaaacaaggaaacaaagagacaagcaataaccaaagacccaaaaaatgaaatgaaagctaaaccaatagagttttaacaagacaaattttcaggaatttttcaacaattaaagcacataaaagaaagctaggactcanagagaaacttagaatgactctagagtagagtanaanaaacccaaattaaaaagactcangaaacctcctagttttggaacttgtttttcacactaatttt

SEQ ID NO: 6390 - DNA, 467 bp, Glycine max
agcttttaatatgtgcttacgagtgaactggtctatacttatgttattcactcaacagttgtgtcttgattcaccaattgtcattaacaagttccctttaggttgaacatcttgacttcatttgacttttacaaatcttttataaaggcttgctatatatgccggttattctctgatataccactggaaaatgtaaagggttttcctcatataattgtttcatctaaatttctcacgaagaagattgggaagtggttgctcaactgggtggtctttctttaggcgtattgattctggtaaaatacataaaattttctggatggctttattacttgttaccaaaacacctttttgttggaactatacattcttttaactttttattgcaggatacaccctggccttgtaaaaacattatgggtaatttcaataacttggttgagtatgccactactgcattcttttgc

SEQ ID NO: 6391 - DNA, 675 bp, Glycine max
ttgaaaagtaatgtagaagctattgacaaatattggtacagttgataaatattagactcataatcttacaagagtggagttgataaatattagactcataatcttacaagagtgtgagtttgaatcattgttaatataaaaatcttattgctagacaatctgttaatatgtccataagcattcaataagctttgaagcatgttgtgaaccttaaaatccaactcactctcactccattgggaaaaaaataagcttccactgaaattagcatagttgacttaaaggcaatttaatattttgattttgcaaaaagtcaccgacaatattcatttttagtaatgtgtttttaatattttctttttgacatattttttatttttagtttcagctttaattaaaattcattgaaagctataaaagtataagattcattaaataagtgaaaaacactgaatttttaattttcaataaattttaataaataaaatagagttcaattcattgagttgataaaacaaattctagtgaggttgccactatactacatcatcaaagttatgtatcgatttatgtgcggggaccatacattcttgcatataaaatctcgaaaggagttttgtgtccccactcaagtaaaaccgcatactacatttaattgagatgtgaaaaaaataa

SEQ ID NO: 6392 - DNA, 397 bp, Glycine max
agcttctagtctcaattttgagcgtctcgatatattacccgattcaatcggacatccgagtaaaaagttattgtcgtttgaatttcctacgagcttctgttttcaatttggagcgtctcgatatattacaggactcagccggacatccttgtataaagttattgtcaattcaattttcttagagcttcggatcaaaaatttgagcgtctcgatatattacgggactcattcagacatccgagtaaaaagttattgtcggttgaatttgatacgagctttcgtttttaatttggagcatctctcgataaaatacgacactctgtcgggcatccgagtaaaagttattggcgtgtgaattttctaagagtttccgttttcaatttgggagcgtctgata

SEQ ID NO: 6393 - DNA, 584 bp, Glycine max
  unsure at all n locations
ttgaataaattgaaacgacaaaaactttatacacggatgtctggttgagtcccgtaatatatcgagacgctccaaactgtaaacggaagttcgtaggaaattcaaacaacaatatctttttactcggatgtctgattgaatcgggtaatctatcttgacgctcaaaattgagactagaagctctgagcaaattgaaacgatattaactttatacacggatgtccggttgaatcctgtaatatatcgagacgctccaaattgaaaatggaagctcttataaaattcaaacgacaataactttatactcggatgtccggcagagtctcgtaatatatcgagatgctccaaattgaagacggatgctcgtatcaaattcaaacgacgataactttntactcggatgtccgattgagtcccgtgatatatcgagacactcacaatttagatccaaagctctgagcaaatttaaacgacaataactttctacacggatgttcagttgagtcccgtgatatatcgagacgcttgaaattgaaaaagaagctcgtaccaaatccaacgacaataagttttactccgatgtc

SEQ ID NO: 6394 - DNA, 363 bp, Glycine max
agcttgtacgcgatgccatatggctattacttgcaaatgcctattctgaagccaagactactgcatggttgaatgaattgtgcatgcctcgggtaactgcaataacttcttcgctgcttgacgattgttttgtggaggcatccaatgctctaatgtcacaaccaattactaaaggagcctatatatatgtatgtacaaaaaaaatgtacttattatgcaaaatatatttttcctcaagcaattctttatatggaaatgtctaagcaacatgagttaaattattagctacaagttaccttatctaatgcccatatgctgaaatgagcgcgatattcttcttgttgaatgcctccattttcaact

SEQ ID NO: 6395 - DNA, 298 bp, Glycine max
tagggactatgattctccaccattacaggggctggaccctactgttggagattgcagccaccccaggattgatactctgtgctaaatgattgctgactgagaagccttaagatgctaacaacccggtgccctgctgcagagtgagcttcgattgtcttcatacatgcatagacattgataatataccagtactattatggcaagcgccttgctctgagtcctaaaccctactcagtgacacagctccgtacctactgcatctcctatctactgcttactgaatagactggtgctgttt

SEQ ID NO: 6396 - DNA, 414 bp, Glycine max
agcttgaaagtgtgtaaccaaccattttctcattgtagaacaccggtaacgtgtatactatcattgtgatcatctttttctctgtcattgaaggtgccacttgagctgtcaagtccctccacctctgggcgtattccttgaatgactcatgctcttttttacacatgttttgtagttgcgttctatccggagccgtatcataattgtactgatattgcctaacgaaggcaaccattaagtccttccaagaatagactcgggaaagttccaagttagtgtcataccctaatttcgtccggggattattacttgacgacatgcaacctttgattggccgtttcaagatacttggccccctttgttgcacaatatgtaagtcttgagacccaccggagtcaaaaagaaccagggtta

SEQ ID NO: 6397 - DNA, 710 bp, Glycine max
  unsure at all n locations
tttcgattcattctatgtacccgtagtggtccacattgtgtttcgtgcatttttattctcgttttgtttactttttatacccccctcttgacgtgcttaagccattttacttaagtcatttctcgcttaacttaaaaataaaataaatttccaccgaatgtttgaattgtattatccattaacttcggttaaaatcaattccgaccgttcggtcatgccgtaaccacgttggaaatcaaaaagaggtaaaaaataatataataatcaaaaaaatatctttttagtgaaataaagcggaaaatcaatcggacgttttctctttgggatttctcattcttaatcgaattaattaataactaaagtgaaactaaggctaaaatcaactttgctagtcaagctcgtccacaaaaataggcttttgaagtttgtcatttcaattcctcactaagaaaaatggatcatttttaaggtccaacgccttagaatgaccaccacttaagtaaaaaagaatcacttgataagaaagaactacgtaggtatgattttctcatcccanattgaggaatacgtaggagcaaagggaaacacccttgtcgaccacaaaaaagaaaaaattaaaagggtataaggattcatgaacatanaaggacataaaaataaagtcatgtttcacattcgataaaagctgccgtcctttggacgggcgtgtg

SEQ ID NO: 6398 - DNA, 524 bp, Glycine max
agcttatgcagcaaatatatacaatagacctcctcaacctcagcagcaaaatcaaccacagcagagcaattatgacctttccagcaacagatacaaccctggatggaggaatcaccctaacctcagatggtccagccctcagcaacaacaacagcagcctgctccttccttccaaaatgctgctggcccaagcaaaccatacattcctccaccaatccaacaacagcaacaaccccagaaacagccaatagttgaggcccctccacaaccttccctcgaagaacttgtgaggcaaatgactatgcagaacatgcagtttcagcaagagaccagagcctccattcagagcttaaccaatcagatgggacaattggctacccaattgaatcaacaacagtcccagaattctgacaagctgccttctcaagctgtccaaaatcccaaaaatgttagtgccatttcattgaggtcgggaaagcaatgtcaaagacctcaacccgtaacactgtcctcatctgcaaatg

SEQ ID NO: 6399 - DNA, 599 bp, Glycine max
  unsure at all n locations
tgtctcagtgtctatgcgagacagaaaccaacatgttagccatcatcgccaagtaccaagaagagttgggtctagccacggcccacgagcatagaatcgcggatgagtatgcccaagtatatgcggaaaaagaggctagaggaagggtgatcgactctttacaccaagaggcaaccatgtggatggatcggtttgctcttaccttgaacgggagtcaagaacttccccgattgttagccaaggccaaggcgatggcagacacctactccgcccccgaagagattcatgggcttctcggctattgtcagcatatgatagacttaatggcccacataattagaaatcgttaggaaacttgtatggtctctcagaccttgactagatatgatttctttttttgaaataaaatgagttggtcccatgtttctactccaaaaagcttgtgcaaatcaaatcactcctacgtctcatctctagcatgcattttctttctttacccactcctcacgtttggttntttagggaaaacaccataactaaacgcgccgcaagggatccctatcgcaccagatccaaatctagaacgatgggtgatcaag

SEQ ID NO: 6400 - DNA, 467 bp, Glycine max
agcttttcaaactattttgatgtctgaggttgtattcttgaatcagtaatgtccacactattctcttttttgtatttttaataacatgatggtgataaaatgttgaggatatatgctttcttttgttttagtttttcttgttggaatatatttttttatgctttagttcaaaatttatatttttaaaatataattagaaaaaaatatatataaatttttaagttgattattataaaaatatttttttatttatatgaccatttatatttttaaaatataattggagaaaaaataaaaaaaatgaaacataataaactgaaagtatttaattcaaacaaagaattcaaaatttaagaaatttaaattggtttatccaaccaacaaatttaaaaaatctaagcattttaattcaacaacccgcggaaagggttgtttttcggtgaattgacagtgacttgtaaaatata

SEQ ID NO: 6401 - DNA, 661 bp, Glycine max
  unsure at all n locations
tgggtggaaactacaggtaatcagatatgacaatatgtgacaaatttaataagttctatgaagatgcggacatagaacaatagttgacagcaccttattctccttaacaaaatggcaccgtagaaaggaagaataggactattatggagatggctaggtgtttgcttcatgaaaaagaattgccaaagagattttgggcggaagccgcaaatattgcagttttcatgcttaacagactgccaacaaaagctttgcaaaagaagacaccatttgaagcatggtatggctataaacctgagttgctcaatctgaagatatttggttgtttgtgctttttcttacattcctcgggttaagaaggacaaactatacaagaaagcagaagctgtaacctttgtaggctatagcttaatttcaaaggcctacatgatctatttgccacatcatgacaaagtaattgttagcaagaatatgagattcttggagctggatagttggaactgggaagatgacaagaagattgaatntcagaaggagaatgagaacatagacaaagaacctgccagaggaacaagatcactttttgatatctatcanaggtgtaatgtttctctcatggaacctgcacgatatgaggaggctacaccaataaaaaatggat

SEQ ID NO: 6402 - DNA, 338 bp, Glycine max
agctttcagaaaatgtcaatgtcgagcatatactatttttcttccatgtttcagttgtatgtagcttgtatcttcttcacagatagggcatgcatgatggtccttaacactgtatccactcaaattcttgtatgccgaaaagccattaatgggaaaaaatagcattgcatgcaacttggatgcctcattttgatacccatcaaacatgacaatccctttgtcccataactttgtcaagtctttaatcaagggactaagataaacatcaatgtcttttcctaagtgtcttgggcccaatattatcataaacaatatcatgtattttcgcttcatgcaca

SEQ ID NO: 6403 - DNA, 566 bp, Glycine max
  unsure at all n locations
ttagcttgagggggtgtgttgagaatcaaaataggatcaatttcatattttgtctttattatcataattatacgaacaatatctcctataattaattgtaatttatctatataaaggagcatccacagtggacacatggattcagtcacttatccctctatattttttctcattttactacctttattgaaaatctaccaaacctagatggagtcttttgtcatgtatattggccttagatatcaattttatttcttgactaaatcaaatgtgattcatgaacatagttattgattgtgtgctgtaccagcacgatagccccaccacggcctccagctgtgcaacaaatttcagtttgtggagcactttaaaatcatgtgtgtcacattgcaatctgcagcccaaattgctgccattcgcacactgctattacacctggagggtaaagccccattttgccccattctctgacttttcatcgtctccaagacatatntgcatttctggccattcccagcatttaccagtatttctggtcaaccgagtctcttactacttcaatcatg

SEQ ID NO: 6404 - DNA, 512 bp, Glycine max
agcttgttcgcacatcgttcgcgtgtatgatatccactcgacaaggtttgaagtagaggagacctttaatcctataatgcaacgtggcggacaaaagtgggcagttaacttgaatggccattattgtcaatgcggaaggtattctgcgtttcactatccatgttcacacattattgcagcttgtggttacgtgagcatgaactactaccaatatatagatgttgtttacaccaatgagcacatcttaaaagcatacttcgcatagtggtggcctcttgggaatgaagcggcaattcctccttctgatgaggcatggacactaatccctgacccaactacaacttgtgcgaaaggtcggccaaaatcaacaaggataaggaatgagatggattgggttcaaccatctgaccaccgacaaaaatgtaataaatgtgggagcaaaagcacaatttgcgcccatgtcaaatgcaatctgaccgtgggaagtaatcattttaattgatttatgtatg

SEQ ID NO: 6405 - DNA, 592 bp, Glycine max
tgctacattgatgcatcttggctacggaatcttcgatttgggcacttaaattttggaggcttaagtttgctatcaaaggagaagatggtaagaggactaccctatattaatcaccctgatcaactctgttaaggatgtttacttggcaagaaatttagaatgatttttccaaaggagtcaaactcaagagctaagaagccacccgagctaatacatgttaacgtctgtgggccaatcaagccccaagctcactacgtaaaaataaatatttcctctttttcattgattatttttcaagagaaacatgggtctatttcttatagcaaaaatcataagtcttttccaccttcaagaagttcaaagctgcagtagataaagaaaattggtgagagatcaaagccataaggactgatcgaggaggagaattcacttgcaaaaagttcaagagtttgtgaagagaatgaattagacgtcccctgacagtctaagacccccaatagatagtgtggcagaagataaaatagacgatccttgatatggcttgaacatgctcaaaagcagaactgccaaagaatttaggcaaagctttgca

SEQ ID NO: 6406 - DNA, 367 bp, Glycine max
agcttgaaggcaaactggatgcattggttaacttggtaacccagctggccttgaatcagaaatctgtacctgtcgcaagggtttgtggtttgtgctcctctgctgaccaccatacagacctttgcccttccatgcagcaacctggagcaattgagcagcctgaagcttatgctgcaaatatttacaatagacctcctcaacctcagcagcaaaatcaaccacagcagagcaattatgacctctccagcaacagatacaaccctggatggaggaatcaccctaacctcagatggtccagccctcagcaacaacaacagcagcctgctttttccttccaaaatgttgctggcccaaacagaccatacat

SEQ ID NO: 6407 - DNA, 661 bp, Glycine max
  unsure at all n locations
tctatagttatggaataatcgattatcaaatgtggtaattgattagttcgatacacgaagaactcctaaagtttcctaacacaatataaatgattactaaatgtggtaatcaattatctggaaccacaacgacttccttctgttggaactagcttatgtaatcggttactaaaaatggtaatcaattaatttgatgattcttatcaaatttcaagagaagtgagttttgttgcttgttctaacactttgtaattaattaccaaacttggtaatcaattacactatgttgaattcattgcttctaagaaactttgagattaatacatttatcttatcatgttggattcctactaaacctatatgataaaactaagtctaaaacacttgtcatgcctagtctaaaaacatttgatagaaatgtcacatcttaaaaaacttgtttggcgttgtaaacttattaaaaccaaaagatcctaagactaatcttcaagtcttcaatcactttgattcaacacgcaagaccacttgaataagaaaatgtgggtgtccttctaaattaaaagggaaggcttgtgagaaccatanggtggagacttactgtagaatgtgggttatataaccatacagcgatgtgaacattgcttggtcattcatatgttag

SEQ ID NO: 6408 - DNA, 479 bp, Glycine max
agcttcatttgaacagtcagctctttaaggaaaaaaaaaaatcctcttttctagcttatgtataaataaaatactaattggacaacgactaacgtattttgttgaactagattttgaagggtatgatgcacgagaaaagaaatagtttgtttgtgtatgttttgagcgtggacatatgtaaacttggtaatgtaaaaaaaaagtgtcaaattgagtttatattgaaattaaaaaaaatccctagaaaagtaatataataaaagaaagataacataaaaaataataaaaacattatcttacaaagctttattgttattaaaattagaaaactttctcataacatattttatcgtatcatccgctacttaggtcgaattctcaaaaaaatatgattctaagtaaatgttcttgcattactgtgaactgagtaaatctatctgaagagtacatgacatggatgcaccctacaacttagatca

SEQ ID NO: 6409 - DNA, 611 bp, Glycine max
  unsure at all n locations
ttccagcattaattgtgataatatcaagggtgtacttgagatttctgaaccatttcttgtccatttcattcttaactcactttctcctcaatatggtccttttaaatttttttacaatatacataaagacaaatggtctattaacgaattactaaccatgcgtattcaagagaaagagagattgaagcatggggcacctgaaagtgctcatatggtgactcataataaaggaaatgggagaagagacaatggtgttcttggagtccacaagactgtccaaatgaagcggaatgaaacaaagattgattgctttttctgtaaataggtgggacataagaaaaatgattgtctcaaatacaagaaatgactcgaaaagaaaggtaattttacctttacttgttttcactactacaaaaaagactttntgcatcggttatttgacacttttcatgacggttttcaaccgtcttcgaaatcgtcatcatgagaattcaacactttacatgatgatttttaaaccatcttataaactcgatcttagaaactcgattttatatcggtttacataaaaatcgtcttagaatgtctttttttgttttttttataaaaat

SEQ ID NO: 6410 - DNA, 443 bp, Glycine max
agcttgaaggtgtgtaacccaccattttccatagtagaacactggtaacgtgtctactatcattgtcatcattttttcgtcattgaagtgccacttgagctgccaggttctccacctttgggcgtattctttgaaagatccgtgcccccttttttgcacatgttttgtagttgcgtcctatctgaagccattataccaacactgcctaacgaaggcaaccattaggtcctcccaggaatggactcgggaaggttccaagttagtgtaccaagtaacaactaccccagtaagactttcttggaaggaatgtatcaacaattcctcatcttttacgtatgcccccatcttccgacaatacatctttagatggttcttggggcaagtagtccccttgtacttgtcaaagtccaacaccttgaacttgggaggggtgatgatattgg

SEQ ID NO: 6411 - DNA, 654 bp, Glycine max
tttgtgtgggatacccagtgtgagtatagtttccaaacccttaaggaaaagttgacgaccactcccatgctagttttgcctaacctgagagaagcctttgaggtgtattgtgatgcatcaaagatgggtttaggaggagtgttgatgcaaaatggccaagtagtgacctatgcttctagacaacttaagactcatgagatgaattatcctaccaatgatctagaattggctgctgttggatttcccctgtggttactttttgttccacttttttcttcatacaaatatattcaagggaaatctggtttgtcgaaaagtgcaccagatcgtcaagtatttaaaaattaaaacggatgaattcgagtatcgaactcagggaaactagtctaagatcgggttaaattcagaaataatgcattgttgaaagaaacattgataattgatggtttaaaatagaattaaactgggtctaggataaaaacagtaaaaatgcaagtaagtaaaattgacagcagtaggtagaagtgttgggtctttcaaacagacaagctgatgcatatagggatgtttctctaatcgatcatgcttttatgttctatgatgtagcataaattactaaacctcgatccctaattgactgaatcaatccagctt

SEQ ID NO: 6412 - DNA, 503 bp, Glycine max
agcttatggtagattagagtgaagttcatcctgatcccgagaggtataggagacttgtaagaaagctcatttatttcaccattacaagacctgatatctcttttgttgttggagtagttagtcaattcatgcagaattctcatgttgatcattggaatgttgtcatgcatattcttagatatattaaaagagctcctgtacaaggattgttgtatgaagacaagggtaatacacaactatcaggatattgtgatgcagattgagctggttgtcctatggataggagatctacatcaggttattgtgtcttcattggagggaatattatttcttggaagagcaagaagcaagttgttgttgcttggtccagtgcagaagttgaatatcgatccatggcaatggttaaatgtgagctcatgtggattaaacacattctccaagaattgaaattctgtgaaagtgtgcaaatgaagttattctgtgataatcaagctgctctttac

SEQ ID NO: 6413 - DNA, 688 bp, Glycine max
  unsure at all n locations
tatcaaaatgcaccttaagtgcatgtttggaaaagattaatttcatgaaatattcacttcttttttgaaagttctcttggaaagctaacaaaaaaaaaaagtgattatctctagaaaataagttgaatcaaacatgaactaaatcttttaagagcctaaaagtgattattggctgcaaaaaagacttcaactaaccaaatccatacaaaacaagcactaaccaaagttctctcatgtacaacattgacaaaaatgtgttctacttctaatgcgccctttccaatttccaaattcagtttctaaacctttgaagagctcgagtgattactgaccgtaaaaatcatattctcagggccaaaatgcagtgagttatggcgctttattacttgcaacaaaaaaatgcgcaatacctgttatcaaaagggagataatgctttgaaaacttttaaatagatatcattctcttcaaattaaccaataaatgtgccacaactaaaatgaacaattacccaatcaaatccagatgaagactgactcattcaaatgcattgtataagtttacttgcatgacangagcattttcataagcaactaaatttaaattttacctatataaagctggtaggtttgctcggtctaataagctatgaaaattatccatttaatgcacattaatccataggaatca

SEQ ID NO: 6414 - DNA, 469 bp, Glycine max
agcttgtgtgcagtaatataaaatgtgtccacacacagtcacttgttgctatccagtgtattgttagccttttttttcacattttttttttgcttactcccttttactttctttttctcttttttgttttctattttatcttgtaaaacacaagatgctctagttttaatttaactaatttttaaactagtcaaaataacttataacctactgctcttaaaatgatttgcaaaatacactgtttcacttttgattaagaattacaaaattcacacacaaaaagatgacaatggaacaaattttatactatctctatattgtaattaaaattaatattataaagatttgatagttatattaagttgttcataaattatttttttttatcaatcattcaattcaattttgaataaaactataataatggtttaaatcttgaaaaaataatataaaatttttagaattaaaa

SEQ ID NO: 6415 - DNA, 696 bp, Glycine max
tcacagcaaatgatagaatgtctatagttttatcatttgacaatttattgttattatatgtcttatccttcatatatatagactcttttttttcatctttttcaactgtgaatttttacataattcataaattttatttgataccttgcatagcattgcatttagcaaatacaatttaacatgcttggtttataagtattgacacaaaaaaggcttatgaaaataccttgtattgcatgttgctagggcttattaaaaatatcaaataattttacatgtgtctgtgaaatcagacttattaatgatgcgataaattatgtaactatcatgtctctcgttgatgttgctaaaaaaattgtttaggaagtatatggattaaaagtgcattcttcaaaaagtttaaagatcgagaacataattaacccattaaattattatcaataaaataaccttaaatttaaaatacaaacataggtacatgtaatttatattatcaattattgataaaaaaaaatataataatgtttatgtgaacaaaatatttttttgaccaaaaaataaacgcatgtgttttatattcaaaatcattttacagtttaatatttaatgtgtataaaacagtataattgtagcaagctgaaaatagtttatgaacatatatataagtgttatcataagtctggcaaacatgtttac

SEQ ID NO: 6416 - DNA, 598 bp, Glycine max
taaacctgttatcgctgctcgcattaggaaattaataatgcgaacaccatgtggtcacccacgcctggaaggagggatcacccctgaccgataaggtccaaacctgcgcaataacaacagtagccagcattattctttgaaaaagaatgctgggcgataaaggccctaatatacggcataagaaaaaagaaatgcaagacatgccgtatattagaataagtgggggactacaataaataatttgttcgaagaggatggcatgtataaatcgcgttgtaaaaccatgatattcctactagaagaacaaaatcctgcgatcttgtagcataataaattaccagtggtgaatagggttgcccaataaatcgaaccacattggccaaactattgacaaagaagtgtgttaaaatccgttcatgaaatggcataaagataatagatactgtcctctagagacgcgcgaggagagaatgggagagtgatactcgggatagcctctcccatgtttgcgaagtatatggggcaacattgtcttttacttcttcaaggaggtcgggtccaaaggtagtctaaacgctctctcgggagagaggaaacg

SEQ ID NO: 6417 - DNA, 958 bp, Glycine max
  unsure at all n locations
cactcactgagcttatcggttctcccgctccccgcttgtatcatattntnagttataattgcctgnannantccncctcnccncctcccggccccggcnattgatgacctcgtaggtacgngccacgatctataaaatactgctgcatgcctgcagggtgactctatatgaggcgcgggtactgattttaatatccctaggagcgtcgtaggtaactcactggccagtgatatcaccctctgaactgggaaaacatttgcataccccaccaaggtcgtctggcggaacagccaccgtgcccagttggtagaaagaggaataggcccacgcgcgacaggcgtatcgcacatatggagactcagaatgggggatggggcctaacacagtatggtgcccttgcacacctgagcagtgtttaacacactgggaggggaactgctagtagaagctgtttagatgcacacagtgggacataatgacgaaggattgccacaacaacccgtgacgcagaacgactgagagagcgagagtggccattnactngnntaaaacacatacgatagaagacgtcccggcttggaataactgcagagggtgcttgaagggttatgaacagccgacagagactggcatatgatatacgcgtccattttcaattgttgattattcacagcatcttcacatcatggaacaaagagagcggggatctttcatatggatacggaaagcaatggaggaaccatgggggggactagatactggttaaataggagtatgagtacccaaacagcttattggccctatgttgggcctgttttatatgaggaaacgtcgaaccattggaaatacaacctacgtcgaactatttgcctacaacgttgggtgagagaacgaaacacttctgtctctaattattcagatgcaacggtagcggtttcctcacgcaaccctcgaaaag

SEQ ID NO: 6418 - DNA, 404 bp, Glycine max
agcttgcttctacagtatgggaaaaaaataaggagaataaaatgatgcttcttccattcttacattagtaaaaaatggacaatcatcagccaaaatgatacttgatctccttcccaaaacaataattttttatgcaacatagaaggcacacattggctagaatgaatccaatcccttcatagcaaaattaaatagtttggtttagcatccactataaaaaaatgttgaatacatggattttggcccaatcgtgattgtggctaccaaaactcccaatgttgtagtagctcctacaatgaaattggttatcttgatattcatggggatcaaatcatcctaccttttaccaatttgcctcagcgtggttagaggcatgatgttataaataataccaccatcaaaaa

SEQ ID NO: 6419 - DNA, 651 bp, Glycine max
  unsure at all n locations
tgctatttcttttggcacatttagtagtcttgttagtatgttttccctttatgcattctacacaagtactaaaattagtaaagttaacattcctaagaatttcttcctttactagtctcttaattcttcaagagaaatgtgccctaaatgcttatgtcgaaacgtagacaaattttcatccataatacttcgcttagtaccaatggtggtatgtaaggctacgagacttgtttcaaaaataggatctattgaaagcttaaataaatttaactaaaaaaccacaaccaacaactttattgtctttaatcaatttaaaagaaacatcgtagaaaagaaaagagaaactagtatatgtaagcctagaaacagaaaccaagtttctataaaaggacaaaacataaaaaagtgttttctaataacatacaaaaaccagaattcatgagaagtttaaaagttccaatagcctccatgtatgaactcatatgatttccaccatagatgctttgttcacttcccattggatttcgcaagtttagaaattcttgtacattattagcaatgtgaatggtagaacttgaatcaatccatcaagtattggtaggaaactcagtanaatcttattcaagcaaggcaaaatacctttcttttcaa

SEQ ID NO: 6420 - DNA, 455 bp, Glycine max
agcttgtagggttcaccccaaatgccgtagtcatatgctaaacttgatcccatatctacttgataattcaatggtagccataaccctagccaaggttcatcaacctccatttctccgagaatacgacttcaacgcaacgtgtgcttgtcacagaaaagccccggggcgcttcattgagcattgtagggctctgaagcgtaaggtgcaaggtctaattgatacgggctggctgaaatttgaagagaatcgcttgatgaatcctaacattaacaagcgacaccatacatggggcaattctggaagctgttgttatgactcatcaagatctttaagtttatgccataaaccacagttacaatgttaaatgatatagataaaaaggacattctttcacgaacacatcttttggttattcaacttccaacggcatgtgagtgtaaacccttggcctgttt

SEQ ID NO: 6421 - DNA, 604 bp, Glycine max
  unsure at all n locations
tctcccctattttgctatcaatggggggagaagtgaatatgataagggttcaaccccttaggcacttctctctctctctcgaatttgctgaggaaaattatttccgtgaagaaaattcaagccgaggcgcttgcgtaacgtttccgtgagtaattacgcgaagagtctcgaccgttcttcaaaattcatcgatcgttcttcattttcttcaatcttcaacgggtgagtacttcaaaccaagcttttacattcattctatgtacccgtggtggtgcaaattttgcttcatgtgtgtatattcttgttttcattcactttttatacccccttttgacgtgcttaagccatttgtttaagtcatttctcgcttaatctaaaaataaaatatactttcaccgatcgtttgaattgtgtcattcgatacttttggttaatatgaattccgaccgttcggacgtgccgtaaccacgttggaaatanaaacagaggcaaaataataatataatcataaaaaatgtcttttactggagtataagcgcataaaatcatcagacgttntctctgtgggatttctgattcttaattgaatcgactaataactaaa

SEQ ID NO: 6422 - DNA, 605 bp, Glycine max
agcttcctttacaataaagataagagaaagatgaaggattgaagaaacacaagtggtagggatgtctcctctgcctctaagacctcacaataactcacaaactcatctcaagctctcaggacgacttcctcttcaagctctggtctctgcagatcttcacacaacaaaatctctcaaactctctggaacttggacctttctctctctagaaaaccctcacatacagaagctccttgagaaaaatagccaaactcccttccaaaaatatgatttcaagcttaaataggtggttttgtttgtgctcatgcgcttagcgcaattatgaaccgcttagtacgcattagtaaatttcggcttagcgcgagattttctcaacgaatggactgaagcggtgcgcttagtgggatggcccttcgctcagcgaacatgcacaactcatccttcttccaaattcttcctcgcgcttaaccgaagagtgttgtgctcaacgattggcttgctaaacccatagaatggcttaatgagaagatgaaaattatcactttccaaactcaccttaattaacctgaaattgagagaaaatgattattaaacatacaaaatgg

SEQ ID NO: 6423 - DNA, 591 bp, Glycine max
tgagatgaggaagtgttgaagggtagaacttcctgcttttattgttgaccacagagtggtacctggagatatgtcgcgggggtcaggagaccttggggacgtcaggtggggtgctattgcccaaaaccaagcttgaccaatcccgacccaacccgggcatagtcggtcagtgagaacctgtgatgtacctaagcaggcgagctcctggcagtcaacagataaaaggaacaaagaccacaaagcaaggaggcttgtggtggctggccagctgtgaactttgattgatatgtgggttatggcctctggtaatcaattaccaagggtgggtaatcgattacaaggcttaaaaatgaagacaggaggcttatatggtctctggtaatccattacctagggatgtaatcgattaccaggcttgaaaacgaggtcaggaagctaagggagcttctggtaatcgattaccaaggggtgtaatcgattaccaggcttaaaaagggaacagggagatggtggaagcctctcgtaatcaattaccagcctgtgtaatcgattacacagaggaatgggtcactggtaatcgattaccaggca

SEQ ID NO: 6424 - DNA, 640 bp, Glycine max
agcttaacaattaccttattaaaaatcatgatttatttaaaatgacataaaaaataataaaattatcatctagttaagaaaaataacaagaaaaatgaataaatatattaagaataaaagtgaaagaaaatataaaaaattaaaaattattatttaaaaaaactgttatttaatgttttaaaaaacaatagaagttacttaaaaaaacatatgtttaccgaactgttaaacaaatttttcaaatatttaaaaaactaaaaattaattaaaatgtgttattaaacataacctaataacactcattaataagacactaaatttaggcttttttttacgttaatggggtaattttttttcaaaattaccaaaattaataccttttgagttatttatgaaaagaattaaattgtcattaaaaacacgattttcaatacaaagatatggtgcgtgcaaacaaaaattttctttttcaaaaacaatgaacaattctggtttggtttaaaataatgggattaagtgaaatcggacgtccttgaggattcaacttaatttttaatataaactaaggccgtttaacagggaatttggttttttttttaaaacaacgaattatagggggttttttgttagctaaaattta

SEQ ID NO: 6425 - DNA, 518 bp, Glycine max
tggaccgttggacgtgcattgcatgaaaataattagtataaaaaactaactgatcgctataaacatagtttggaaaaacaaaaaggaagcatcattacggcatgtgcaatgcattatattaaaaataggacaaaaatatatttttgattactatattttcatcaaatcttatttttattctttaaacttttatattctctaatttgatccctaattctttttttaaacaatgtttttagctatttttcacagattttcattaacaatgttaacttgagttgtgtccagcgtgataaatattgtgcttttttaaatttttttataaatatgtaaaaaataaattatcattttttaaataaaattatcatttttttttcaaatatattaaaacctaacttttaacgacttcatctctattttgatttttaccttcattattattatttcttatttgttcattgaaccgaggtttcgaataaggatgagaacccgcctttgcaatcatgcacatgaaaaaa

SEQ ID NO: 6426 - DNA, 282 bp, Glycine max
agcttgactttggtttagacatgattgatacatgatttgggacttgtaggatttgatttgggcaagattggatgaggggaaatgtggttttcgaaatctgctctttgtgcaaatttttgctgtgaaattgtgcaccagaattttgcacaagtgcagaaaaatgctatgcatttgctggttgtggaaagagcagtgcagaatgagttctggatgtttgctagtagatcccaacggtcaaaatgtaggcttatgtactagacacttccagtaaaattttggaat

SEQ ID NO: 6427 - DNA, 578 bp, Glycine max
  unsure at all n locations
tgagatgaggaagcgtaaaagggtgaaacttcctgcttttattcgttgaccacagagtggtacctggagatatgtcgcgggggtcgggagaccttggggacgtcaggtggggtgctattgcccaaaaccaagcttgaccaatcccgacccaacccgggcatagtcattcagtgagaacttgtgatgtacctaaacaggcgagctcttggcagtcaacagataaaaggaacaaagaccacaaagcaaggaggcttgtgtggtggctggccagctgcgaactttgattgatatgtgagatatggcctctggtaatcgattaccaagggtgggtaatcgattacaaggcttaaaaatgaagacagaaggctaagatggtctctggtaatcgattaccaaggggtgtaatcgattaccaggcttgaaaacgaggtcaggaagctaggagagcttctagtaatcgattaccaaggggtgtaatcgattaccaggcttcaaaaagggaactgtagactatggaggcctctggtaatcaattaccantctgtgtaatcgattacacagaggaatgggcactggta

SEQ ID NO: 6428 - DNA, 445 bp, Glycine max
agcttcttttggaccttgaacaagcaatcaactcctctttcagaaccatgctatgtgctcgcgactggtccctttcttcccttcgcaacttgagttcattattgctaccccatagagctccgcgaaatttgttccggccatagtcttccttgcgagccctcttggtctcttgttcaagggctcttgcggtaattgcattctcttcccgtaacccggcacactccttccgaacgtgtgtagcagccaacttggacttctccttggcgagttttgcctttcctaactcgcttttgagagcttggacttcctcgtcctcttccggtgcttcaaaattctcttcgctgacgacttttaacttggcgagccaatctaaacctcgtatgcgaactttcaaccattcgtggtacccaccaatgatgcccttacgaacccctctaagctcttg

SEQ ID NO: 6429 - DNA, 562 bp, Glycine max
  unsure at all n locations
tggagaggatgcttcaatggaggaaaagaaagagggagagaaagagagaggggggagcacgaaattgaaggaagaaaaagggagagaagtttaagtttgagttgtgtctcacaagactctcattcatcaaagttacaataagtgttacacatgcttctatttatagactaggtagctagcttccttgagaagctttcttcagaaaacttccttgagaagcttctttgagaaaacttccttgagaagctaaagcttagctacacacacctatctaaaaactaagctcacctccttgagaagcttccttgagaagctagagcttagctacacacacccatctaaaaactaagctcacctncttgacaaaattcatcgaaataccaaaaaaaagtccctactacaaagactactcaaaatgccctgaaatacaaggctaaaaccctatactactagaatggtcanatacaacgcccaaaagaaggaaaacctattctaatattacaaagagagtggaccaaccttgatcatgggctcaaaaattgccctaaggtcatgagaccct

SEQ ID NO: 6430 - DNA, 224 bp, Glycine max
agcttgttcgcacatcgttcgcgggtatgatatccactctacaaggtttgaaatacaagagaccttcaatcctataaagcaacggggcggacaaaaaagggcacataacttgaatggcaataattgtcaatgcggaaagtattctgcgctttactatccctgttcacacattatttcaacttgtgggtacgcgagcctgaaccactatatataaatggtggtta

SEQ ID NO: 6431 - DNA, 717 bp, Glycine max
tcatggtgaatcaaaggtgattcaaaggtgttttgatgataacaatgatgataacaaaagatgacgacaaaggtgatgacaaaaagctcaaagatcaatcaagaacaattcaagagttcaagataagaatcaagaagaattcaagactcaagaagaaagtctagagacaagaatcaagattcaaggttcaaagatctcaagaatcaagatcaagaatcaagaatgaagagaagactcaatcaagataagtattaaaaagtttttcaaaactttgaatagcacatgagtttttgacaaaaccttttaccaaagagtttttactctctcgtaatcgattaccatattgttataatcgattaccagaagcaaaatgagtttgagaaagttttgaactgaatttcaacgttcaatttattttcaaaaggcttaatcgattacaatgttttggaatcgataccagtgccttgacgttgaatctattcaaggtgaaagcacacctttacttaaagcttgtgaatcgatacactaattgggaatcgataccaggactgttctgataatcaaagatgtactctcaaaaaggttttgacttttcaattggtttaagttttctaaaattatactctctaatggcctcttgccagactgagagcttataagcaggcttgattgctttcagaattactttccatcatcctttcagcctgaattttttga

SEQ ID NO: 6432 - DNA, 470 bp, Glycine max
agcttgacgaaatctagatggcgatgcctcagcaacagcttgtacttgtttctcgggcacagcaaagcatacagaatgctcactactagcctacataaatactgaaaatgattaatgccatttcttatatatcagcgtggacaactagaaaaattgaaaaaagttataaatgcacctgagatatcatgataacattagctccaacatcttttactgcaccaaaaatagcactggccgtacctggaacaccagacattccagttctgcaaaaaagcatcaaagaaaaatttattggaatctacaacttggacaattaatattggttaaagaaaaccttaaattaaatagaaatccctcggcaggaaaaaatgccaactattcatcatgtaacacaacttgcatttatgactcaccccttgacgtttacaaatgccaaagttgcctatggatgcaaaatctttgacaaaatt

SEQ ID NO: 6433 - DNA, 604 bp, Glycine max
tgtaatgtcagaaaaggctaacacagaaaatatgaagcgcggatgattactagaagcatttcacactatattagagaataatgccacaatttaacttcttgtcatcttttcttttgattttccctttaacaatttctatgagcagatgatttttatgtgaaattgcgaatagctaatactctaaagttagtcttcattaatatgagatcatgatccttgaaatccatggtcctattatggtcttcacatacttcaatgttgtcctgattcatgagtaaaggaaaaaaaaaattgaaatattcatttaagtgagtgtacatgtatattaagagctgtaaaaaaggataaggtcaatactagaatttattttctggctcagtcagctgtgaaagattcaagagtgaaatagaaacttagaagataatcgagattactacggcgtaacataatttggtactccttttcattatactatgatatagctatgtatttctatagcgagatcatatactaactgaatctgagctgacataacataggaattgacagatttcagatatctaatatagcactagaaaagtctttactctaacattgtcccctc

SEQ ID NO: 6434 - DNA, 540 bp, Glycine max
agcttgaagtgaaaaatgttaactggagcaacctaatttttacatcaaagcctaatcagcatcaacactactattttaatctttttctcataaaggattcaatcctactgatgttgtggtgcagcagagtaatgcaaggtctatttgatgccagtaagtaatccttttatttccaaattcagagcaattccaacaaaaggttccatgaccaaccctaattattaaagaactcagttcactgatatgtatgaataaatgatgcaagaaagcatgcaaactatagaacaacaaagaaattgtttcttctgcagattctagataatgccaaagcctaaagaaacaagctaaagtattatggttcacttgaaatattaaggtggaagaaatgtaacaagtaatatttgtttttgatgcatcagaacaaatgcaacaagtaatatgatgctattatacatcacggatatagcttaaaataaaaagccaaaaggagggaaaggaaaactcctttattggacttagcccataaaaaaaaaaagtaaa

SEQ ID NO: 6435 - DNA, 676 bp, Glycine max
  unsure at all n locations
tgtaatttccttctttttcgatattttgaggtgacaaaaagatttgtatcaatggtgggtacataaaattcagaagaaaaatattattgtttaagtgtggttatgtagtggctaagtggagacatgatctgaataatccttctactagttcataagtggattgtctctggagtaaaatagggacaacggaatgcacaaagatgggggttggtggctagaaaccataatggaaataggagaggctttaggtttccaatgaccccttcaaagcagtttttgaagaccaatggcgtagatgaagtcccttatcagttggacattcatatttctaaagatgcagttgaataatactagtattctattgtaaaaataaataaaaaaatgcactaaatggcagaagatatgctatcaatttcggcgctaaccatgattcttatcataaggaaattgttgacggtggaaactaaaactcgagctagtgtgggaaaatctttgatattgtttttgaaaatttgaaatcatatataagtcaggatgcattgaaataatgttcattntccattatcattntcaatcaaattaagttctaacgaacacatattcatgcctcaccggcggtaactacctactcccatatatatatatatatatatatatatatatatatatattatga

SEQ ID NO: 6436 - DNA, 463 bp, Glycine max
agcttcttattaaataatttaaaaaaaaaaaaaaaaaaacgtggttgcactatagccagcatatgttgcacaatcacatagttgatctcacttcaagtctatagttcagctttcatagacctgaattggcgattaaagctgctcaaaatcatacaataaagaaccaaaacttagagggccagacacaaaaaattcataaactagctttgtacaattttgatatcatagaaaaagaagagataaaagtctagttttgattataggatatgatatgttccaacctagcattaatctaaatatcagtaagcatgcatttttcccaagctagaggttgagatcgagtcggcttcaattgcatctgaattacgcgagtaaataggcattttggtccttgacttttgaccctttttgcaaattattccctatctttttggaaaggtaaaaataatccctatctttccat

SEQ ID NO: 6437 - DNA, 776 bp, Glycine max
  unsure at all n locations
tcctcggggccatttcctgcgaaggcaaacatttggaaagttagttttaccagtgggacactactcttaaaacaaaaatggcatacaacctcctcccataaatacaaacatcaatgtaaatttagagcaagcttatgcgcatatttccttacgaacgttcacttgcgcaagacattctattaactaagaaaaatgcacccatatacaatcaaggcagcttcgttacctagattatttacatgcacttccaaggtgtatttgttacttacatcacacacatctccttggctgaatttacatacatgcatactcaaagcattttggggtaccaaaaattgcacatgtgctcatcttggtatttctaatacctatacatacacaaactctatgatgaatcttgactacctacacaataaggtgctacatttcatgcccttttcaagtttttgctacctaaagccgcatgcaaattcaagtatattntcctttgctgactaaaatggtattcaaattaaaaggtatatatttttttttaatgtattttctttacataacatgcaacatatttatatatnatttttgtgagacantttgactaccaaaaattatatgtacatacatccaagtattttctatcatacccaaagtgaaaatgccaaggtattttgctacctattctaaacctacacattcatgacgagcaaaattctaaacatctaggcgagggaaaatatatagtgtggcccatactgatggtggcaaaaaaaaaaaaaaaa

SEQ ID NO: 6438 - DNA, 412 bp, Glycine max
agcttgtgcaaatcaaatcactcccacatcttatctctagcatgcattctttctttctttacccactcctcacgtttggttttttagggaaaaacaccataactaaacgcgccacaaggcatccctatcgcaccagatccaaatctagaacgatgggtgatcaagaggagacacaagaacagatgaaagccgacatgtcggctttgaaagaacagatgacttccatgatggaggccatgttaggaatgaggcagctcatggagaaaaatgtggccaccgctgccgctgtcagttcggctgccgaagcagacccaactctcttggcaactgcgcaccatcctccctcaaacatagtaggacggggaagggacacactggggcacgatggcaaccctcacctgggatacaacca

SEQ ID NO: 6439 - DNA, 673 bp, Glycine max
  unsure at all n locations
tattcaagtcatggttgtcaaaatcatgatctgtcttataaaatcatttgattttaacatcaagcaccccttgacaatctgaatcttgagttgaatcgctggagagtaggatcacagagggattgcttttgtccatgtttaatcatgggatcatttatcctggtgaggcagaagacggacaaaatcacaaggttggggtcatatgatccagtttgggcaaaacccctttttctccttcaaacaatttcctttccatatgtgactatgtgacttctctaacctaatctccatcaattgttttttgaattgtgtgccattggacctctttcacaactgttgaagctttaccttgtgccactattgctactgcgggttgtgggtagttntggcactgtcaattgcacctcctttacctaacatctttctttgtgggtctctcttactcagtcactctcatctcattctctggattatctttcttttcttttctatggctgtcctcacagtctatagaattccttttgagtcatagatgcttctctcacagagggtgaaccactgaatagaatattntaattagcttgtatgtaatgtcttatgactcgttaatatgttattagaattcttatgaatttttaatcagggcttaattgcttctctcatcatgacatat

SEQ ID NO: 6440 - DNA, 439 bp, Glycine max
agcttctaaactttgtacaagaatgaagctctgataccacttgttagacaagtggcctcagatatcttaagaagggggggttgaattaagatattccaaacttttcttctaattaaaaatctatcttactttttacttaagttatgaattcccttaatgacaatcttcttaaatattaattcaaatgaagcaacttgaattatgaatataaagcaataataaataaaggagattaagggaagagaaaatgcaaactcagttttatactggttcggccacacccttgtgcctacgttcagtccccaagcaacccgcttgagagttccactaacttgtaaattccttttacaagttctaaacacacaaagacaacccttcctttgggtttagagattctttacaacaagaaactcacagtctcttaatcccttagagaatg

SEQ ID NO: 6441 - DNA, 694 bp, Glycine max
  unsure at all n locations
tgtctcagcatttatgcgagacggagaccaacatgctagctatcatcgccaagtaccaagaagagttaggtctagccacggcccacgagcatagaatcgcggatgagtatgctcaagtatatgcggaaaaagaggctagaggaagggtgatcgactctttacaccaagaggcaaccatgtggatggaccggtttgctcttaccttgaacgggagtcaagaacttcccctcttgttagccaaggccaaggcgatggcagacacctactccacccccgatgagattcacgggcttctcggctattgtcagcatatgatagacttaatggcccacataattagaaatcgttaggaaacttgtatggtctctcagaccttgactggatacgacttcttttttttgaaataaaatgagttggtcccatgtttctactccaaaaagcttgtgcaaatcaaatcactcctacatttcatctctagcatgcattttctttctttacccactcctcacgtttggttntttagggaaaaacaccataactaaacgcgccgcaagggatccctatcgcaccagatccaaatctagaacgatgggtgatcaagaggagacgcangaacagatgaaagccacatgtcggctctgaaagaacaaatggcctccatgatggaggccatgttaagtatgaagcagctcat

SEQ ID NO: 6442 - DNA, 485 bp, Glycine max
agctttaaactctatttttaattctatttttctctctaaatgtatattacaatgcatatatttgtaaataattaatgagctcaaatatttaaaatgtattttttttacataaatcttataaaataagtgttagaaacacattttttaacattatccttaacacatttaatggattgaaattgtttaaaaattacaaaatcatttcatggagtcattaaataagatgaatcacacaatttttttataattttaagaaatttcaatcaagaggatgtgtatttaaaagaatgagtgaaaatatgttactaatatttctcatcttgtaatattttgagtctgattctttctaattggatagggaaatacacattatttttgtgggagccacaataatattttcttcgtcccgttataaataatgtttaaggtttttttaaaccgattaaaaaaacaagtattttaaagtgttttgtgtatttcaaatg

SEQ ID NO: 6443 - DNA, 544 bp, Glycine max
  unsure at all n locations
tgcatccatagctgcaaagaagaagaaattaataaactggcatgtttactaccaaaacaaatacgaaagaaatccttccaagaggccaactattcgggtagctntcttttcatgatatactatcaaattactttttctaattttagaagaggcccccttttagcattttctttttcacaagaatagccataattggggatatcagctaataaccttttatgtttcacgatttgatttattatctatagacaggtttcctgggtttcttggggaataaagttgatgctattgatcattatactgcaataattgataatttgagcaaacaagtaagtactgatcaaatcatacaatggatatgtcaatgtcacccttatccctttgtgtaatagnaactatttttttacaaattgtgtcatccagtcattctgccaactcttatcacttttataatattttgaagtaatcaaattatggtaatcggatatcattgttatattcagaggagataatgggctatgcttttatagttcagtgaggggac

SEQ ID NO: 6444 - DNA, 416 bp, Glycine max
agcttgcttatgtagagagatagagtgtggaaattaggagtgcgagtgacaatgttagcttgcatgacagggaaatagtgaaggtgaaactaattattgtaacccggtgagttgtgtgaaccttaactgtgaaagaacgactagcatcaagtactgatctttgcatgaatctttgattactgaatgtatgcatgatgtggaaatgatgaaggccatgttgaatttatttcagccacttagccaaacaactaccctatattaatgaatgattgaatcccttgcaccccttttgagcctaaatgttaatgaatgactcattgaaaggagctaaatgcaaatgctatctttgtacaccctatcttaagatataaaagatcattcttatggattaagacaaatttgttccaaatatgggg

SEQ ID NO: 6445 - DNA, 373 bp, Glycine max
tgaatgtgacaataatatagagacaacattagcccctatccttcgttgagggacattattaagaaaaaaatcgaacgtcttacattaacctcacatgtgctcaagtttctgagtatgctcaaattcagatattgataaaagaatatttacccataacctctgatgcggcggtgcattatcactgtctaatagctcccccattgtgatataacacgattactatactgacttataaattattgatgtggaggtggacggacgaaatatactgagcaaatattatgaggcgaatttaagaactgttcacgataacgaaccaatacaaattacgattaatttgtataactatggttgatgctgttctggatggcat

(The sequence listing continues in the following parts.)
